United States Patent Application Publication US 2007/0067865 A1 - sequence listing, part 12

SEQ ID NO: 67234 - DNA, 372 bp, Glycine max
tataaaagacattatgtggtattttcctaatcatactctgtgggttacatgtcgattatcatccatacttactcaataaaatgtcaaccattttctctgctatcacaaccccatccatcaccctcgcatgtttagtacaaaaacatcctctcgcgttctcatctcccgttctttttttgtcagcaatggtcaatgtgtgaagagtgactttctccatttatcaaaagccttcttctgtgaatgaaattatttcaagcatgttgtggatgatttgcatcttttatggcatatgtcaactcctcattcattttaatcccaattcatggcccttttggataatagacttatcacttaaagaaaccttctaccctt

SEQ ID NO: 67235 - DNA, 203 bp, Glycine max
aaacaaaaaaaaaacaataaaaaaaaaaaaaaaattcttcctctctaaatgatccaatcttacctactcgttcatgcaaccgcataactcttttataatgtaacctaaatttaattcactggccaacattttacaacttcgttaactttaaaaccctgtcattacccaacttaattatctttaacacatcccccttttttcaa

SEQ ID NO: 67236 - DNA, 256 bp, Glycine max
  unsure (1)..(256): unsure at all n locations
taacataactataatacatttcggtcctctctttctttttcaactctcacaacacattaacattncttttatctcacatgtccttcttttcaccactttcattcttctctccaccaccctgctttatattactttctccaatccttcatttcaaattcaccactctaacaaacccacctttcactctttcttgtattcataagaaaaaaaaatttacacaaagaaaaataaaattaataaagttaaattttcatat

SEQ ID NO: 67237 - DNA, 88 bp, Glycine max
taagtctatcaccgctctttacatccattcttacatacgcgtgcattcggcgtcatttggtcttttttaatgtcacctaaactcaatt

SEQ ID NO: 67238 - DNA, 259 bp, Glycine max
ctctttggcaaattttgtaaatttaaaaaaacataaaactcctcccctttaaaaaatccaaacttacttaccccttcattctactttattacttttttattattttacctaaattcaatttattttcctcctttttacaacctctttacttttaaaaccctttccttacccaacttaaatccctttcaacacattccctttttttcaactttctttatatctaaaaaatccttacctatctccctttccaacaattttt

SEQ ID NO: 67239 - DNA, 133 bp, Glycine max
tccattcatctcccatctttaaaccatattcaatctccccttctattcttctctctttttacttttaaaacttacctaacttaaacatcttattatctaaagtaatttaaatcaacctaaacccctttattat

SEQ ID NO: 67240 - DNA, 178 bp, Glycine max
tttctctcacctaaaaatatcttccttccttcataactctccattcttaatctccttcaaattctccaactcctttttaaacttcaacatatacccatactttacctacacttaatcaaccaccacccataccttttccattttaatttcaccttttaaatctcaattttattcttcc

SEQ ID NO: 67241 - DNA, 298 bp, Glycine max
taaaaccaaacttataaaccatttattctctcttagaacaaatggccctcaaaccactttccccacactctttattgtgtcattttttttttgctctttccccacaaagaggtctttgacccttcttctgtgtagtgcaatggccatggctaatgttttccttgttctgcttctgtcactcctttgcatttccatcatcacaactcaagttatgtcaacaaattcttcttatcacttggatggaaggaattattgaccttggattcttaaaaactcacaatgccctttttaatgcaca

SEQ ID NO: 67242 - DNA, 403 bp, Glycine max
ggcacaagtgagtttgttgatctaaattactagaagcagcgtgatgaaaatgaaggtccttgttttcttcgttgctacaattttggtagcatggcaatgtcatgcgtacaatatgttccttctacaaatgaacactggctatggtgcccgtactccggaggtgaaatgcgcaagttggaagcttgctttggaagcacacaacatctttggctttgagaccattcctgaagagtgcgttgaatcaacatatgaatacattcatggcgaacaatatagatcagactccaaaacagttaaccaacaagcttacttttatgccatagacctagaagtgcattccaaggacacatttgtgttcagtatagatagcaccgtactctctaatatccatacaaaaaaaaca

SEQ ID NO: 67243 - DNA, 129 bp, Glycine max
gccacccacaaatacctgttttgttattgagtgagaacgtgtgagtgaaagtaagcaccatggcttctttctcaaaacaaggactcaaccattactgtgaacagctcccgaaatgctctttgttaacca

SEQ ID NO: 67244 - DNA, 403 bp, Glycine max
gataccaaaaacaaaacacaagccaagtgaaagtgagaaaaaataaaaatcaaagagcataatgtcagggatcattcacaagattggggagacccttcatgtgggagggcacaagaaggaggaggagcataagggtgagcaccatgctggagaatacaaaggggagcaccatggtgaacacagtagtgagtacaaaggagagcatcatggtgaacacaaagctggagagtaccatggtgagcacaagccagagcacaaagaggggttcctagacaaagtcaaggacaagatccatggtgagggcggcgccgccgacggcgagaagaagaagaaggagaagaagacgaaggagcatggccatgagcatggccatgacagcagcagcagcagtgacagtgattaa

SEQ ID NO: 67245 - DNA, 386 bp, Glycine max
  unsure (1)..(386): unsure at all n locations
ggttctagtgtgtgattgtttgttgttgtaactcgttcttcttcttttgttgttctgtgtttgtgtttgttttttctctcacctgaaaatgtcttgctgcggtggtaaccgtggttgcggaagctcctgcaagtgcggtaactgctgcggaggctgcaagatgtacccagacttgagctacactgagtcaaccaccaccgagaccttggtcatgggagtggcacctgttaaggctcaatttgagggtgctgaaatgggtgtgcccgctgagaacgatggctgcaaatgtggaccaaactgctcctgcaacccctgcacttgcaagtgaggtgttgggagagcaagcttcaagcanagatagccctttattaggaataatgataaac

SEQ ID NO: 67246 - DNA, 413 bp, Glycine max
  unsure (1)..(413): unsure at all n locations
gacaagtgagtttgttgatcgagataactagaaagagcgtgatgaaaatgaaggtccttgttttcttcgttgctacaattttggtagcatggcaatgccatgcgtacgatatgttccctctccgaatgaacacttgctattgtggccgtactccggaagtgaaatgcgcaagttggaagcttgctgtggaagcacagaacatctttggctttgagaccattcctgaagagtgcgttgaagcaacaaaggaatacatccatggcgaacaatatagatcagactccaaaacagttaaccaacaagcttacttttatgccaaagacctctaagtccatcccaaggacacatttgtgttcagtatagatggcaccgnactctctaatattccatactacgaaaaacatggatatggg

SEQ ID NO: 67247 - DNA, 430 bp, Glycine max
ggcacaagtgagtttgttgatcgagataactagagacagtgtgatgaaaatgaaggtccttgttttcttcgttgctacaattttggtagcatggcaatgccatgcgtacgatatgttccctctccgaatgaacactggctatggtgcccgtactccggaggtgaaatgcgcaagttggaggcttgctgtggaagcacacaacatctttggctttgagaccattcctgaagagtgcgttgaagcaacaaaggaatacatccatggcgaacaatatagatcagactccaaaacagttaaccaacaagcttacttttatgccagagacctcgaagtccatcccaaggacacatttgtgttcagtatagatggcaccgtactctctaatattccatactacaaaaaacatggatatggggtggagaaatttaac

SEQ ID NO: 67248 - DNA, 358 bp, Glycine max
tgcggctgttagtcgacatcactaggggggtagagatatacgatgagaatccatgtgtttagttttctatcgatatgcatataagggaataatccaacatgcctttttgtgaatttaaaaactaccattgatcaatgcctcagaagggctgataataaatgaaaaaaatcaatgcattcatgataaaaccctaccacgcttttttattatgaatttttatgacaattgaggaatcacggcgttggcggatcaaattcgtaaactctttagatgatacatcagatgattagaaacatgactatagctttacaattaggccattgagcattaattgcaatcacatttatcttattgatta

SEQ ID NO: 67249 - DNA, 375 bp, Glycine max
gaaggtgcaagagtttgttgtgagctataagctagtttatcgtgaggagaatatgaagttgtttgttttctttgttgctgcagtagttttggtagcatggccatgccatggcgcaggctaccaaaggttccctctccgaatgaaaactggctatggtgagcgttcttcggaggtaaaatgcgcaagttttaggcttgctgtggaagcacgcaacatccgagcctttaaaaccattcctgaagagtgcgttgaaccaacaaaggactacattaatggcgaacaatttagatcagactctaaaacagttaaccaacaagctttcttttatgctagtgaacgcgaagtccatcacaacgacatatttatattccgcat

SEQ ID NO: 67250 - DNA, 124 bp, Glycine max
ccggaattccgagggtacgacccacgcgtacgcacacgtgcaaaagtaccaaagacgtgggaggggctatttgctctatcacacatagggggttttatggtggatgcctaaaaacacagcacca

SEQ ID NO: 67251 - DNA, 137 bp, Glycine max
ggctcaacttaattttttgatctacattactcgaggcagtgtgatgaagaataagaacctgcttttcttctttgctccaactttggtaccaggagaatgcccacccaacaaattattccacttcaaaataacaattg

SEQ ID NO: 67252 - DNA, 398 bp, Glycine max
ggcacacgtgagtttgttgatcgagataactagagaacagggtgatgaaaatgaaggtccttgttttcttcgttgctacaattttggtagcatggcaatgccatgcgtacgatatgttccctctccgaatgaacactggctatggtgcccgtactccggaagtgaaatgcgcaagttggaggcttgctgtggaagcacacaacatctttggctttgagaccattcctgaagagtgcgttgaagcaacaaaggaatacatccatggcgaacaatatagatcagactccaaaacagttaaccaacatgcttacttttatgccagagacctcgaagtccatcccaaggacacatttgtgttcagtatagatggcaccgtactctctaatattccatactac

SEQ ID NO: 67253 - DNA, 360 bp, Glycine max
agggatctggcagcagaagaacaagtggctgagaactaagaaggagaagcaaatggcttcctcaacgatctcttccccagctgttaccactgtcaaccgtgccggtgccggcatggttgctccattcactggcctcaagtccatggctggcttccccaccaggaagaccaacaatgacattacctccattgctagcaacggtggaagagtgcaatgcatgcaggtgtggccaccagttggcaagaagaagtttgagactctttcctacctgccagaccttgatgatacacaattggcaaaggaagtagaataccttcttaagaagggatggattccttgcttggaattcgagttggagca

SEQ ID NO: 67254 - DNA, 262 bp, Glycine max
caaccgaacatagactatcctcgagacctacaagagctagatacttaaaatgatgaagcaagtgctcccttacatcttctatcttcagaactgttatactgatcatcaacacgcttataaactacatctctcaaaacctcgcccacaaatcaatagttgtctttcccaccaacaagaacaccactatcatttcctcccttactcacaacgctggaagaatactattcatacacgtgttgtcaccacatgtcaagaataaatt

SEQ ID NO: 67255 - DNA, 267 bp, Glycine max
ggtcagaagccagaaattcgcgtaggtgagtgagcaagagagaaaagaaaaccggtgttgttgaagccaacattcaagagaatggaaggtgtgagccctgtgccctttagatcagaattggattccaaatccaaacaagacacgctgaaagaagaagatgacttctcattcaaagaaagcactcactcccatgtcactaatattcgcatcattagagcctttcttgaaagctgtgatcctttctctccggaagtttatcattttatg

SEQ ID NO: 67256 - DNA, 401 bp, Glycine max
  unsure (1)..(401): unsure at all n locations
ggcacaagtgagtttgttgatcgagataactagagacagggggatgaaaatgaaggtccttgttttcttcgttgctacaattttggtagcatggcaatgccatgcgtacgatatgttccctctccgaatgaacactggctatggtgcccgtactccggaggtgaaatgcgcaagttggaggcttgctgtggaagcacacaacatctttggctttgagaccatttctgaagagtgcgttgaagcaacaaaggaatacatccatggggaacaatatagatcagactccaaaacagttaaccaacaagcttacttttatgccagagacctcgaagtccatcccaaggacacattttgtgttagtatanatggcgccgtactctctaaaatttatactacaaaaa

SEQ ID NO: 67257 - DNA, 107 bp, Glycine max
ggcctagtcagcttgatgcttaacacatccatagagaggggggtgacaaagacggacccttggttcttcgaccctacaagtgttgtagcctaactatgaactaccta

SEQ ID NO: 67258 - DNA, 174 bp, Glycine max
  unsure (1)..(174): unsure at all n locations
gacttttaccataaacatcatacagcanaagatagaggctagagaaaaaagatatgggtctcggctttgacttttgcagggttattgccgttaccaatgacttatgccagacggaactggggtctggctcctatgcctgattcattattcctcaagccactggctctaagtcct

SEQ ID NO: 67259 - DNA, 173 bp, Glycine max
tccgagaggacttctgactgaaacacaacagagtttaacgatggagataactaacaacaccgtgatgaatatgaacgttcatgcttaattatgggctacgctgaaggtggcatggaaccactatacgaacaagctgtaccatatatgtatgctcacttgctgtctgacctcaa

SEQ ID NO: 67260 - DNA, 223 bp, Glycine max
aggacttctgattgaaacacaacagagtttaacgggggagatgaccaacaacaccgtgatgaaaattaaccttcattttttattatgtcctacaattttggtagcatggcaccaatatacgaacaagctgttccatatatgaatgatcaattgatatcggacctcaactaactatattacaaactacctgatctagctagctatttaagcacaacacattttt

SEQ ID NO: 67261 - DNA, 432 bp, Glycine max
gaaggtgcaagagtttgttgtgagctataggctggtttatcgtgaggagaatatgaagttgcttgttttctttgttgctgcagtagttttggtagcatggccatgccatggcgcacgctaccaaaggttccctctccgaatgaaaactggctatcgtgagcgttcttcggaggtaaaatgcgcacgttttaggcttgctgtggaagcacacaacatccgagcctttaaaaccattcctgaagagtgcgtcgaaccaacaaaggactacattaatggcgaacaatttagatcagactctaaaacagttaaccaacaagctttcttttatgctagtgaacgcgaagtccatcacaacgacatatttatattcggcatagataacaccgtactctctaatatcccatactatgaaaaacatggatatggggtggg

SEQ ID NO: 67262 - DNA, 202 bp, Glycine max
ctcgatttttcaatacaacactacataatggggcacggggtcgttataaaggatctaatcttacatattctttcattcgacgctagacctcatttatatctaaacctaaatctaattgagttgatactactttcaaatatgataattataaaatcattggctttctcactattaaacgttttgacagttattcttattttta

SEQ ID NO: 67263 - DNA, 315 bp, Glycine max
acaacgtactgctgctgctgcacgaagacaacataacggggcaccggggacagtaaaagactctgcttgataaaaaacatctgacgggtgctgctcccaaacaactgaccgaatttacagttttggagatgcctaccaatctaactctttctctctttatgccagccggtgctcatctcaatacacatcctctgcacctgcacctactatcaccacgacctatcttgatcaagggataacatatgtgttgatgcttttggctatgctacttacatacatcattcattcgagctcaacttactacaccttttgaac

SEQ ID NO: 67264 - DNA, 167 bp, Glycine max
gacaagtgagtttgttgatcgagggagcgtggaaacagtgtgatgaaaatgaacgtccttgttttcttcgttgctacaattttggtagcatggcaatgccatgcgtacgatatgtcccctctgcgaatgaacactgtctatggcgcccgtactacggaggtgaaatg

SEQ ID NO: 67265 - DNA, 311 bp, Glycine max
gactctcagttcctcacacgctgtatatctgtgtgagggagttcactctgtctatatttgcatcattcatcgctgatggctctgctccaaactgttaaggctattgttcattctcccaatggtttctcttatctttcattgagaaaaaaagtcctcacaaccttcgccgaaaagaacataccttccaacccccacctcatctgtctgagaaaccaacccggatggtgccagtgtgtcaatcctaaagcaaatgggccactgattcttatttatttcagatgatactctaataataatacccataaccctat

SEQ ID NO: 67266 - DNA, 389 bp, Glycine max
tagggactacagatcgctgtgaaattaaaaattacttggaggcgtgaaatgaaaataatgactcaacaattatctccaaagctctatacctacaagcctttaaaagatcgattaaagtacatacgtgcgcaacaaatattaaacgccttctactctccttataaattggcacacactcccatactttaaaaccaccttttaatctttctaaggaaccccacaccaaatcttactaattttccctttcctaaacaatgggtcaataattcctatataaaatttatttgtttactattattaataaactttttaaccatttcatcaactactccttctttttttcttttaaacctctaaatttcccttccttttcaccccttttttttttt

SEQ ID NO: 67267 - DNA, 199 bp, Glycine max
  unsure (1)..(199): unsure at all n locations
aaacacacaaaatgtgctctttaaaattgcttgtgagacaanggccaccggtcatagtcttacttcattatttcctcctttcctccttccttcatatttcttttcagaccaaaccctatctacacatatcaaccgttttgaacaacctgttttaaaaaattaaaccttttagtaaacccaacccttataataaagatta

SEQ ID NO: 67268 - DNA, 188 bp, Glycine max
gaagagagagaagctaataggcccagacgtaacaaatgctcgagcaatggctagcggattctaggatcaaggtttatgagctgatgcagaatactaaggctgatctgttgaatcacgtgaaggacacgcatgcctagcttgacttgcttggtgtcgataacgtatgcgctggagcctataaatagctt

SEQ ID NO: 67269 - DNA, 411 bp, Glycine max
cccaccgtccgcccacgcatccgcccacgcgtccgtccacgcgtccggccacgcgtccgaccacgcgtccgcccacgcgttcggtcatgcactgcctccctcaaaagcctcacttgttcttccgaaactgtcctaatctgaggaatatataggataattccaaattccaaatcaataatacacagtcataataattaagagaaagaagagacgaaagtaattcaaagaaggaaagaacaaagactagaatataattttggtacttgtgactttttctgttcttgatttgttctcataagttttaaaatcttcattttacactcttgttattaaagtatttcagttagattaaaataatccatttattagtttgttttacactattaatattaattctgattgatgtaaaaa

SEQ ID NO: 67270 - DNA, 83 bp, Glycine max
tccctctagggcactcatttcgacatttccattacctctctcactattcaagaaggctaagctatatcaaagtcttacataac

SEQ ID NO: 67271 - DNA, 94 bp, Glycine max
aaaaaacatcagatcacacatgatactgaaactccctatacattatatgataagctagtgctcatataaatgtcgactcatataacattaatcc

SEQ ID NO: 67272 - DNA, 439 bp, Glycine max
cccacgcgtccgcccacgcgtccgcaacaacaacaaatagttgaggagttaggaaagtgagtgagtgaggggtgcaccgttgttgtgttgggtggaaatgggtatgctgtagtgcattcccttgtgtacagttggttccataaaaggcaaaaaagtaaaaggttaaaataaaaatagagggagatatatagaataaatattaggaaagagagagagataagtctagagtctagtctagagcggtggacaatgtggttttgtttgttctttttatatttcatctaatctgtttatgatttattatttattctttttgttttatgtattatacttcaaaattttttttctcttctcttttaaattttatcttgtttttattttttttttttgtttttttaatctttatcctttttttttattttcttgttttttttttttt

SEQ ID NO: 67273 - DNA, 403 bp, Glycine max
aagagaagcaaaccaaacaaacaacactcaggttaatttgatgtcaatttaatatcgtgattaaattaacaaaccataaataagtgagaagaaaattgaaacatgatgctttatatatacatggcacaacaattcaaagacagttctaattttaggcatcattgcatcaatcgcagaaacaaaatagttacaaaattgacacaaactaattttggaaagatacatattggctgcctatggataatagttgcacatgatatgtatccatcttgtggactaattttttgtgtggtttggtcgggttacccgaatcttgtggtataatcttggtttcgttttttattaataaaactattttgggtttcccaaaaaaaattgcagaccccaaaatgaggtggtattt

SEQ ID NO: 67274 - DNA, 402 bp, Glycine max
cccacgcgtccggccacacgtccgctcacgcgtccggatacgagaagattgccaggagagtactaaacaaacggagatataaacatatgtgtctagaatcgaatgaactaccattcccttccaaaagagaaaatgagattaagcatgaaaagtgctttactatcaacactcccaccctcttcatcagttctcttattctcctgctactctaaattcaaactcaaatccccactcggaattcccattcgcgctctcacctcctcttctctcccaaccactcgcgaccacgatgatttattcgaccctgtttcccttcccgctccccaacaccttcacaaagccaccaacgccatccagagaatcgcccttcggttgcgcaacttaaggttagctttcaacaac

SEQ ID NO: 67275 - DNA, 319 bp, Glycine max
ctgcagtactcgtccgtgattcccgggtcgactccacgcgtccgctagatcctagcggccgaccttagatcattcataatttctacagcaacagggtccgggaacatttagagaagaatggaaaaaagacttttgccattatggagacaaagatagcttgatatcatagtatatagtttgtactttgacctaccaaagcttcaactagctactatgggaatacatttagacagactctattctttactaagtgaacacacattttcagctcctgtatcttttacgtatgatgatatatgttatagtacattgactttcc

SEQ ID NO: 67276 - DNA, 338 bp, Glycine max
aacactagaatctggtgtgagatatttgtccatttagctttgattttcatcatggagttatgttcaaacaaatctattgatttttttttcatttacatgatatccagagtttagtattatatccaatactcagatgtccaatgattaattataccttcagctacaagaaagtacaaagccttttgtaccatatatatgtaattctaacttgcctgtttgcaaggattgggttcacagatacattcaaagaaggggtttatattggaacatgaaaaaaaaaaattaaactattaaagactaatactgacaaataataataaaaatatatatgaatatta

SEQ ID NO: 67277 - DNA, 414 bp, Glycine max
tgacagtctatttgcgaatctggttagtgttgtaaagtacccctctattacgtgcttcagttggttatatgtgtgttaaactgaaagtgcttttgattgaatgcgtctcattttttgttgcggcaccctttaacagaattcaaatttttttttccctctccatcccttttgttgatttggagaaaagcttctccaaaagtgagaatgcatttccctttctgttttaataaatatctgaggctgagaagtctgacttccttttttattctctttatacatttcagttatctgtggtaacaacataaagaatatatattaacaataataataatttaagtcatattccgcataacagggtcctatctgtttctgcataacccttaaaggtttcccagtattatatattgctttagt

SEQ ID NO: 67278 - DNA, 439 bp, Glycine max
  unsure (1)..(439): unsure at all n locations
attgggatatcagtgctaacttgagtgtgggggatagtgtctttaatcgggctaatgatcaaagaaagttggacgaaaattcaactattgacagttgtatgcatcttgtccaagagtttccaaaagctgggaaccgcctagactcaacgaccaccatagaaagtccttgtgttgcttcagatggatcagctgataccacacagactagaacaggcatcgacaatgttcagataaatgggctcaatgattccaatagatgtgatgaatccttgaatcagccaggaataccagaaagatgccatcctgttggtgactgttctttgacatcttccagcttagatgtgggacgtaaaataaacttaagatctgtaggttctagtattacccnctccatggacaataaggatacttcagaagtacctcgtggaattgactacat

SEQ ID NO: 67279 - DNA, 202 bp, Glycine max
attcccgggtcgacgcatgcgtatcaaccaaacactcttcttcatattcttcttcttcttgttcttgttctatctgcgacgggcatcatggcctctagagcagtgctattgttggctatctgtgtgcttcctgccatggttgtggccatacgctcagcaaagatccgtctttgcgtgaagggtcgagactactgtgaccctt

SEQ ID NO: 67280 - DNA, 414 bp, Glycine max
ctgactcatgggaaataattaacaagctgtgagtcaagattctgtcatatcattctgctaatcatgtgatgtgatttcatatatgcattactttaaattatcattgttaggtttacgtgtacaattccaaatcaccagctagaaagcgtggtgctgtctaacttgttggccatgttcaccgaatgggagggactaagaagatggggctaaaaatcagaaactgcatacccatttgttttagcgctttgtctatattagacatcttatagtacgtggtattgcggtaatgaatattctatattcagattagtgcatgctgattggatggaggattggctgatgtacagaatttacattttttggtggaacataattcacattttgattcttatattaaatcatccaaaatatatt

SEQ ID NO: 67281 - DNA, 393 bp, Glycine max
aacagttgcagcagctgcatctccctattgtggtggttttgaaagcaaaggtgtcttcagattcatattatcacctaaagaggccattaggccaatatcataaagcataacaacaacaccaacatgtccccttttgattctccccaaacaacagcagatagcagcctcagcatgagcacaagcaccagtccaagtggtggtgatgcgttgttgaagtggggacacagaaagagatcaaggctttccagggctgccattgaagattcatcgtcttctgttcacaccaacaacagaagaatcacccacactgttcctccaaacttgtccatgccgacgccgccactcgtttcttctactgcctccagtggcagaggtagaaagcataatagccct

SEQ ID NO: 67282 - DNA, 356 bp, Glycine max
cccacgcgtccgctcacgcgtacgcggacgcgtgtgtagccaccacaataactagtataaataacgactattcacagcagcaagctgtcaatctaattacgaagtcggtacctgacgccattagtgcatcaactgctgatgcatccagttatgacttagggtcgagtgcacacgcatattaaaatcatctatccagagcttcgtctgaggatgcacatgattataaagccatgcaattggatatggctggacacgatctagttaggccaattcgcccattttaaaacgatcattctagggcttaagttgacagggtgtataactctgctctaaagcgtaaatagcagctttacaaa

SEQ ID NO: 67283 - DNA, 343 bp, Glycine max
cggacgcttgggtcgaccacgcgtatgtgaggaactctactctgacggtcacacaagcagcgtatggatgactagtcgtcacttgaacttacgaatgtggaagagtgcattgtgctttggcttagctggcgtagagcttggactatgcatagcttatgctgctgtgtccgtggacatgacattgtaacacaacaaggaggatgagagttgatgcgaacaatgtgacttggaggttcattaactgaaccaaggtctctgatccacatagtgtagtgataaggatgtctcatttgcagggtatgacgatgctcttgatgagcttatcctgtaatccctggctcag

SEQ ID NO: 67284 - DNA, 421 bp, Glycine max
cgcgctgccggtaccggtccggaataccaggcttgacgcacacgtgcggtggaatatagagctgagtaaatcgttagtacttcgagtcatggtgatagtaggaacacagcacagcagcatgctgtaaatctaattacgaagtcagtacctgttgccattagtgcatcagctgctgatgcatccagttctgacttagggtcgagtgcaaatgcatctgaaaatcatctatccagagctttgtctgaagatacacttgattatgaagccatgattttggatatggctggacaaaatctagtgaggccaatgggcccatcttcaaatgatctttcaagggctttggttgacaggttttctactgttgatttaaagcttaaattgcaactttacaaggttaggtttcatgcttcttactaggaac

SEQ ID NO: 67285 - DNA, 431 bp, Glycine max
taccggtccggaattcccgcggcgggccacgcgtccgggaaagcgtcactctctctacccgctactcaattaatccacttcggggaattatgggttaactagatacatagcttaaccacatgtatatcttacatacttaaccatgattagtctaacacataatgttataatggctgtaatagattataggctgaatgatgatggatgaatgagtgttagcttcagcaatttgactatcttccgtaagcaaagagcagtacctgaaacatacaacgaacgaacactgtaagcatgaacaagccctaagaagatgtgcgcaacatagctactaccctcgactccagattcaatcataccctcagaaatgttcaagggctactcaaaggtcctagtatacctgttaaaatataattgagccttatggttgaccc

SEQ ID NO: 67286 - DNA, 193 bp, Glycine max
cccacgcgtccgaagggaatgatggattttgatttttagaatcaaaattttgattagtatatgcccgaggtaaggatgtaaggaatggaaaatatagttggacattttctcgaacagattacgttcaagctttagattttgattgttttgatttttcagtggaaatagacaaacacaggatgtactggttctt

SEQ ID NO: 67287 - DNA, 205 bp, Glycine max
cccacgcgtccggcttaaccgcgggttttctgactctgcttctgtgaattgccttcttggacttgacgacgaggttgccgggaataatctcgaacccggttcgaaggacggtggggatggtggtggtggtggtggggttggtggcggtggtgcttctctgggtggatcttttggtatcgggttgtgtttgtcgcttgttgttcac

SEQ ID NO: 67288 - DNA, 421 bp, Glycine max
caacccctcccatctcagctactccacagcctcccccaaacactaaccctagccctaaccctaaccccagccctgcccctggcccgggcccaattcaagccccgagccccaaaccccccactcccactcccactaccactcccacgccttcccagcccttcaaccgcgctttgtcgccgccatcgcaaccgcagttcccgcactactcctccccttctccgccttcctacgctcccggcgccgtcccgccgccgcggggcggcatggcgatcggtgtgcccgcgcaccaccagagcccctcccctccgtcttcgtcctacttcggtcaacattttggggggttgggtcgaaccggagtcaacgtcgctgaatctacctccaattcaagcacctctcaagtgaggacgccggtgcaaggaac

SEQ ID NO: 67289 - DNA, 409 bp, Glycine max
tcaattccaagggtttccattttccatttcaatgtcttcccattcgcacaaaggcacctccttctacggcgatgccgccccttatcgatccaggtttgtttgttttttactctctctttccctttctcttgttcaattcaatttcttgcgtgaattgcagagaggggcttagcactcgacccgttgcatcctccgatgaaatccaattgcacatcgatcccggcatcgacttcgacgacgaaatcaccggtcttcgtggccaagttaaaaaattgaaaaatgttgctgaagagataggttcagaagtcaagtttcaaagagattttctggaacaagtggtacgtaatttcttggatcacctatatttcgcatagtttttgttatttttatttatttattcgtttatttt

SEQ ID NO: 67290 - DNA, 429 bp, Glycine max
gcttccttaagctccttagtgctgctccttgcagctctaattctatcccctcaagttcttgcaaactatgagaatcccccagtgtacaagcctcccactgagaaaccaccagtttataagcccccagttgagaagcctgctgtttacaaacctccagttgaaaaccccccaatttataagcctccagtagagaagccaccagtgtacaagcccccagttgagaaacccccagtttataagcccccagttgagaaaccaccagtgtacaagcccccagttgaaaaaccaccagtgtacaagcccccagttgaaaaacccccagtgtacaagcccccagttgaaaaaccaccagtgtacaagcccccagttgagaagcccccagtttacaagcccccagttgagaagccaccagtttacaagcccccagtt

SEQ ID NO: 67291 - DNA, 414 bp, Glycine max
cgacaataaaattcccagtcctagatcttttcggcgtaaggttgcgtagaagaatcagattaccataccaaggttatgggtggaggtatgaaggctttttctaagcaaccttacgccgaaaagatctaggtatggtaatctgattcttctacagtctggtgtgcacagtaagtgctttgtaactttagttgttggctggtactaatctcctggagctagaataatttcattgtgttacaccgaagataacgggtttgtactattgttgagtagggtttatttatttctttatttatcttactgtaaaacttagcatattattattgccttgtggcttattagatgtgtggttttagagggttgtaggaatgtctttagtaattcgacatcagtcaaaagccagcttgcacttct

SEQ ID NO: 67292 - DNA, 385 bp, Glycine max
tttttacagcaacacatccgtgaacattaaaaaaagaaaggaaaaaagacatttgagattagggagacagagataggtttatatcacagtctggggtttggattctggccagccaaagcttcaactaactatcgtttgaatccaaataaacagactaagttccttacaaagtgaatacacattttttgcttctctactggtaaggtatgatggataagttagagaacatcacctctccaaaaccttctgatttgatccttctgaatctgctctcaatgtaccatctatttgaccaaggaaatgaaataatgcttattaaccaatcctcagagcagcttgagcaatctctacttccccctccttgggcaggtttccgttatgatga

SEQ ID NO: 67293 - DNA, 193 bp, Glycine max
ctagagggggatatggtgtgaggaaggcgtatgcttggatggatttgcctggcgcagacctaatgggtataatatcgcttacttctgatcccagatacgtttaatggcatataacgtgaataaagacttagggcctatgaaatctactgttcactcctataatgtctatatctggatatatgcagaactggct

SEQ ID NO: 67294 - DNA, 464 bp, Glycine max
tgcagtaccggtccggaattcccgggcttgagaaataactgagaaaatcgtaatcgatgggcacgacttcatctttctcgtttccgcttcttatcggaacccccatttctcgttcctcaaaaccgcgtctggtcgtggcggcggcggcttcttccgagggcggcgccacttcttcttcagcaaccaaattgctcacttttctcggcaaaggtggctctggcaaaaccactgccgctattctcgcggctcagcattatgcaatggctggtttgaatacatgtttggtaatacatggccaagacacgactgctgactatcttctcaattgtaagattggaacttcccatgtcacatgtggcaagaacctttctgctgttaggttggaaacaaccaaaatgcttcttgaacctttaaaacttctgaagcaagcagatgcccaactcaatatgactcagggcacactt

SEQ ID NO: 67295 - DNA, 327 bp, Glycine max
tgcggtaccggtccggattcccgggtcgatccacgcgtccgcagactcgtgggcttacccttgggctagaacgtcgtccaagagagcgtataagctgttgatatcgcgttgactgagacgtacagtaattcaatgacttactgattaggataatatggaattactagactgtgctaatatctatagtatatatgatacatcttaattactagtcaattatgcacatgcataatattaaactgctagaagagactaacgttcttcaaagatggtagatagagtgactataatatagtggtattacttataacttactgttgtcttgat

SEQ ID NO: 67296 - DNA, 427 bp, Glycine max
caagccaagtgaaagtgagaaaaattaaaaatcaaagagcataatgtcagggatcattcacaagattggggacacccttcatgtgggagggcacaagaaggaggaggagcataagggtgagcaccatgctggagaatacaaaggggagcaccatggtgaacacagtagtgagtacaaaggagagcatcatggtgaacacaaagctggagagtaccatggtgagcacaagccagagcacaaagaggggttcctagacaaagtcaaggacaagatccatggtgagggcggcgccgtcgagggcgagaagaagaagaaggagaagaagaagaaggagcatggccatgagcatggccatgacagcagcagcagcagtgacagtgattaaactgctgcatcacctatatatttaaaaggtttatgggaccat

SEQ ID NO: 67297 - DNA, 421 bp, Glycine max
gagaaaacaagaagtagtgagaagaagggagagaatggaggaaaaggcaaaagctgagcagaagaagataggtatgaccgagacttggttgaagaagcaccgtcttctttacaatggagccactagacaccctcttattattagcattcgcgatggcaccatcaacactgcttccttcaaaacatggctcgcacaggattacttgttcgttcgggcgtttgtcccatttgtggctagtgtgctgataaaagcgtggaaggaatcagattgcagtggtgacatggaagtcatattggggggcatggcttctctggaggatgagatttcatggttcaagacagaagccaacaagttgctggaaagtttaatgagtccagacgcggaatatactgtggctattacagcattttgggctattgaa

SEQ ID NO: 67298 - DNA, 436 bp, Glycine max
gcctcgacccacgccttccaaaccttccactttatttccatttctaaatttgttaacccttggtcctctcgggtttcaaacatcaaccatggcttcaataatacccttgttgacattcaccttgctctttctttctttcactttgtcatgtactattgacacctatactattctatacataccacattcatatgatgtgcttattgaacaaccttgatctttcaaagttacccatttaaacaaggtcaatgtataaatttttgttccaggaatagaacatatttgattctcttaacttgagcatgttgaaccttgtactctaaatttactgtgaattttagcaaaatcttacttttaaatggtttttatgttattaattctttgtatttttttttcatatcatatttttttattttttttatcattttcttttttt

SEQ ID NO: 67299 - DNA, 180 bp, Glycine max
accagtcccgaattccctcctcgactccacgcggtcgcttccatatatcatcctcttataattacatatccatttataaccattgcaacttctaggtgaataagggcctactccttcttgaatagcatctttaactcattttctaatattttaaatagatccttattgatgagtcaaatt

SEQ ID NO: 67300 - DNA, 226 bp, Glycine max
cacacgcctcggcagactcgtgacctcacgcttaacccaaatgctgcgaacgaaagcccatattcctactcgcacattctactctggcgtctccatctcatacaatattatatactcacattcattcaaaatttcaaattcacctttatcatttctaactcaccttccttttcctcttacagcttcctgcagaaagttgactttcttgcccgatagatgccatttt

SEQ ID NO: 67301 - DNA, 447 bp, Glycine max
  unsure (1)..(447): unsure at all n locations
cggaattcccgggtcgacccacgcgttcgtccacgcgtncgtgctagatactcatttgtacaaatttatatcaaggaagcgagcactgaggctgtgacgttcttcagccaaatgtctataaagttttaggttttaatttcacccctctattccaatgcatgaagatttacttcgaattggttattgtttgaatgctatttgtttttgttccagctaaatttgtcttcgtgttttcatgtctttatttgaactgatggcaactagtcctgcatgtgattaaagtttattgaatgaaaactgttattgcggcattattaagtatataaattgagccctcttccacaatattggaattcttttgttaaagtttctatatacaaaatggctctttctagcagattacacacattgggagcatatcaagtgagagtgtatgaacatgaaaag

SEQ ID NO: 67302 - DNA, 323 bp, Glycine max
acgcacgcgtacgcccacgcttccattcacaaccccctttttttttatacatgaccacaaccctttgggatcggtatttacacgacagcgtcctatactcattactcttactctttcacagaattactatctccgaatctttatgttgaaccatctcaagaaagacaaccaacccatgatcttggaaacatcaaacacacctagcgtagtcaaaatatttcattataatttctcaatgaaagatcatcaacaacaacattcactatctataccccacaataagatcatttcaatgaggaaattatcacccccacccatataac

SEQ ID NO: 67303 - DNA, 286 bp, Glycine max
agcaaacaaacaaaccccccacccaacgcattcttcaatcttccccttcgcgtcttttgggtggtttggtttaagacatttcacaaacaccttctcttccctccattttccatttccattcttctctccactataaattctccttctctttctttctcgtaatcttcgccttccttcaacttcaccctctctccttcttacctccttgaccatgatgagtttcgccatggattcagtttccgtgttaaaccctaaactcttccactcccatttctctttcccattc

SEQ ID NO: 67304 - DNA, 369 bp, Glycine max
  unsure (1)..(369): unsure at all n locations
gctgcggcacaagcagcagccgcagctgctgctgctgcttccacagcttctgttcaagtccgcatggtgttagatgatggaacatcaaatatactgatgaggtctgttggcacacgcagtgaaccagtcattggtttgcatggaggggcactgcttggtgttgcctatcgaacatctaggagagtcagtcctattgctgctacagctatttcaacaatccagtcgatgcccttatcaggctatggaagcagtggtgtttcttcttttactacttatgatgatggattttcttcacaaagacctnctactgaggcagcaccttaaaactttcagttatacagttgggagacaattcagcctggggggggg

SEQ ID NO: 67305 - DNA, 352 bp, Glycine max
ccggtctcgaattcccgggtcgacccacgcgtacgcccacgcgtacgtccacgcgttcgtccacgcgtacgaccacgcttccgttgatagtaattgtaagtggctgagtgattctaggaattgttactccagtttatggtaaagctgatgccataaggggaaacgagtgaccatcatctatatgattcaaaactgaggaacattaacattcgtgtcattctttaatacaaggttacatggatgtatgaaaacaaattcattaaacgtgtatccaggtttaattttatgttctattttatttactatgtgtattttccttctaaaaaaaaaccataaaataatatatatcaaa

SEQ ID NO: 67306 - DNA, 421 bp, Glycine max
gcatcgtgagaacactgcgtaaacttggcacgaattacttgcaccctaggcatcccgccgtcccaattaagtcgcaaccatataacgtactccaattcatgtttgtggtttgtcttaggtccacacatatatattccctatacacaccaaatgaattcccttaatttctattatagtggaaaatcgaacaaagttcatacagttctaaaagaaagtgggttggtttccattgcatagcctggaattttagagtaatttgactttgctaagtagctctccaatatatatatatatatatatatatatatatatatatatatatatatatatataatattttagaaaaattttggtaattggactttaattagatgaagacttgcaacgtaagtgtcaggaaagaaacagcgtgcctttcttt

SEQ ID NO: 67307 - DNA, 373 bp, Glycine max
tccggaattcccgggtcgacccacgcgttcgtccacgcgtttcgccacgcgttcgctctttgcagcttttctctctctcaaactcttgttgcgtgtggatttgaggtagagagagacactcagatacgtttacgttcagagacagacacaatagaaagtgtttagagagagaaaatgaacgcaacaatgtcttctttggatttgttactgatttctctgagcagggccttttgtagttccatcgacggtttctttcagatccaggggtgtttaatttgcttaacgcttgctcttgggtgggcttgtgctgcttatgtcaagtagtcattgatgttaaacagctaggatacacttttattgtcacgtcaatgag

SEQ ID NO: 67308 - DNA, 373 bp, Glycine max
ctctctctcttctctcctctctcctctctcctctctcctcgcctttctctttctctctcggtcaaatttctgtctctctcatctttctctctccggaagggcaaaccctaaagaccgtttgcacccaccagtaagttttctctctcctatctcttctctctctctctctctctgcgctttctccttctctctctctctcccttcctcttttcccttctcttcctctctttccttaaaaatttgaaattgatggggtccttcttctaccgctgagcctcaatataaatcatttgtgctgggaatttggttttcttcgccataacgagcgaaaactaatcccaaattttggaaccctaaaatgggaattggggat

SEQ ID NO: 67309 - DNA, 79 bp, Glycine max
aattctccgggctcgaccccactgcgtcacgtcctttctcctagctttaagctacccttacctcatatcttttctcatg

SEQ ID NO: 67310 - DNA, 334 bp, Glycine max
gaatatgtattagtatttgggataatgtatttgtgttgtgattagtattttgattgtgtgtgatctctttcactaaacatgtaatggttgggtttgtaacaatgaactattgagtattgactctttttttgatagataattttggaaagcagttgactttttcttgaaatgtaaacatttttcttcttgatgattttttatatattggaaatatgtctattctttcagcttccacctgagcattttgccctcatgttttctgattatttgatagtttatggagaaaaatacttatctttccctccaaatcatattctataattctctagaatac

SEQ ID NO: 67311 - DNA, 277 bp, Glycine max
cgacccagtcgtacgcaataattacacttactatctcaaatgcattttgttcaaacactctcatttcatctgaccggaacgttttcatctaaatataggcagtttgaaatattacacttaactatccactattgccttttagaggaatgactattaacttaaagctgtcaactattcctttataaccactcattacattacatacatattcaatatctacaccaaatatgtgcattctaaccattttcatctgaaacttaaagactttaaaaccctt

SEQ ID NO: 67312 - DNA, 336 bp, Glycine max
acgcgttcgtgaaggcttgcattgacgcttcataaactgtattagttctgggggttgatgttcaacttggcggtataatgaaagagcatcttatgtagataaactttaccactatctgctctatgcacttcttgtgctctctgcagttctgaattattcaaataacatgttcacactaacacatgatatactataaaagaaattgacacacactcctgaagcttatgaaacttggaactccttcggacaccttttacactgcagagtctgtaaggacaatctcttctgaagtttcaagtgacctcatactttaagtgaaaggaactcgatacctac

SEQ ID NO: 67313 - DNA, 185 bp, Glycine max
caattcccattcgacccacgcgtacgcccacacttacacctactcatgagacttacccagtttattctaacatcataccattaataggcaacggtgcactatccacaacagaaggactgataacaattatccttttaattactcacatgtgttatcgacttatccataacaaaacatgcatttta

SEQ ID NO: 67314 - DNA, 321 bp, Glycine max
  unsure (1)..(321): unsure at all n locations
nccacgcgttcgcaggtaatggctgctaatgaacaaggaggccacttgtatgacaacaagggtatatatatccttacctattcttcactctcttgtctctctttcttgtggggtgtgaagaataaaaaatggggtcttggggttttgatttctaagggttgaactagtgctgatttatgctgctttactgtgtttttcttcttcagagcaaatatggaagtggaagtgtcaagagttaccgtaagtaaagttcttgtcttcatcttctcattttatggtacatctagcaatgtagaacattatgatatttctccaaaatgg

SEQ ID NO: 67315 - DNA, 173 bp, Glycine max
  unsure (1)..(173): unsure at all n locations
aattctctcgggtcgatcccacgccgtcttcgcccacgccgnntccgaaaaaactcgacacccatagatgctacgtcctaagctaagaatcaatacacggggccgagtctcacgcttcatagaacacaatgcgccatgtgcaaaggaaactttgcttcttggtgccctttttg

SEQ ID NO: 67316 - DNA, 451 bp, Glycine max
  unsure (1)..(451): unsure at all n locations
ccggaanttcctcgggtcgactccacgtcgtctcgtcccacgtcgtctcagtgcgcctcgtgagggtggggttctcgagtgtaccgggagagaggaggccatacgntgtccggttttgacgnnngcgtcgggaggtggnngattctcgtggcaccaaaccctcttcttctctttgcacccgttcagttgcgcccgaagcagcgtcaggggctctgtcaaatgnntcaatggtggnnatttgtgagggcaaagaagagttaccagggccttcctacggagtaccgtgtgaagaccagcaaccgaatacaccttcatnntaacttgtactgacttcannaccgagcttttggtttcttaaagttggccttcttcccaatgagttttttattctgacanttacatgtggcagaaattggtttctcactttcttcataatgatgggtaaactagc

SEQ ID NO: 67317 - DNA, 386 bp, Glycine max
  unsure (1)..(386): unsure at all n locations
attaacttgatcagatgagtgtgaatgattttatttgtgtgtgaaaatgaaatgcaaaagataatgcaagtttcgtgtgtttacatattcctttttatgaatctcaagttcattattggtgtattgggttgtattgactgtgtgcttcggccatcagctgattgattatattattgaattttatttcttctacataatgtgttgccttctctgggttgggatttattcttagtttttgacatcttacatttctgccttagttgtttaatcttggtntattcttctttgttatgaaatcgttattttgtaaactctangaacaactagactacttgagacttgagagaattgtaattgatgtactaaattattttgtttaattcttt

SEQ ID NO: 67318 - DNA, 416 bp, Glycine max
  unsure (1)..(416): unsure at all n locations
gtaaaaaatgtaaagtaactaaactacaattacgaaattgcctaaacatcctaggtttcatttttaactttcaaataatattttttccactcgatgcaaagcgccttcaatctctgtggttctaatggtctagcatcattgaaatattgcatgatataataaaacataagttaataatataatatcaatcataacaaaatgaaatntgtttgaattaaacaattactgttttccaattattcttgaaacttcctaagaatatagttgacatccagtgcattacataatacccacactcagtgcttncttttggctattacactaaatacattatgaaatttagatattcaatgttaagtacaaattagtctacacagtactaaaatataactagaagcatttgttaaatgacttac

SEQ ID NO: 67319 - DNA, 231 bp, Glycine max
gacccacgcgtacgcccactcgtgtcaccgctcttacggatgtttcagtttcaaaatacagtgtacatcatccaggcgggatattttatatcaacactagatctattcatcctacttaccttactaaattcactaccacattcaactttctctacaactcttaaaagcattgccaaaatgataattacaaccatttatcaatcctctacttatctctataacatgctactt

SEQ ID NO: 67320 - DNA, 279 bp, Glycine max
aatatccgggctcgcgcacgcgtccggatgagcggaaatcgacgccataagaaactattgctgtcacacacccatgtcagcataggcgacttggtcacaatctccagacgtcagcttcacacgcaacacaaagcctatcccaacatgatggcgtatcgaaactggctaaacgcagactgaaaatggccaaaccgaacgggttgacaccaacaccgacaaaccatcgatatctactagaccatcagaacgtcatattgaagctagatttgaacatcacac

SEQ ID NO: 67321 - DNA, 390 bp, Glycine max
  unsure (1)..(390): unsure at all n locations
nccacgcgtgcgnccaatcacgcccgttccgctcttctgtctcgaaacgacgtcgtcttggatgaccgcagatctgctgctttctcccattcccttcttcccttcagaggttacacttttaccaatatgcccctccttttaaatccaattattggtagcttgattgctctaatcagaaattgtagatcggttgtggactgggggcttgagctctcatgctatgaaatatggtttcatgctatgtcttgtcttgtgttggtattaactatttctatcggcaaaggttagatgctagtttctctttctggagtttaattagctgttagtttgctaggtgattagtttttgttattgagaggattctgacccatgacctgttcccttaaatta

SEQ ID NO: 67322 - DNA, 226 bp, Glycine max
tccaattgcaattctagtgaactccattcatttattgtcttttattttgacttgtgcacattcatcatattcacaaattccattcaaaccacatatgaattaattgatttgggtgatgagcgcgtgaaaaagaagaagaagatgatggcacggaagaataaaagggttgcgcccgaagaagcccttagggccattgggttgggttacgaactcaccaacgatctga

SEQ ID NO: 67323 - DNA, 255 bp, Glycine max
cgaactactccgaagccgctcacgttatccttactacaacactccctaaaccctaaccaagcatgggttcttccaccttcaccgcaatggccgcttgccagccttgcttcttcggcggcaacttcttctttcccaaccaacggcggaacaaagccgggcctttggtcagacgcaacccggcccgccggggcttcggcctgggccaaggaatgcgccttaaccaaaaacggaccgcaaattaggaacctcccaacc

SEQ ID NO: 67324 - DNA, 320 bp, Glycine max
gctaagtaaatcataagtcacaacatatagtttcaaatggggatagcagaagcatgctccagattccttggggactttttacaagcattgaaatgctccccacaaagctcagtgtctcaccttgatcacaagccccagaatgtgctcaaacttaatgacaagatggttggtgcccttgtcagtgtttttggcatggaaaccaacggaagaatcaagaaggaaaatgctaggcaagtggtggagaagctaggtttgatgtatgataagtcctcatcatcatcagggtttgagctaactaagggtggcttgctggatgatga

SEQ ID NO: 67325 - DNA, 103 bp, Glycine max
gcgtaacgacgtcgtttgcgtcttgtgcgaatgaggcaaagaaagagagacagggatgtggtggtggttgtggtggtgttggttggtacaaactaatgcaatt

SEQ ID NO: 67326 - DNA, 172 bp, Glycine max
ttttcttcattttctctcttcctttcacctagtcacgcactcgcctcgactcgtgcggagtccgatccccccgagtcacactcagccagcaccaccggccgatccgaccatgtctcgagcctctatcgccgccttcggcgagatcatgctgatcgggggcagagtcgtagtc

SEQ ID NO: 67327 - DNA, 143 bp, Glycine max
gctgacacgtgcttgttctgattcaggcgttccggcaagggctacggcgccggtggccggggctgtggctggaccgctgattgcaaaaagaaatgcatcgcttattgctaaaccataatatggttacacttgctatcactact

SEQ ID NO: 67328 - DNA, 232 bp, Glycine max
cagctgaactgagtttttggcatggtattatgacatgatcattttgagaagatattcaggtggtagaatgctacctaccctatgatgccctatgatgccctctatgatgccctaccctttatagtatcattcttctgtagcaggtcaagaattttaattaattaaatacactaagggagaaaaaaaaaaaataaataatattatttataataaaaataattatatattttat

SEQ ID NO: 67329 - DNA, 138 bp, Glycine max
cggtccggattcccgggtcgacccaagccttccattccttccttttaaaccggacttattggttccttttacaacttaaaccattgccaaaagtccaaccttggtccctttgggcctttttccttttctttttgcttc

SEQ ID NO: 67330 - DNA, 58 bp, Glycine max
  unsure (1)..(58): unsure at all n locations
cccacgcgnccggcgggaacagagggagcaagccgnaacccacagacgaacaagcccc

SEQ ID NO: 67331 - DNA, 428 bp, Glycine max
  unsure (1)..(428): unsure at all n locations
gcggatgaattcgatgatgaaggtgatatgggggagatgtatcaaaatactgaaaatatggctgataaatatttccctgaggatggtgatttcggctatgatgactatgatgattattactaaaatgttgctagatgatgtttctgattttttttagcaattcatactcaacatggctggcagcgtggaaccgaagattgtcagagacccagaaatctttggaagctaagttgcaatctgataagctagtatcactacacgagcttttttaatgattccacatgctttaaagaaagcttgngaattattgtanccgaaaatttttaggtaggtattaccagcatcactctgcttaacacanaatanggggttagattatgtgtttcatttaaaatatactnatctctaaacaattttttaaatatgac

SEQ ID NO: 67332 - DNA, 240 bp, Glycine max
gaaaaagaaccctcaaccaaacaacaactacaacaaaaaaaaagccctataaaagaatttggagaaacaatttctcactcctgaaaatctcatcctcttcttctttacatttgttttggaataaacattttgctgatactgaattttattttctcttgctttcgtttcttttcgacctttttttttttctgcttcgatgttttcaaggagaaagggattggagtaattaaagagagtgca

SEQ ID NO: 67333 - DNA, 303 bp, Glycine max
cggacgcgtgggttgggattcatttgggccaagaatcttggacccaatacgtctacatacggagacatgatttttcttgatcttccctcaattcacatttattatgtgacgctggattccgatctggacctgcagggagccatgagtgcaactgcgtcattctgcgttactgcttccgctgaccaagtactcttgctctttcgatccctggttcgagccgctcgccaagtcccccgatgccatatcagggaggaccacaaacgaaccaccatcggatactttcgacacaacgccactcttttc

SEQ ID NO: 67334 - DNA, 337 bp, Glycine max
aagaaattgaaaaggagataaagcatatttttttcttttaaaagatcatagatgggtcaagtgatacatgttgcggtggtggcagcatccttgggatgtgtttcaacccttttgatggtttttatatggcgtttgtgtcaccacaagaaagagcacagaaactttgtccaacccaatagtttggccagaatggagaacctccaagcaggaatagcaagacttcatcaacaaccaacaatctatcaccaatttgctgatcacaaaaacaaaaacaaaggcaacttttatgtgtttcataatggagtctctagaaaaggacatttggttaattgggatg

SEQ ID NO: 67335 - DNA, 262 bp, Glycine max
caagcattgcatccctcttgatttgtagtttgaattgggctttagattaaagggatgacggatcaatatgggttttaagaacattgagcgtgacacgcaacaatggctaagttcttcactgctatgatcttggcactctttgacatatgcatacttgaaacataggtaatggctgctcatgaacaaagaggccacttcgatgacaacatgagcctatatggaactgtaagtgtcaagacttaccaatgcccatgacaatgct

SEQ ID NO: 67336 - DNA, 144 bp, Glycine max
  unsure (1)..(144): unsure at all n locations
ctcaaccccaacaaagcaagagaagtanggtttttgtgcttggcanaagaaagagaagagaagatggtgtcaggttcggngatctgcgcgaagcgcgtggtggtggacgcccggcaccacatgctgggtcggctcgcctcgatt

SEQ ID NO: 67337 - DNA, 229 bp, Glycine max
cccacgcgtccggtacaagattggaggtattggaactgtgccagtgggacgtgttgagaccggtgtcttgaagcctggaatggtggtgacttttgcaccaactggactgacaactgaagtcaagtctgtggagatgcaccatgaatctcttacagaggcacattctggtgacaatgtgggattcaatgttaagaatgttgctgttaaggatttgaagcgtggttatgtt

SEQ ID NO: 67338 - DNA, 418 bp, Glycine max
aagcaattggctgaaagtgctggaatgttgttagttcaagctgaggtccttcgtcacatgggagagcaactacttgttaagtacagagaatcggttcaacgtgtaatccgaaagcctgcgctcagaattgatttctcaccatgagtaactttcctacgttcattctgccattctgggataaaacttaggttgactaagtcaggtgatttttgagttattttttaatgaatattaaaattttatctcgccaatttatatgataatagacgttttattgatgtaaattattgagaataaattttaatttttattaaagaatatcattaaaaacactgagttatgtcttaatttttaatatggtttttctgttaaaaaatattttggctctgatccgattgcattgaattactaggatatt

SEQ ID NO: 67339 - DNA, 196 bp, Glycine max
aggggctaaagctccaaacctccaaagaacaaagatccaaacttgagtggagatgtcaggcagagggcggtgacggggaggatggggatggggacgaggaggtggattcaatacattagcctctcaagttccatttgatctatttcctgacgctgatactgtgcctgatgttaaccttgatgatattcatgatgat

SEQ ID NO: 67340 - DNA, 175 bp, Glycine max
  unsure (1)..(175): unsure at all n locations
gctgcttccttttctggtggtggtgttngatgctntgnatctgtgcctgccttgggtcctggcaaaacttgtcgaaaatttcggtcagctggtgaaaaattcttgcacctggacataaatatgacaaatcagagggtatcacttcttctgaagaagaggcttacaacccctaaat

SEQ ID NO: 67341 - DNA, 412 bp, Glycine max
caattcccaattcgacggacgcgtcacgcgtgtctggacataactctagactatatgtttttctctgttaacacagagttcattttcaagtctctgtctctagaagatggggacaacacttctttcttcacacgattgtctccaatgccacgtctttcacagtgaaaacttcgctattgccgcatcacgtgtggcatagccaagaaactataatccttacactaatagctttgcctcctcatccaaaccaaatcgctgtcggaagccgagtcctgtcaccaatcgaaaccgccggcgatctcctgcgaatgccacctttccagcgaatataggcatgggacacgtttacatcctgaagcgaagcgagaaatttagcctgcacaataataccaacccaagactctctgagaac

SEQ ID NO: 67342 - DNA, 250 bp, Glycine max
cggacgcgtgggtttaaacctaattctcatttcttcatcgttcgattcttctcctcctaaagatgcagatcttcgtgaaaactttgaccggtaagaccatcacccttgaggtggagtcctccgacaccatcgataacgtgaaagctaagattcaagacaaggaagggatcccacctgaccagcagagacttatctttgcgggtaaacagcttgaggatggtcgaacccttgccgactacaacatccaaaa

SEQ ID NO: 67343 - DNA, 361 bp, Glycine max
gtccggaattcccgggtcgacccagacgaccgctcacgcgtccgatccgcacagcacactctcatacatcatacgccgtcgaagtcaccctggctcgctctgtacaaccagaaggatgctctggacctatcaatgggaactacaggaaataaggcatagacttttgatgaagacaaacccagtctgtggcaaggaactaaatgaacttgtatgacacgctctaagagctggcttcttcaagagacacactgggcatacattaaaacctaaagaatgatgctacatgatcatcaagtgaaacactagttcatgacgatgttcaacacactacaattgatgctctattcattgaagatgaccc

SEQ ID NO: 67344 - DNA, 271 bp, Glycine max
caacgatggcgactcagatcctctctcgcatcttccccaaaaccctaaccctagcccccgtcctgttccgatccctcagcagcgccccctctcgctcttccctgccctcgctctccttcctactccgtatctccgtcgcagccaaccactccctccgtcgagtcctcctgcgaaactccccctcactcacgtgccctatccacacgcaccaccacctgctacctcaacgaccacaaccctaactggtccaaccgttcgacgaaagaaacca

SEQ ID NO: 67345 - DNA, 453 bp, Glycine max
cgagcgacccgtacgtatacgcatgggcagacccgttgctgccagatgaactggctaatacgcctgatgagagggtggactgagaagctgcaggctgttgtagaccttgcattgggtactacatcctctgcaccagatccttttcacgaaggcttaacctgtgttgacgcaagtaactaattcagcttgtcagatactcttgtacagctgataaataccgttcacacattctgcaaacatttcactttcaggaaagatcttctctgattacaaggttgggcacatttaatgatcttgaaggtactcagagaaattctggctacaatgttctggaagagcctgttagcatcactggcctcgaaacatgttcacttagttacaaagttcactggccactgtctatagtgttatcacgtaaagcccttacaaagtaccaattactttttcgatttc

SEQ ID NO: 67346 - DNA, 109 bp, Glycine max
ctcatccatatccaccagcccatcacaaatctctcttcattgccacaaataattcacccgcagtatgcttatctctacccggatcaaggccaccagtattctcaaggtc

SEQ ID NO: 67347 - DNA, 229 bp, Glycine max
gaattcccggctcgacccactcgtccgcccacgcgtccggaggttgtctatttgaattctccttcatcctttcctttcttgttgaagagtttttgttattgttttaaggaaccagcagttcttcagttttagaaagactcatgttgaattatcatagcatctgtgatggatttatacagcattatcacaatgtttcaatttcactcagattcattcatgggtgaaacta

SEQ ID NO: 67348 - DNA, 104 bp, Glycine max
gaattcccggaccgacccacgcatacgtcctacgccaatctcttactcattctcttttctctgtccttgccccttacacgaaccctgtacatcttcaaaaggcc

SEQ ID NO: 67349 - DNA, 169 bp, Glycine max
tttttatttttggtttgtttttaattttggtgtgttttttttttttccaataaaaaataaaacactcattgctacaaaaagcccatctaaaaaaaacccgatttaaaaaaatccacttccaacaaaaattccaccaatttgaacccaaaaaccacttactttaggcacc

SEQ ID NO: 67350 - DNA, 271 bp, Glycine max
cggtccggaattcccgttcgaccaggcgtccgacactgaaacgaggcttaccagtgttcactgcgttagcgctggctgcattctgcgcctgacaggtcagataatgactgaggttgatcatgtattgcattagacattgacagatcgtgacttactgacctgatctttcatgacttactcctgaccagcattgaaccttgctttaaaggctcacgcataacttacaccaatgtgatatgtagactaccacttgatataacagttctgctgc

SEQ ID NO: 67351 - DNA, 121 bp, Glycine max
gaattcccgggtcgacccacgcgtgcggtgtgatgccgatgatgggcattgtcggtactgagacattgcatggaggctagaaagctggtgtgtcggtccaggtaacagctgcgaacattga

SEQ ID NO: 67352 - DNA, 145 bp, Glycine max
aattgccggatgcacccacgcatgcgtccacgcatgcgtccacatcgctcatgccgaatgcggatcaggctctctgcgcgcattacggcgggatgtgcaacggactaggtcaggcattgtcactgaatgacagccttcaacgagt

SEQ ID NO: 67353 - DNA, 418 bp, Glycine max
  unsure (1)..(418): unsure at all n locations
tccggaattcccgggtcgacccacgcgtacgcccacgcgtccggtcagattgacactttcttaaactttcaagagcttgctttcccttttgtcttgctgtatgttgacattgatctctcattcctttatctcttcctcgattttgtgttcaagagaccattgaagacatggcaagagagtcaagaatccacaccaacaggatttatcctcgtctgcgtgtggcttagtcaagggtcatgaattgtatactgtgtaacagaacaagatttgggtggctaaggtagcgccacatgtttgtacctcacatgccagagtataccaacctgatgataagtacaaatcaaaacagagaacaatttttggacctttntgtggaaaatatatttttagcttgcaaaaagatgaccaattcatgtgc

SEQ ID NO: 67354 - DNA, 359 bp, Glycine max
atatctagattctcttcatctgcctttactaggataattaatattgatttcattttatttttttacttaggctgaaaacaattcaaaaatcaaaatgaaatattttgaatttacaggattctttttgaagaaactaactagggacacataaagtaagtcttttacagtcagaaataggtttttaactttttactacttgactgtcaattgaatcagttaaatggtgtgaaagacaaacttatgttggttagttacagtgtcagaagcctgggagtgctttctggttgtagctttggctttatatgtttttcaaggaattacttacttatcactctgataaaaaaagaaaaaagaaaaag

SEQ ID NO: 67355 - DNA, 60 bp, Glycine max
  unsure (1)..(60): unsure at all n locations
tcccggatcgacccacgcatccactctttctatgcctcatncgtatacactctcttgaaa

SEQ ID NO: 67356 - DNA, 132 bp, Glycine max
cggttcggaattcccgattcgacccactcgttcgctgcgatctagatcttgctactgcatattcacatgagctgacacgatatgggctataagggagacttacaaattatgcagcagcttattgcactggtc

SEQ ID NO: 67357 - DNA, 244 bp, Glycine max
atctcgcttacacactcgcgtccgcctaggtgttgtctcactcagacacacgattgctgggattgggtaaggtgataatcgctcagcgttagtctgttctgtcatcaggcatatgttagacttacaagccgtgggagcctgtgaagattcgatgtctgaactatctggatctgcacgtgttctgcatggtcttgctgtcgagtgtaatatatactctctgatgtaatgctgctctagccaaagt

SEQ ID NO: 67358 - DNA, 104 bp, Glycine max
tccactcatgcggtaaaagatttgttgctgcaaaactaggcgagcctaagggagcaatggctgtaggttcaacgcaagctattaaagataccatggctgcactg

SEQ ID NO: 67359 - DNA, 363 bp, Glycine max
ctctgtctggtgtggacgatctggtcatcgtctctcagacaagcactactcgtgtgttctgtctgacgataacccgcgcagtcgcaggtttcaattcaccatgaccgtgattatgccggttcccattgatcagctagaggtcgaggaggttctcgtgccagacgcggatttgcctgcgcacaatcaccatcccatggaagttgtagcttaacctgaaaatgccaataccgtggagagtcaacccgttgaagatccttcatcatctagacttacatggagaattgacaattgttcatggctgaatacaaagaagctctatgcataaatatttgatgatggtgcctactaaatgcgtgtgcttat

SEQ ID NO: 67360 - DNA, 114 bp, Glycine max
cccacgcgtccgcccacgcgtccgagcctctctgttccaaaaccctaatccttcgtcttgcaaggaggtggctgattctgcgcctcgcaaggaactcaaggtcaccttccccat

SEQ ID NO: 67361 - DNA, 84 bp, Glycine max
cccactcgtccgtccactcgttctcggactcgtattcaagtactttttctgtagatccaggctactttatatccaccaattgct

SEQ ID NO: 67362 - DNA, 127 bp, Glycine max
aggatgcgtcacatgatggtctagcacttacggcacgagtcactgcgatctgggccaaggaagcgtgctgctggtcacaggcgaaaagtgaacgcattaccgaatgatgacccattcacggcacaca

SEQ ID NO: 67363 - DNA, 443 bp, Glycine max
gggcacggagtggaggacgcgtgactctgtctagaggaacttcacgtatttgtaagcttgttccagaagcatcgcttggtccgttttcttgtcccacggcatcagcttctggagacaccgtgttttctggcttagcttctgacgacgttggcgagccaggttgctctgcgggatcaccggaggtcattacgactccacgcgctgccacttctgctccggcgagtagaggggagggaggcggaggtgtatctcattaagggtatttttgactttcagaaagaaatgacaggtgcaagatacactataggtagtgtaggattcaaaacctcaagtttgaaggatccaaatccacccactataaaggttacttctcacccacccaattacattaattttataactaactaccaaaagattcattatgctcataataattattttta

SEQ ID NO: 67364 - DNA, 144 bp, Glycine max
  unsure (1)..(144): unsure at all n locations
gaattcccgggtcgacccacgcgtgcgccttctctctctctttcaatttccaaatctcgaaactcaagaagatggagaaagcgatcgacanacggaagattttgcttgatcatctgaacccttcatcatccacccaccccaact

SEQ ID NO: 67365 - DNA, 407 bp, Glycine max
gaattcccgtttcgacccaggcgtcccgtcacactcactatctactagacactggttttagaatacatatatctatttctgattcagggcgcgattgttactaagcctgggaagttcgtacccatagtacttcatatatagtggaattctacatgaaggtgtctatgctcgatcacatggaggattgtcacaaactcggtcttaccatagctcattgcagtcagtaacttgtccatcaataagcttgaaaaattgctatctttcgttaacatctgttccgcagtgaatcaagttatgatccaatcattaagctaatcacacattaatttaattacgtgactgatccactgttcataatcaatgatctaactaaaccttaattaattcttaacaggtctaagttaacc

SEQ ID NO: 67366 - DNA, 92 bp, Glycine max
acgcacgcgtgcgaaccctagtggtagcaattcttgcatgagaatgttgctttcaggcccggctaactgttgaaaaacaatgcttgcaaagg

SEQ ID NO: 67367 - DNA, 157 bp, Glycine max
cccacgcgtccgtctatcttcacatatctttacctttctcaaacagcatatgctagctcgggaaccggtgacttccatagggaaactgttatttttgtgcacgctctcatcgatcatcattatttacatagctcatccggctttcataccaaatgca

SEQ ID NO: 67368 - DNA, 98 bp, Glycine max
cggacgcgtgggcagacgcgtgtgcctctatatagctagccaaccacactaggagctagggatacttcctatagatcccagggacccagagtcccctt

SEQ ID NO: 67369 - DNA, 182 bp, Glycine max
aacaaattaacaagaaacaaggagcagcttatgtggtggttgagattccaagcaatatggcagataggaatacaaacaagaagcaaaatgagttatccactatctttgagattggaaagcctgtagtaaggcgtgtccaagggcactgtaagctttgagacaacagaattttttgcagaact

SEQ ID NO: 67370 - DNA, 220 bp, Glycine max
gaattgaccggatggacgcacgcgtccgtatcaggaacgaacgactaggtaatccattgatggcacattcctcgatcgtggttactgtgagccataactagggtaaagggaaccttacctgtgcaaaaattcacactcattctacttcttctactattggatctcgatctctagctataccttgtcttctcctactctcatagaacaacttctctttctc

SEQ ID NO: 67371 - DNA, 89 bp, Glycine max
tccatacatccacggaacccttttccaatttacaccgttacgtaattttttaggaacgtggatgctccatcatgcttgatcggctctta

SEQ ID NO: 67372 - DNA, 133 bp, Glycine max
aattcccgggtcgacccacgcgttcgtccacgcgtccgtccacgcgtccggaactataaatgacttctcttcaattccaccgattggacccaggaaccgatacatccgccgtcatcgcaaacggcgttaactg

SEQ ID NO: 67373 - DNA, 423 bp, Glycine max
attctctaatctctcgcttcacaattcacatggctctggaagcttacgcagcagcaaacgctgacaaaatccacacagatggcctcaccaaagctagggattcttgttacaaggctcgtgatgcgttctatgcctgcctggagaaggaatcggacaagaagcccacagagattgcatctgtgggtttgttatacccattagaatgcaaagagtgcaggaatgaatatgtcaaacagtgccgatcttcttgggtaacataaccccttcttcaatttcgattttgtgttggtaaaaatttatgcttttcttaattgggtgtgttaatattgttccaggtgaaacatttcgataggcaatactgccagaacaagagggttcagagacttttggatgacaaagggtcgcggaaaggggtgtaaacta

SEQ ID NO: 67374 - DNA, 396 bp, Glycine max
gtgaaagttgtctaacaatttgtgctcctctggaatcatcatgtgctcaccctgctactccaagcaaaaccactgagtacgccgaaaacaaagatgggtctctcaagagcattgatgccatgtcaactccagctaaacttgtttctactccaattaggttgatgagtgccacacctgccttgcggtcacccaaaaggcattatatgagcccagatgaccactctatcagttctttgaacaagttagctcggcgtacacctcgctcaaggtcattggaatttgacactccagtgaagaacaaggatgatatttttgacaccctccaagaaagtactatccaatcgattagagaaaaagaaaggctggccatggagaaaagagacccagctatcacag

SEQ ID NO: 67375 - DNA, 202 bp, Glycine max
cgcaaacatgtataccgacacaactcacgtgctcgcttatgcctaaaataccttcgatcgcgtaatcggtctctgatacttgaccaaaaccgtatactctcgcggcgtccatgtcacccttctggtcgcaccctactactaagccttacttacaaaaaactattgcccatttttccaaacgctattcctccccgaacctcag

SEQ ID NO: 67376 - DNA, 65 bp, Glycine max
ggttttctcattaacgcttcttctctcttcactctgttaaggtgcaacctgacagcctggaaatc

SEQ ID NO: 67377 - DNA, 68 bp, Glycine max
ctcatgttttcgaattttaaacgaaacttttatatacttcttaaatttattcgatcgtttggctcgtg

SEQ ID NO: 67378 - DNA, 218 bp, Glycine max
aaaagactcattttcagagactgatacaggaaaaaaatacacttagcaaaacaaataagagtattggcaccataatgatatgtacaatgagttgtatatttacaaatttaacagtgcctgtggtgtacatttagtaagtaatttttttttctttcagaataatattgagaagtagggacacttctaaaaaaaaaataaaaaacataacaaaaaaaata

SEQ ID NO: 67379 - DNA, 365 bp, Glycine max
gtcaaatctcatgttattagattgattgaagaccttcacaggtatgcttatttcaaatgatctttatgttttttgtgtgaagtgatgtgtgtatgtatatataggtggaacttggagatgtcaagtatgttagagggatctatacagatcatgtcaaaggccgagaccgggactaccatgtttttagtatgggtacttatcttggactgattggaaagaggatttctactccctcagatgtaatatatgctggccttggaacgcattatgtgccatctggaaagttaggtttattcatggatgccctctatgtcagaatgtaatatcccaatttttcgtaaataaatctaaaaaagttttttagt

SEQ ID NO: 67380 - DNA, 269 bp, Glycine max
cccacgcgtacgccggtatcgaccatggaaggattggcgctaccagttgcgcagttgcggtcacaacagttggcgttttcaaggccaaagctgttcggcattgacgaaggcacagcttatggatatgtctctctcatacgacaccgggtaagcgggcttcgttatcgcactagcttatgatcgcaggcacaggcacaagcacaggcacaggcacaacgcgatactgttgccgagcaagtcacagtgacagacctatacgactctgtgag

SEQ ID NO: 67381 - DNA, 165 bp, Glycine max
atgtatgccaacttctcggtgataatatgttctagttccatgattcttatatgaatcagggacgtgtgcaatatgccaaggcgctgtgaatggctactgattcatgcttgcaagtatcatttgtaagcgacgtgctaaataccaaatatcactctgaatcatatc

SEQ ID NO: 67382 - DNA, 406 bp, Glycine max
gagcgttgttctccgaagcgaacatgggtgatctgattgagttgagtgagcgggtgcgtgtgtatgtaatgggttatagatctgcatgtttagttttgatccttttcctcatccttggaattggaactggaattgcttcgtctgagactccgaggcccaaaaatgtccaagcttcccttggcgctaagtggtccggtactcctctacttctagaagctggtgagttgttatctaaagaagaccctcgccttttctgggacttcatcgacatttggctcaatgctgctgccgacgatcaatctcattccgcaaaagcttgcgtcatcgaaattctacatcacgctcgtcctcttttgagacaacccttagcgtccttgttcgagttctctcttattctcagatcagc

SEQ ID NO: 67383 - DNA, 307 bp, Glycine max
atcacgcgtcggccgacagactattgacggagccggagagtatgcgcagtatacggtgctagatcatgcggcgagatctttgaagtgcgccgtggctttacatgtggagacaatagcacgctgagctcttgaaactggatacacgatcgtccaagactgagatgacaggagtgtagagtggaagctggatatggagctacatacttcgggactggggtccacggctatgttattgggtgttgcatccattatactgctattggcaaatgagatatgagtctatgggatcagcatctgatgcgggaaa

SEQ ID NO: 67384 - DNA, 289 bp, Glycine max
taccggtccggaattgccgactcgacccactcatccgtccacacatacactgacaacccttctggctacacaacaaggatactctccacggtgcacgaggctactttgaaggtgcctgcacttcacaattactgaatatatctacctagaacttacaattcaatacacgatgtccaagactcagatgacattacctatagtgtaattttcagatggatcttcttacgtcaatccaggtacccacgcatatattatagtgaatttcctcaattattctgctatttgcaaa

SEQ ID NO: 67385 - DNA, 132 bp, Glycine max
tctatatatagatagatatatagatagatatatagatatatctctaataaattctaaaggacttctttaaaattcttttatttaatgtttagttaaccaatattgtattttaattaattctttgaatcttga

SEQ ID NO: 67386 - DNA, 427 bp, Glycine max
ggtgaaccccatggttacctattctaactcacatataggataaatcttttcataagtcttaagttgtcaagaaacattgatcactatttgtcctcctacaagcactcctctaaacttaaaaattatttcaaatattttactactccaataaggacctacgcgactaagatagcactcaacaatttacagtggtcgacttctctatgaacttatggcttactccttacaaggatctcactcaaaaacttaaacttacttaagtcatcttcagcaagcattaaagttaatccaatgagtcctaaaataaccttttggttcgactactaattaagaacatttcatcttaatcctagggttcctctcatcttaaaacaacttctggccaagaaggatttgtaggtatctttcacctagacgtagcatactt

SEQ ID NO: 67387 - DNA, 210 bp, Glycine max
gtaccgtgtctcgaattcccgagtcgacccacgcagtccgtccacacactcgtggtcgcgtactagtactcgctatagcttactattatttggaatcctggcctaacaactcgctggcttgctacattatgctaatgttatgtaatgacatcctttttcatttttaacggactgcttactactgttcattacataactatcactcattaa

SEQ ID NO: 67388 - DNA, 309 bp, Glycine max
atgtacttttaattgttgtaggctataatggaaactttcacggtttccattgaattaatatgtcagttcattcttactttcgtttaccaattatataattaattttttaaagcattttaatatgataatttcttttttatggtaattatgatattaatattaaataatttaattgggagtaataattaatatttatcaaaaatcgggagtggatattaaatggatattttttttaatataaattattttatatttaagatggattatttaatttagagatataaatccatattatttatataaatttta

SEQ ID NO: 67389 - DNA, 253 bp, Glycine max
ccggaatgaccgcatcgacgcacactttccactagttatatatcattcactatcacggttgccctgaaaccttcaacgaccgcttcatggggcaccgtgaacgtttacaccggataggctaactctgatcttactggaaacaacctttccgctttaattgcacgttacgtgttcaaatacccagatcttgttcatgctcttacacataataaccataaccacatacaatataattgtacgatccctgacttct

SEQ ID NO: 67390 - DNA, 235 bp, Glycine max
gtactcgaccggaattcccgggtcgacccacgcgtacgcgtacccatgtgtcacccacgctgttctaaccactcggttcctcacccttgcattcgggccagcctataaacgtccgggacaaacacatctattatgtgcaaacacattcataataccatctcataaatctaaacaagaacattcaaataaaagattcgtgtatcttaatgtgtgccatgccttatgagataatgta

SEQ ID NO: 67391 - DNA, 450 bp, Glycine max
cccggatggaccgcactcgtggcacccgctcgttaaaacaacagaggctgatctaacatgtttgtctcacatgctatgcattcgaactgatgcactggatagacggacacatacttaaagccctctgtcacaaagctctatctctacagcaagagacataaccattgtaaatcaaactgattccaatgagatatcctcaattgatgacatggtagatcaacatctgtatgtcattattttaacccaacaaatggattcacaatgaaacaaacttatgcctctttatcaaacagtattgacaagtcttatcattcattaagaaattgtttaattattgaaatatgccttctctttttcaaatatattactctactgaagttgatagtcactttcatgatttttaaaacccaatccatcattagaaggtttttgaaattcacttttatccaa

SEQ ID NO: 67392 - DNA, 382 bp, Glycine max
cccacgcgtccgcttctcttgcggctagggttttagcgcagcttcttctagatttaagggagatgggtaaggaaaaggttcacatcagtattgtggttattggccatgttgactctgggaagtccactaccactggccacctgatctacaagcttggaggcattgacaagcgtgttattgagagatttgagaaggaagctgctgagatgaacaagaggtctttcaagtatgcctgggtgcttgataagcttaaggctgagcgtgaaagaggaatcacaattgatattgccttgtggaagtttgaaaccaccaagtactattgcacagtcattgatgcccctgtacacagggatttcatcaagaacatgatcactgggacaat

SEQ ID NO: 67393 - DNA, 299 bp, Glycine max
ttgccggtggaggacgcgtccgtcttgacatacatggaacccctataaaagatatgccaagaggaatgattaagggaactgggcgcaacatctgggtcgctggtgagactgcaaacactaagagaatggagatcaagaattaggaggactttcaaatcttccaggacagacccctattgggaactcagataatgagccccaaagtggtgacccctttgaagccaagaccatgggtaatagacacattaatcgtttactgatggcattggattgggactaccacatcagtacctgcttcc

SEQ ID NO: 67394 - DNA, 89 bp, Glycine max
taccggtcctgaattcccgagtcgacccactcgttctcccacgcgtccgtccactcatccatttacttttcaaatgaattcccacattc

SEQ ID NO: 67395 - DNA, 133 bp, Glycine max
  unsure (1)..(133): unsure at all n locations
cacatagtgtgaggatctctgtacctctcactgtaagatgcacatcttattcaagacctgnagatgctataccatagcccatgaggtggaaagctctgacaccaaaaactacgtcaaggctaagatcacatga

SEQ ID NO: 67396 - DNA, 175 bp, Glycine max
  unsure (1)..(175): unsure at all n locations
tcaccaattacaagttatatcaagttaacaaacaactcaagaaatgggcgtaactttatatagtngcggagtatcacattttttctttctctcttcccaaccaactaacaccatcaacattttctcaaatcaaaattatttttttttcctcttaccccaaaaatttaaaatcttt

SEQ ID NO: 67397 - DNA, 369 bp, Glycine max
gacaaaatgatgtaaaactgtttgagcctatggttggatctctccccaaaggcaaaaagagttaaaaatattttcaagccaaccaaccggacactttgacaaaagccagttgggatgattatggcaaacaagaaaattcacgcagtggtggaaagcttaattctttagtgaggatttctgtcattaagaaaccagtgacctcagatgttaaaagtcctgcagaaccagaacaaaagaaagaagaggaagatagtaaaacaaatactactagtggactactatctttgtgtcaaaactatggaagtgatgatgaggactagtagccataaatattgaatgacttttttgttaactgttgctctcattgga

SEQ ID NO: 67398 - DNA, 190 bp, Glycine max
  unsure (1)..(190): unsure at all n locations
gcgtacgcccacgcgtncgcccacgcgttcgcccacgcgttcgcccacgcgtccgcccacgcgtccgacgggttgctgtatctagttgagaaaagaaacaagtataagtagttgaagagatgtgatcactaacaacactgccaatgggcattgccgcgatcacttgttcagaaacaatacatggcgcatt

SEQ ID NO: 67399 - DNA, 432 bp, Glycine max
cggaattcccggtcgaccgcacgcgtccgcccacgcgtccggtcaacttagatgttgaaatttataaaatagaaaaatgattcctaaaagggtgcattatcaatcgagttattccttgaaattctaatagtcaatgaaattggtctctaaaattaagaaaattgcaaaatgatcccctaaacatcaatcaatttagtccctttagctaatatcatttaacctcgttaaaaatattaaattgacacgttaagtgcttgaggcagctagacaaacatagttgtcataccatagtgatgatgaaaatgactaaaatattgatgaaataataattaattattttcattctttaagtcaatgttcctcctcttctcattagttttacattagtctttcaatcaattcattgaggaaacgtcaccacagtaactcata

SEQ ID NO: 67400 - DNA, 247 bp, Glycine max
tccactcgtccaaaacatagaacaaaacataaaacttcatactaattaacatactggagggtacttatcactctgatgacgtggaaaaaaaaaatggaacgaatactgactcaaattcagatcagaaatgctaactgataatcttagttcttctgctttcccagttcactagcatgtaaaaaagcatgatacaacgatttataatacatttcaacctattctttatcaattatttacggaagaatta

SEQ ID NO: 67401 - DNA, 118 bp, Glycine max
ctctctacaaaaagtgtgtgtgagagagagaaagattttgaatttttgatatctagagcgcgagcgcgtcacccccccaaacccaactctgtccagagatctctctctctctctctct

SEQ ID NO: 67402 - DNA, 180 bp, Glycine max
ggccatcattgtcaagaacgttatctaatacttgccagcatttgattatagacatagccggctacacatagttggatgaacaatttctaacgaaggaatggaactttaatttcaagcaaagcataaagctaacaaacatggaagttcttcataatcaaggtcttgcaatccgtgaaattt

SEQ ID NO: 67403 - DNA, 60 bp, Glycine max
gcggcgcaaaattaacagaaaaccccaaaaaagcctcacttattttattccctctcatgt

SEQ ID NO: 67404 - DNA, 92 bp, Glycine max
cagacagaagaaaatgggaagcagaggtccacctcaatcccatccaaattcccctggccttttcaaaggttacaacttcgctttcacttggg

SEQ ID NO: 67405 - DNA, 258 bp, Glycine max
  unsure (1)..(258): unsure at all n locations
cgcgtccggcactatacactcccatttcagcttccatgtctgaaccacacaaacgtancaatctgaaagcntcaacttcaaccctggtcagcaagaaagagttcttagtaagaattagctggaaaaaagcatattctcactccttctagggtttttgttttgcattgaaattgaaatcccactattcaaaatccccgaccttctctctagaaaaagaaatagtttttttttgtgtgtgtgtgggaagggtttaaattt

SEQ ID NO: 67406 - DNA, 57 bp, Glycine max
ctatactattgatttaacaccaagttcagacagaacgcagcgaggtacaccctatac

SEQ ID NO: 67407 - DNA, 149 bp, Glycine max
  unsure (1)..(149): unsure at all n locations
tcttcttcttcttcttccgctgcttggatctgcacttttcggtcttttctttcattgccncacgcttacatcggttggcgggtncaattccaattttggctttgcgcgcctttgtttttttcctcgcactcacataaaagctttttcgc

SEQ ID NO: 67408 - DNA, 198 bp, Glycine max
  unsure (1)..(198): unsure at all n locations
gaacaatttgntcgtcttccttgttcccaactattgtagattgcctcaaaaacaccctgagaggagaaaagttccctcttcgcgaaacttcaaccaaagcattgggaaagctccttctttatagatctcaagtggatccttctgacacactgctttacaaaaatgttctttcattgctaggttcatcacacatgatga

SEQ ID NO: 67409 - DNA, 77 bp, Glycine max
cgggtcgaccgacgcgtccggtgcctctttctacttttccctcattgcttctaactcaacaattgagatctcacact

SEQ ID NO: 67410 - DNA, 145 bp, Glycine max
  unsure (1)..(145): unsure at all n locations
gaatacccggccggacccacgcgtccgcaggcacgtgagataaaagaaacccaaaatttcgctcactctctcgaacgcttnccgaaggcatgtgtaaaccaaaccctacgcgcaggatccccaatgcttcaacacccacgaggac

SEQ ID NO: 67411 - DNA, 94 bp, Glycine max
  unsure (1)..(94): unsure at all n locations
cgggcgcgtgggcggacgcgtggggttatttacagngtcacaaaatatatgggatgggggggaaaaattcataaaatagataatctgtgactcg

SEQ ID NO: 67412 - DNA, 387 bp, Glycine max
  unsure (1)..(387): unsure at all n locations
cggtccggaanncacgggccgacgcactcacgcgtcggcccacgcgtccgcccacgcgtccttccacgcgtccgcccacgcgtccggccgtatttataagaatggccaaaacaacatctaaagacctaaaacaacacaatctaaccactctatcatagaaaaccctgattctgacaacacactcctcataactcctaaactcaaacacatcattaacaacaattccaatcactctgaattctctctctcattatctcatgttctacttgaaactaaccatctattgaatctgaagatacccaagacttgcctttcaagagtgctcactttaatgtcttgggcttatacaggggtatttaattctgggatgacatagatacttgcctt

SEQ ID NO: 67413 - DNA, 410 bp, Glycine max
cggaattcccgggtcgactccacgcgtccgcattttcagacacgagaacttcattggagaaaaatggtggccgataattggggatacagtacacgaaggtcttttagttgcataatttgatttgaggatttgaaatcagaaacgtatcatttacttagtgagagatttatttattttatgttaatgaaatcataattcttaaatttggagttgtctgaatttaaaatttgtaatgaattgagaaattgaaatgaaggaaacaactagtagaatggtggtgaaccagtgggcaccggtggtggtaggggagttaacgataattttaaaaaaagttttataataataacaaatttcaatccaaatatattaaaaagttgatatatctatcatattttaagtagataagcaaa

SEQ ID NO: 67414 - DNA, 192 bp, Glycine max
cggacgcgtgcgacaacgcgagcgcaaaatatgcagaacacaagagattgtgccgcgcagctaatgatgcaagtgctctaggctatcacagtctatatcatagactgtacaagaggcaagacatcagaatctgagacaggctaaaatacctaaagggccacggatcccagaaacgagcttaacataacctgg

SEQ ID NO: 67415 - DNA, 199 bp, Glycine max
  unsure (1)..(199): unsure at all n locations
gacccactcgtccgcgggtgntctacaactagcaacaaagattcatcaagcanancaaccncncnccccaacgccgaatcaaaacagacatgggncngaaggaagattatgagcaggatgctgagaaagcaaagactgagccaccgactcaatcaaacgaagactagcttatcctaaaaagattgcacaagcaagccac

SEQ ID NO: 67416 - DNA, 316 bp, Glycine max
  unsure (1)..(316): unsure at all n locations
aaacccggcgcggacccacgcgcgcgcgagatccaccactagcacacagcattgatcacccatactaatttcccacagaaaagacgccacctttctttttccgactaaaggttcgccggaaaatgcctctatcctcctcttcctcctccgccgtagactccgccgtctccggcgagatcatgctctttggcgttagagtcgtggtggactccatgcggaagagtgtgagtatgaacaacctctcgcagtacgagcttcctcgcgacgctgccaacgccaaagacgacgccgcaggatacgcctncggcgatgatgc

SEQ ID NO: 67417 - DNA, 384 bp, Glycine max
  unsure (1)..(384): unsure at all n locations
cggaattgccgggtcactccacgcgtcggggctttgtctatataaccaccgtttaccctctctatctgttctgttctagagttcatgctaaggaggtagttagttactatgcctatgcctatggctgcttcgacttcaacttcaacttcaacctctctctccgtcgtgggaactggcctcgccttcccgcgccatcctcccgccgtattctcctctgctcgttntcacactcgattgcgcagcaacaaccgtttcttcctatcttcttctcttccaagtgaaagaaggaggcataaggctgtttgtggcggcggattgggattattgcgaatgaacaagtctcgcggcggccacgctttcgtcgttggtgaaccctcgtttttg

SEQ ID NO: 67418 - DNA, 307 bp, Glycine max
cgtgggataagagcatgttctggtgtgggcgtgctttgctcacaaaaaaggaggccccgtctcatcgatgatttctcttacatgctctatttaggatcatcccttcaaagaaagtctctggcttttcttcatatgtagctctaaaagttactccattaaagtaaaagcacaatactatatatatatatattgtatatatatataatcttcatacgcggttaagccttgcaatgttttttttcaatgaatggtttgcgtttgaattgaaaaacccgcaaagaaagcatcaattctgaatggaggaagg

SEQ ID NO: 67419 - DNA, 180 bp, Glycine max
  unsure (1)..(180): unsure at all n locations
aaaacccggcgcgacccacgcgtgcggaggctgaccaacaaagcatccttgattacttcaacaaacatgggcctggaatnaagcaggctcagattgcaccttcaactgagccagcagctgcaccagtagcacctgtggtacctagcccctctgctataggactcatagcgacgcgagagg

SEQ ID NO: 67420 - DNA, 239 bp, Glycine max
cccactgcgtccgctgattacatttctaatctcattctctcttggttcaaacactctctctcatggcgtgagggaagattaacaggatcggcatccactgatttgagaagatagacctgcatcttctctaggagggtgtctcatgaactattgtcttgataaaacccagaaacgaaaccttcattgcgccttggtacatagcttgcgagagattattcgtgatggcatattctgagaac

SEQ ID NO: 67421 - DNA, 257 bp, Glycine max
  unsure (1)..(257): unsure at all n locations
aaacccggccgagcncacgcgagcgggcgcgcgtccgctaaaccctatggcctactaagccaaagccaaaggcaacgcagcgangggcctccaagactatcctgccgccaaccaccacnacnccgaagccancgcccnggcacccaccaaccaaagccacaaagccaaccgatccgacgcatacacctccctcaaaaactacgcagatgcataagcagaagccaaaaagacagaagaactcaagcccgactggtcca

SEQ ID NO: 67422 - DNA, 149 bp, Glycine max
aagaatgaaaggatcggcagcaacggatacggaaggattggccgtttggtggccagggaagccctacaaaggaatgaagttgaacttgttgctgtcaacgaaccattcatcaccactgattacatgacatacatgggcaaggacgacac

SEQ ID NO: 67423 - DNA, 272 bp, Glycine max
tggatattatagatgatgaatctgatgtgattagatatatgatttaaaactaagattgaccattaaaagttttactgattcaaatactactctaatataacggagatgatctacatttatgcagtagtattcttcggtttcttttcacatttcatttagtgtaattgcacaaggattaagtaaacaattaatgagtcaaccaggaccactgcacgtgtattaaggaaaatttggtcgaaattcaattttaaaagccactggtccccccgcta

SEQ ID NO: 67424 - DNA, 148 bp, Glycine max
atacccggctcgacacacgtccgctagcgcttattctccttctcattttgaattttaacaagtgttgcgtcttcaaagaaagggggttttataatagaaagacactgacgcttactatgaagagctcatcgactacgaagaggaagaa

SEQ ID NO: 67425 - DNA, 189 bp, Glycine max
cgtccgccgacgcgtccgcaaaagggaggcaatattaggaagaggataaagaacgaaaccggacgaaatagtctcagatatagcaaaattacaagatgcaagatggagactaaatgtaatagagctacgatggcaataaaatgtcaaggtatcaatatggataacaaaagagatgagagtgtgatgaac

SEQ ID NO: 67426 - DNA, 259 bp, Glycine max
tttttaacttctacctccactttttcgcccacgcgtccggtggttccgttggcggaaaatccagaagagggaaaagaacgttgttctctctgttaacgacaattcgattccattgggtgctgctgtgtgtgctctcagttcccaaatcaaatctcaatagtagtactactattcataaatcattgcattggttcactttctctgggttgcgttctgctcctttgggcctggccatggctatggcagcaacggctgtggt

SEQ ID NO: 67427 - DNA, 182 bp, Glycine max
  unsure (1)..(182): unsure at all n locations
agcacgcgcacgcacgcatgcacgactatttcaccaacacgagcctatcccccgagacgggtgancccacgaaccaaaaccgcaaccacatactcatcncattcagaaacgcaaccataaccactctaagacatgaacccgcaaatcctgacagacgaaactcagctcctgacagcaacgac

SEQ ID NO: 67428 - DNA, 101 bp, Glycine max
  unsure (1)..(101): unsure at all n locations
acgccagtcacgcgtcggggganatttaacttctagcttgcataaatcatccacgcgtccggtggttccgagggcggaaaatccaaaagagggaaaagaac

SEQ ID NO: 67429 - DNA, 251 bp, Glycine max
ccgacgcgtccgtggacatgaacaacgatttcaacccaaggatcagcttcctgggaagagtgctatcgaaatcatgctcttgataccgagatgtgagtattgagaggaacagcaccagtgaggtgacagaacagcaacgagcaatgagagatgcaatggcaaaggctttgaattctggcctgtcttcaagggttggggcacctggggcatctttgaagttgccgggaatggtggtggatgtggaaaaggct

SEQ ID NO: 67430 - DNA, 190 bp, Glycine max
aagggcaaccatgtactagtctctcaccgtgtgagaccacagcatgagaacaaacaggtgcagaaacagcaacagcctatgaatatgttatctccagaagctggttcatccagtgttgagggtgcatacaaggactcatccacatctaaacacgggaggagaactacgacgcatacgattgcaactccga

SEQ ID NO: 67431 - DNA, 201 bp, Glycine max
ctagtgcatttctaatctcattctccttttgtttaaacactctctctcatggcatcagataagaagattaggatcggcatcaacggatttggaaggattggccgtttggtggccagggttgcccttcaaaggaatgatgtggaactatgtgctggcaacgatcctttcatcaccactgattacatgacatacatgttcaag

SEQ ID NO: 67432 - DNA, 221 bp, Glycine max
tccggaattcccggtcggaccaacgcttccgccaaggcttccgccaacgcttccgaagccttaggaaatttggaattcctgggcctgaatggagcggacggtttgtcctacgaggacgtctttcaagcctttattgccggggcgccactcttagagttttactcaaccaagtccaaaagttttgttccctaccaaggtggtttgcaccgattaaaaagggg

SEQ ID NO: 67433 - DNA, 403 bp, Glycine max
cggttcggaatgtccgggtcgacccacgcgttcgatctctgtctccactgttgactttctcaaacctctacctcttaacaaatacctaattatggagattatattaaacctgaattgcttcaagcttagctattgttcccttatcccaaaccatcttccaagcaatgttatgtccttagctgcactatcttattctgaacctctaccacccaccatgtctctgcattaccatctacttgtgattatacatcacggagctcaacacattcaacatcaacaacactgctacaacacatgacaccataaccactaattgctgcaccctcatatcttttgcacgcataagcctcatactcaccacttactcagccgcattcaattcacagctcactaacgttgactt

SEQ ID NO: 67434 - DNA, 398 bp, Glycine max
actcggtttcggaatgttccgggtgcgacccacgcgtatcgcattgatatgggagttataggaccatatgaaattagcacatgcgtcatcaaaactgggcattctggtggtcactcgaagcacaaattactcgctgaaaagagagcacttcaagcacagagttgtgcttgcctcgttgacacagaatataccctctgatagggcttcatatggtagagcttgaagagcgacaaaggggtctgatatatctttgtggaagctatctccaatgtgtcattgagccacaatgtgtcagattatgatatcttggaaactggcaaaaaaggtcatgtgagagagcacaattgagcacactatgaggagaatttatacctgacacaggtgtagagaggggtagc

SEQ ID NO: 67435 - DNA, 185 bp, Glycine max
ctcactctttctatcacctttattttgaactactcaacggctatgcaggcttttattgatgggccatgtcatagacatgtacgtaaagcacatgctgattcatgaatcacactgcatcttacactgggattcatctactatgcatttacactctgcgataatggcctaagaagcttatctctgcc

SEQ ID NO: 67436 - DNA, 308 bp, Glycine max
gaattcccgggtcgacccactcgtccgttctctctttctatctcctttatcatcaactacccacctcctctgctatctttaatcggtggtctattccataaacgttgtatgtcaagctcatgctaataacagaatcacactccaactcccactcccattcatatactatacatttacactctccgataattgccctcctaactactctattcctgtctactctattatcatgtataatcaccttcacatcatcatctctaataccgttcacctacctctagatactacacactctactctttacacta

SEQ ID NO: 67437 - DNA, 51 bp, Glycine max
cgtccgcccacgcgtccgatcggccaggaccaaacagcttccgcggcagcg

SEQ ID NO: 67438 - DNA, 384 bp, Glycine max
cactcgtatcctgacgcgagaattcatactattagacttatgcctttgcaatttattacgcggctactgattacatttccaactattggtactctttgtcttggtaatgctttcttactaagacaacgcttcattttaacatgctagtgcatacctaaacctgtctgctttgccatcatcaacaatactgatccgacatccaattgcaagatttcaacgtcaatctacagattttaacctttcaagatgaaaagtcaataatgtgaagaccgaattggttaaattgcattcacagcatattgataaaacaccctatcatattgaatctgctatccattgtacaaagtattttaacccttcagaagctatacattatcgcattat

SEQ ID NO: 67439 - DNA, 423 bp, Glycine max
atacatttcagcctctcaactatcaatttctactccagcctcctggatatatattaaatccaggcagtccttatcaaatttattgacgtcttacttgatagtctttattgaacatctattgcttccactatttctgtgtaaaatgtcagactcctttgactaacccgactttcaattctcatatttgttcaaatttctgctgactttatgatattcttctctattttacgaaaattcttaacccaattttgcttctataccctttccaatatttgctgcactgtactgtattctctttatcctttttgcttaaattgaatatcaattcttcagttcacaaacattaactccatataaaatcttattatcattttactcacacttttccttgaaatatctattcctcaattttttaatcaatac

SEQ ID NO: 67440 - DNA, 239 bp, Glycine max
accacgcgttcgctacgaggtctctccaccaccatctccattactcctatgcgtccaagagggcaatcttcctctggctctctgcaactaccgcccttgtcctcatcctccaccttttccgcgcctccctctccactcactatttggccattgtcaccaactgggtcgacaccaacagcgccccttcttaatccgaatctcaccggcataccttacaacaacaacgacaactacggaaa

SEQ ID NO: 67441 - DNA, 343 bp, Glycine max
gtcaccattagcatcaagttgtttaaacacatactctagtgcttccttgatgtgggtgcaggaatgtaacgcaagaaaggcgaacattttccatcgagaaattctcaacagaggacaaaattgaatttctgccggaattcaacaatcaagcaattaattagcttgcaaattttactacatgcagggaattcagcaatcaagcaattaatggtaaacctcagttagaaccagtggatatcttttcaagaaaaatagaaggcttttggtcaagatgtcagctgtttgctgattggaaggcacaaatggcaagcaaataattccagcatccaatttctcaaataat

SEQ ID NO: 67442 - DNA, 171 bp, Glycine max
ctttttcccgggtcgaccgacgcgtccggccacgcgttcgcccacgcctccgaatcactgagtctagcatctactaatctcaatcggggagcatcattcatgactgcttacactatcaatgtcgataaatgctctaactctccaactgcgcacgctctgtcgctgtgtgag

SEQ ID NO: 67443 - DNA, 376 bp, Glycine max
ctgatcgataaatgcagcatttatctgctttaccttttatcaaaacttataggtgtacattaaaatctttaaggcatgctatggtcctcttaatctaacatatctagcatctcaagggctatacaaatacaccctggtggtactccaaatctttcaatgttgggcatggctaatacaatgcagcgaccaattggacctattggtccaccgaagattattgctgggatgaatctttatattagtcatcatcatcagcatcaacatcaacaaccccaaccccaacaacaacatcaacaacaccaacagcaattgcaacttcaacagcatattcatcaacaatttcaacatcaacaactaccagaaacaactttacaat

SEQ ID NO: 67444 - DNA, 345 bp, Glycine max
accggatcggaatgcccggctggacccacgcgtccggtagcctgtcattactcaaacattatgggttccaaacactcacatcgattgggaccttggttctttcttacacgctgcacattcgaaaccactgaattgtaacctttaactttctccaaaatggcttgcatataattgacattaatacacaccatttatcaacaaaaaatgaaaattgcattgaccctaataaacaattaatggcctttacaatatgcacttacatagaactcataacactcgcatattcaccaattctactaactgaccaatctgaactgctttttcgtattcatgcataacttcata

SEQ ID NO: 67445 - DNA, 285 bp, Glycine max
cattacccaaaacactttccgccgttttatcaaatacaccggagaacaacatcaactatatctctaaacgcacactcaaatacaactacacttttaacacaaacccaaattctcatataactccccaattttcctcacctcacaatcattattaattccattatactcgtacaaactacaattacacccagccaacacttcctctaaatacctctttacttcatttcactaatcatatttttacacatacaaaatcactatgtaactacatacaataccactttt

SEQ ID NO: 67446 - DNA, 312 bp, Glycine max
acccacgcgaccgcaagcatccctctacattagcattatggtttgtgcttatagataaaagttgtgactcatgaacatttttactcagatcatagtctgtatcactgtgttaaacaatggctaatttctttgctgctatgatcttcacactcatttccattaccatgcttcaaacaatggttatggcttctaatgagcaatgaggccacttgtatgacaacaataacatatatgatagtgagattttcaacatataccattgcccatcacaatgctcgaagagatttaaccagacccaataccacaatccct

SEQ ID NO: 67447 - DNA, 281 bp, Glycine max
tcccggctggacccactcgtccgtcagaacttcccaacacccatttttcctaccccagacctactcatcacttatgccattagacttacttttcattaccttagatttcatctcgccattaccattcacattcactcacatgaaccaatcttcatcaatacacctctcattgccgaataactgattaaatatcatcctaccattttaatcaaggtccatacgtccaaagccttctctaactcaacatcaaatccagattatcccataactactgccgaact

SEQ ID NO: 67448 - DNA, 279 bp, Glycine max
ttccccttcttcccttcccattttttaacttaaaaaaaaaaccattattccagaaatactgcaaatttttaacaatctctcggccttctaacaaccaccacctcctccattcttatctccatcttacctactatccctactactactctactctatttacacctattatcaaaaaactatccccctaccccaaataaaaaccccaaatcatttcccttatcttttattcttttaccaatttctcataactaaatttttatcctctaaaatctaattttt

SEQ ID NO: 67449 - DNA, 306 bp, Glycine max
attcccgggtcgaccgcacgcgttcgagacactcaccgaggagtccttacaccggacttctgggacgaactctcgtggccccttggggtgaaccacggacgcatgggaaccgtctgaagcacatatcgagacggctgatcatactactgacgacagttcaagtggtggcactcaagcctgagtacagtacgtacgcgaagcttaatgcggtagctgttgaaacggcgaagatcctggttaatgaactgaaaagcactcacattacagtgacttgtattgcaccaggacctattgatactgatatga

SEQ ID NO: 67450 - DNA, 185 bp, Glycine max
cgacccactcgaactatattttttcattccacattattttccgtgttccaaacaatgaatttaattatgatctttggttttttttacaatcttcaaattctaaatctcataattttaagcttcaatcttcaccattattccagtcttattgttcccatcaatactccccaaaaaacttccaaacc

SEQ ID NO: 67451 - DNA, 385 bp, Glycine max
  unsure (1)..(385): unsure at all n locations
tcccggntggacgcactcgaccgccggcacttatcaatttaaactcttgtccttaacaaaaaacgttctctctagaggcaatagagaaacttccaaattggggcgccaaactacaattcatctatcgaactacacaaatactatggatatccaactgtcatcgaccattaccaattaacctacgaacagatcctaaccatggacactatattcacaacgatcccatattctgtcgacaaaatataaacaactatgaacaatacgattttcagatcctaaacatcctaataacaattcataacacgttcaatgatccaaaaactctggctgatgcttgctataacctttcacagcatatccactgccattctactagaccgatcat

SEQ ID NO: 67452 - DNA, 354 bp, Glycine max
atagtattaaccacttttaacccctatattaatggttaataatcgagtccaaaggtaaactatcaaggttgtgaagttacataccactacttaattaccaaaatgtaaccaaaattataagaatgtggaatccagcatcctacatcctgtaaatggacaaaatcttaatggaaatcatccttcaatacctgacttagaatgaaaacctttcttttgttctactgcactaatgttcattgctcctgtcaacatacttaatcaagttcataacgcccaatccatgaaattacgcaagtcttacaataacaaacaattggacgttaattctttaacctcaaataatccaaattataa

SEQ ID NO: 67453 - DNA, 385 bp, Glycine max
attcccggctggacgcactcatacgtaaacacttcccaaaataaacttttgccctagcaaaaaatttcacctttagaggcaaaagagaaaattttaatgtcgagcggttgtctaaaattcacatctgtttctacaactatagtattcatatccaccactaaacatattttattatttaaaaaattattaaatctcaacctaactaactattctactatcataaaatcaaattcttcacatactcttcataaaaatcatctctactcatttatattacctcacatgactccaatgtacagatattcatctgttgccacatatactgtgtctatgccttctcaaaagctagaattcattggtgcaatactacatgagtggcttttaa

SEQ ID NO: 67454 - DNA, 336 bp, Glycine max
acccactcgtacgcatgacaattattaaccactttcaacccctatatttacggttaataatccagtccttagagaaactacaccatttatgacacttccttccacatctaaactaccaaacgataaccaaaaccctaagaatcatgaatccagcataatacattctgttactagacaacaccttcaagctaatcatcttctacttactcactaacatctaaaaccttcttttcattctgctgaacaactgcttaccactcctgtcaacatacgtactgaccttctcaatgcccaatccagaaacttaggcaaagcttcgaataataaacaattgga

SEQ ID NO: 67455 - DNA, 244 bp, Glycine max
acccacgcgtccgatctctctttcttttatggaatttatcaatctagatccacttaacaataaggggcctaagtggcgattattgaacctctggggcttcaattttaagactgtttgccttctgccaaaccatactacaagcagactactcaccggagctgcgctacccttccatatatttcttacacctactcttgcacttcttatgcacatactgcttcttcaaactttcaaataccacact

SEQ ID NO: 67456 - DNA, 301 bp, Glycine max
gtccggatattcccgggtcgaccgcacgcgttcgaccacgcgtgctgcacagagccctctattgaggtcacacatctagactgcaatcactactgatgtgccacatcatacatgagcgggtcagaacctatctatacagtcttacctggtgtccagacttatccccaactttaactctatcaattatactacatccagttcatacgtcaatggcagaatgcactcgcctgggttcgctgttgtgtcacccgtatcttcagctactagccatgctccagcagatatccgatgtacatgattt

SEQ ID NO: 67457 - DNA, 257 bp, Glycine max
ccgaattccccggtcgactcacgcgtccgcccacgcgtccgtccacgcgtccctccacgcgtccgcaaattagttcattctgtttgcgcagttccctacctctcctttcaagatgcagatcttcgtcaagaccctcaccggaaagaccatcacccttgaggtggaaagctctgacaccatcgacaacgtcaaggccaagatccaggacaaggaaggaattcccccggatcagcaacgtctcatcttcgccggaaagc

SEQ ID NO: 67458 - DNA, 252 bp, Glycine max
ggatccccaacatcactagctagctccttttgtacacactctacaaccccacgtagctacatcacttaattagttttcccatatctataaccaatttcaaattctcacccttaactagctagctatatttcataactgattattaccaactcactacatattatgggctaggattcaccattggacttaaaagtagtggattaataatatatataagatgtctagcaggaggtcacggtcaaggcaaacaag

SEQ ID NO: 67459 - DNA, 268 bp, Glycine max
cggaattcccgggtcgactcacgcggtcggggtcactaacactactgtaaaggcttcatcagtccctatcaggcagcctcacggtctcctctatcgctctcttcctaatcgcatctcaactcgtcgtcgtcggtgattcattctgcctaatcataaccctaatcgcatcttaaatcgaactcaatcagagacaaaacagagtcgatgattctgttacaaaacatagcacggtggacaaacgttaaacaacgctacagatcttcgattc

SEQ ID NO: 67460 - DNA, 92 bp, Glycine max
ccccaaccccaactccaagctaggtcatcgtcaattccgaagtcgaacggcacagacgcaacgaaacccctcaccgaagccccagggatgaa

SEQ ID NO: 67461 - DNA, 112 bp, Glycine max
gggacgcgtgggcgcgtgagtgtgtagaagagacaaaggtgcagttctgggggttggcggtgaagaacagaacacacacgatggggaagaagaaaggtaccagttatcaaaa

SEQ ID NO: 67462 - DNA, 244 bp, Glycine max
acccacgcgtccgggaggatcgaacacgagcctaattgtgtgtcagagcctctcaggatgcttcggggtattccctatcgctgtctacctaagcgcatatcaacttgccgtacgaagggaatcattctgcatagtcataaccctaatcgcatcacaaatcgagctcaatcagagacagatcaaaggtgatgagcctgctacagaacatagcacggtggacagacgtctaacgacggctcagatc

SEQ ID NO: 67463 - DNA, 374 bp, Glycine max
gtgcatcttaccctctaccctaaacttggtctctactgcagttccttttctaaatacagatgtatgttcataagtgatgatgaatatatctggattatgattgaaatattgaatgcatgatattcatgcatccttttattctaaaggtttattttagttactccgtttactcttacatgtactgcgccttcaaatattgcagtcactgattgacttgagttgatggcaacattcttttatgttctaatacacacattgcatgagacgagaaaagaatcagatgtctcaggatgtaacataattgtacatctcctcgaaaagacggaatccaagttcttggacatgctgattcaaatcaccgctgagctcacttt

SEQ ID NO: 67464 - DNA, 139 bp, Glycine max
gggacgcgtgggcaagcccgaagattacttatgcgtatgttgctcatagactgagaggtttgaagccatggatccagcaaagagcgtatggcgaaaccatcccacatccacctagagaccaagctaagtccatggagcc

SEQ ID NO: 67465 - DNA, 231 bp, Glycine max
caagaatggatgatactggaagtaattcgtaactgtcgaatccatggatgctgcacttggagaaactcgatctcgaactcaagagccctctatgtttgagttagcacaagaggccggtgttactaccatgcaaccactcgtactgcaatacatgtctggctgattgcataacggctgggcctagatgtgctgtttgaacggcaacgtatgctcaaacgaatgtaaggcatg

SEQ ID NO: 67466 - DNA, 106 bp, Glycine max
gttgcggctagggttttagcgcagtttcttctagatttaaggaagatggctggggaaaaagttcacatcagtattgtggtcattggccatgtcgactttgggaaat

SEQ ID NO: 67467 - DNA, 79 bp, Glycine max
caggcatatgcgtcaaactgttgctgtgggagtcatcaagaacgtggagaagagggatcctactggagccaaggtcacc

SEQ ID NO: 67468 - DNA, 300 bp, Glycine max
ccagaacactggttctttctcccacttcatctccaccttttccctcgtgatcatcgacggggcgagaggcgcctctcaatctcaatccacagcgtcccacgccaccacgcgaccgggcgtgatggctcctcgcggcaccgctgccgccactgccggcatgcgccgtcgccgactcggcggaggaaccagctccgcctcggtcagcggcggctccggcgccggcggaagcaatatgctgcggttctacaccgacgacgcccccggcctcaagatctcgccgacggtggtgctcgtcatgag

SEQ ID NO: 67469 - DNA, 196 bp, Glycine max
cggaattcccgggtcgactcacgcgtccggggacgcgtgggttttagttgaactggaaaaacagttacttgacaatgatggctctatgtcgaaagatacaattacggagggagatgagaaacatgaaccatccagtgacaatgcagtcagtaatccacacccttcaaagggagaaaggcatgaaccagaaccagga

SEQ ID NO: 67470 - DNA, 268 bp, Glycine max
cggaattcccgggtcgacccacgcctccggctactcactctataatgaaatgtacatcgcctccaacttcaaggcattgggggtcacctcctttcgccaacgccacttttccttcttttccccttacacttccaccaccacaagggtatcgttttctagttctagttgcgggaaaaatttgcaaatggaagaagtgaaggttgcttcagacttgttggtgggtgaccctgcttcactggagaagaaaattgatgcaattcgtttgggt

SEQ ID NO: 67471 - DNA, 370 bp, Glycine max
  unsure (1)..(370): unsure at all n locations
ctttatttgatgcgttattcaaaaatgattctacatatgctaggatttaaaataggatgacctttgcaatgggtgttgttgggtttcctatccaatggcgtggccccaacccagaattaagtgcatgttacatttgcattttgcaatgcttattggagattaggttaatggtggacaagtaaatatactcttttacacactaaagcattgaagttgtaaattgtgattgctatgatacagtcctcctttntaacttcggnggacaaacagagatccaaagcgtagcattaccgctgttacttgtaacacaaggaaaggtttttgggggaaatgtattacttttgcttgaatttgttggtcaatgagtttg

SEQ ID NO: 67472 - DNA, 317 bp, Glycine max
  unsure (1)..(317): unsure at all n locations
catctgccatccgaggagagttatacaagncctagtgtagagtgcaaaatgctttcaaacaatggaaaaaggtactctaagacaaatgaagatgctttcttaccatacgatgcactacacccaattacgtcacccactccaatcacaccacctaaaatgaatatatctgaaggcaaccaactttcttcacgattagatctaaatgcatcctctgaaaaaactccagaatctgctttgaagagcccctcatctgtattgaacccttcattctcctaaaaagaactattcgagactactttttagcattcttaaaaacc

SEQ ID NO: 67473 - DNA, 438 bp, Glycine max
  unsure (1)..(438): unsure at all n locations
cccacgcgtccggtccagtggctctatgtgtactctctccggtgttattataaggtccggattaaaagtgtggcttggtccttattataaggtccggtctaaaattttccctgcattaactattttttcacaaaagtgcccttaattaaagttagttctaaaatgaagtgataataagagaaacataactcgttaatgtttgttagttttgttcacaggtaattttggaaaaaatactaatttaggacaaatttaatgctatcaatcaaattaaccaattttctaatagcacaccatcatttatctcatattacataaatgaatagtcattgtcctcaattccttagttggtttatgcatatattnctttggattttgaacaatatatgtgaaatgtgtgtagtgggaaaaggcttgtcgttgttgaatttgggaatg

SEQ ID NO: 67474 - DNA, 285 bp, Glycine max
gccacacggagacaaacgactcgctgagcgagctgataacacgctgagcgcgtgcctacgtgacagattcccttctagattcctcctatccactaagcgtgttgatgtctcgcttagcaaatgatactcgctaagcacattgagctcacttagcgagacatcaactttagcacttcttcaaaatagctcctttttgcctgaattgaagagaaattgacattaattccatacacaaggcttctactaagaatagataaaaacagcaaaatttatttacaatcctac

SEQ ID NO: 67475 - DNA, 276 bp, Glycine max
  unsure (1)..(276): unsure at all n locations
cgcgtccgtcgacatattctcattttcaattcngtaattgcatgngcttgtctgacaacagcgcntgatttgaggaataaagtggtctactaattgaaaatggtgcaaagagagaaacttttgctgatctgattgaacaaaagggacgtgagagcagtttcagctccgagtatctgccatctgagaccactcatggcgagcatactaggagtagcactgacgactcatcttcatctccatctgtggggtgcccggttcaggaaattgctgcatctg

SEQ ID NO: 67476 - DNA, 302 bp, Glycine max
gtaccatgttccagatcaaataaactcatttcctctgagatgaatttcgggagggcagagaattcttgtgtctttgatgctggttaccagaatttctgttttggggtaggtcatgtaaactatcattaccaatgagtgaggatacatatacaatgcaatatgtgcgagacaggtgaaccaacttctagatataacagagaaaaaggtgcgaattctaggaggaggcataagtagacacataaatgcgaaaatgcagaatatgtcctatggccatgatgtttcatccgatgactaccctggaa

SEQ ID NO: 67477 - DNA, 265 bp, Glycine max
gcggactctaactcacattctatcttcaatatcaaaaaatactcgcaaaacacgacctgcgcgtatttagtattcgatagcaatttatacatctctctatctatatatatatccggcatctgaaaaatttattgcagctagcgccaccttacacactcctactctcactcctaccacacctatctctctctgtctgtctctgatacagggcctcaaaactctgatcacggctcgtctgattctgtctgaaccacacagagtgacc

SEQ ID NO: 67478 - DNA, 221 bp, Glycine max
ggtcgatctagagctcaaaacaatgtctaaaccaaggtaccctcaacttccaccacgacagacaacgtcgtcttccacgctgattctgactctgcatctgggatgaccttactattgcactgctgcagggtgtatggatactgagcacacctagcagcactcgaggaacattgaccctacctaacgacataggatccagtgctacaagaacattccggact

SEQ ID NO: 67479 - DNA, 109 bp, Glycine max
accgttccggaattccccggtcgactcaacccgtccgggacgctaaaggaagcacacgcaattgcaagagcaagaacgaaagccgcagagaagaattgaaggagaaaag

SEQ ID NO: 67480 - DNA, 411 bp, Glycine max
ggaattcccgggtcgacccacgcgttcggccacacttgcccattctgatgctcatctatttcgctattttactcactatttatcaatattgcgggatttttttctgagactcatggatgcacttaacctatatatattcattcttatatatatccgaacgcctaccgacgacgatcgtatctgatatgaactgagacagcctaaaggaagtactagaacgctacacacggatgctcatattcaagtcttacagcaccatagtcatcatgatatacaatgacttagtcagtcgcgtgtagtaagcttaagtagctttgctgccttacaaagtatctgtgatcactgagagacgccctatatctattccaaccggctataatgacctttatgaaagtatgcattctcacaaac

SEQ ID NO: 67481 - DNA, 253 bp, Glycine max
acgcgtccgccgacgcgttctctttcctactctcttctatttctttcaatcatcacactataaaatctcccacggcgggatttttaaccaccctcagtcgactcataacgactcacatgcactcacgccattcttacaatgcttaatcactcttcattttgaacttactgacaacctcactgtatctcatccacattcaaacctaccaattctctaacataattcccttacaccttcaatctctataaacccc

SEQ ID NO: 67482 - DNA, 353 bp, Glycine max
ttcccgggtcgacgcacgcgtccgaacgtattgctaaccacaagaagatcacttcctactttcttcttcgctcactatataagccagtcatgggtctcttctctattttcaggggctttacccgcctattcaggcatcatggctagcgctaatggctcaggctattaatgtcgcctgcactattgactgagcatacgcctgatcaggaaacggaatccagtacatgagtaagatcgacccacatgatgacagctctactaacaattggattaagaatgacaggttcctcatggcttcatactttcaatcctttggatactatctcgagacctggcatagagttctattctaag

SEQ ID NO: 67483 - DNA, 365 bp, Glycine max
ttcccggctcgaccgcacgcgtccgaacctatagctaaccacaataatatcactacctactttctcctccactcactatataatctatcgatgtctctcttttctattttcagctgctcaacccacctatacaaaaatcataactaacgcttatgactcaatctattaatgtcccagcactattgactgaacacacgcctgatcaacaaacagaatcacacaacattaataagatcgacccacatgatcagtgctctactaacaattggattaagaatgacacgtacctcatggattcatactttcaatccttattatactatgtcgagacctagcatatactctcattctaatgtctccatcgc

SEQ ID NO: 67484 - DNA, 278 bp, Glycine max
ttcccggctcgaccgcacgcgtccgaacgtattgccaaccacaagattatcacttcctcttttcttcttcactcactatataatccatgcatggctatcttctctattttgagcggctcaacccgcctatacaaacatcatgactaacccttatgactcagtctattaaagtccctgctctattgactgatcatacgcctgatcaacaaacggaatcaacaacattaataagatcgacccaaatgatcactgctttactaacaaatggattaagaatg

SEQ ID NO: 67485 - DNA, 58 bp, Glycine max
cccacgcgtccgcccacgcgtccgctctctgtctattctctatcacactctatatata

SEQ ID NO: 67486 - DNA, 61 bp, Glycine max
accacgcgtacgaccacgcgtccgaactctttcaattttctatcatacgactacatatact

SEQ ID NO: 67487 - DNA, 422 bp, Glycine max
ccggtccttaattcccgggtcgacgcacgcgtccgcccacgcgtacgcccacgcgtccgatctctgtcaattctctctcatactctatatatacttcgcgtaggattttaagcaatatctatgtggatactcatatactatggtccgccaattctcatgaactacaactatattatgtagcacatgacgactattagacctctaactgttactagtacagttattctcatgatactcatatctcttcctcttcgcaattatttccacttacacataacatcatatacctcatatgatcacatatcattatagcctttatctcttatacatcaagttgaatacaatgctaatcagtaattcataatcttttatgcccagctaccataaccgaccctatgtgcaattctgataagtgctacatc

SEQ ID NO: 67488 - DNA, 415 bp, Glycine max
cggtcctaattccagctcgaccgcacgcgtccgcccacgcgtccgcccacgcgttcgatctctgtcaattctctctcatactctatatatactttcgcgactatttttaccaacatctatgtggataccatctactctaatcctccaattctcatgaactacaactatcttatctaccacatgacgactattagatctctaacttttactcatacatttactctataatacacatatctcttccacttcgaattatttccacttccacattacacatactacctcatatcatcacatctcatcatatccttaatcttttaaacaccaagttgaatacaatgcatatcactaattcataatcttttatgcccatataccataatcaaccttatgtgcaatacttataagttccaca

SEQ ID NO: 67489 - DNA, 247 bp, Glycine max
accactcgttcgactgtgaataatctgaggcgactaatgtcacatacttttatatgatttctcagagggatgtgttcgaacagactatatgcagtctatgatatgccccagtatctcgctaatacaatgcgcgttgttcaatcccaaatactggctccggtcaatattacacactcattagcatctgtcttcattgacttcgcccattatgataccaacactatccacttcaactatactcgttact

SEQ ID NO: 67490 - DNA, 100 bp, Glycine max
ccggtccttaattcccgggtcgaccgcacgcgtccgaacactcgttcgactgtgattaataacaggtttcttatgacccatacttttatataatttctca

SEQ ID NO: 67491 - DNA, 304 bp, Glycine max
acgcgtcctaacactctttcgactatcattaatcccactctacttataacccatacttttatataatttctcactctcaaatcttataacacactatccgcaatctattaaataacccactataccctaataccaatcttatctatcactcacacaactactcacatctctcataattacaaactaactactatttatcatcatatacctcgatcactatcataccaccactatcccactcaaccatacactttctcctatctcctacacaaattctaccatctcattcaatttacaaactata

SEQ ID NO: 67492 - DNA, 179 bp, Glycine max
cccacgcgtccgtttatatctcacactgtatgtatcagacgtgccattgtcagttacctcgatataggggattcgcatgctcaagcgtcatcaattcactactaagattctatttcaaacattcgcagctaatatgtactctgatcctttataccatactatgactcaaatgatattaa

SEQ ID NO: 67493 - DNA, 438 bp, Glycine max
ccggtccttaattcccggctcgaccgcacgcgtccgcccacgcgtccgcttatatctcaccctgtctgtatctgacctgcctttatcagttaccttcatgtgggtgtttctcatgatcaagcgtcagcacatcactactcagattctcattcaaacattcgcagctaatatatactctcatcccttttaccatactttgaataaaaatatattatgattctcaacaactactcaatcgcatgaccaatattataagcacatacccgtcatcacgcactcctatctaaacactgctgttgtcactcactatctgatgctccctcgatataatctctccgtatcgatagtactggaaccctataatggtcttgaagcactatcaatattaacacctgtatactaatttcttgaactctagtaaaatccactttgatttcc

SEQ ID NO: 67494 - DNA, 259 bp, Glycine max
  unsure (1)..(259): unsure at all n locations
tcccactcgtcctcagacacttaagataacccgttttcattctacgtctctataactatcttcgactgtaccctttctttaaacccttcagaatccttccaataccacaatcttctatccaccaccaacctcatttccccaccatcacctatactatcaaaccttactacccttcatacctctcttttattcatgaatacactcttccatgataccaataaaatcccaaccacaacaacaacaacaacaagcgtcntct

SEQ ID NO: 67495 - DNA, 235 bp, Glycine max
tctcccacactaaaactatcttcgacttggctttttctttaaaccctgcccgcaccttccaataccacaatcacctatccaccaccaactccatttccccatcttcaccaatcctatcaaacctcactccccataaaacctctcttttacccatcaatccactcttacattataccaatatatccccaaccacaccaacaacaacaacaagcgtcgtctctcaaacacgctctct

SEQ ID NO: 67496 - DNA, 144 bp, Glycine max
ccggtccttaattcccgggtcgaccgcacgcgtccgcacactcgttcggctgactcctcatatacggagcttgctacatatgctaaagacaatggctaatggggagatgcttataacagggatgtgaggcttccatgcgaaaaa

SEQ ID NO: 67497 - DNA, 275 bp, Glycine max
tccttaattcccgctcgacgcacgcgtccgaacactcgttctgtgactcctaatacacggaactttctacatatgctaacgccaattgccaatggacgcatgcttataacattcgggtgaggatctcatccgaaaaaagcaacctcctctcagattcagcctgttaacacatcgaaagattactctcatcatcaatatgaaatcactacttttcatcatatcatccaatataaactgcaaactgatgtagaccaaatacgtatatacaaacatta

SEQ ID NO: 67498 - DNA, 462 bp, Glycine max
cgtccttaattcccgcgtcgacggacgcgtccgaccacgcttacgtccacgcgatcgatgctatcaccttctaaagcttccacttcacatgtcatcagtgcgtgtcactcatattgacatctgggcctactaagataaacctccattctgtatcaaccactatgacccttttatgctatcacatcaatcaacataccttttacttttctctacccttattcacctccgctacccttcattctgcacagactaacagaacgaataaatcaagcatatgcgaaaaatactgtacccgatatggtagctactctgctgacacagattctcactatcgaatctaatcagaataactcatactcttgcgaactctgcggaaagaatcactatgaaaagagaaagctgtagcaatatgtagatgcattgattgctgatatattaaatctggctatacctacactttca

SEQ ID NO: 67499 - DNA, 202 bp, Glycine max
ttacctccacgcaatctatcctatcaccttttaaatcttacacttcacaaatcattcattcggctcaacaataatgatatgtgattctcactatattaacctacattctttatcaaccactattaccctttcatcctatcacatctatctacacaaccttttacactttctatacccttattcacctacgttacccttcatt

SEQ ID NO: 67500 - DNA, 279 bp, Glycine max
cccacgcgttcgatcagtttgagagctgacagaaaatctggccctacattctaataagcactaatcagttcaataaaaaagttttagacacacttgcatcttttctgctttcaattaatggcttgaggattgaaaagttgaacggggaacccctgatctatatatacctgcacttttgtccaatatgctgtcttccctacgttgagaacgtgcaatttcaaggttaataaaaatggggggtggggaggtgactttaaaggtagggtaatataagtcaag

SEQ ID NO: 67501 - DNA, 241 bp, Glycine max
ctaatttcctctcttctattccactcaccctatacactattcaatctcccagttgtctttccataaccactctcactgcactacttataatactctttcactcactccattctttctttactaaatcacttctcattttaaacttatttataacctcattttttattttctacatttataaccatccaatcctacttctttaatccctatcaacttcaattctataaacccctctcttttc

SEQ ID NO: 67502 - DNA, 357 bp, Glycine max
cggacgcgtgggttgttctgcttgctggacagtgtttttctgtcatggttggagcaacagaaggacacaccttggaagaaatggtttgcatcatttcattccacgaatgaaaaaggaggtcgatgttgatgaggagattggtggaaaaagaaaaattgtttgattaaagcttttgaattgttttgctttttttgttttgttttgtaagttgtaatgggtagatttgaagatagatattaggtttaatgaacttttttgtttctatagtttcattatttgtattttttagttcccatagtttgaaagtggttttttctgtctatataatttacattttaattatcttttagttcctgt

SEQ ID NO: 67503 - DNA, 305 bp, Glycine max
cggacgcgtgggcggacgcgtggggtccattaaaccttctgatggcttaaagggtttcatgtgcattgtggatctctagcagatgctgttggttccttttccaagtggatatctgcttttaaggaaaattttagagccttgctgtgagtacacaaaactccatttttccatgattatttcttgctattgggatttcacaacctctatcttcgaatgcctgtgcatctgccttgcgtaaagtctgtgaagatgcttctgtagtaatttatgaaccttcaaatttggaaattttaatgtggatagga

SEQ ID NO: 67504 - DNA, 272 bp, Glycine max
  unsure (1)..(272): unsure at all n locations
ggatcttaaataatactatagggatatctaattgtaccaattaaggttgtttttgcttgatttgccttccaatttggttcgtgagctgaccctgcaagccgtgcagagacctctattggagtctttctctttggtctcctcttttttggatgcaatggcttaattgggtcttctcttctcagaatctgggtaccaaaaacagaagagaaaaaaaggggatttttggttttgntgagctcagagaagctgaggctttttgggatcaaactata

SEQ ID NO: 67505 - DNA, 89 bp, Glycine max
ctgtagaatgctcggtaatcaatctgttccggcatattcaacattgtttgctcgtctgccatatgctcaaaacacttgctatctgtact

SEQ ID NO: 67506 - DNA, 319 bp, Glycine max
cggacgcgtgcgccgacgcgtgcgcgtatactttgggataaagtagtgcgcttttttgtgtcacaagtttgagtttttgggtattgagaaagctgtgaattattttctataattcttctttttttgccgtgtttcaatgtggtgtgtgattgatgtgcgtttaactgttgagattcaaaatggagtgagcaatggttgttgcgaaatgggtacgtggaatgattgtggtggttccattgatgatgctgataacgttttgatggatggactcggggaagatgtgaacagggaaggccttataaagacaccactttacgta

SEQ ID NO: 67507 - DNA, 177 bp, Glycine max
tactctcccaactattttacccgtactaaccaaacgctgcactttcggcggcactctacgatataggtttgtatgtatctcggtgtatcctccttaagcctcgtttgcctttaatgagagcggttattaatatcaatatatcaactataaaacttattgctagcagaaactggctac

SEQ ID NO: 67508 - DNA, 239 bp, Glycine max
ctcttctccgccacttctgaatctattgaatcaacaatcatgtcggacgaagagcaccatttcgagtccaaggccgacgccggagcctccaaaacctaccctcagcaagccggtaccatccgcaagaacggctacatcgtcatcaaaggccgcccctgcaaggttgtggaagtttcgacttccaaaactggaaagcacggtcacgctaagtgtcactttggtggaattgatattttcac

SEQ ID NO: 67509 - DNA, 219 bp, Glycine max
ttcccggctcgacccacgcgttcgtccactcgtccggctatatctcaaagtgaatatcaccgaggagttattgcattgaacttccatattgatgattttaaaacacaagcggcatttattcaagactattattatatttcaaaaattaaggaataagatgtaaaccaattctttaactcttacaaggccccacttaatcccaatttatttttgaccaaa

SEQ ID NO: 67510 - DNA, 284 bp, Glycine max
cacgcgtccgtccactcgtccaatcttatacttttatttcatcactctcttcaatcctttcttggtctccaaagaattcaatggtgacacttttccaaacatcttttcaatttcatcccaaattacccatgattgatctcgaatcaatacattctaacctgctacccatactaaccagcttaaactctccagaaaacttacacatgacaatgtcaactccttaactatactacagatggtaaaaaatacattcccaaaatcttcaactgaaaactatctcattc

SEQ ID NO: 67511 - DNA, 376 bp, Glycine max
  unsure (1)..(376): unsure at all n locations
gtcatcacgaaggcacgcagccctagttcaaattcacacacccttccatctctctatcgttgtcggtgcagcaaaagacgccacaaaacaaaaccgccaccacccatccttatccttcctgcctccgaatgcgtgatcactgatcgtcaccaacatgtatataacaacggtctcttcgctcctcagagcaaccaggcctaaactcttctttccctctccttctccttctagaaccttcgcttcccgcacttcttccttctccgccgctccttccctcctccgctgctccgttccgcgctggagccaccgnctncattccacctctccgctctctccccgtcctccgatcaccgncgtcgctcccgtcgtcgaacgc

SEQ ID NO: 67512 - DNA, 141 bp, Glycine max
taccctttcatataccaaaggccgtggtcttataccaggtctgatacatcaatctccaatcctgaaacctaattcaatctactacactaatctccactctcatacacttcaccatcatatctaacataaccatcttatatt

SEQ ID NO: 67513 - DNA, 258 bp, Glycine max
cggacgcgtgggctttttttcttctcttttctcgtgttctttatctctctcgctagctcacagaagaagaagaagtaaaaggcctttatttataaataaaagaaaaggagagaacagattataagaaacaaagcatgaatggtgctgcatgtgttgaggcagaatgctgtgagtttgtggaagttgatcccacgggaagatatggaagatacaatgaaattcttggcaaaagagcttttaagacaggctatagagcat

SEQ ID NO: 67514 - DNA, 247 bp, Glycine max
  unsure (1)..(247): unsure at all n locations
nccactcgtccgcactatctaaacataagctgtttccagtctccgacagtataacgatcttcgactgcacncttacattaaaccgtccgcaaaccttccgatcctacaatctcctatccaccaccaaccgcatttccccagcgtctcatctctatcaaacctcactcccattcataccgcgcttttttcgaggaatcctctcttccgttattccatgatatgtccaaccacaacaacaacaacaaca

SEQ ID NO: 67515 - DNA, 453 bp, Glycine max
  unsure (1)..(453): unsure at all n locations
tgatagtgttgtacggataccaatttctgattactaaaatgtgctttgtaggttgagagtagctctggagctgttaatgatgtggcaaatacaattatgcaaaaattttgggactcagcttttaatctagaaccaccggaagattctgatactcataggtaatctggttgtgcagacatttaaacacaagctttgttttgttctgatccttgatcggcctgtatgatgtattgatgttctattgcagtgaaatttctgggctaatgacatcagatggggctgatacatcgaagtctgcatatcaatctgtaggttntggaaattcatttgccttcaaatttaaagatctcagtggccgtgtgcatcgattcaactgtggtactgaacatatagatgagctagtttctacaatcatgcagagacttgatgtgaatgatgtggaacgccctatga

SEQ ID NO: 67516 - DNA, 332 bp, Glycine max
gatgcaccaattgcaactgataaaactttgagggagagtagttgattttgtcagctgacatggaaatttcttctttgactataatgccccactgaattttgtaagaagatcattgaattgtcgtggtctaatagtgtataccctgatgggttactagcagcatttgttcttggagtctaacacatcaaattgactattctggatataccagaactccagcgtttacagtttgattgtcctaaaacctgattccaaaaattaatactttcaggaattatgtaacttttgatgcttattccttcgtaaatgaaagagattgaattttgaatttc

SEQ ID NO: 67517 - DNA, 201 bp, Glycine max
  unsure (1)..(201): unsure at all n locations
ccggnctggaatacccgggccgacccacgcatccgaaaactcaagctgcttgtatgatagttaattaaataaagatataaaacataatacggttgggttttttaaaaaattataatatcctttataatattaattattttattataatttattaaattattttttataatatttaatataatataataaattatcatataa

SEQ ID NO: 67518 - DNA, 451 bp, Glycine max
  unsure (1)..(451): unsure at all n locations
gttcgaacagtacggagacaggaggtatttataatncgccctcttcctctaatgatgtcggcatcttatcaaaactcaccgttcttattaataataattgatatactttcttatatcttcaattctcatttaatttttctatataattttatattatttttcattatttatttattttatatatcatttttaatcttatttatatattcttatctatttctattttttcttttattctcattctattctttcttctttcatttattttattatataatatcttatattacctaacttattctttttattatctttttccttattttataaaatttattttatatttatttttttattctatcttattattatatttttatatccttttctattcttctttattccttcttatatttttattaattctcatctttatctctttttattatat

SEQ ID NO: 67519 - DNA, 287 bp, Glycine max
attcccggtcgaccacgcgtccgcctgaacctgctctgaatccaattcttcttcttcttgttctctgtttaaggcaatagaaggtttactactcatactcaaagtagcttagtgttttgtttagcatatcatggagaataataatcagtcgttttggcaattcagtgaccagttgatgttactggcatttatttggcttttctttctttatcgttttgttttgtattctctttttcttatattattttgtttgtttctagtgtatttttattctttattttatgttt

SEQ ID NO: 67520 - DNA, 517 bp, Glycine max
ctcacgcgttcgtccactcgtccgaagagtatttcaccaaaaagaaaaatggcaaggaaacggtatttttttatcaattttaactctattctctttttaatttataagttgattttattaatttttttttatattaagatattttactttttttttttttattttatcattttttattattattgatttttttatattttattttaatttattttttaaatttttttttttattattattttattatatatttttttttattttttttctaatattttttttttatattttaattatttttatttaatatctttatattagttatataaattttttattttttttatatttataaatttttaaatttatattatatattattttaatttatttcatatttacttattaatataattattttttttattattttatttcatttttaaaattattattttattatttctttttttatatatttaaatttattatttttttatatttattttattttttt

SEQ ID NO: 67521 - DNA, 438 bp, Glycine max
cccacgcttccgctctaatctctctttattattcaacaaaagttaatataattccggacggctttataccttctcaaaccgcttaacataacaccaaactttgtcatctccataaaccaataaatgagtaaaaaatgcattacatatgtcttaacattctaccaattgtttaaactttctatccataatactctgtttaaatgtgtatcatatgtttgtactattccttttatctttatcttatttttatattttatcttttcattttttcttcaatttatttttttatttttttcatatatttaatttattatttttctcaattttatatatatatctcttttcttttatttttttattttctttttattattattttttttattatattatttatttttttttttttcttttattttattatttttttatttttta

SEQ ID NO: 67522 - DNA, 344 bp, Glycine max
cgggccgaccgacgcgtccggtccaggcaagccctactcaaccaccacacttacttctcgttcacgctacccctttctgcggttgttttacctttcaagttttaaaggtctaaagatggcagagacatttctatttacctcatagtctgtgaactatgtacaccctgactagcttctcgaccaaatttccgatgctgtcctcgacgcttgcctcgtgcatgtctcatacatgtatgtatcctgtgaatctttcacaattatctactttgtttttgtcttttttgtattttttacatctttcttactatttcttattatattaatgtatttttatcttatttatt

SEQ ID NO: 67523 - DNA, 419 bp, Glycine max
cccacgcgtccgcccactcttccgatctctctctttcgatctgtgtactaaccctaacccgcttctaaccatgtcttccttactctctcataacctatctttaataaaacttacttctttctctttcttcttaatcatatcatattatattttttctactctattttatacatttctttattcctatcctaatctattctctcttttcatcttttattttatctattttatattatttattcctttcttctttatattttataataatattatatcctatttataaatattctataaattttctacatctaatatctctatttatattttatatattttcttattatattctaatcattttatttccttttctcatttatttctatctttatttttactcttatcttcttttcattatt

SEQ ID NO: 67524 - DNA, 85 bp, Glycine max
cccacgcgtccgctcaaactacatctgcataaatcacatagaaagctatcatctgggagtgtagatagtgccatgactatggaaa

SEQ ID NO: 67525 - DNA, 319 bp, Glycine max
  unsure (1)..(319): unsure at all n locations
cccacgcgtccgcaaggatggattaatgtatttgctaatgttcttacagaatntaaagaggtttgactcataccttatttgttcatctataacacattgatctatgcattttatattttattttttatttcttttttttattatttcttattttatataataatttttattctttttatctttcttattttattattcctattttttatatcttttataatttattttcttataatttatttcttttctttcttattatttattttttttttattattttctatattatttttaatctatttattttatatattttttc

SEQ ID NO: 67526 - DNA, 438 bp, Glycine max
  unsure (1)..(438): unsure at all n locations
ccacaactctcatcctcatgcttcttacattttttcgtntcttgtttctattattggttggttttttattataatattttggctctaaaaataatatatataatttttatatttttattaataaatattatatataaattatattatattattttaattatatttttttatatattatatattttttatataatatataatatatttattttttaattttatatttttttaaaattatatattatttttataatttatattattataaaattaattattatattattatattttatataatattataatttttttataattaattataatctttttaatttataatatatatttatttatattttcataataatattattataattttattatatatatatatataattattattttctttatatataatattattat

SEQ ID NO: 67527 - DNA, 304 bp, Glycine max
ccctaataagccatactactaccattctttttcaccaccatcaccttcttcaccaaggaggccatattacaaccactctccgcccccacctttaccttctccaccttactagaagccatactactatcactcaccacccctttcacaccaccttcacctattctattctattaccactcaccacctctaccaccactatacaatataccatactactctccttcaccatctttctatgattccatactagtacctaatcatctccattaccaattcactccctctacacttttcatctatttta

SEQ ID NO: 67528 - DNA, 421 bp, Glycine max
cccacgcgtccgcaaacccacattaatcatggtcacaacaaccattggttattgttgtcggatcatgtctaacttctacatgtttcatgtaatttctctgtgtttttatttaaattatttatattttttatttttatatatttttattttattaatttattttttctatattaatattatttttattttttattttatcttttttttttatattatatatattttttttttattattatattttatattttctatatattaattattattttttatttttttttttttatttttatttaatttattttttctttttcttattttttttatcttctattttattatattatattatatttattatattcttatttatcttttttttttattttatttttatttttatttttttttttttttt

SEQ ID NO: 67529 - DNA, 410 bp, Glycine max
cccacgcgtccgatcatacccttcaatattaaaccgtacctacttccaatattcctggtggtctttatccttctctaccaagccatatcaactatttctactataaatattaatgttctgataaacaaaattagatattttttttacattctttctatcttttattttttatttatttttccattttattttatattttctatctattttttattttttatttttttatcaaattttatctatttattttattttatatttactattttatttatcattacattttttaatttattatattctattttattctattttattatatttttatattttattattttattttatattatcttatctattattttctattttattctcttattatctacttctattattatttt

SEQ ID NO: 67530 - DNA, 426 bp, Glycine max
ataatacaagaacccaatccaagctattcattaatcattattaacacacacaacacgcagattttttctaaactctaatccccaattttgattcctattcctactagattctatttagcatatcatatcctttctatctaaatttctttctttgtttatctttttttatttatatttcatttattatattatatcttttatttttattatattgtttcttttattataaatttatatttttatatctcatttcatttatcaatttaattattttttttctcataatatattattatatttatttaataatattattttatttttttatttttatattcttatcattcttttattattatttttttaatcttatattaatttttttattcctaattcttatatatatcttttttaatctttttatct

SEQ ID NO: 67531 - DNA, 485 bp, Glycine max
  unsure (1)..(485): unsure at all n locations
cttgcaatctcatatgaaaaccctatttattattctcagttctnntatatatatatgattgtttttattttaaattattttattatatatatattaaaataaatttatattattattatcatttattatatataattttatttttatatttaatatattataaatattttattaaatatatttttttaattttttatatttataatatattttttattttatattattattatttataattatatttattatatataaatattttaaaaattattattataaaattatattatttattattatattatttaatatctattttaataaattttttattaattaattttaaataaaattttatatataaaataaataattaatttatataaatattattttaatattataatacttattaattttaattttatatattattatattaataattatatataattattttattattatatctaatatat

SEQ ID NO: 67532 - DNA, 390 bp, Glycine max
ccggtccggaattcccgggtcgacccacgcaatctcatactcataatattataaataaaatttttttatacaatcatattaattatatcaaattgtcgggttattaaataatattttatctgattaaataaaataaaatatatataataatataaaaataatctattatatatcatattaataatataattaatttatttattttatataaaatatataaataatataaataattaataataaatatctaatttatatataaaatataaattatatatctattaatcataatttaataaataatattatatatattatatatatttaatataatttatatataaaattaatttatatttataatatataaaattataaaattatatatat

SEQ ID NO: 67533 - DNA, 323 bp, Glycine max
cccactcatccgatttatattaaatataattttatgaacaaaagctataaaattggttgggtttttataataatattgaatgtaatttaaaaaataaaattatattaatttatatttattataattaaattttatatattttatattttaatattttattttatatttttaattttattttatttattaaattatttatattatatattataaatatatataaatatataaatttttttttaatttaatttaatattattatatttaattaaatcttaattaataatataaaataatataaaattataattaataatatttaa

SEQ ID NO: 67534 - DNA, 446 bp, Glycine max
ggaattcccgggtcgacccacacgtccgcccactcatcctaatatgtctttacatactatttccaccaaagaatccttttttatcggtggtattttataaaaaatatattataatattataataaatatatattattttaattaatacataataaataatttaataattttaatatattttttattttatatattttataattaatatatttatatttatatataatataatatttatttttattatttattatttatattattatatatttattatttattatttatataatattttttattattatattattatattatttatatataatatatttaataattaatataattatatatatttttaaattatataatatcttattttattataatatatatttttattattatatttatttttaaatttttttatttatattaat

SEQ ID NO: 67535 - DNA, 460 bp, Glycine max
ctctctgctcctagggtttctccttcgatttagtgaaatggcttccaaacctcctagtgcgggtctaataaattaacagggcataaatatactatatctaattatataatatttataatttataaatataatatataatctatattataaatttattatataatataaattataatattaatatatattatatttattataattaatatatattatatttaatattatttaatattttatataattaattataatatttaatattaaataatattaaattatcatcatattatcatatatcataatattatatattaatatattataaatatattttattatacatatatcacattattttattattatattttattatctatattatattatattatcattaaaattactataatatcaatattaatatataataatatattttttattatattaataa

SEQ ID NO: 67536 - DNA, 453 bp, Glycine max
  unsure (1)..(453): unsure at all n locations
ccggnncggaaaacccggcccgacccacacatcctaagatattaacaattattntaaaatttaaatanatctcatacaaaaaaatataataggatgattaattataaaaattttttttccctaaccaaatactataatttaattaatttttatatattataatatttattttatataattatatatctattatttaattataataaattttatttataatataataaataaatatttaaataatttttattaatcataaatatatttattaattataattatttaattatataaatattatatataattaatttattttatttattaaaatatttattttctatattatattatatattatattataataatattttatatatatattataaaatattaaaatatttattatttttatataatatttatatttaaaattatatatttttaaaa

SEQ ID NO: 67537 - DNA, 472 bp, Glycine max
  unsure (1)..(472): unsure at all n locations
ttttcataagtaacattattatttatttttattaaataatatgataatatattttagtntgttattatatataatatgattattaataaatattatcaaatatattataatattatataattttataaatattttaatatataatattatatatataatattattttatataaaattaatttaatatataatatatattattaaatatataatatattataatattatatatattatattatatattatattatatatattttaatttataatattatatatatatatataatatattttacaatatataataatatattatatattaattatatataatatttatacttaattatatattataataatataattatatattaatattaatattattattatatttaaattatcattataattaataataataatataattattataataatattattttattattaatatt

SEQ ID NO: 67538 - DNA, 424 bp, Glycine max
cccacgctttcgaagaaaccaaaagatattcaagaacaagtcaatttttcaattttgaatggaaaactaaaccttatcgattcattttttcatccttgaacatgtttagtatttgattttgtttttactttttcttattctcttattttatttatttcttttcatttttcttttttattttttatcatttttatttctctttttttcttttttttttcttattttatttttttttttttttattttattttttttttctttttattttatttatataattttattatttaatttattttttcttatttttttttctttatatctttatctattttttttatttttttttattttttttttttttttttttttttatttttattttttttttatattattttttttttattcttttttttatctt

SEQ ID NO: 67539 - DNA, 52 bp, Glycine max
cggaaaacccgagccgacccactcaaccaacctcaccaatccctactcccat

SEQ ID NO: 67540 - DNA, 137 bp, Glycine max
  unsure (1)..(137): unsure at all n locations
ccggnccggaattcccgggtcgacccacgcagtccgcaactttgttgattttaataacaatttttttttaatacattttattataatatatagggtgggtaatatattaaataatcaatatattataataaaatatt

SEQ ID NO: 67541 - DNA, 205 bp, Glycine max
cccacgcgtcttattacataactctttttttctctctgagatctcatctccttagagagtggtcatttatcctttaacactttttcattcataaaaacattatactctaatatatataataactcattaaaattttaataattcactttattataattaaatataatattatatatattattatattatattaataatatattaa

SEQ ID NO: 67542 - DNA, 178 bp, Glycine max
aagcaattgaggattcacaaatgattatttttcttactgaccaaatctgaataaagggggggtttttttttatatttagctcacacactcactacactctccttaacttcccttcactactccattcattatttcaactatcatatatactataacacaatttatctacttaattctt

SEQ ID NO: 67543 - DNA, 114 bp, Glycine max
atttttacaaacacctgtgtaacataccaacaattatgaaatatacagtatataccataattggtgtatgttacacaggtgtttgtaaaaatagtttttatcattattttagta

SEQ ID NO: 67544 - DNA, 452 bp, Glycine max
ccggaattcgacgccacgcatcagacgtccgctcacgcgttcgggataggtcttgtaggcgtgtttcatgctgatattggccattggaagttgggtttctcaacatctaaaccattaggaaactctctcatatccaagttgcaagcttggaaacatggttatcatatgttgtatggatttgtccaagttctaaatgctttggaacatggatgaggttagcgtgcatgtaaatagatgttggatcgtgattgacatgtctcacaaagttgcggattctcttacaagatggggaacaacttcttctaattatgatcagacttggagtcttcctcctaatggtgttctcttagcccttgggagagatgctttaagttccacttagtttctatttagtacttttatttccaaatgtacctaaaaaagattcctgtatatacaactaacgtctgtat

SEQ ID NO: 67545 - DNA, 201 bp, Glycine max
gcgcttatgtctcacacaaaacactagtccctcccttcttacttgtctctttctcttcgcaacaacatgcagatcttcgtcaagactttgactggcaagaccatcaccctcgaggtccagagtatcgacaccatcgacaacgtcaagggcaagatccaggacaaggaatgtatcccttctgaccagcagaggttgattttt

SEQ ID NO: 67546 - DNA, 341 bp, Glycine max
cgcacccactcgtccgacaaaacggcggattaaaaattcttttgtcgttttcaatcggagcgggggagagagattgggaatttctacttttgaggaattctagagaacacgagctatggaagaatccatcaaggaccagcaatctactccatttcctggtaacgcagccagacccaagcttcagcgctatgctttgcgttcggggaataataaatctaaagatgacaagcttcctgctcctgaattgtcgaatcctccttcttctgcctcaaagaggggaagatctgtgtccagtgtgagcaaaagtgttggagtccttgaactatctgccaaggacaagt

SEQ ID NO: 67547 - DNA, 320 bp, Glycine max
ttcattcgggtcacttgggcagcggctactatgcgtttttttgtcagagaagacgacagtggcgaagcctactatgaactccatttcattctcatcttccaccaatcctcaaagcttaaagagcccatttcacagacaatcccaagcccgaagcctttcgctctcgttagccttatcattctcgcatctgaagaactttctgaagaagcctcacgccttccctttccttctctctggtatcctcttactcacttggatttttcttagaaatcagcactcttcttctcaattctcctctaggtatcaccaggctactgatt

SEQ ID NO: 67548 - DNA, 248 bp, Glycine max
tcgatagatgagaagatcgcgtttacttgcatataaaataaggtctatctagtactaatgcagatgtggtatcccctctcatcattgtgaaagctcaggcacataaaacattgaatgatgaaatggcacgaaacatgaagatgactagactgatctgatagggtaatccgaatcctaaggtattggacgtgcacaaatactaaaattcacaggtcaagctacctcgcaactcaaccataatgtcatgt

SEQ ID NO: 67549 - DNA, 281 bp, Glycine max
gaattttcatattgccaaactatcctaactttttacacatgacatggccctcaagggcactgtaaccattacttcttgaactagtgctctctcctacatattcaatttacttaccatacacactaatcaaatggatactcccactgctcctctaactgttcaaacccctacttactacctactgaatcgaccctgcttcatgtcaccgatcgtccatcttagcgcatactcattaattaacacgttcgatcacactaagtcagctcataattccggattaa

SEQ ID NO: 67550 - DNA, 143 bp, Glycine max
ctcatttcttctttttttttttttctttccttttaaattattattcccttcaaacagtacaagaactttatcaccaacacgaagaacaagattagccgaatggaattcttcacttctaggaattaagcttgcaaattcatata

SEQ ID NO: 67551 - DNA, 55 bp, Glycine max
tcgatggattatccctttgtagatgattcgatctttttggatggtattgtgatgt

SEQ ID NO: 67552 - DNA, 171 bp, Glycine max
gacatagaataagcttgtaaattcatttcactagaaaacataaagctattaattgtctatggtttttcaaacactaatagtatacatctgaagttaaaaatattcaacagaagactaatgaaataatgattaaaccaaataaaatggccgccgctctataagaatcaagct

SEQ ID NO: 67553 - DNA, 321 bp, Glycine max
gacatagcacatcataattcgtgcatttccttataaactatatcgtttctccttcgcgatcgcattacacacacctgtatctagcacattaagcctcaacaactagaaccattgctaaagaataatccgaaaccgatgatcttgcccaatgtgtataggcatggtctttccaaacacatgctttccatgacgtctgtgaacaatatgtctagctcaactcttagcattaaacttccatgtgccccactcatactcatcctttccaaacagcaagatactattccaggtaccaagctttacattctcatccctgccatttca

SEQ ID NO: 67554 - DNA, 433 bp, Glycine max
  unsure (1)..(433): unsure at all n locations
gggaaagttcattggaaatggagagtgttggaatgatcccacatgattatgttgctggtttagatctaaaccttgatgatagtacagcattccctggatatactggcattagataagggtgaaatcaagcctggaatgcagttttgaaatgacctttggcttaacaagtggcatactcttggcaagttagtcttgatcagttcatgaattgcttgtggcttacaattggaaatgcattcttgcagttcgctccttggcatgccatttttggatataccagacaaacatttcaaaaggctagccttgctgaaggttcgatatgaaaatatagagatgtagaacgctgtcaatggattaattcttactgggaatatgtatnggcttggtgttcagctcgaatttgacagcgccattctttcatagatcagtgctg

SEQ ID NO: 67555 - DNA, 315 bp, Glycine max
tgcgctcagacacaatctgttatgaatactaactggccaccagatatagatgctgaacttgcggaactgggatcctatgcatttgaaaaagcaccatcttccttagctcacttgactttgacaatgcgttgtaattgctgacttaaatcatggcggctaaatgatccacttgttatatagagggaacacactcagaagttttcatttggatggtttgtgacacattcatgcagatccacccttaattgacatgctttcgaaatctgtcttgatgccaaataccgatatgctaacgacaataacttcatgcttact

SEQ ID NO: 67556 - DNA, 155 bp, Glycine max
gactaagtacatgacaatttgtgcattgccttgtgaccatggttttttatgcttgtgaaaaagattacacacaccgggatctagcacacggggcttcaccagctggaaccatggctatgggagaatgggagaccgatgctgttgaccaaagagaa

SEQ ID NO: 67557 - DNA, 327 bp, Glycine max
gaacaagtagttgagaactaagaaggagaagcatatggcttcctcaatgatctcttgcccaggtgttaccactgtcaaccgtgccggtgccggcatggttgctccattcactggcctcaagtccatggctggcttccccaccaggaagaccaaccatgacattacctccattgctagcaaccgtggaagagtgcaatgcatgcaagtgtggacaccagtcgtcaagaagaagtttgagactctttcctaactgccagaccttgatgatgcacaattggcaaacgaagtagaataccttcttaagaagggatggattccttgcttgga

SEQ ID NO: 67558 - DNA, 291 bp, Glycine max
ttggggaaagttcattggaaatggacagtgttggaatgatcctccatgattaagttgatgattggggcctaaaacttgatgatagggcaatcattcctgtaaatactgacattatataaggatgaaaatgcgcatgaaatgcaactttgaaatgagctttggcttagcaagtatgatactattgggcagttagtactgatcacgtcatgaattgctgcaggcttacaattggaaatgcattctttgagatcactccatgacatgcgacttttggatatgcagaccaaacat

SEQ ID NO: 67559 - DNA, 304 bp, Glycine max
ggacaatgttacaacttggaccatttcaatactgcccagatgtaatgatggcagatcttgtgaggccaagagcctgggatgaataaggggctacctgtctgattgagagtacagttactggtgcaaaatcagaatcctattcaccaaaaattgctcataccacaggcatgctcaccacttgtttcgacacatatacatgaccacaatccatattgatgactgataatactcactgctgtgtatgcaattgaaccttttgagcagacgatactcattataaaggtactaaacatactacttactg

SEQ ID NO: 67560 - DNA, 302 bp, Glycine max
cttgttcctacgctcaacaactataataacatctttctctctccgaacagatcacgcgttggcgcactaaagcgccaaatcagtccatgatttcaccgttaaagatgccaagggaaatgatattaaatctggtgactacaaaggaaaggtccctatcattggcaatggtgcctcacaatggtacctccccgattcttttttttcttaatccctattttaattctataattaagtaccttggaaggaggatcataagttttttttttaacctaaggtccctaattgaaattttacccttaaat

SEQ ID NO: 67561 - DNA, 362 bp, Glycine max
gaacatagcaccaatatgaataatatcttcatttgcattgctaactgattcttgtgtgaaaagaggctgttctaaatggatttgaagtgtggtcgaattttgcccactgaaaaatgtagttccacagagagaatgccaaatgccaaaggtcttaattgacctgtattgaactatgtatattagatagtgcttgtgcaacctcaatacttatattttcaaggacatcgtgatatctacaatcgaatttgtacttgtgacggaaattaaccccggagaaagtgagctgcaataatggttttgaaacccgactgctgagttttcgattgttcttttttcagtgcttcgcaacagtttattaaaca

SEQ ID NO: 67562 - DNA, 254 bp, Glycine max
cccgtccacacatacggacactactaactctatgttagattaccattttaaagaaagagatgaggcgttaggagccgagacgctaacacttgagaatatcacaagacaacatgaagaaatatgtcgataccaatataacgcagattcattaccatattcgaaattttgtattattcaaaaatataccatacctacaagtgactatcaaaagaaaaataaatgaaaaactttcttctaaattctttgtaccctac

SEQ ID NO: 67563 - DNA, 127 bp, Glycine max
caaattgtttgagcttgtaaattctgttcactagaaatcagaaagctataaagtgtatattgattttcaagttttaatagtatacatctcaagtaaaaaatattcaacagaaaaaaaaaaaaacata

SEQ ID NO: 67564 - DNA, 303 bp, Glycine max
tcgcaaatcgttagaacttgaaaattctgaacactctcactcagacagctattaatagggtatcgatcatcacgtacgaatagtgtacatcttacgcaccaaatatacgacagtacaccaaaagcacattattgcccgatcgacgtgcatccgccatagatgctcctatcttacatacgcctgcatgctaccacacagcgcttacatgccctaccataatatcaattcattagccatcacttctcaacgttcacactttgcaaacccttacattacccaaacaaatcgtcttgcagcacaaaa

SEQ ID NO: 67565 - DNA, 227 bp, Glycine max
cgaccgacacgtgcagaattaggcacaggccagcgttctaaccgattttccttatgctccatacggtgtctgctgcgattagggggccttcatctcaacgagtgccatgctatatgatataaccagactcatgctcctattacgagatcaatcctcaccttgagtctttaacaacagctcattatttgcattacgcgcttgatttttctggaactactgcaatattc

SEQ ID NO: 67566 - DNA, 339 bp, Glycine max
gatattcaccattcaaaagagatcattagttttcgtaactatgagactcatgggcatatgctgattcaggactaggcgcatattcagtttctaaatgcatcatgttcccagtcaaatggtggaacaaagccaccctgatccttttgaaggacggttggaagcattcactcccgagagagagcattcgtatgtagcttcaaaaaatgaggatcaatggagatgggaaagagatgagtctaagatgccaaattctatgacctctcacatgttcaatgaaggtcaaagtcaagggggtgatgccacaagatcatactttcaaggtcagagacctaacccaaa

SEQ ID NO: 67567 - DNA, 290 bp, Glycine max
gataattgtaccattactaatgatgcatcatttatgttttcgaaactatgatacaacatgggcaatgggcttattcatgactaggcacagattcagtgtctcagatgcatcatgttaccagtcaaatggtggaacagagccaccctgatcctttcgaaggacggctgtaagcattcactaccgagagagagcgttcgtatgtaactttaaaaaatgacgatcaatggagatagtaaataaatgactctaagattccacattctatgacctatcacatgttcaatgaaggt

SEQ ID NO: 67568 - DNA, 362 bp, Glycine max
gtcgaccacgcgtccgattaatcttcatatctgtctccgggagagtttctgtgttccggaaacaagggtacatcgtgcgctcatgctccatcaaattgaaatcccaatgcaaatttgtaattacattcctggagtgttctgctttagatcgccttaatgattgcttctgtaatttgaatctgggataacttcctatcaaaggatgcctctaagcttatagctgcaaacatgtctgatcggataaaaaactctccatcagtttcgagactgacatactcgattatcttgtaaaatcattcgacactgattgctcctcaccagatcaaaccttattaaccagaaccagtcggactctactatct

SEQ ID NO: 67569 - DNA, 277 bp, Glycine max
  unsure (1)..(277): unsure at all n locations
gcatgccactgtatcagggaaccttaaggatggccaaggggttcaagtaaatgggggcatggagaagaccagacagaagagaccattaagcaattcatgaaagaaactgacatcttaggtctcttgcaccatcaaaatctggtttcactttatggccgcacttctcgcaattgcgacaaacccatgctagtttacgagtacatctncaatggcactcttactaaacatcttcatgaatcttcccatggtaaactacccatgcatactagatggaata

SEQ ID NO: 67570 - DNA, 340 bp, Glycine max
gtcatcgactctatctcggtatctctctcattgtctctatgttgcattgcattgtcatcaggaggataaacccacggctgctatcacttatctctctttgtcagaaactacccattgctgagaaagacaaacgtaccatctccttcactcgtattctcgctctctcttcagaactctctgagtcacgaaccgataccacgacccactacgtggctctccgagcattcaattctgcgaataaaatggttgttcactgcatgtgtattgtcacatatatacctcccactgaacctgagacaaacttgaaattcctcaatgcttataatcgaccaatccctac

SEQ ID NO: 67571 - DNA, 231 bp, Glycine max
ttcctgggtcgacgagctcactcgcatgtgcgcgctttctgaagatcagatcgacgcgcgctgacgtgctaatctgtactttctatgtgcgatcgtgcacagtagtcttctttgacgaagcttaacacgaagaagagccatggcactatagatcatcatcaattccacaatcatcatatcatatggaaatctcaagctcaacaggtaacttactcatctaagctagtacga

SEQ ID NO: 67572 - DNA, 336 bp, Glycine max
  unsure (1)..(336): unsure at all n locations
cccacgccgtaccgcccacgtccgtccgcgcccggcgtacctctaacctcgtgtttccgtccccgagggagccgagaggtactccatctgaaaaccatcgcgcgtcaggaggagattatacctcatcctcgctcgtcatgccacaggcggtcgatgatcgcccggtgtatcatacgtcactcgtcaagggccgatanatcctaactgatatagatccggaatgccgttaccttgaatggatatgcgtccgcccgaacgtgttcttatgaaggacagcgacggctgtgtatacggcgcctctgccaggcgtctttacccagcccgtgcaaactaacg

SEQ ID NO: 67573 - DNA, 296 bp, Glycine max
aagatacccttaactcaatttctatatcattcaaccttcttatttaattctcaattccatctacctatttatgtaaattgtcatgatattaatgattcttcgtaatttcaaaattttgaatcatctgaactattgtttatactgtttactgcccattccttccatcaattatgtatttctttttttaatatcatatgattattgcacatatatattaatatttaattattatatgtctacaaccctaatatacttattaaaatctcttgctctagttatataaattattttttatc

SEQ ID NO: 67574 - DNA, 261 bp, Glycine max
aaaaaaaaaaagagagaaaagaaaaaatttggtttataactttttaacttattggtcacttcttcttcttcttcttcttcaatatcttggttctttgatattattctattgggcaaaaaatgggagttccagagagagaccctcttgcacaattgagtttgcctcctgggtttaagttttaccccacagatgaagagcttttggttcaatacctttgccgcaaggttgctggccatcatttctctctttccaaccttggtt

SEQ ID NO: 67575 - DNA, 429 bp, Glycine max
tcgtaccgcctcacgtcgtcgcggttatttggttctccttcctttggacgaatcgatcactgatgttcgatggagcaaggcgagaagtaagaatgccagactccagtaactgcgaagtagggttgttcgatataggcatcacatggtgctcgggagacgaggcggggtcccaattagcaatttgtgcggtaaaacgacgcgagggagcttttgtgtgtcggcttgttgatatgacactcgctctctcaaaagtcctttacgcccgtagagggggaagggctttcccgtccctggtgataacaaacatccactcggtttttcgcgcttttacttgcctcccatctttggatctcgatgcttctaagttccttagggataagaaattgcgatcgcatgtgtgtaacgaaaatttcaatggcttgttgcaag

SEQ ID NO: 67576 - DNA, 200 bp, Glycine max
ggatctgtttaacacagactagctgtggtagtagctatcgggtgaaggtttttgcgccgcgggtaggtcacaccgacgggcggaagcgtcgatgccgttaaaccctataaagaaacgacgtctgaaatggaggtggtacccttggagccgcagtcgctgaagaagctaatcttcaagtctgtgaagcgcgctctcgatct

SEQ ID NO: 67577 - DNA, 227 bp, Glycine max
gcaatattgattgatgtaagtacatgatagataggctaacttgtacattaaataggaagaaaaaaaatacagagtaggatgagagccaacagaataggggtaaaggaaacagaatgcagggaagcacgggcctggaatactccttgcctttttagattacaatattttttttctggttccttttgtaatttgcattataatatagtggcttcattcttttgttggtg

SEQ ID NO: 67578 - DNA, 300 bp, Glycine max
aaaaaaaaaaaaaaaaaaaaaaaaaaaaaaaaaaaaaaaaaaaaaaaaaaaaaaaagaaaagaaatataaaaaaaaaaaaaaaaaaaaaaaaaaaaaaaaaaaaaaaaaaaaaaaaaaaaaaaaaaaaaaaaaaaagggccccccttttaaaggatccaaatttacttcccctttttttcaacttaaaaatttttttttagtgccacctaatttaatttacttgtccttcattttaaaacttattatcttgaaaaccctttcgtttcccaattttaatccctttgataaaaatccccttt

SEQ ID NO: 67579 - DNA, 299 bp, Glycine max
cggacgcgtgggcggacccctgggccgacgcgtgggccgacgccttggctttttgattgatttgggatgaagaagaacaagtatggtaattaaagttacatcaattttacatttacatcatttaaatttgaggggtgtttctgtttgttgatttcgtgtctccatacttaggtccaaggaagagagagaaaaaaattgagaataacagaacagaatcatattcgtattcatgtgctgtagctgaaggcataacatacatcactgacccattacataataaacctttttttttctttctc

SEQ ID NO: 67580 - DNA, 336 bp, Glycine max
cagcattcaatggtactaaagctatttcggaaagggtaagtcatatatgactcatttttttgtctcattgagatattgtaatgacaattgcttgagaaacaaaccataatcatattgaattttgctactggaagctactaagtagagcatacaaaagtttgtcattataattcggtgtttgctatcaaaacttgtcacataagaatgagagagtcttgtccttagttatctcttattgtctttcttgtacttaattttcattttctattataatcaattctccttttaaccataataagtacttagagcataaatgccgattggactattattttt

SEQ ID NO: 67581 - DNA, 135 bp, Glycine max
ccggtctcggcaattccgagggtacgacgctcacgcgtatcgtagaagaagcgcgacacgaagagagtgccagtcgaggtccacagccgtggtaggagtctcgagtcgtgtcgcgtggaatctcgcacaagagac

SEQ ID NO: 67582 - DNA, 182 bp, Glycine max
tccacgcgtgcggggtacttcaaatcttaagattccgccaaaaaaccctatgagtgccgatgaagagtcccttccttctagggcatgctgtgttattgttgagtttgtctctggggggacactaaagcaatatttgtttaaaagtaggatgaggaaacttgcttattagattgtgattcagc

SEQ ID NO: 67583 - DNA, 199 bp, Glycine max
gacccactcgtccggtaagactgtcggtgaataatattgaacttctatagacccaatgattttttgacacaatgggggcttaatattataacgctagtttttgatcttgacctctcataacatccattactcaactttttgatcacatcattactaataatatgttttccaaaaatatcaatgatccctactcttttat

SEQ ID NO: 67584 - DNA, 227 bp, Glycine max
cgccacgccccacgcatagcgaaagtcgggcaaataggtttctgaaatacagcttaccaatagcctttaacccatatgggtacggtcttatgactctcctgaaaaaacaccgcgagccttcaatactcacctttactgtctacgtggccagcatgccaatttcaatttccgcaacacaccttgcaacatggacactaccaatgctccttaccaatctcttaccccac

SEQ ID NO: 67585 - DNA, 202 bp, Glycine max
acgctcactcgtactcccacgcgttctcccactcgttccactggcagggtgataccaccagggggaccgtcacaacgcaagccttcaccactattttccggccatgatcctcgaaatacaagtttcagaccagctcttactgtaacataaccgagaaggtgctatcaggccaatgtcgtgccctccttctgcctctttcaaa

SEQ ID NO: 67586 - DNA, 251 bp, Glycine max
gacccacgcgttcgaagcaggatggactcgcctatggatcgcctcttttgttactccttatctgcaaatcgtggcgaactgattcctcatggtcctattttttacccttactccttactccaaataattagcaacaacctcatatccactatctgagactgtttattctaataccacctatattccctcctttgatctttatcctctacagacaaacttcaacatcctacccgattccataacagttttac

SEQ ID NO: 67587 - DNA, 329 bp, Glycine max
tcccactcgtcctccctcacgttcgatcactcttccccccaagcctacgaccacgcgtgcgggatactatatgcaaagccatggatgttaattcccatcctctgtgcacaattcttacccccacacgcaaacactcacttgttattccacaacacatccccaatacttctaaacattctccatcattatactttcccgccaacactatatccaattcttttcgtttatcttctccaactcttttgttcgctacgccaaaaaaccaattcatcatacctaacagatagaacaccaatgcaagcgatttggctctacattattctcattcc

SEQ ID NO: 67588 - DNA, 222 bp, Glycine max
ctaaccctttatattattcattcaacaccactttctccaaccttcaacatctcctaacacactttaacaaatttttatctctttcctaccctcaaacccttttccaaattccccctcttaacattctcattccctctttatcctccccaaaatcacatctaccctttttacatttaacctaaagtatacctttttccacccatattatcatcccatcaaatc

SEQ ID NO: 67589 - DNA, 231 bp, Glycine max
ttgctacgtccaaacattcctacctttaaccctttcctcaacccttctccctttgggttcattcttacaaatagttctctctcataattcggctcctaatactcatcccctccctttccacttttatttatcaaaaccacctttattaacccttatacccacaataaccttataagtcatatacttcctatcataaaaccaccccaacaatctcattcatcttttctaatt

SEQ ID NO: 67590 - DNA, 262 bp, Glycine max
ccactgcacacttttcatactaaggcgccatttatatttgggactttcttccccccaaatatcataaaactctctctttactcatttcttttatcacttcttttcttcctagttctcataatcttcaccccatccatcccccattcccaataataccattatttctcctaccacctcaccttcctctttattcctaatacacttaacttcttatccaatttcccttttttttttatttccctttatttcactttttctctct

SEQ ID NO: 67591 - DNA, 204 bp, Glycine max
cccactcatcctctcttctctttttttttcttctccttcgtttgaatcaatcggtgcatatgttaaaatctgaaatccccttaaaatctctcaccaatctcatcattactactcttctcttattcatccctcacattttattttttattttccttcttttttatccttttttttatttatactttttttttccctaatttttta

SEQ ID NO: 67592 - DNA, 375 bp, Glycine max
cgaccgcactcgtacgattttatctgctaacaaccagtccttcccctaaccctaacttgtaaccttctcccttgaggtacattcttaccgagggcaatctcacattattcagctcatattactcataccgagtttctacactttcatttataagatccacttatattaaccattctaccaacattcaggtgttgagttgtatgcttcctaatataaatgtacgccaaacatttcattcatctggtctatgagaagaacaacataattattaaaagaaaggaagctcctctaaaatatgaacataaactagaaaccactcctgaaactaaagagaggaatctgaaatgctcaaagcataaaaaaagatctgtctct

SEQ ID NO: 67593 - DNA, 282 bp, Glycine max
cgaccgcacgcgtacgatatcatcttctattaaacaggatctcacctaaaccctaatcatgtccttctctctcgaagcatatctatactgagggagttctcacactactctcctcctattaatcttacctagatcccaatcctacttttattataagcatccaaggaaaccatcctaacagcttattttgcttattgcttttttcgctttaaataaattttacaacttactttatacttatccgttttcaacataaacccaatcctatacccaaacctacac

SEQ ID NO: 67594 - DNA, 225 bp, Glycine max
gcgagtgccacgtccaaacaggccttcgagtaaccaataactgagccctacacccttgagaaagatatcttacagatgcgtgtctctcataatgcagctcttaatacacaaccccaccctttgcacttttaattatcaaaaccacctatatgaacccttatatccactatcgggtgttttgtttttatttttattaaataattatttctacttaatttttttttt

SEQ ID NO: 67595 - DNA, 224 bp, Glycine max
tcaagcgtagaccctttagtattccttattacccacccacctgggcggcaaattaccattttgtcactaacgctcaactaatgttcattcccgccaatactacataattactgcgaatcttataaaacaaaaaaaaaatgccggtcgctatataggatcccagcttacctacgcgtgcccacaacctaaaagatcttatatagtgtgacccaaatttaattcac

SEQ ID NO: 67596 - DNA, 364 bp, Glycine max
ctaggtcatatgtcgaatcgttcctctaggcttattgtggacacggcaaatacacttaatggcgagtgattcactcgcgtataacatctatttattctcaattaagtagccagttgggtggcatattacctttttggggctggcccctatatgatgcacacttacgtacgcgtgcctgcaacgttgtagaatgttctataaagtacctaaattgaattccctggtcgaggatccacaactacgtaaccgtgcaaaccacgtcatatccctactatatcgccttgtaaaacatattcacttgcccagctgttacaatatcgaaaatgcccaaaccgatcggccttccaaacaattgcgcatgctg

SEQ ID NO: 67597 - DNA, 346 bp, Glycine max
  unsure (1)..(346): unsure at all n locations
cgacccacccgtactttaaaatccatactctcccacatttctttcttaccattatcaggtccctancttctacatagttttcatcttaactctgcactccccctcacatattattccatacatatcccacaactttattcttatctacttatcatctcatcacaatttacaaccaacattaatatatatttcacctactcatttatactcaacaactcattttacaactataatctttattattaaaacctacttatgtatcttacaaaccactttcatacacacatatttcttattctaataattcaacaaaaccctcccttttacattatcaacatctttaaac

SEQ ID NO: 67598 - DNA, 199 bp, Glycine max
ggggcgaccacgcgtcctcccacgcttttctaaatctctctcattggctttttagcaacacgactccattttgggcgggggatacttggacgacgacgacgactattctcatttggactattagtaccaacattacgaccactaataaatcgtgccctttccctccaccgttatctctttcaccgtttcctttcccggt

SEQ ID NO: 67599 - DNA, 272 bp, Glycine max
gattgtcctcaaatttctgaaagaggtgtccaaggagctgcaaagtctgtgtctttcaggcaagacttatcttggatgtactgaacctgttgggttttagggacatgaagtccgttgtttttttttatggccatcttcaatgcttctatatatctatagtgtatcacacacacgtaagattattctgttgtattttttatttttatgtcaaattctgttcttgtatttgttttgtaaatcttttaataaaataaatggcttctctggcaaaa

SEQ ID NO: 67600 - DNA, 345 bp, Glycine max
atactattgtcctccaatttatgaaagatgactttgtttttctgaaatgtctttccctggtatgggcaacttatatcgggccggctgacccttcttttttccatttacatgacccaagttcacttctttggttgccctcctcgaagaccaacacatatattatgctttttgttatcaacagaggtaataagctattctttcaaatgttgacaccacatgctaaaaataaatttgatactattttcttcctaccaaacaccttttttgctcaatttgctaaagaagtttaataccctcttaagaagggaaggattcctttctttgaaatccaatttgaacaccgat

SEQ ID NO: 67601 - DNA, 334 bp, Glycine max
  unsure (1)..(334): unsure at all n locations
cccgattngaagtcagtgccacatgggaggatggttacactgactagtgaggccaatgctggagatggaacgcctagtgcgcgccacacgattaagttcactgactgaatgctcaccaactattggccatcctggactgatatccggattcgctgagaggtggcacggggagacaaacaccttccatcttccgcatagagagccgaccaacacattggatgatttatctgcactacatcatgtgcccatctgtggcaccttgcacagaacacaacgattctctatggaggacgccagacaattgctagagagacatgttggagggaattgccga

SEQ ID NO: 67602 - DNA, 87 bp, Glycine max
tataggatccaaacttacttacgcccgcttgcgacgacataaattttctttattgtcacctaaataaaattaattggccggcgtttt

SEQ ID NO: 67603 - DNA, 89 bp, Glycine max
tcgaaacattctgggaattggaatattctaattcctttaactattcacgtgatgatatttagacatttataaattacaaacatcctctt

SEQ ID NO: 67604 - DNA, 185 bp, Glycine max
  unsure (1)..(185): unsure at all n locations
gaaacagaaacacacaggagacananngagacgcgggncgcgangganggaggaggagccaacgcgcgcangccncgggncaaaaaccgcgagccgaaggacgacnacgccaagnncgagccccgcgacaccgacgcgagcancgccaacgcgccgcggcgcgngaagaacgcggaggngccgac

SEQ ID NO: 67605 - DNA, 368 bp, Glycine max
agtcctagatccgtgcgttcgatcgcgatctatgatgcgagttatctaaccccagtgggagtttcactcacacaccgaagtcagttacaacataacatactgcttcctctcacctcacatgaatctttctgtgtctgatatccgcgccttctcttcactttcatattgctctggctctatatctccgaatcacacaacaggagaattttctgtgggagagtttcaatttttcaaatcctgtcatggatccatttggaattgcacacgcgtttctctccttctatcatcgtcagatattaatagcttttcgtttctagaaggaagggtggtttagtttttattaaccatagatgcaatcatggtataaa

SEQ ID NO: 67606 - DNA, 206 bp, Glycine max
gttcaatccttatgattgggacactcacccatgtgaccgcatcaggaggaatcatcattttctggcaatctttagccagacccgatcaacaacaacttattgcattggggaggatttatttgcatacacagaccagccattccgttttcatctaccttacctttgtatatagattttttacactttaggcctagttcatactcaat

SEQ ID NO: 67607 - DNA, 391 bp, Glycine max
  unsure (1)..(391): unsure at all n locations
gcgtncgaacagaaactttgtcagaatgtggaagccacgtgtcgttcccagtgttctctctttgctggttcttcttcactcgctgctcgggatggtctctgcacaaggcattatccgaaccacttggaacactctcactggttcgtgtctcgtttcattcttctttctctcccttctgtttcacacttattcatatgttgccgacaaaatgcaccaaaaaataaattataagaggaattgttcgaagcttgacttagcttgtttagtgttccttcgttcatctttgtcgagctcgtgctttgaaaattatgtatttatttatatttgatgtttgtagaatttgagtgagtacgaaagtgagaattttacagttggagcaggtaatcaactc

SEQ ID NO: 67608 - DNA, 397 bp, Glycine max
catgtttatctcatcaggcacactaaattttatgcagggtggtatctactatcaagggggagtgttttagagaaaaatattgccaatgtcattactgatggtactattgaacgtgttccatggactaatcctaccccagatagattgcataacactgatgatagataactaaactaatgccatcataacataactctaatgtaaatgaatgaataaagtactatttcggtatcaaacatcaacttaaaagaatttgatctaccttaaatgcattcatagccggggtgttttaatcaatctttgaagattaatgtaaaacctttaactttacataaagacacttatatacttatatctgtctctacgacaaaaaatatgttacatattttaataacct

SEQ ID NO: 67609 - DNA, 302 bp, Glycine max
atttcatatgcttatggaagttcatgaacatatctcatttcatttatagaaggttcatatcaactgtcgaggcgattttccattcaatgacccattcctctaacacaaaattcaaatttgtttgtgtaaatcttttcttgtggaagcacaattacatgatttgcctgtgaggactgaatcatatctatgtggtggatatcttcattcctgcttcaacttacagtgatggtatacaaaaagttgtaatggtctggacatgacatttatatttatttttttcacgtatttttttaaactgatcc

SEQ ID NO: 67610 - DNA, 290 bp, Glycine max
gcgtacgatttacggctggtgagtaccacttctattcaatgaacggtttacaaaacattcaacggtggcctttggacacttggtagggcttctgataaaaggtccgctggagtatctacatatgactctacttatgctcaaagctctgctactgcacacaccaatggatgctacccacagcccacatatttatgccaacgaatcccaattggtcgaaaacactttgggttgggaggcactaagtgtcttacaagccattgtacatagacacaactgatcgactggttctg

SEQ ID NO: 67611 - DNA, 277 bp, Glycine max
cgggcaagaggaggagtcgttgagcgtaacttttgcccggaacaacgtctggctacccaatgagcggctgcgcctgcaatcgcgagacagaccgggacttggggttggaccacagcgacgcgatggtccacagttgcgtcatgcacaggagtgggcttacgatttcatcattgagtgacacgacgaccttttctgagagcttacaacttctaaagcgatgaagaagagaggctgctacttgggagcatgtgataagatacaaggaatatactttgag

SEQ ID NO: 67612 - DNA, 438 bp, Glycine max
cattataaccctgaaactccatttcactcacagaaaagtagagatatagagagagaaagtgcggcagagtacacacatacacaccacttcttcaagagagagaggtgtgagaaggaaaataagaactgaaagaaaaattgtgctaatggcggaattaaactttgcaaagttaacaactgataaagaagatcagtgatgcgcctctctcttggtgatgatggtgctctttgcagagaaaatctcactgcagcactcacacgcacacccttcttcgagtctgaatctggatcagtgacaaattcttcacaaaagggtcgctgactcttcatagagacacagatcatgacgttggatgcaaaatcctagacacactttgggggttatggaaacagactatatgaaccatatagattgcaaggattccgagccagagttttt

SEQ ID NO: 67613 - DNA, 168 bp, Glycine max
gcgattctgagcgaaaactgaagccatgcatatctattgtgaccttcatactgtgcttaggctctatcatctccctctctctggggcccaaattcgcgtgggacccaaccacttctgtgcgaatgagtatattcatcagaaacctgatgagatgacccagattgaccc

SEQ ID NO: 67614 - DNA, 92 bp, Glycine max
ctggattctaatgtagtgagtcgccggcgttttccactctaagcacatcatcattcaaatggggtggcacaccatgataagatgtttattga

SEQ ID NO: 67615 - DNA, 357 bp, Glycine max
atcacatctctaaccatcgccctatactatctactctctcgtacctcctcattctaccaggccaatacggtaccctgtctctttacaccaatttacaaacccctgacactcaaattttcatccctcaacatctccgtctttctctaccttaccggaccaactcaacattctcctcttgtcacctatcttgaccacacttacgatcgtacctaacaagcataacaacagattctcagtcagactgaagcatgccacgaaagatgaaaccccaacttaaaatactccgacgatgagagctctctcaaaccgacctatgaagtctacatcttccttgcgaactctccttacgacttttat

SEQ ID NO: 67616 - DNA, 412 bp, Glycine max
caatttctctctcttctgctctcactctctcacttgggggtcgaagatgagaatgggtggagcagccatcagcagcagctacaccaccacgtccagattcgcttttagtgtctgctctctctcccctctccagtcctgctcaaaaccaagttcctgccttcactttctagaatttctgtcaagcgtctctgcttcctgttacaaagtcatgcgcacatttgcgcgaacaagccctgcatgaacctgttgaacagactcgcgtttggcatcgcaagagcaccagacaacattgattcatccattcctcagggtccagatgatgacataccagcaccaagccagcattttgcctagtttggtgctggctgcttttgaggtgttgagttggcctttcataggttgcctggtgtga

SEQ ID NO: 67617 - DNA, 116 bp, Glycine max
caaatatcgacgtacggtggactgatctaagaaaatattctggttcttatatatgaggccggttccattcaatggaggaaatcccaatgcctgatattatcattaacaaaccagat

SEQ ID NO: 67618 - DNA, 439 bp, Glycine max
accacgcgtccgcacattttcatcctcgggttcgccacagcaaagagtgaacgcttttggaagggtagaatggtccgatgggaagcacgtggttggaaccccaatttcgattaattggggttgatgcaaggttcatcactcactcgaatagggggtgtgtcttgattggttgacattgatgatagcggggacctcgtgcttgattggtgttggttctgtttgttccctgggagaaatgttgcaaaggggaaaaaatgtttggctcatgtgtttcttttcttcccggtgtacagcgttctaatcattgatgaatatttttcgtcgaccatcttgacattaaagtttatgttcaactactttaaagtgaattcatttaactttccattttaatttaatgtttgcatcaaagccactagtagttgtaaccattctcgtacgc

SEQ ID NO: 67619 - DNA, 431 bp, Glycine max
ctagacactacattcaaagacggttattacgtaataaccgtctttgaattggtctaaatgtcaaagacggttattataataaccgtcgtaaaaagcagttgtgtttcaacgacgttatatacaacgacggtttacaaccgtcgttaaaagcacttaataaccgtcgtaaaaagctatttttctagtagtgaccgttgtaggaccatacatgtctaaacattaattattaataaaatacctaatctatgaagaaatatagtactactattttatgtttgataatcaaactgaaatatattatcatttcatggatataaatcataagagttcaatgagtatcaaagtcaacctattaaaaatcacagttatacgcgtaacgtttaatataattattataaaagttgataaatttattaatcatataaaattat

SEQ ID NO: 67620 - DNA, 330 bp, Glycine max
attagatcgctagcgatcgctctatacgatctaatcttacgtacgtgttcattctacgtgggagatatcatatagtgtctctttaaatcaatttactaacccgtgacactcaaattttgagacttggaaaactctggcgttatctaacttaatggactagctgaacattctccttttgtcagttgtcgtgatacacaattaggattggactgatcgagcttaagaacagatgctcagtctgaatggagaatggcacgcaagctgtaacggcacattaaaagacgccggtgatgagagcactcgcaaagcgaccgataaagttgacatctt

SEQ ID NO: 67621 - DNA, 193 bp, Glycine max
gtaagatgtatgatggatacgtgccgaccataatatccacgtggataatagaccttatgcgctgaaacacacaggcgaccaattgcaaccacccgaacatcctaaccatgtgatatgacaacgactgaccctttagatatgatgcgctactacgctcttgacccttattacttgatgatccccatgctgctaa

SEQ ID NO: 67622 - DNA, 130 bp, Glycine max
ctcatacaggcgcctgtgctagtgctttatccccgctatccctaactctagaactgggcgggatttgcaccagcacaagaagcatggctacaatatctatcccttactgcatgaaagtctgggacatact

SEQ ID NO: 67623 - DNA, 254 bp, Glycine max
aaacttggtgttttctttcttgtgctaagaaggatctatatctatatccttgaattatcgtatcttttatatctttctaaatcgatgtttgactgatgaccattattgaacctttcttttagtattattactattgctataactatgctacttgaatttatgacacctagggtaactttcggggatttaattattgatgcgctcacgaatccaatctcttgcacaaacttgatccctggtatcatacgaaaaca

SEQ ID NO: 67624 - DNA, 229 bp, Glycine max
ctggtgccctctacacatgagtattcttggctactaccagatactgctatgggatgcaggccaatacagagcacacacagacactaccagagcgctgctatgctgttacttgaacaccttctatgatggttggtgaatactctacatggacttaacatgggtgacagctttgctaaccttgatgtggaacacacgacaattgaatcacccttgtacgctcagacaaggc

SEQ ID NO: 67625 - DNA, 368 bp, Glycine max
atcacttgtctgaccaatgccgtattctgtcttctctcttctcgctacatactcttccgggccaaaaccaaactctttttctttacacgctcctccaaacccctcacactccaattctcacacctcaactacttcgtcattgtattcctagactaaccatctcaccggtatacccttgaaactttcgtggaccatactttcgaattggctcaacaagaagaagaacagatcctatctgaaacccaaacctaccttgaaagttcagagcccaaccgcgaaaactcctgacatgagagcttcactcaaccgccacaagaggtcaagctcttcgctgagaacttgccttactacgttgatagccagaaatt

SEQ ID NO: 67626 - DNA, 434 bp, Glycine max
gttgagaactaagaaggagaagcaaatggcttcctcaatgatctcttccccagctgttagcactgtcaaccgtgccggtgccggcatggttgctccattcactggcctcaagtccatggctggcttccccaccagaaagaccaacaatgacattacctccattgctagcaacggtggaagagtgcaatgcatgcaggtgtggccaccagttggcaagaagaagtttgagactctttcctacctgccagaccttgatgatgcacaattggcaaaggaagtagaataccttcttaggaagggatggattccttgcttggaattcgagttggagcacggtttcgtgtaccgtgagcacaacaggtcaccaggatactacgatggacgctactggaccatgtggaagctgcctatgtttggttgcactgatgcttctc

SEQ ID NO: 67627 - DNA, 142 bp, Glycine max
cccacgcgtccgcgcacgcgtgcatctgtgcctctcctaatctatatgcttctcttatcagaacaacctcagccaatggccatagtcaccaaccaattaacatacgtctatatatcatcatatcatcaccaaattaacaata

SEQ ID NO: 67628 - DNA, 392 bp, Glycine max
  unsure (1)..(392): unsure at all n locations
cccacgcgtccgcccacgcgtccgattttattttgacgaatatgccctggtgctgggtgggggtgtagctgcgtgcctccctccatcgcatcatactatatggatagggtgttctcagtggacgatatcttctatcacttctggcagccgtctatccctgtcttcgtcggccatacatactcccagatgatccgcagctgcttcgagtggtgcttccancgctgtctccaggaagcttccgcctccgcaccctctcctccgtcttcttactatgccgccgacgtcgtattcgtctggatcgaagatcaacctaaacccgcccctccccctccgtcaaacggcgccgttctgcccaatgcccctggttccgtcccccttgactccgacgaata

SEQ ID NO: 67629 - DNA, 123 bp, Glycine max
tcgaacttaatacacgcgcgcttgcacactcatagctctcgtatcgtcacgccctaagggaaggccacggccggcgcatcacacagtcgcgactgctaaaaccctgccgtcacccagcttaat

SEQ ID NO: 67630 - DNA, 290 bp, Glycine max
atataatacaacatcatccaaacagacgtgcccgagaacatctatacactagtagaatcgcaacaagctaaagacacgaacctctcacataaaggattacctttacacctttgactaagcaaaatctaactcaactcctaaaaacgcacactctactaacaataatcattgatgagatccaaaaccactgaacaaaataactgataaggatattacaactaaaccagcatgctcacctacatacaatacaaaactatgaactagacttttatacatcaaccgcattcaaa

SEQ ID NO: 67631 - DNA, 54 bp, Glycine max
aatgtacccaaactaccatataaaaccaatttcacgaacgataaaccttaattt

SEQ ID NO: 67632 - DNA, 237 bp, Glycine max
acgaccacgcgtccgtccatatccacatccaaaatctcctactttactctctctctctctcttgcaaccccgacacttgtattgtctcaagcaaccatggcaatggcaacccaagcctctctcttaaccccaaccctatccggtctcaaagccagcgaccgcgccttcgtgccatggaagcaaaactccagcctctccttctccagcccgaagccccttcaagttctccagaacaat

SEQ ID NO: 67633 - DNA, 346 bp, Glycine max
ctcttataataaaaaaaccttagcatcgactctactaactgtctctaattggcgaccccggcacttgtatgcgtctcaagcaaccatggcaatggcaacccaagcctatctcttaactacaaccctctcctgaatgaaatccaacgatcacgcctacctgacatgccaccagaaatccagcctgttcttctccagcaccaagcccctgaacttctccagaacaactcacataccatcacgtcgacgagaccacagaggcaccagcacaagatcacgctgcacccgtccggctcaccccaccagaacttgaaccaaacaccacttaacagatcttcgggggcaaaac

SEQ ID NO: 67634 - DNA, 209 bp, Glycine max
gtcgaccagcgccgaggaatcgatagcaccaaccgactgccctgaacatggacagctgctgaggcggagagcgaggtaccgaacctgcggattctacgctgtcgatgcacgtagttctgagcatcatagtcgctggctccaaaggccccacactcgatcagattctctcctttctccgatccaaatccaccgatcatctaaactccttc

SEQ ID NO: 67635 - DNA, 149 bp, Glycine max
aatgaatcgaaaaaaactcatacctacgtattccagagcatctataaattagtgttatgggtagaatctagttacacgtgcatgcgatgtaatggattttcttttctggcacgtctgtgcagacaatcggctgacttttaacaacattc

SEQ ID NO: 67636 - DNA, 270 bp, Glycine max
gccacgcatgcgttcactgttcactgatagcataaacctcatcttgacgatcaaagcctagtgtcaggtttgtttcaagatatagcaaagaattcttctcaaaaaaagtgaacatttttcatgttttgtacaagttttgaaaatatatttttaggaattgttgactcgtaggaatataaagtactgttgtcacttgccttattgaaagttgggtattttatgttttcatgggaatgaaaatcaatttctataatatctatttttatttca

SEQ ID NO: 67637 - DNA, 215 bp, Glycine max
gttggttaccatgccactgctcatattctttcacaaataaaattgctactgaaggagttagggtgtctttaaatatggaaagaagcatagcattactcactagtcttctctcaactgttgtcggagtctatgcatatgattttgctgcagctgttagcacaagtagaagatctctaaggttagccaaatttactcaaaatcattatacaaccttg

SEQ ID NO: 67638 - DNA, 186 bp, Glycine max
ttatgtggtgggatattacattttaacatcaacaacaacatcaacaaaagggggtttgggggcaaactctaattcgatcgataatattttttttagttcaacccttttttttttaaatggcttatccgtactccaatatactaaatcccaccttgcaaaaaaaaacaacaaggacctttctggctt

SEQ ID NO: 67639 - DNA, 218 bp, Glycine max
aatagaaataatataaaagcatttctgatattcagattctaaacctcttatgcccgccaaggttaatttcgaataaactgcctttccattctcattcccaaaactatacttgctttctatacattctcaaatgcaacaacaaattcctttttcttttatccaacatcataaaggataaacaagcttataaatgcactttatagagcactaattcttaa

SEQ ID NO: 67640 - DNA, 171 bp, Glycine max
ggaaattatattcaaaaagtgttctgttttgcgaggaagaaaatgtattctcagacatgatagggattttgtatacgaattatgaggaatatattttggtttgacattgtcctctatgtaattttgtacaatcaaagaataaggaatttttgtctgaattaacatttaaaa

SEQ ID NO: 67641 - DNA, 120 bp, Glycine max
gcttattctatccttttcatttccatgtaatgaaagcttctagaatattaaaattgctgcccggacaactattggttgtggctctagtcatgatgggtcagcttatcttgattttttttc

SEQ ID NO: 67642 - DNA, 228 bp, Glycine max
tcgaaaaaaacaactttgcggctgcgctgctgctgatagcgcggggcataggaaggcggtcatgcatattgtcgactaaccaacgattcggttgagcgtttttaccgaagcgctgacgacggatgcagaagaaaatggtgctgtttgcagtggaagaggaaatgctgatcaggcgggcgctctggtaggaccaagcttaccgtcgcctgcgagccaagacataacttt

SEQ ID NO: 67643 - DNA, 203 bp, Glycine max
ccaacatttaaaaaactataatctctcccgtcaatccgtgttatcatgggttaaaaaaagagggtttgcgcttcttgttcattataaaattggcggatgttaaattttatgggattgaacgcccctcttttgtcaattaaaacctccctttttccaaaaaaaaaaaaaaaaaaaaagggccgccctttttaaagaacccaact

SEQ ID NO: 67644 - DNA, 403 bp, Glycine max
gccaacagcacgggacttggattaattgaatctaaccatgaaatgggagaaagagagatcaccaaaaatcaacctggcttccccataaaaataatgaaccaaatacagcagctacaaaacgaaatctggctagttaaactctagaaattcgaacaaaaaatcaagtgcacccctacagaaaagcgcatggtgttggtgagcaacttctactcaaccaaacagaaaaagaacaaagagtgaaaagagaagcacaaacgaattatcatgagccaagttgctccaccgatgacttctgtaaccacaccatattatttccaattgaatgaccaagctggaatcaacatattacagcaaacagcttgactaacagaaacttgagaccaagcaagtgcataattgatat

SEQ ID NO: 67645 - DNA, 240 bp, Glycine max
gctcactaataggaaagagctctaaaccgaacatgcgtacgtacacgtacatacacagaaatagctctcggataaattaacggacggtttaatgactgtccattcctttacaacgtccccactatttaaaccttgatttttcccaaataattacccttgcacttcatccccttttcctcctttgattcaaaaacaaagaggcccgaatcgaattatcagatttactgggtcgccgggaac

SEQ ID NO: 67646 - DNA, 304 bp, Glycine max
aaaggttttaatacgagttggagtatataattatggctcttttcaactttttccagaaaaggaggtctggggaaacgaagctatctggctacaaaccagtagtagacgcactgttacatcttcggacgctgcctatccatgctcctgtgctgacacgaccacgctatttcctattagaccctgtactctaactatgcttatacctatataagcatcaaaagttatacctttgtatataatagcacccacccttggcgtaccgatattgcttttgtcatacctgacgacaatgaggcttgtatga

SEQ ID NO: 67647 - DNA, 441 bp, Glycine max
ggctgctcgtgcacatttgaagaattttgcacatctactgttatattgtttcaattgttataacctttttgttagcttatcttacaatgttgtgtactgaccaatttacctttttttttcctggggctttattctgaagccgaatgcaacgctagggatggttcttgattctgcagaaaaggttatttcagaagttgtgcaagagccggtgataaggcatgttcttgtttaataattattgtttttagagctggtctatctgtattttgtctttatgctgtctcttgtgctttttgatgtatcaggagattgagactatcatcgacagtgtgagatatcagtagcaatatctggaagtggcaatctttcagtggagaaagaagagagccagcaatttgggtaagtactaatttaaatggctggccttcatttctctatttt

SEQ ID NO: 67648 - DNA, 322 bp, Glycine max
caagattgcagctcttctaagttcttacacctccattgaacaatggcctacacatcaccatgggtgatcgggactttacttgtttttgacaagcttttaaccgttgatttggacaaaccatttggcaaccttttgcgtaaactgagagctgcaaatccaccaccccatcttgcctaatcatcagagctagatcctatgctcctcaactccgtcagacctaaaaaacactggcttcatccaagaagggtcttgttgccattcacaagtccaaagctacctgcttgcatcttaagccttcaacttgtctagctaacactgaatc

SEQ ID NO: 67649 - DNA, 284 bp, Glycine max
  unsure (1)..(284): unsure at all n locations
cccacgcgtccgatttctttttgatttcaaaaattttccggaaaaaatttgaatctattttgtcaagcgcagaaacctcactatcanaactgattatgacaatatacactacaagagaggggtcttctacttctaactacaactttattggtgttagatgaaattctaacacggatgaaatttgacctgcttatacaaagctggctatgcaatgctatacctatacttcacatcgtcgccttctttgctggctgaagataaacacatattccaagccattcaag

SEQ ID NO: 67650 - DNA, 110 bp, Glycine max
agcattgctcttgtatcatattctaacccctacaaccagcaacctccacttcttaactttagaaccagagtgtcttgacactgtgttcacactctttaactcaaaaacac

SEQ ID NO: 67651 - DNA, 222 bp, Glycine max
  unsure (1)..(222): unsure at all n locations
ccacgccttccnnacacntnnnccacactttctnttctacttcaacacaccttcgcggacaccggggatcacatctgccatttaaatcttaccttttatttctatgcacacaccaaggccacgccaagcatgtaatggacaaatgtcacaaacgacattgtattattcagacacaaggagtttgactctgttttggccgcaccaatccattaagatctagct

SEQ ID NO: 67652 - DNA, 150 bp, Glycine max
acgaaacattctgggaatagaaatattctagctcctttaactattcacgtcatgatggggagacgtgtataaactacacgcatcctatgtaccttttccaaatgaaaactggtttggcggccgctctacaggatccaaacttacctactc

SEQ ID NO: 67653 - DNA, 280 bp, Glycine max
aaacatcatgttaatatacatattctactttttttatctaatcacatcataacagtgtgacgtttactaatcacaaacaccctataataaaattaaaaataaaaaattcaaagggcgacccttctacacaatccaagcttacctactcgttctcgctactacctcacctctctcaatagcttcacctaaattatcttcactggacggcgtctaacaaccacttcactgttaaaacccttgcctaacctaacttattcaactttcaccacatccctctttc

SEQ ID NO: 67654 - DNA, 284 bp, Glycine max
  unsure (1)..(284): unsure at all n locations
cgaccgcccgaattcggtcgccacgcgtcgggatactagaacagtgtgagaaaagaagtccttgttttcttcgttgctacaattttggtagcatggcaatgccatgcgtacgatatgttccctctccgaatgaacactggctatggtgcccgtactccggaggtgaaatgcgcaagttggaagcttgctgtggaagcacacaacatctttggctttgagaccattcctgaagagtgcgttgaagcaacanaggaatacatncatggcgaacaatatagatcaga

SEQ ID NO: 67655 - DNA, 313 bp, Glycine max
gagacgcctacaaccaggcgtacgaataagactgtcttagactacttcagaactacaattggggaaggaggagcttgatatgacatacgaaatgaataaaattgcgactgagcactgagatccagggccactaatccaaaagtaaagtgctcagggcagaatctggcatttcaagcacacaacatcaacagctaataaacgatctcatgtgagcgactatatatatgcttatttatgcttagttgatcaagggtaaaagatcatttgttatacaaaatcgaactatttggggtcattttcttaggcgtggaaa

SEQ ID NO: 67656 - DNA, 445 bp, Glycine max
  unsure (1)..(445): unsure at all n locations
gctcgacctggctccctcactctctctgctccgccgccacggaggttgatttcggccaccataggcgttgccttctgattttgcccaatccaagctgcgaccatcaaagctatttccgcccaccacgggattgcatgttctttggatttgagattgtgtggatgtactgttggtattcaattttagatacatttcatgaggtgagaaggagacgtgactgaaaggaggagtcatatgacaccataatgttggaaaagtatggagaagactcttcaaagcatccattggttgattcaacagtgtgggcagatgtgtcagattcaaagaagagacaaatttttggaactatggctacttcatcttcaaagatcataggtccctcccacatttgaatttctacacangaagtttattaaggaagctgtaaatggtgccatgacttctt

SEQ ID NO: 67657 - DNA, 200 bp, Glycine max
tactttgatttcaatccaatattattcttaacttatttttcttatattaattactctgccatcggtacattttaaaccattcacccactctaccttatcaaacatccaatgcaacttcaataaacccacactcttcatccatcctttacctttcacactcccactccaatgcctcctcctactcccttcataccccatct

SEQ ID NO: 67658 - DNA, 439 bp, Glycine max
tgcacttcaaacagtttgggcgtcatgtggagagagagagcgttattggtgatcctgctgctgcttctagtccagcaaatttgtgctaccaagaagcaagatcatggttgccccctttcttcctgcggcaaaatcaccaacataacttacccatttcgattaaagggccaccctaaaagctgcggcgacaataggagtcgatcaacaaacaaattgctcctcccttcctcgctatttcttgtctcgctccaatttcactgatacttacagtgatatttacaacatggatccataccaagctggtcaatattcaggtcatcggaatttatttatttgttatcggtaaagattagttgttagtttttatttatgatgaaatccacgactttttcattctcaattctttcaatacttaggtcgtagtaattgggacaggctt

SEQ ID NO: 67659 - DNA, 118 bp, Glycine max
gtatgatcgctgatggatacgtgccgacgatattatccagggggataataggccttgtgcgggggaacacacagcgtccaatcgaaaccgggaagaacatatgaccatgagagatggc

SEQ ID NO: 67660 - DNA, 118 bp, Glycine max
cttgaagtagatctcacgcggacactctatagcatgcacgataacttactcgtaccttcgggatcatatcattcctaaaatgtctcctacattcaattcaatggccagtatactacaa

SEQ ID NO: 67661 - DNA, 283 bp, Glycine max
attacacatgaaatttcgaactttaaaactctaaattccctatcattgattagatgtgagttctcgtgtactattacggattcaatacggtctttaaagcatcttacatttctagcacttaattctaatatgttcactgtaactataccactctctcttgaccatctatcaaatattgattgacttgatcttgcttaaaaccatctttaaagtactattactgtctctgatgaccaatgaagaccatgccttgaccttcttcttaaggcacaacactttcata

SEQ ID NO: 67662 - DNA, 249 bp, Glycine max
tattcataacactatacactccttcacaatgattgagccatggttttattgaagctggacataaatctgatatcatcttcatcatcacattgctaaaatcatagattatagaaaatactatttcctgttaatataaataccataatgattctaatccaaataaaatttttgatgatttaacatgtaacttattaaacttaatgttcatttcccaattatatttctgataatatccttaacaacaaacac

SEQ ID NO: 67663 - DNA, 354 bp, Glycine max
tctcacgcgtccgatatttctatctctctctctctctctctctcattacaatttcgtcaaggccttttatgacgtcatagttttccttatttctttctttacgaacaatcaaatagtccacaccattactcacaaaactaatacatattaaaccgacttcaaggttccctatactattacgcttttcgttaacaactgcggcgtcacccgaaaccctcttacgaataacatgtgtcataagtgcttcaccgtcttcaccacctctacctccaccacattcttcaccaaaagtgcctgaatatcttctacggctaccagatcctgcatcttcgcgcgtccactgaagatatcttt

SEQ ID NO: 67664 - DNA, 249 bp, Glycine max
cgtcacgcttatacacacacagtctctaactctaagttagcactgattttaaagggatctgttcaaatgtagacgagattgctttcataagatacacctgttattcaaagggttgcaaccataatgctttgaaaaatgggaaccctcattgtaactgtaagtgattgacaacatgcaaagtattctttaaattgcatgccttgtgtttaacattgtataacggagtctcttctgaaagaaagaaacaca

SEQ ID NO: 67665 - DNA, 85 bp, Glycine max
ttgtaccttaacctgacgtatacactcacattcccaatggaacacgcatgacaaaggacgcgcccattttagcttatatgaaccc

SEQ ID NO: 67666 - DNA, 420 bp, Glycine max
cccacgcgtccggaatggttttccaattttaattcctaaaacaaaacccggttccttcacgcgacggagattttaaatttttattttttcttcctccgaattagacattaaattaaattaatgtaataaacccaaaaaagaaatagatcaattttgctttagcattattcattcatcaccaaactccaactgggccccacctaccacctcactctttactaactcgtactgcttcatatttttatttttatttattataatttcggtgtgtttttttcctcctttttaataatcttagctttgattacttttcctctcgatctctctgtcccacccctccccccctctcttcttcctctagtgttgatggatctccatctctcttacgcgtctttattttcactcacacacacaacactt

SEQ ID NO: 67667 - DNA, 81 bp, Glycine max
attatacacaaactacaatagaagagtaatgtgataaatcttaaaagtaaaaaaagggggggacaataaaaaaaacagtac

SEQ ID NO: 67668 - DNA, 131 bp, Glycine max
gttccatgttagggatacactatgacacaagagattcttttatttgtttattgattcattgttatccggatgaataaatatatgaagttcaatgtaccaaagcaaaacatatagtatatgtgaattcaatt

SEQ ID NO: 67669 - DNA, 183 bp, Glycine max
aaggcacctaggtatcgtaaggacgacattggctgcaactcaaagataacaaagcacatggctctgagcactttagttctctagacccattaactatagacaaaacactatctcatttgccagtaccaggcaccactgcgccaccaccaagtgctaacgcagagccatgtcaacaatgttctg

SEQ ID NO: 67670 - DNA, 239 bp, Glycine max
aaggcacctacgcatcttaaggtctacatctgcggcaattcacagataacaaagcacatgtctcttagcaatttagctctcaagacacattactatgaccaaacactatctcattttccagaacaaggcacctctgtgccaccaccaagtgcttacgcaaaaccatgtcaacaatgttctgaaacggcacccggcgtatttgaccgaaaaccgcaaaccagaacaactgactcaatttt

SEQ ID NO: 67671 - DNA, 213 bp, Glycine max
gaatatcgtggctatgtctgtagaaaattcatccacctcggtgtctgtcgcagaaggacgatccaagaatgccatgaagcccaaatattctagattctcacagcaagaacttcatgcctggcaaccaattctaacacctagttgcgctatttcaatattcacggctataggactcatattcattcctgttggtcttgcttcattgtttgcatc

SEQ ID NO: 67672 - DNA, 217 bp, Glycine max
cccacacatccttcacactaacttatttataccacaaccccccaatctaaaggatccgtttttttttacacgttctttccacttcatatctcttctatatcatcacctaaactcaatccactctccatctttttacaacaatattactcataaaaccctttccttacccatcttaatccccttccaacacatcccactttcctcatttctctttata

SEQ ID NO: 67673 - DNA, 240 bp, Glycine max
agaaaatgaaggcacttgatttcttcgttgctacaattgtggtagcatggcaatgccatgcgtacgatatgtactctctgcgaatgaacactggatatggtgcccgtacttcggaggtgaaatgcgcaagatgcaggcttgctgtggaagcacacaacatctttggctttgagacacattcctgaagagtgcgtcgaagcatcaaaggagtacatccatggcgaacaatgtatatcagac

SEQ ID NO: 67674 - DNA, 329 bp, Glycine max
  unsure (1)..(329): unsure at all n locations
cacgcccgtccgcggacgcgtgggccggactcnnngtgggtcgactccacgtccgtccgcgggacgccgnntgggtttttttgtattagtgtagttccgtnntttcgcttggtttttaagnnttttgtnncctggaatgcctaatgcnnaggatttaaagacccagggtcanngtcagttatttggttctctnnngcattttgtnntcccaaatgannaatgtctattgacttttttcgtcgtnncaagttctttagggtaaccaaattttaaaattgtttgccttgcttttgttatnntattatacccttagannataaaaatgtttc

SEQ ID NO: 67675 - DNA, 123 bp, Glycine max
taacatatcattactttttaataattattttttactcaactctaacaaaactatgcgcacgagtctcattatcctacttatctccaatcataatactattcccaatccacaatctcatttcac

SEQ ID NO: 67676 - DNA, 321 bp, Glycine max
agaaaatcaaagcccttgttttctccgtttttacaattgagggagcatggcaatgccatgggtgggatatgtaccctctgcgaatgaacactggctatgatgcccgtactccggaggtgaaatgcgcaagttgcaggcttgctgaggaagcacacaacatctttggctttgagaccattcctgaagagtgcgtcaaagcatcaaaggaatacatccatggcgaacaatatatatcagactccaaaacagataaccaacaagcttacttttatgccagagacctcgaagtacatcccaaggacacatttgtgttcagtatac

SEQ ID NO: 67677 - DNA, 327 bp, Glycine max
cacgtggtagtgctagggaagaagcagtattcactgagcttgaagtaatagatggagaggagtcgcaatttcttgcttagttctcatgtggcgccatccccacccgtcaaagtcaaagcacaggatattcgggtatgcaccaaccgcacctgcccgagacaggcctcaatttaaacccttaaaaccttttcttgccctccttcttccaaccttcccctgaaatccttccggtgctttgggccgttccgttgccggcccaaacttgtggtccttccttatggccttatcgttggccaatgccggaccgcttcttcggccgccgaagtt

SEQ ID NO: 67678 - DNA, 285 bp, Glycine max
gaaagggtcaccggccgcccccgccaattgaaccctcctccctctttcctttctacaatagaagtgaattcccagagccaccggcccaaacgttctttggccatgtctacgtccgacgctggaggtgctggatccaatgattccaatgctaccaggagacaaagcaagagacccaagtactcaaagtttactcaacaagaacttccagcatgcaaacctattctcacaccaagagcggttatttcagcattcttgattgtcaccattgtgttcaatcccattgga

SEQ ID NO: 67679 - DNA, 86 bp, Glycine max
  unsure (1)..(86): unsure at all n locations
ggaanacccgggcgcgaccgcacgcgtccgcccacgcgntccgcaaattgaaagtattttttttaactggactgtaaactacaaat

SEQ ID NO: 67680 - DNA, 297 bp, Glycine max
aacgccaattctgaaacttcttctccttcttcttcttcttttgtttctcttgtggacttgtacttcttctgaacatggaactgttgtctctgagactcaccccttcaccttcgagttcgacttcatcgcttcctgcagcacttgctcactgctccaagctatgtgaatttcagccgaggaagaagaagaaagcgtgcttcgacgcgcctaagcttgcggtgcggtgtgtgaaagcctcggcggagcgaaccggtgatacgatcgatgatggggaggctcgtaacgggttcaccacac

SEQ ID NO: 67681 - DNA, 266 bp, Glycine max
gttcattctctttgcgcagttccctacctctcctttcaagatgcagatcttcgtcaagacgctcgccggaaagaccatcacccttgaggtggaaagctctgacaccatcgacaacgtcaaggccaagatccaggacaaggaaggaattcccccggatcagcaacgtctcatcttcgccggaaagcagctcgaggacggccgtaccctcgccgactacaacatccagaaggaagtaacccttcaccttgtccttcgtctcccggggg

SEQ ID NO: 67682 - DNA, 53 bp, Glycine max
gtccggctaatccctcactcttggtcttcaagctccttctattattcggcacc

SEQ ID NO: 67683 - DNA, 247 bp, Glycine max
gtttttgttcttttctaatttactatatcaaaacctttctctgtatagaaagacccaacaagtcagggtgattatgacttgaagaatggatgctataaaatagcaagctacctaattgacggagcaagttgacaaacaatagcaggctatacttagacagttggaccaaaatagcaaatgaacaggtcaagactgatgaatctgaaattgaatgtcttcagcaaaatccaaagttatacacttatac

SEQ ID NO: 67684 - DNA, 217 bp, Glycine max
  unsure (1)..(217): unsure at all n locations
gncatgtccactttaacgtggattttttgtcccatatgatccccttgatggctccgcattgttacacaaatgtacgggaccaccatatttggtgattgcctgcacataagtgactgggatcaccgaaagagataagttgcttcagtcatgcagctttttgttcctacaacaacatatgtacttgctataaaagactttactgacacccatgaattta

SEQ ID NO: 67685 - DNA, 375 bp, Glycine max
aaaaaaacccgggcacccaccgtccactttttaccttacaccttgtttttaacatcatctccaattccctacctgcccccaataaaccttgtgctttatctactaaattataatttccctctacctttttgtctaataatccagatactatcttctatctacggtatctagcttaattaacaatcaaatacataaagaataatttttatcaccattcgctaccccattcaactaatcctgcttcttcaactattattcaatcttttcatatatctcatctacattttattatgaactaacttcttctcaatcctttacacatatttctccaataaccccattttttttctaattatataaatcatccaaaatcct

SEQ ID NO: 67686 - DNA, 385 bp, Glycine max
  unsure (1)..(385): unsure at all n locations
tttctatttaaatttgccgaagaatccaattcatcgatctacgaagagctccatttggaaaaagaagcgaactgggtatccaattttcgaacactttcgatggggaatgatgcaaggtcacctcanggtccggttacgtgtgggtcgtggattcggaggcctgagaatttgaacttggtggtgttaggaaggtccagacgtggcaattcttgtccttctctcttggagattttctacttcgatcccaaaaccacttctgtgtctacctgtactctgaccacttatgtgttggaagcagaagaaggtgatcctgttgctattgcagtccacccaagtggggatgattttgtgtgcgctctcaacaatggtagctggaaattgtttg

SEQ ID NO: 67687 - DNA, 114 bp, Glycine max
ccaaaactgctgactgttttcgacttatcggtggcaaacaccccatagagtgtttggggcgctcacttaaattgcgtctcaatcttaaaacacagttttattgcacagcacttt

SEQ ID NO: 67688 - DNA, 208 bp, Glycine max
cccacacatctctcaactaaaaaattatttttaaaacatactccataaaatcccttgcttgcttcattactggatattgctataaaaaaaactattttaaatgaattaaacataaactcacctaactcatcatacctaccttcatctaaatcacttaacacattttttttattacctcttttaccatactattaaaatcatatttaaa

SEQ ID NO: 67689 - DNA, 288 bp, Glycine max
gattacaggagaatggttcacaaacagtattttgctcgagaagctcttgaaagctgattgggaaaattccaaagcgagatcaattagtttccacgtcatagttgtaaacgtttgcctgaagaaaaagtctgcaccttataaatgtcctttttttttccttgctttgatattgtaacctgaaactacgagagttctaagtcctcttaaaagtcttttaattactttctgtatagtagtaaaagttttcattgcaaaatagccaaatgacgcaatgacatctttgtgata

SEQ ID NO: 67690 - DNA, 57 bp, Glycine max
gcgcagacacgtggccctactcttcatgtatgctttcgagaggacgatatataatgc

SEQ ID NO: 67691 - DNA, 358 bp, Glycine max
ccttttcaaaccaaccaaaaatatttattattataattcacacattacaagccagggcccgggctcattcaatggcaccctacataccaacaaatttaaaacccccacctcttttacttcataaatttctaacataaaaaccttaatacatattaaccaaactattataaaaattacatattcccaaaaagataaggactcttatattttacacaacccaatacgataaagacatataacttcataattcaatcacccattcttatcttttgatctacaactctaaagaacaacttaactatcctctacatgtttattcaaaacatgcaatgattgctcatttttatctaaaacactc

SEQ ID NO: 67692 - DNA, 98 bp, Glycine max
  unsure (1)..(98): unsure at all n locations
gtcacacntgagattaattgcgatatagattttgatagcttgcactgattactaaacacgggctcggaactcaaatagctcaatgttaactttatcaa

SEQ ID NO: 67693 - DNA, 190 bp, Glycine max
accacacaaactaacataatatctttttttttaaaatcaatataacatatcttaaggcccgggtcttcacactcgtatccaaaaccacacaccattaaacaacccttattatctatttaattgacaataactgctatttactcttaaacccacattcctaatttttttataatttaaaaatttacctaaa

SEQ ID NO: 67694 - DNA, 122 bp, Glycine max
gtgacacgtgggcttacttgccatgtaactggcgagaggtggtactgatgcctcaacgcagtgacggaggtgaatcagatcattggttgccttgacaatgactcacctggcctgtgtcaacc

SEQ ID NO: 67695 - DNA, 225 bp, Glycine max
ccctttcgaccgatcaattgtggattaaagtttgaatgctagcactgtatcctcaacacaggcttggagcacaaattgctccattacaaccccatctaacacgcacctcagttttgtccacctgaatctatctacattgtcgatgaacagaacgaagggcatttactctatcactagatgctttgtgataacatgttcagcaagtcactcacagacagtagagat

SEQ ID NO: 67696 - DNA, 209 bp, Glycine max
atctttcttacgatccatagatgtttataattcggaatcttacactgtaaactaaggactgtgtttatacacaaacagcttaatttcaactatatctaaaacgcaccttcattttttttcacctaaatcaatctgtattgttgatgaacataaagaacgtaatttagattaagatcacatatttagtgataaaatgttcatcaatttac

SEQ ID NO: 67697 - DNA, 264 bp, Glycine max
cccacgcgtacggactatgtatttttttagttatccctcccacaacacaagccaaggcccgggcttatacattggattggcactttacaccaataatgcaagcccgccgctgtctacctccttcacgtttgacactcaaggtcccgaaaccacaggatacctaactctgataaagatcacatattataccatatgatggacctgctttaggttacaaaaatgtgttgatgagtcatatcatcactgatggcaacagacgtttct

SEQ ID NO: 67698 - DNA, 218 bp, Glycine max
accacgcgaacgaactatatatgtttataattataagtcacacaatacaagccaaggcccgggcttttacattgggtcggaacttgccactatatttaaagcgcgcggcttttttgctgcatgaatgtccacactaaaaacacgaacacacattatacctaacttatttaaagatcacatatttaccaaaaggtttggcccccaataggttacaaaat

SEQ ID NO: 67699 - DNA, 211 bp, Glycine max
ctcactctagcgataaattgaggaataaagattggtatctagcactgactactcaacacagggtctgggctcaaattgctccatgtcaaccccatcaaagactcaactcagttttttacaccaaaagcaggtaatttttctgtaggaacagcacgaagggcatttgcactatcataagatgttatgtgataacatgtgcatgaagtgactc

SEQ ID NO: 67700 - DNA, 450 bp, Glycine max
gccacgcttccgttcacgcgtacggatgtgtacatactcttataaatattaaatagcgctgggaataaagccaatcgaccaaacaacaataaaatgaaaaaagaaaaaactctgcattcaattctattgattcacaaattgcaactccttctcggctcttcctaatcatcacgaacacaacacagacacaaacacagagagtgacatggattttgaactgagaagagccagaaacaagctatagaaagagcagacgtagaggaatgatagagcaagactgaaacttcacaaggaaaagaaggtcaatgaagacgctcagaaacaaaacgataccatcgaagctgtcaaagatctcatcgtattgatgccgcacaagctcaactcaagtgctgccgacagaagcaagaaagcctacttgctggcacacgaataaacttttaccgactacta

SEQ ID NO: 67701 - DNA, 189 bp, Glycine max
  unsure (1)..(189): unsure at all n locations
ancagatnaaataaatataaaaacatttactttataatcatcattaacttcacaaccgcccgtttatttttaaacctaccccccccaaaataatacttacacttaaattcaaatattttcctttatatctcaacacccaatatcttatacccactttacatctaataaactactacttcttctcttata

SEQ ID NO: 67702 - DNA, 52 bp, Glycine max
aaaaccgggccgacccacacgtactatcaaattaatcataaaataaaacttt

SEQ ID NO: 67703 - DNA, 326 bp, Glycine max
aaaaaaagaccgccccgctccggaaaattttacttattctctaattatttttttttatctctcttaaaagtgcttgtttattctaacttattcttacaacataaggttttttccacatcttaataactctttatttccaaacaattagattcaacataaaaacataaactacatcaatataaatttacattactgttcaaatacaacttgacttacatatacattgcatgtcctataattatattactataaatgaaacatttcattacctacaaatatcctcataatattgaatactataaacaaaaatttgtatgatttaaaat

SEQ ID NO: 67704 - DNA, 446 bp, Glycine max
ggaaaatgttgagcttcattctctaatgaggaagttttgtatactctcttaaaagtgcatgggtatcatcctgagctatatgctatacaacattaaggttttgttccacatctgaagtaactctgttatttgccaaacaattagattcagcagtaaaaacatgaaacgtacgtcaatataaattgaacattgcggttacaaagacgacttgacgtgacatctacattgcatggcctagaatgatgttactagaaatgaaacattgcatgacctagaatgatgtgcataatagtgaagaggataaacaagtagtggtaggattgaaaatgacgggtgttgaatggtcattttaggttctacattatgtatgtgatcaacaagcaatgctattacactaaaaaagccacccaccaactcaataaacaccataaatgaagacgatcaac

SEQ ID NO: 67705 - DNA, 324 bp, Glycine max
cgacccacgcgtgcgcccacgcctcctgattttctattacatatatctacatttttcttctataatcaaaaacacgggtttgtcgtataaggatgtactgtccccactcactggtactgttcttaatatatcgactcagaaatgaaacattgcaaaacatgagactgaattaattggtaaaactacattgtaatatctcaaccacataatggatagactatcttcacatttcctctccaacttgaaatgattgaaccttgttccactgtcataatacagtataggatatatcatgaatttatacccttactataaatgactcat

SEQ ID NO: 67706 - DNA, 454 bp, Glycine max
  unsure (1)..(454): unsure at all n locations
cccacgcgtncgattctctttgcgcagttccctacctctcctttcaagatgcagatcttcgtcaagaccctcaccggaaagaccatcacccttgaggtggaaagctctgacaccatcgacaacgtcaaggccaagatccaggacaaggaaggaattcccccggatcagcaacgtctcatcttcgccggaaagcagctcgaggacggccgtaccctcgccgactacaacatccagaaggagtcaacccttcaccttgtccttcgtctccgtggtggcatgcagatcttcgtcaagactctcactggcaaaaccataaccctagaggtcgaaagctctgacaccattgacaacgtcaaggccaagatccaggacaaggagggaatccccccagaccagcaacgtctcatcttcgccggaaagcaacctgaggacgggcgcaccctcgccgactaca

SEQ ID NO: 67707 - DNA, 293 bp, Glycine max
tcgcacacgcgtgcaatgtacgagatacattatcaccagctacccgctatcacagcatcggagggggcttctacagacaagcctacttgtaaaccttaatacataacatcttcaactccatctcctgcttattttaattacattaaatatgatgttatgctaagggttatatagttttcagcatcactggtagctgctggcaaaatcataaatgctaataaaacagacattattcacattctaaacgctgttccatgggcaaacaacgacatatactcaccaccctttgttta

SEQ ID NO: 67708 - DNA, 209 bp, Glycine max
ttctattcaattttctcttacttgtattatccaaactacaccttatggttctcaagcataacattcatggaatcaccaatccctctattctccgtactgtccatacttgatgtcgtcaagcgtatcaatgttcttatctattaataaactctctgtgttctcaatatctttctatagaacgtccattctctaactctttcaccctacac

SEQ ID NO: 67709 - DNA, 307 bp, Glycine max
tctaacactcgttcgttatattcaatttaacatcacatttggagctcaccgaaaaatttacattgtcaagcatacttctaacataaaacgaagccaagggtattcatacacgatactatccaaacatacatcctttacagttctaactgataacatctccataatcaccaatccctcgattcgaccactcaccatacattacttcgtcaagcttatcactgatattatctattaacaaactagcgaagttctcaagatcttactatagaaccacattcgcgacactttcacctacactgaacactct

SEQ ID NO: 67710 - DNA, 146 bp, Glycine max
cttcgaacccattctcgctgaataatggcctggggtccttaagccttgccaggattcaatggttggtggaagaaaaatgggtccttccaccttgaattgtaggcggttggctgcctttcctggtaaccccaaaggattggttacca

SEQ ID NO: 67711 - DNA, 376 bp, Glycine max
aatacccagccggacgcacgcgtacgctagaaccaattcacatcaatacaataaattttaaggcgctaatgatcacaataggatttgaacccttacccggactacttttccccgacatggctgcctattaagtagaagatgctgaaaaccttctactaatgttatctcccttataaccacaaacctttcactttataggtcaattcctcatcatgcttcaatctaataggatcatgaacaaattatggcagaattaccacaaatgattaacacacgaactactacgccaacatatgctgatactatgtcagccctatcacgcataatatcagtacaaagttccactacacattctatgttaaacatcatcattatt

SEQ ID NO: 67712 - DNA, 250 bp, Glycine max
gctaaaagattttccattattaatcaaagttactggttccatgaacttttttcatccacctgacagcttaaaaccctcattttacaaaagttccaacaaacctaagttcccgagaaactttaaaaattccttttccaccattctacaacacttactctagacctttgtgatacctcttatctacttatgtccgtcctgatcaatctttctcttctcataaaatgcttttatctaggatcgattacatata

SEQ ID NO: 67713 - DNA, 277 bp, Glycine max
tcgagcctatgttctatgaataacaactgtagatcatattgcctagcacgaatgaagtgtctgttgaaagaacattgctctcttgaacatgacgtttaaagcgtttagtggctttccgtggcacaactaatgcatgtgtaactataatgaacttgatattcatttctcatgagatgagaacatcactacctacaaaaattctgtttgtactttaaacgtgctcaagcttgtagcgcaagtcatcaaatgctgggactaatattctatgcttactatt

SEQ ID NO: 67714 - DNA, 235 bp, Glycine max
aacactgtttctcttctctgatccttcccgaatatatggatcctcctcaattattagatcacacaaaaaattttttatccccttctacatactacaaataatttctaatatcattaatttattcattataaatttaccctttcatctatcattataaattattatatattctacccacacccatctatttactactcacactctatttttcataaataatatacactatttcatt

SEQ ID NO: 67715 - DNA, 316 bp, Glycine max
aattccgggtacgacgcacgcgtacgcgtaagtccaaggccactgatactacgctttctactgatccagtctactatgcgggagcggctaacattcaaggatggtagtccagtaaatgactgtacaaaatgctgatgcagtaatgctgacgtccataatgctacactaaatggcactattactaacgctacatatgcatattacacaactgatgcagtgtaaaaggtgtcatcacatccgaataattttgactgatctcaatctaaagctcattctctaacaattcagactgcatatgatgatgaccagaggactg

SEQ ID NO: 67716 - DNA, 307 bp, Glycine max
actcagtcggctgtgtcggtctatatgcactgagctcactggcaccttcatgattcaagatatatgggatgcaacgggctctcaagaccatgaagtgcccgatgaattaccacaataacccatttaacactgctgcctttcctacctgaactgcttttcactttacaatgcctacagcagcatggcccactgcacctactacctctgcagactactcaatctaaaacaccttcagcatgtattgcatatgaatccactatcacaagcgatatacctagcacacaagtataagttgctcccactacta

SEQ ID NO: 67717 - DNA, 311 bp, Glycine max
cccacgcgtccgaccacacctaccttaccttctcatctctctaaattctcggtccattcgtagctatactctgatagggtgactctttacactgactactatacacattctctgagcacaaattactccctcttaaccctatcaaccacgcatcatccaattctaccaccgaaaacaaatcattttctcaatgaacaaccacacaggtacttccccaactcgatacaaatctatctaaaaacatgttcaaaatgtcactcacatacagcaccaattcaccatcctgactactcaagatatggtaaaagcac

SEQ ID NO: 67718 - DNA, 340 bp, Glycine max
gtcaaagtgtttcttttgcaagaagaaagagcacatgaagaaaaattgttcaaaattgaagagctggcgcgacaagaaagggtatggaaaacctaaggaggccagtgggaagtgagcagtacatctattcaggaggcaagatgagctcatatgtggaagtcattgggagatgcaatttagttttaagcaacgattttattttgtgtttagaaaagatattttacgttccaagtttttctaagaatttgatttatgtatcaagacttgcaccattgggcttttcctttaattttttaagttttggtttatctttaagtaataaatatggaattattggttc

SEQ ID NO: 67719 - DNA, 243 bp, Glycine max
tcgaacttcaagaacacaaccactcaaaagggttgaaagagagaaaagggtttaataagtagtgttgttttcaatgtataaatatgatgagttcttgttgaatgagatggatcatattatcaatttcaatgtcaacaagcgtatgtgcatacaacgaccagttcgacttaaatgactccgcattcatccaccttatgaattgcatcatggatcctaaccatttccaacaccaatccaaaccaa

SEQ ID NO: 67720 - DNA, 418 bp, Glycine max
cggacgcgtgggcggacgcgtgggtttgcatcaaacacccaaatttgtttggtggaagggagaagcgtggatgtttcgtgggacaagggtctgtatgattcaaatgtcttggttgcatatagaaggccacggccagaatggcttgctcagcagtcttttgtattgcagcattctctttcacctgagattggagtccatggtatcccagtgaacaatttctcccgctcaggaagtggaggtataaatttatctcgattgtcagtgggaatggacctgaaggaacctgctagttcaaaatggagcagcactaccagcataaagtttgagcatgttcgtccattgaatgatgatggtcgcgctatatgtagagattatgatggatttcctttgacttccagtttaatcttcaaatagaaca

SEQ ID NO: 67721 - DNA, 228 bp, Glycine max
  unsure (1)..(228): unsure at all n locations
tcgcgagtgttgaagataacacgaaacaaaaaccatcatttagttgccatccatcttccaccggtgtccactcccaacaccgatttcggcacggggccgncaccgggccccaacatcacgcttccttcgggccccttcggcgaggccttcttcttcgccgccgccggcgccagccccggccccatgaccctcgtcttcagcttcttcggctccgacgccggcggcgac

SEQ ID NO: 67722 - DNA, 74 bp, Glycine max
gtcaattagatggatggacctggtgacaccaatgctatgtatttttcaacataattttggtatatggggttttc

SEQ ID NO: 67723 - DNA, 349 bp, Glycine max
gctaatcacgaagacagtatgaatggctctgccgatggctttcacgatgctcatatctagggctgacggccaatcagctgagaatcccaatagttcatctatgcccaaacttgtaatccatgcgtaaacatgcctacgctcacaagcttaccgagaccactcacaactggacaagcatctctaaacgatctccgtccattactgctaagccgacgcccgagacgcctacctgataatactcctcgtcaaatggctacacatgctaaggattccaaagccaacattccactgacactataaactgtcgacactgtcatcatagcaaaccaagcagcggaagctacatgca

SEQ ID NO: 67724 - DNA, 365 bp, Glycine max
agcaagtgagatcatgtcctatgccaccataggggggatcccccaaagccgtatcaatggtgcctacacctacacagagagccagccttcatttccttctactttgaacagaacttctgctgattcaagtgcttcaattattcccagtgtgaacattacaaactccattcgagagcaccctcaagcatcatccacacctgttgtaagtaggaatctcttaaattcactaatacttctagataatgtctttttacaatgcttacgttgctataatcggtcatttattttctaatcaagattttcctatgtatacaaatctgccaattgctagaaaagctccactccaccagtttctggataatata

SEQ ID NO: 67725 - DNA, 119 bp, Glycine max
atcaaacactaatgctacagtgtttggtatctcagacaataatgctacagtgtttggtggctaaaatggtccaagaaattatttcacaagacatcctaatacaattttttttccttcta

SEQ ID NO: 67726 - DNA, 198 bp, Glycine max
acggagggaacgtgttagtgcattcaacgcgactcagtggaaactcgaatagcgtaaactggctaaactcgaatcgaatctaaccatgatcgtcaactccaccaaacacttcttataaagcaaagaccatatttcttatcagcgactctgtacaacccccatagatgtgaacgaaaggtattgtaggctgagctacaa

SEQ ID NO: 67727 - DNA, 214 bp, Glycine max
gcgttcacaaataacgtagacgaggacactgatttactaagaacaataccgcctatgagaaaggcggagacatctgcactctaccataaaagaatgccgggtatctataatccgtaccacaaatgaccacatcaatgcgccatacggacaggaaggtggatacgatcgagaataacatcatcaaatgaagaattcagccaaaaacgaccactat

SEQ ID NO: 67728 - DNA, 120 bp, Glycine max
tttactatcataaaaatttcatgcgcaaaactgcgtgtaaggtcccggtgctttattatacgaacatattcatacacccaccctctatctaccaataaataaaatcactttcactaatta

SEQ ID NO: 67729 - DNA, 303 bp, Glycine max
accacgcgtacggctgtcgaccttcttttttttatttttgacagaacaaggtgagcttggggaagatacgctgccaaagtgtgacaatggagacatgtgaaagcagtttaatcatgttaagttactcgtttaagtgccacgaagtttgtgcctaggcaacttgtaaatggcaaccacctttggtagctactagaatttagcagtacttatttttttgctatgttctttagtatgtaaataaaccttatcataatcttctaggctaaatatgtagttaaaataaagtattattttgaagcgtaa

SEQ ID NO: 67730 - DNA, 162 bp, Glycine max
tcgctcacacagatctggacccgtgaggctgacatctacgctactccaagggctgactcactgccagctgtgcttaccgaaattgaatccaccaaagtcggcatggcctgcctaaagcatggatcttcgacgttcatttctgaaggtccacgcttgataccc

SEQ ID NO: 67731 - DNA, 362 bp, Glycine max
gaaaactccacggttttacaggaccaagaagagagtcagagtgctaatgttactgttgaagcctcgggagctactcaagatggaagaaaaagatcacctaaggggtgtaaaaaaatcagttttttgaatgaaaccaattgtcaagaacagactgattttcccgagaagtgctaagttcttggtggctactcacagcactgctgcaaaaacaaatctgcaggccggggcctatgatggttaaaagtgaaagtggcggcaacgttgcattgcatgactctgaatttgtgtctctggaaatgggattaaatgggcctgcacaaccacagatttcatatatagaaaggcaattcagacgggggatt

SEQ ID NO: 67732 - DNA, 215 bp, Glycine max
ggcgccctttactgattccactctagtcagtatatacgggcgccatttgaaggtgcaggcggtgatgaatatggcggacatgccatggaacagaggcgttacctttactcacgcaaatatgatcacaggcctgagagaactctgatacaagaccaacagcgctcatcataccggggtgaaataaaacgccaaatagagcctgagatattactgat

SEQ ID NO: 67733 - DNA, 333 bp, Glycine max
gacccacacaaaccggcttcaattatttttttaactctaatcattataaaaacacccctttttaaaaatcactcgtgcaactaaagtggccggcataccatggaacaaatgctttaccttttcataccccaaccttataaaaatcttttttttaactcaaatccattctcaacaacacactgattttccttctataactaaattcttagtcgttacttacatcactcctccaacaacaaatctatactccgctcctataataactctaattttaattcccttcaactttacattttttaactctcaatctttttctattcaaatccaattaaa

SEQ ID NO: 67734 - DNA, 395 bp, Glycine max
  unsure (1)..(395): unsure at all n locations
atcttaaattacatattatttatacgtttatcaaaaactcttcagcatcacaaacgcgtattgttcaaaagcttgtctggcttcctttaccaaccccaaacatttcttttttgttaaatttactgattctactcatcaatcatcaatcaccaatcaccaatcatcaatcancatcattacttttccttgtatccatgtcaatttcttttctgtttcaaaaaccaatatctctttctctttttctaatttttttcttattttccttaaataagtaatttgcactttttttctattttcccactgatttataatcaaaaatcaacgtacatacacacaaaatttgttatcttcaatcataaaacatgattcttaaaaactttttaacaccaattctt

SEQ ID NO: 67735 - DNA, 255 bp, Glycine max
acgcttaccttaaccttttttatattcaaaaaattacaattatcttcttggactacactctgggcaatgacacatgccgactatgcaccaacatattgaagcaacaccctattttatacttaccagatgggcaaattcaccctctctcataagactggacttggctcctataacaagatacaaagcaaagaactttattccacatgcagcgcttgctgaatactacacttaaagatcttcaccaaatggatttct

SEQ ID NO: 67736 - DNA, 364 bp, Glycine max
gaaaacttcacggtttttctgtaccaagattaaagacaaagtgctggggttactcttctgtccttttcaactactgatgatgcaacaaaacgatcacctatgaggtgtaaaaaaattagctttttgaatgaaaccaattgtcaatatcagactgattttcctgatattgctaaattcttagtggttacttacatcactgatgcaaaaacatatctgcactccgctcctataatggctaaaagtgaaagtggcagcaacgttggattgcatgactctgaaactgtttctatgtaaatggatataaatgtgattgcacaacctcaaaattcatatatagaacggcacacagacggtgcatttcata

SEQ ID NO: 67737 - DNA, 59 bp, Glycine max
ctcgttcttcttcttttgttgttctgtgtttgtgtttggtttttctctcacctgaaaat

SEQ ID NO: 67738 - DNA, 103 bp, Glycine max
cccacgcgtacggattcatgttcgtcttgcttttggaatctgtttcgtagaaagtcgtttggtcttgcatatggcatggctcttgaggtatttttttgcaagt

SEQ ID NO: 67739 - DNA, 326 bp, Glycine max
cccacgcgtccgatcgttgtgcacccatcgtaacagccatagggtgctacactgaccgggcttgcctgactagcgggactgccaagcactctccaaactcacaacaatatatatatgtgctacgagaagccataaatcgagctctttattctaagaatctatcacagtaccttccaaagtcaacactcactgttgtaaagacatataatacttcactcgcgaccagatgctaaattgatgacaaactgcaacaatgactcacaaaagcaacaacagataaggcgttgatcatgacgaacatgttcatggtagactcatgaagaaca

SEQ ID NO: 67740 - DNA, 441 bp, Glycine max
  unsure (1)..(441): unsure at all n locations
attcatattcatcttgcttttagaatctctttcataaaaagtcaccgggtaatacatatcgtcatgtttctaaatgtatttttttncatntacaacatataatccattacaacaactcatattcgaccatatatccatcccattctcttttttcgatcgctacataccccttcatcacatcattaatcaacgtttctctctcgttctacactttttgcctatctctcattttataaaattattttattattttaacctatgtacttaaaaaatatttcattttacaaatttttctattaattccctcaaaaccctttttttttttttctttatttaatctttaataatttttctcatctcaccttttccataacatttccgctttccatttcatcatcaaaaaaatttaattaaaaaaattttttttttttttcttataaa

SEQ ID NO: 67741 - DNA, 83 bp, Glycine max
  unsure (1)..(83): unsure at all n locations
tctaatttaaaaattcaacacctttccatactctctcttcccatacaaattctccattccaaaaactnncccatcacccccaa

SEQ ID NO: 67742 - DNA, 132 bp, Glycine max
  unsure (1)..(132): unsure at all n locations
cccacgcgtncgnccacgcgtncgagaacaagtagttgagaactaagaaagagaagcaaatggcttcctcaaggatctcttccccagctgttaccactgtcaaccgtgccggggccggcatgggtgctccat

SEQ ID NO: 67743 - DNA, 336 bp, Glycine max
cccacacgtccggttggagggcactcaacttaacagcactggggagcgggacagccccggcgtgcatcagctgcgggagtgccagcacctatgcaaaccacaacaatatataacgtgcgacacaagctataacggcaggctgaagaacatacagcatgtgactacataacattcaaatgggcgagtacactgatgaaaaagacaattcatacgaccatgggagaccgcacgctgaaaatcatgacaaaactaaaactgtgactcataaatgcacaaacaaatagggcatgtttaatgaaaaacatgttgatgaaagactaatgaagaacaaacatc

SEQ ID NO: 67744 - DNA, 155 bp, Glycine max
  unsure (1)..(155): unsure at all n locations
ccacaaaaaaanaaatttcaacttttaaactctcacttcaatatctcttgctcgctattttaaaccgttttctcaacaatctcgttccaataaaacttnaaaaccccttatcaatacttttatatttttcaaacttctcataacaaaacaacttc

SEQ ID NO: 67745 - DNA, 308 bp, Glycine max
attcaacttttaaactcattcacctatatctctttttccgttaattataaccttttcttaccaatctcattccaaaaaaactttaataccccttatcattactttatatcttttcaaacttctcaaaacaaaacaacttctgcaattttcttcaattctcttatttttaaacataacttctatctctcacttctcatcatattctccaaaactccattttaacaattccaccccacaattttcaattttttcacaaatacccatattttttcaattaaaaatcaaaacaacatttctattcaacaatt

SEQ ID NO: 67746 - DNA, 403 bp, Glycine max
  unsure (1)..(403): unsure at all n locations
cggacgcgtgggcggacgcgtgggtgcaaaagtaaatccatcatgggcaagaaatctacacaggaacacaacagcaacaacaacaactgagtttaaaatgcgcaagtatgacatgatttaccatgattcattctctaatattgccttgtagaagtgtatttgctcttctctctctgcatcttatatgatgagttccaactcctcccagcagaagctataatagctgtttgtgctatctccactggcaacagcaaaagccagtgattagaaggaagcattttgctagaaaggcccagaaattctccactggattgagcaagagaactagcaaagtagctgagaagaaagagggtactgttgctggtgcagntgctcttatcattggtactagtattggtactgg

SEQ ID NO: 67747 - DNA, 185 bp, Glycine max
accacgcgtccgtagaaactttattttacatgttttgtttaggctgtgtaagcatggcggcgggcttgaacccgtggagctgaatgtccccattttaacagaaaatccgaacggtcgagtttgggtttttcccaccgagatcgaagttcgatcacgagtcactcttaaattcacacatatatatt

SEQ ID NO: 67748 - DNA, 379 bp, Glycine max
ggcgatcctctcagaatctgtggttcagccctcattagcgattgcccttatctctctccggcgtaactccaaccacaagaatcatattcccatttcgtgttctgaccaacggctttactcactgtcccaaaccattgtgtgcccactttgctatcgactcactctctcaactacccatcttcccaaaacctgccacttactttcgggccatccaattctcaactttttggcgctcaagctatctcattcttacttttccacaattcccttgtctgcttattcactcaaaggctccattttcgccaatgtgactaaaggttccaagccaccgaattttacgctgaaagatcacaacgggtaaaatgctatcctgttcaac

SEQ ID NO: 67749 - DNA, 286 bp, Glycine max
gctgattttcttatatatggtggtggtgacctgaatcgtgttggtcaggaagttggttctgtgtatgagagcgtgaagatacctatttttgtctcgtgtgggaaaaacatgtcttatactgatgcatcgggtttgtttgcctctggtgctagtggttttgttactagtttggaaaattttggtttgtttggtgatgagtttttgcacaaactgttttgcactgtgtatgcaagtgatgatggtgggaatatgagtggggataaactgaatgtagataatgggtttt

SEQ ID NO: 67750 - DNA, 294 bp, Glycine max
ctaactcttcgtcgcaaaaacaaaagaggcattgaaaaacgagccttatccactacggcgggagcaaagatatgagactgtcttgaaaggctgctactcaaagatttatggaatatgctcagcttgataagatccatgacaaggctaataatggttaaaacgctagtatatatactggcaagctcattgctaagtcaccctgaatgcctaatctgacagaactcgtacatcaaagcttaaccttcgctcactattgtcttactcggactgaataactctgattatgtacaagct

SEQ ID NO: 67751 - DNA, 430 bp, Glycine max
ctaagactgcgtcccataaagtagagaggtattgaacaacgagcattatccactacggcgggatcagagatatagactgtcttgtaaggccactcctcaaagatttctggaatatcccgagcttgatctgatccatgacaaggctaataacggttaaaacgcgattgttgatactgcaaagcttattgctgaatcagtctcacatgcactaatctgacagaactacgtccatataagcttaggcttcgctgactatcgtcgtactgtgaatgaatcactctgaatatgtacacgcgcaataccttggtcacgttactatgatacgtggcatacggtagaccttaatatcttgtctccactgctcgaaaattctatctatggctttacaacgcgatgactagcttggatgcttcaaggaaaactttgcata

SEQ ID NO: 67752 - DNA, 134 bp, Glycine max
ctcactctgagtctcctaatcttgtcagcttctcatcatcaatcaccctgaaccacggctggaacagataaatagagaatgtagaacacacactcacatacttatacggtaaactgacatcctttattactaag

SEQ ID NO: 67753 - DNA, 99 bp, Glycine max
ctaactgttcgtcctataaagccgggatttactcaacatctagcactatcaactactgcggcatcacatgattgcagagattgctacgatcactccccc

SEQ ID NO: 67754 - DNA, 334 bp, Glycine max
ggtgctttaatttcagttcactaccaactcaatccttctgcagatgactcaaatgcgtctggttcagagtctcactagtaagttcaaattcatgccacacattatcagatatgatcctatcctttggctcatttgttccctcatctttacctcataaaaccacattactgattcagaaaagataagaaagaatgtcattgcctgtatttaacaaagaaaacatggcatactggtcccttgcttctactacaaactctgtgtcttgactttcacaatatacatttctttacatgttggtaatttaaatactctatgatatggatgcaactacaac

SEQ ID NO: 67755 - DNA, 130 bp, Glycine max
gcaacacttatactgtcaaatgttggagatagcaaacgtttgcaactgtgtaagtctaagcctaattctaataagctgaaggttatggttaaatcaagacgttgctctacgacacacactttgtgtcaga

SEQ ID NO: 67756 - DNA, 96 bp, Glycine max
acgcttacgcatacgtccattcgacgtaatacattttcagtaccgtcacctatatttaagtcagccactgacatttgtctcctagatgactggtat

SEQ ID NO: 67757 - DNA, 342 bp, Glycine max
gctttttgctcagtggctataccaaaaagaaaagactaaacaccaagaatttcagatattgcagcaaatcttgttagccttcaaggcaacctcactgttatggaaactcatcatcatcatcagcaccaaaagaacacagaaaacgatgtacaaaagcaacaacatcaaattgaagaagaagtagcaccaccaccaccacagttaaggcaacaagaaaatacagaactagaccaaatagcatcatcatcaccacaatcttcaacaccctcttccccttctcaagagttttccttaacaatcttttttaacaattcacaataattccaactggttacttccaaa

SEQ ID NO: 67758 - DNA, 442 bp, Glycine max
cccacgcgtccgaaaaaagttccgcacgcaccctactttttctaacgtttctatgggatagtcccattagatcttcgaagatgggtttgaaggttgaattgtgatatattcttcacctatgcatgttgtaaaagctgctgattctgcttgatgatgatcgatggtgatgaagctaagcgacaggaactatatatccttaattgcagtagttgcagacaattgcagttgcagtttacaagtcctacagaaactttcatgatatacaatgaagaattatgatagttgaaaggtgacatgagctaaggaatttaggagacggagactgagacggagactgagaccagatcaattcctctatactttggaatacaggacacatgtacaacttgtataagccaaattcaacttgtatgctatgagataataaacatttgtgccacat

SEQ ID NO: 67759 - DNA, 200 bp, Glycine max
cccacgcgtccgaaaaaagttccgcacacaccctacttactctaacgtttctatgggaggggacccattcgatcgtcgacgatgggactgaaggttcaattgcgatatattcctcacctatgcatgttgtaaaagctgcagattctgcttcgagatgatcgatcgtgatggatgtaatcgacaggaactatatatccgta

SEQ ID NO: 67760 - DNA, 356 bp, Glycine max
  unsure (1)..(356): unsure at all n locations
ggccgcccttttttttttctttcttttggtttttttactttttttttttaaacaactaagcacattcaatggtgtcaaatccatttcctaacccaaaatcatatcaaaaaatgaagaccatatttgtacacccaaataataacttatatcttacactactatcaatgaatcactctgcttcatctcaaatcacaccaatgacaccttagacatgatatgcttattcaactccaccatcatgtcttttctcacccgcttttcctaacttaatgatgtcgtagctgtctacaactggctttacaacactttctctcttcccaaaatntttagcttggttcttcccctggtgcacctat

SEQ ID NO: 67761 - DNA, 119 bp, Glycine max
aaaatcaagatccttcttgttcacccacattctatcttgggtggcttccatactcttcttaaacgaatcgcttctgacttaactctcaatggttacaccgctttcacctttcacatgat

SEQ ID NO: 67762 - DNA, 210 bp, Glycine max
catattgtcgcgctccttcttatattgtgcgtcaacgacctttgattgctactactggtgctcgaagccacagatctgctacagagctaccgtatcctgtatttattcttcttcacctagaaacgtcttacactcgaaaatatggaatttgatacactggatcggatatacctgtcactgcattcactatatacttgttgaacactacgc

SEQ ID NO: 67763 - DNA, 109 bp, Glycine max
cccactcgtcccatcaattcctaagatttacaaatcttagtatttgctacacccattggaggctacactaaatggcctttcctacctactcttccttccatcactctcc

SEQ ID NO: 67764 - DNA, 217 bp, Glycine max
catatggtcgcgctccatgttctcagagacttcgacggcctttgttagctactactggttgtcgaatccacagatttagtgtggagctaccgaatcctggaattagtcaacctcttcagctagcttattattcagagaatttcgaattacatacacgtgaactgatatgctctaggctgcttgggctatatacttattgaaacttcccggagacctt

SEQ ID NO: 67765 - DNA, 331 bp, Glycine max
cccacgcgtccgatcaattcctaaattgacaaatcttagtatttgtgatgcggtattgacgaattatgggcttgatatgtttaaagctcctgaaactctgaaactgctggacctcaaaggttgttggctcttaactgaagacactatcttgtcattctgtagaaatcatccacaagttgaagtcaagcatgaacttggtaccttattttctgtcaatcaaaacggacttaatcattcctttccatctggatcaacttccaagactatgcaaatgactaagaggaaggatcaaattccctaatctccatatttggttgatcaaggattgaag

SEQ ID NO: 67766 - DNA, 264 bp, Glycine max
tcaattcctaaattgacatatcttagtagctgtcattctctatgggcgaactatcaacttgagatgtttaaaactccttaaactcttaaactaatttacctcaacagttaaaaactcttaactcaaaacactatctcctcattctttacaaattatccacaactacaaatcacctattaactcagtaccttatcccctggtaatcaaaacccaattaatcattcctatccatctttaacaactttcaatactattccaaccact

SEQ ID NO: 67767 - DNA, 151 bp, Glycine max
tcggtttccctttccaccaccccttttcttcccttcactgtaaaaaatgcttctactagaattccttcttgcacattattctcttacaggaaggcacgtaattaccaggattccaagaagggtggcttggcctgtgttggttcttcttaaa

SEQ ID NO: 67768 - DNA, 358 bp, Glycine max
cccacgcgtccgatcacgcgtacgccaacgcttacgaaacatcataatctctatcagatacgggtgcgttgccaggatgagcttgtcactactcatccgtgttgctgggtccgtggcagcctatgaacccatggtgaagaccatggctcccaaaaacgagagtgaccaaaccatatgcaatgacatcgacacacataacctctgcaacagcatctgcagtcacgccgatgaccgttgtacaactaacatctgtcactcgcgagacgccgtccttaatgcttacactgcctacactgactgcgccagacgtgccaatcaagatgactccgatccagagccgcatctgctgtcgccattg

SEQ ID NO: 67769 - DNA, 299 bp, Glycine max
cgcgtcctgctgattttcttatatattgtggtgctgacttgaatcttgttggtcatgaagtttgttctgcgtaggtgagcttgaagatacctatttttgtctcgtgttggaaaaacatgtcttatactgatgcatcgggtttgtatgcctatggtgctaatggttctgctactagcttggacaatttaggctcttttcgtaatgagtttttccccaaactgtttctcactttttttacatattatcatgtttgcaatatgatgttttttgcccttaatgaagataatattttttaaatt

SEQ ID NO: 67770 - DNA, 249 bp, Glycine max
  unsure (1)..(249): unsure at all n locations
cccacgcgtccgttttaaaataacatctatatgtcagtttgatntacataattatagaataatcaactggtctctttctaattttttagtactccaatctgggtcatcacaatgctttttcttctgggtcacaccgattgctggtactcttaatattggctaccatttgctcctttgatcattggtctattaattggagcccaattgccaggtgttattaccaagattggtcaaaggattcaaccacca

SEQ ID NO: 67771 - DNA, 399 bp, Glycine max
cacgctttctcccacactttacttccaagtatcatttaatgcttcaccctatatttctagaatccgatttaacgaaaacatcactagctcactctctgacccaattatcatactacacttttaatcccatgttaatcatcaatgaccacctttcaatgctaaatactttctgtattacctatatttaattatacctttaggaaacctttattatacaacattttaagcatataaattcttttatgtatatataatataatttttatactttgcttttcttactgctttttacatctgctttccccccttattgatcattgtccttccttcattgccaatattatattataatcatttacttgtatatcaatcttattaaactttttataaaattttttt

SEQ ID NO: 67772 - DNA, 209 bp, Glycine max
aatttccttaccgacccactcgtcctatcaaattctttcactttaacacatcatcttttatttcttctcataccttaattacttgagaatgttaaccttataaaatatctaaatctcatcaccacaaccattcattatctacacatacttatttactctcctaaaacatataaaaatcaatcaaaaaaacattcttctcttaacaaact

SEQ ID NO: 67773 - DNA, 440 bp, Glycine max
cccacgcgtccgcccacgccgtccgggcgaaacaacaaagaatggctgaccctaaattgccaggggccagtaacccaaagccatactaggttacgccttgaccccaatagcattgggcaccgtgaaatccctgtggaataaccagggccaacttgcaagggctaaatactctgggtgaaccatagtggaagtaatccctgagggaagggttaataaaagacatttttagccgtgggagtggttgatgtatatatagtaaaatttgatactttggtgtgctgactgcttttacatctgctttccccccttattgttcagtgtcctgcctccattgtcaatggtagtggataatcattgactgggatatcaagcttattaagttttttaaaaattttttttatgaaagctcacaggaaatattgagtgactcacttgtgact

SEQ ID NO: 67774 - DNA, 245 bp, Glycine max
tcatccaaactatatttctagggtaagttttcttacaacatgactacctcacacacttacccctctcacaaatcacactttcaatcacataaaaaacaacaaaaaccacccagcacgtctaaatactccaagcttacccacacctaaataccacctcatacaaacccaaaatatacaccataatacacattactgtactatatctaaatacatccaaacttataaacccctaaaatcacccaact

SEQ ID NO: 67775 - DNA, 357 bp, Glycine max
aatcattaactcaacgaaattcatagttaattaacatgatgatacatatgtggcggaaatggaaccatgcaaattagaaactatcttttgtataattaactactattgcaccgccaataaatttattaaatacaattttacatcaatacctccttttatccacacatttttaaattattaaaacagttcccactcactgtattaaggttaaataatggtaattatattttatttaaatttattttattatagtcaatgatttagggttctattttatgggttaaacaatggatcttctagtccttgtctttgtccatgtattacagtgaattttattattaataaatatcaattacg

SEQ ID NO: 67776 - DNA, 437 bp, Glycine max
attctgagagttttgttttgtttttacagcctggattgactctgtcaaagcccatggtgcctgggatttcaagtgaaaaccagggtcagcccagtccaatttctgttttagagcctccatttgaagatgataatgctgttatcgagtccttgggctgtttgaggggtggtcagctgggtaatgcttactcctttctctcactttattattgctatttcagtaagttcctttttgatattccttgtctttactgttttattacctgactgaattttttctgtaggatcacgggtgtctctgaagtctaatttaattgataaatcaccacctatagaatcaatcgcccggaccctctcatgggacgattcttgtgcagaagggtttggggggggggccccccaagtccataccctttgagccctcgttggcatctagac

SEQ ID NO: 67777 - DNA, 253 bp, Glycine max
ctggtttatgaagctgcaggcagcatcaccttatgctttaatttctcctatccttttatctgtttcgcacaacataaaaactgtttaatacgttggtattgcaattactagtagttaccgaaaaagaatgggagatgtagtttccctagctgtaatttagactttgaattatctgctagtcttgtgtaataatgtacaagaaatgtaacagaaagatgttgcacttaattagaacatccttagttaacatgtt

SEQ ID NO: 67778 - DNA, 208 bp, Glycine max
ccgatcaggcgttcaccaaacctcggcttatgttttagaacactgccaatcatacccaggaccagtttatttcacttgcaaccatgcacttaacatccacccataccaaatttctccaaacacatcaatcttattacctatcacacaattacatataactatttctgtagacaaaccacaattaaaaaactttcaactcttacccatc

SEQ ID NO: 67779 - DNA, 351 bp, Glycine max
  unsure (1)..(351): unsure at all n locations
taaaagagaagcttcctggttatcaactccaagtacaagaaggaagggaaaaagggaaaagggaaaaagggagaagtgggtgcctcaattggatatttaaagattgagaacagggttttttgttggttggagatgcatgattgtggtgtgctttggtttcatttcatcatatgacagccttgtgggtttctttggtgtttcttgatgcatacttaatttactntattattgtgtatttatctcttccatttacaaaaaaaaaagtttgtgtaggtttccctctttgaagtaaaagaaattaaatatgtactgaaaaatggaataatagtgtgttttatttgtgttttataa

SEQ ID NO: 67780 - DNA, 335 bp, Glycine max
aaagagacgctccctcgttatcactccaatttagatttacgaaaacgaaaaggaaaattaagctcgggctcattcatatcgaacattgacacaagactactacgacgaatgcagatacatgactccagcatactttgttttcatttcatcatatgacaaccttatccgttactttaatgtttcttgatccatacttaatttactttattattgtatatttatctcttccatttacaaaaaaaaacatttgtgtaaatttccttctttgaagtaaaaataaattaaatatgtactgaaaatgcaataatattgtgctttattagccatttataaac

SEQ ID NO: 67781 - DNA, 434 bp, Glycine max
gaccgactcgtccgcaaacgctcatccaaaattgcatcattaaatttaacgctacccaacacaccacattgagtatcgcttcattcccatgcgttcctgtctctgcactccaaatgtcaaacccaatcgaaacatccactgccaacgaccgacaatttcacgccgttcacatgaccatctcctactctcatgtcctgaataccctgttgcccatcctccttccgagcactgttcaccttactcctccattaatgcttacccttccagcagctcccactccgttaaaccttacaattgcatcgataacatcggctatgcacagcttccgataatccatactgctaattgccacatcacccattactaacacttttattaccacttgattaccttccccccaaaaatttttttgcacatctatacaagtcttaata

SEQ ID NO: 67782 - DNA, 308 bp, Glycine max
gacccactcgtacgttacgccttcgtgtttttataaaattctattttaatttttttctaccgaacacatccttaaagcttaagattattttaattgtttcttgctctacacttcaaacttcaaaccctaactaaacattcactatcgccttctcacactctcacgcctatcacatgtttatttactacactcatatcctcaatttctttttatccatctttaattctttcacttcttacatttactttttaattctcacttcctttttatccttatacacttttttaaacccttcaattttatttatt

SEQ ID NO: 67783 - DNA, 428 bp, Glycine max
cccacgcgtccgcaaagcgttaaactgcttcttcttcttcaatggcggcagaatcatctcggagtagcgctaaacgcccctttatggaagaagacgacgacgaattctccaaaaagccaccagcaaaaagggttaggtttccaaagggaaagaaagtgaagccaggagatgaagtggtggtggacaaagcaaatgttgaggagggtgaagaagttgacttggtgaatgctaaaactgctaccaatgctgccaaagagcgggaaaaactcagaagggttctaaagggagagaaagtgaagccaggagatgaagtagtggtggacaaagcaaatgttgaggagggtgaagttgacttgatgaatcctaaaattgcgggcttggccccccccccaaaaaaagagcgggcaaactcaaaatcaaatactgtg

SEQ ID NO: 67784 - DNA, 199 bp, Glycine max
tacactaccacttccattctattctttatttcacaactctatcaataatatatgagtcatgttacaacatcccatataacttaccaaataatatccaccctacacactaattagaaacattaatattatggcaacctaatatttttatccataatacctctactatacacgacagacaaaaaaaactcttgactattaa

SEQ ID NO: 67785 - DNA, 104 bp, Glycine max
cccacgcgtccggtttagaacaacagaaactagaaaaaaaatagtttatcttgtcaaaaagacagttagaagaaaaaaaaaaagaattccaaattctattgttc

SEQ ID NO: 67786 - DNA, 220 bp, Glycine max
  unsure (1)..(220): unsure at all n locations
ggttttaacagggaggttgcancatcacccatgttttccttggtaaatcataattggggaatatggaacagaaactgtagtgtctgaatccatcataatagacacatttcttgatctacatctctggtttctcttttggtatcatgttgtagttatacaaaaaacagaagcaaattaattgagtttgatgataatatgataatgattgttgtgtattgag

SEQ ID NO: 67787 - DNA, 448 bp, Glycine max
aaaaaaatccaaaaaaagaaaaacaaaacgcttaacgcaatacaaaaaccacagtttcaatcacatcggtctctctctttctcgcaaatttctactttctgggttttctatttgagattcgttgttccaatgagcgatcacttggtggtgttcgttgaccgtctcgcgcgccctgtccccgttgacccggtggcgcagccgccttccgagccgtctcctccttcggcccccgtgaatgctgacgcttccgggagctccggcaccgctccggtggaggattgtgacggagagggcggcggcgaggaggagccgctgatccagatggcggagtgccgcatctgccaggaagaggacggcgtttccaacttggagacgcccttgcggcccctttttggggggttttagcggcagtcttagtatgctcacagaaagtgtgccagcattgtgt

SEQ ID NO: 67788 - DNA, 309 bp, Glycine max
tcgtactcacaccatgctagccaaagatctcaatgacggcgactctactctacagatggacgggaatgaacattacgacattgtgatcaatgaacttagaagatcccctgtatacatgatagatatcattaaattttaatatagataacttctaccatatatgtacataatatggttgacatatatgcatagaagagtcactgataaatgtactcttgattattaatagaacaccgcagactccttatgatgggtgtggacatttgatcataccaaatgactaatagtggttgcatagctatctatacc

SEQ ID NO: 67789 - DNA, 261 bp, Glycine max
  unsure (1)..(261): unsure at all n locations
cttgttccaaactttatctctctctctctttttttaaattaacttggtcctaaactggtgccanaaagtcctttcttttaaggtccttcttgcttcaaattaccactctcttcctatgctatgatacagatacaggaagaggatcaaaataccccaccataagacaaacccaaaggaatagcaacgtcaattatggtgggaggtttcaatggagaaagtgttgtgagagaaaaaagaggggangaagaaaacaacacgtgg

SEQ ID NO: 67790 - DNA, 251 bp, Glycine max
catccgaaacaaaactacaagtaaactaaatttactttatcattaccgacttctcttgcaagcttagatgcaaatcaaacaccttcactcaatgtactaactactatttcactgtcaacaaataaactaaatacaaacccacatcaataccttgccttatccaaacacttttaaattattacaacagtacccactcactgtgacaagattaaatactgagaattacataatatttaaatctataacaatat

SEQ ID NO: 67791 - DNA, 311 bp, Glycine max
cccacacaacctactacattacaaacaccatcactctatattacatatccactcacactatcatgcacaacgtaaaatttttcaacacatcaaattccaatacatactacatcaacaccatccaaacttaaacccttaaaccttaatcaaccattcaacaacatacccaactacaaacacaacttcacaaaaaactataaaaacaacttaacctacacacatactaaatctcaacataccattacacattcttaaccaaaataaatctcatcattaatataaccaataatatactatatatccaaatcaac

SEQ ID NO: 67792 - DNA, 277 bp, Glycine max
aacacttatactatcaaatgttttagatttcaaacctatccaactctctaaggctaacgctacttctaataaactaaaggctataactcaatctatacattactctacacacacactctctttcacacaatactaccttaattctaacctcatatatcctcatctttcaaacaccttctctcacaaagaattcacttccccacctacaacaactcaaacaccttcctctaactacacaattctaaatccaactccaaatcttgtcttacatatcata

SEQ ID NO: 67793 - DNA, 120 bp, Glycine max
gttatccgctattcaatctcgtcgccactagcacttgttcagccgaagctcaactctaatgctctgtgctctacgacagcacactctaagagaatctctctcatgaatcatgacttattc

SEQ ID NO: 67794 - DNA, 214 bp, Glycine max
gttggctattaacgggtcgtgacatcatcttcttcgggttaactgtcttttttgggttatgatctaatagcccggaggttgaggagttgattatgtaggatgtggaccatgttattggcccaggccaagaatttccttaattcgaccaaatccgttaaatgcattaccttaacactgtaatttaccacaacatgaggctgttaccactgattca

SEQ ID NO: 67795 - DNA, 259 bp, Glycine max
atctggacactactcactcctcacaccacctttacctactcaacctccttctttggaccaggcactaatcactatactcattaccttctctttatatactccattattattttcacttaaccctctactgaaaattcctccaattttcatattaaacgtttcaattcaatttccttcatttcaccacaaataataaaaataactatacatatatcttaacattacaaatatatttattacccattacatttactaaaca

SEQ ID NO: 67796 - DNA, 194 bp, Glycine max
tccattcaacattatattttttatatactctcacctaaattcaatacagtcacctttatactacaactatatcactcacaaaaccctacacattcccaacttaatcatccttcatcacatccccctatcatcatctaccataatatccaacactcccttaccaatcatccttccctacactttcacaacctcaa

SEQ ID NO: 67797 - DNA, 438 bp, Glycine max
  unsure (1)..(438): unsure at all n locations
aagaacaagtagttgagaactaagaaggagaagcaaatggcttcctcaatgatctcttccccagctgttaccactgtcaaccgtgccggtgccggcatggttgctccattcactggcctcaagtccatggctggcttccccaccaggaagaccaacaatgacattacctccattgctagcaacggtggaagagtgcaatgcatgcaggtgtggccaccagttggcaagaagaagtttgagactctttcctacctgccagaccttgatgatgcacaattggcaaaggaagtagaataccttcttaggaagggatggattccttgcttggaattcgagttggagcacggtttcgtgtaccgtgagcacatacaggtcaccagatactacgatggacgctactggaccatgtgnaagctgcctatgtttgttgcactgatg

SEQ ID NO: 67798 - DNA, 452 bp, Glycine max
cccacgcgtccgaagaacaagtagttgagaactaagaaggagaagcaaatggcttcctcagtgatctcttccccagctgttaccactgtcaaccgtgccggtgccggcatggttgctccattcactggcctcaagtccatggctggcttccccaccagaaagaccaacaatgacattacctccattgctagcaacggtggaagagtgcaatgcatgcaggtgtggccaccagttggcaagaagaagtttgagactctttcctacctgccagaccttgatgatgcacaattggcaaaggaagtagaataccttcttaggaagggatggattccttgcttggaattcgagttggagcacggtttcgtgtaccgtgagcacaacaggtcaccaggatactacgatggacgctactggaccatgtggaagctgcctatgtttggttgcactgatgc

SEQ ID NO: 67799 - DNA, 288 bp, Glycine max
caccacacttaattaaatttataacttttataatcacacttatcaactgggctctggctttattacaatacaccatatctatcacacaaaatttaaaaaatacacactacccaatactaatgactacatacctaaactaaatatttatattatgtaataactcaaactcttcttctctctacttattgatatactcatcatcactccatcataatacttacctaaactattaataaatgaatgcatactaccatatattacataacaactatatactcattaactacc

SEQ ID NO: 67800 - DNA, 247 bp, Glycine max
tctgtctcctcacattctcttcaattatattaacaacaccatcatattctccaaattcaggaccactctacactttataaaacatctcatatggcaaggacaaacatcattctcaatctgacaaaggaactctctcacaccttgctcatgacttaactcctacatcacatcatgaacattcttaccaacctctgtctaacccatcaccacctaactcataccctacacaacaaagatatcctccaac

SEQ ID NO: 67801 - DNA, 238 bp, Glycine max
ctcgatgcttgaactagctactctacacatttagcacaacaacaactacaaccgattttggaactttatacaccggattctgcatgataagagcttatcaacagtatactcaccttgcgcaatctgcatctgtctactgtctagtgcatcagatatagctgcttaagattctatactccgctacatggcactgtttatctcttctgttcatgccacactatttgccatgaccactttc

SEQ ID NO: 67802 - DNA, 127 bp, Glycine max
ccattcacaacaactatcccatcaaaatcaactccttaacatttaacatcaactccaacattataatttttaactcaataaacaactcaatccccacaattatttccataaccctaccatctctcaa

SEQ ID NO: 67803 - DNA, 403 bp, Glycine max
caacaaaaggctcggtttcgcacagcacacttccctctccaatggaaaatcaattcccaagtatcagtgattcctactgtgttccttatcttatcaatctacgaatcaatacagaaaaaggtatcacttacgacgcaaacaatgtccgtcacttttatatcaaagataaattattcacacttcacaagcgacgtgtcctgtgtgataatcaaggaaaccccatcgtcactctatacaagaaggtttgactactgaggcatcttatgctcgttgatttccttcaataaagaatgacattgcatgggcgatgccaagtttttaggggttataaaagcaaagatttctctcaattgctcttttcagtgaagagatcagcaatgataccgagtgggatgattaactt

SEQ ID NO: 67804 - DNA, 398 bp, Glycine max
agcacacatacgagaatggaagattccaagtaggtgaaggatagtagttgtacaagatacgaacaattttcgcaaagcgttgagactgcctcccaagaaccctaatcactcctactacaataactacctatcaagggacgaccaatgctatcccgcgttacatcctactggactcaccattgtcactacaaatcacactcgatactgactaattcactatcctggtactgcaccactgatccaagcttcatggtctgaatcatactccatggtacacttaccatgcgtcacaaagtactctggttgattacatatgagagctaatgacgattatcacagatgacagtggcactcactttctattaatggctaatatcgcagaacacaggcccatatac

SEQ ID NO: 67805 - DNA, 260 bp, Glycine max
ctttacaacatcttcactactaaaacccttacattacccaacttaatcacctcgcagcacatacccctttttcatcattcgtaatatctaataaacccacacctatcacccttcccaacaatatcccatccttaatttctatataaactctccctttatcggcacattaatctctactaatttcctcaatactcacaacattaccacttcactatccaactccctaactccctctcctttcaatttcttcccttactttc

SEQ ID NO: 67806 - DNA, 199 bp, Glycine max
  unsure (1)..(199): unsure at all n locations
gggcgcacnngagcaacaanggngcacccaanagcagaggcaaacgaggaaagnccgngcgggaaaccaacgccggaagagnncnacgcgcancacncagngagncacggngccgagngcgngacgaaccccagaggncacaagcacnncacacagagatggaccccacacattccttaaaccatcattggaaccttcg

SEQ ID NO: 67807 - DNA, 224 bp, Glycine max
ccttcataaccagccacaagattacacaacttctgcaaccagaatccctctaaaaatgtctctgcaaaacatgaatattattctgattgcatagtaaatattaatagcacttatcctgatcatactcctatctgtatagtcttcaattcaactgtggaacacaatccattcacccaatccttttataatgtaatttcaaccttttatcccatgaaacattctaa

SEQ ID NO: 67808 - DNA, 72 bp, Glycine max
tttgtatctataggaaataaagaaagatattgggcggtttataatacaaatcttagctagatcaattaagtt

SEQ ID NO: 67809 - DNA, 383 bp, Glycine max
gacagctcttggctttggagcccctcctactacacttccgcttcaggtacgactgacttcgtctccttctaccttggccttcccactaatccacatatgccaaaacgcaggcgagtcattgatcacaatctgtacaaagagaaaggccaaatcaaggttggacactctctgctctgcacctgtgcaagatcaggaggtccgtgatattactatcagagagcgaagcggctcactagacctattggctggaggtcacggcaagaggatctgatctagcatgccaaagcagtatgaacctctttgaggttaacccattgctctgtataggttctacactttgactcacactgatcaagtcaaataaatgatcgaggtttgtgatc

SEQ ID NO: 67810 - DNA, 372 bp, Glycine max
ctcacaacttcatcaaaccaaacaacacatctgactacagactgagagaaactgacagtgcgtcgcttcgtattaagatatctcatcaaagactggattctctcgcactataagaaacgtactccgacgtgcaacgaaggagaccgaacaaagcacaactattagaagttgacgcagtcattcccaaccactatctctgaccgataagtcaggagctgatcacacatccggtgactttatcaactgtcattacctactaccgtttgatcatgctgatgtatatcaatgcagaaatcagatcctgacctgtctactaccaatagctgacaaccttcgacctcatccacaaccatgccattcccatgatgattc

SEQ ID NO: 67811 - DNA, 430 bp, Glycine max
cttcaattcaacacttcgagagatttgaattatctgagatgtggaagttgtaatcaagtggagagggcttttggagaattattatagatgaaaaatagatgaattttgattttggtcgctttgattggagaacaatactaaaagcacctacgggcatgagatggatcgggaagaatatttgcggaagtgttccaatatgaaatgccaaagagttcaggtggatgaatcatttgtacctgctcttcaagatgaagtaatggaagttgagcatttgcttgcagaacctagaaacgttcatgcttccctggatggtagtttggattctcatacaactttgaatgacaaggatgatttggaactggaggtccttgatggattgctggatgatgttgaaattgatgatcttgaaggaactggtggttttgctggt

SEQ ID NO: 67812 - DNA, 357 bp, Glycine max
atccgcacagccacttagtcatgtcttcagccaaatgcattgtctatataaccaggtctagttaatagatctaggacggaggaactttgatcagtttgaagagtagcctttgagagcagagatgttgaagttattctagggacctattgatatacaggccaagatggactggagttagcgttacaaagccctggcagatattagtgatagcaaatcatcttctgctaaatggaatttaaataggatgcttttgagtgttttgggaaatttgttaaatatgggtgtgttggaggaattttaataattgtgaacaattacgaagttagcaaaaatgcattaatattagcaactattagt

SEQ ID NO: 67813 - DNA, 172 bp, Glycine max
tcttttctataaaacaacttacagatatcccaactctttcccattacaacattcaaaaacagttcttccttcacctgatgcttcatcttcatcatatcattcaaatctttttcaaaacccttactcaaaaaaccattaccctttacgtataaaactcttacactatttacaa

SEQ ID NO: 67814 - DNA, 376 bp, Glycine max
cccacgcgtccgttttcctctctttcttggttcttttgtttactaagcttagatgcaggggcttaactgtcttaacttttcaagtgtggtttttcaatcagaattagagttttacatcgataataccgataacaaatgtttacgtgaaatgtctaacttagatttccgaagtaaaactctaattttgatcggacaacaatattaaaaaaaacttacaagaactgcttttctcttcccatgaaaaatgactgttactattcttttggggaacgtgcgtgtgtgtgctcgcactcacgtgctcttctattgatgatctggatctcggaatttgaactactgtgtcaagaagtttctgtttttaagctgcggagaaaaa

SEQ ID NO: 67815 - DNA, 291 bp, Glycine max
  unsure (1)..(291): unsure at all n locations
caaagacgnggactnngctgctagaagaggaaagncncaaggatgggcgngatcatgtgtgtcaatcatatataatctttctgtgtttctttaattatttattattgttatcattgttggaggggatcttttgatttttgaattcttattcatatatttggaggaggacataattgctctatttatctgtataaatttcatgtaaattttggtggggcctttttttatcaatatatttgtctttttgtctgtagccaagctttaaaatatgtttgatctgtcaaataaaat

SEQ ID NO: 67816 - DNA, 192 bp, Glycine max
cttgaaggaaactagtagtatttttcaaggtttctcgcgtgacgtgcattttgcgagaaagggttctttggaaaattttccaagaaaacatagtgttctacacttttaactagtcaaccatggagaatgttaaaataagccataagaggtctcaatttttttattaattataggtggataatgttactcttt

SEQ ID NO: 67817 - DNA, 436 bp, Glycine max
gtagttgagaactaagaaggagaagcaaatggcttcctcaatgatctcttccccagctgtgaccactgtcaaccgtgccggtgccggcatggttgctccattcactggcctcaagtccatggctggcttccccaccaggaagaccaacaatgacattacctccattgctagcaacggtggaagagtgcaatgcatgcaggtgtggccaccagttggcaagaagaagtttgagactctttcctacctgccagaccttgatgatgcacaattggcaaaggaagtagaataccttcttaggaagggatggattccttgcttggaattcgagttggagcacggtttcgtgtaccgtgagcacaacaggtcaccaggatactacgatggacgctactggaccatgtggaagctgcctatgtttggttgcactgatgcttct

SEQ ID NO: 67818 - DNA, 149 bp, Glycine max
ggcaaaattgcttttatttatctgtgttttaatgtgttgtgtttgtcggaacccctgattgcatttttgttaagcgcagcgagtttcaggactttgctgcgttgtgttgctttggtttattaaatgtcaactttctatttgtagtgttc

SEQ ID NO: 67819 - DNA, 418 bp, Glycine max
gcgatggggagcatgcatagtgaagtcattagttgcaaggatggctgctacaggaagcacatggatactaagtccttgagatgtacatgagccatactaggatgatagaaactagcttgctataacatagtcatgatgcatggtgatgacaaattgcgtcacatgactgtgaatgggtgaagtcctatgtaacgcacacatggagcatctagctgaagatctgaatgaggaaagcgaagtccaaatattagactatatgattggacaaggaacccaatgggtgaacttgaatcatgatgtaacttaccgacctggaaggccggacatgatgctaatatccggaggaagagacttctatgccgtttaatccaggggaggagggttctgtatatgtgggaaaagggcttatgcacatgca

SEQ ID NO: 67820 - DNA, 190 bp, Glycine max
gcgcagacacgtaaacagacgcctgtagaattattatcctgaatctttccactcatattggaagccttttctttctaaagctgatgctcctaatctcagtctttcatctctcctatcctactaggatacacaaccagctggtacagcacccatcacagatactccattccctcaacgaaaatacttttat

SEQ ID NO: 67821 - DNA, 206 bp, Glycine max
cggacgcgtgggcggacgcgtgggtaatttttgacgtgaatctttcaattgaaagggtagctatttgaaaggtatagctgatgttaaggtgcaaagtctgatgttaggtttatctcaagatttaagacagaatttctcaaaaagtgaacatttttcatgttttgtacaagttttgaaaatatatttttaggaattgttgactcgta

SEQ ID NO: 67822 - DNA, 213 bp, Glycine max
aaacttttatttgcaaaaccatgtatatattggggttatgtatcattgggtttagcaaaaggtctattgctggttagcatcttggttgtattattctgaaatctgaggttatcatatcttctcaatatttagaataaaatttccagggaatttgtgatcaaatcaattttccttctgtaggaagaagagctgtatgaaattgacattcctctc

SEQ ID NO: 67823 - DNA, 226 bp, Glycine max
cccacgcgtacgaaaaggaaagggttctatttgtttcaacaactgtaaaaaatacctggacaggattcatggttatagaggctccacataacatgatgctataagacgcagtgacaatttcaaggtataatatgttaccaacaaatcggatagtatacatattatgcttaaaacctataaatacttgtctcaacttattataatatctaatgttaactaaaaaata

SEQ ID NO: 67824 - DNA, 436 bp, Glycine max
ttttatccaattgaaattctacaaatttctattataaacctaataatgcaattttggaattttataaataacaatttaattctattgttctaatagtatcaaaaaaattgagtactaactcccatttcttatttattattaaattaacctatcaactttcttttttatctaacatgtcttttttatttcaaaaatattccttaaaaaactttaatctatttcaatattctaatcaatcctactacttattttacttacttttcttcactttaaaataaatatcttatacttatcttccaaattaatttttcccatctataatttactttttcctccattaatattcctaatatttttaattatcttatatttattactttatattctttttttctacttattaattttaacttttttatttacttcattttttttt

SEQ ID NO: 67825 - DNA, 292 bp, Glycine max
atcacacaacacagtctttttctgaccctgacatgattattcaccactttaacaaggggggtgtgtatatggctacattggactatccataccccataccggaaactcaagcttttgccatattctcgactagttatcacacacaactggctagatgatacctgctagagatatttctcaagaaaaatatgaataaatgttctattgatatctggaaggagccaaaacattcaaaaaggcattagtatccacatcgaaagaatgacacattctctcgtcagggcacattttt

SEQ ID NO: 67826 - DNA, 202 bp, Glycine max
aaaaaccgggtgcacccacgcgtacgataacacaaaataatttaactctggcttttaaatgattcttcaccagaagaacaaggggggtgtgtatatgggtgccgcgggctaaccataccatataatgtgatttcaagcatttgtcatattcctcactagctttcacacacaacatgtttgataatacatgctcgagatattt

SEQ ID NO: 67827 - DNA, 171 bp, Glycine max
tcctcaattcccttctcgacccactcgtcgaccgcatcctacccccacacctccgctcactcatctcattacacaatttcatcaagcctatcatcgctcacttagaaactttaccttccatcgtagctacttccatctgcacaccaaactctcatctcaactaatcattct

SEQ ID NO: 67828 - DNA, 266 bp, Glycine max
attgtttaaacctaattctcatttattcatctttcgattcttgtccaaccaaaaatgtggcggtttcataaaactggttcctataacaccatcacccttgacgtgcaaacctccgacacgatctgtaattacaactctatcattttgtgacaaacacacattcccgttttattagtatacacatatctaacacgaacaacacctccaagctaatatcaccattttacaactctatttcttttctgaattcactatccattttttac

SEQ ID NO: 67829 - DNA, 427 bp, Glycine max
gcgccacgcgtccgaactcgttcttcttcttttgttgttctgtgtttgtgtttgttttttctgggacctgaagaggtcttgctgcggtggtgactgtggttgcagaagctcctgcaagtgcggcaacggctgctgaggctgcaagatgtacccagacttgagctacactgagtcaaccaccaccgagaccttggtcatgggagtggcacctgttaaggctcaattcgagggtgctgaaatgggtgtgcccgctgagaacgatggctgcaaatgtggaccaaactgctcctgcaacccctgcacttgcaagtgaggtgttgggagagcaagcttcaagcagaaatagcccttaattaggaataatgataaactattaatgtgtagctaaaaacttatgtattatgtctgggatggtttttgggcactc

SEQ ID NO: 67830 - DNA, 126 bp, Glycine max
tttttctcctagaactcaaataaaccgtacggtttatattttatgtgctctaaaaccctccccaaaatcatttcaaatgaataacaatctttcactttctcaaaatattatcaaatatttatccaa

SEQ ID NO: 67831 - DNA, 240 bp, Glycine max
attatatataatttggtccagaattgttgtttttcaattcaaatcaacacaaaatcgaggcgggcatatatcaatggcgtctgatactcatatatcttcgaccatcatttctatcaccacactctattcatctagtatacatctacaactcacactacataaaggaaataagtcgtatgctacatgcgtcatacataattcatgaccccgagagctgacccaaaaaccgtttatactaaa

SEQ ID NO: 67832 - DNA, 117 bp, Glycine max
acggttgatttctggatctatattgcgtttatggtttgagtagtattattgtgagatcattgtttgtagtacataattgatttctttatattcagattcgtgcttagtttttgtttt

SEQ ID NO: 67833 - DNA, 260 bp, Glycine max
tttacattcactaactcgcctgctaatgcttcacgctctctttcattccgatcataaatgcagcacttaaacaaatcactggacttatatactcaatcactcacactagcattaaccatttacccattttatttaatacttacattatctttctacactcactacttttttatcactttcattaaataatttaattactacccttactcaatttaaaacaattattattttataaactctcatttctttctatttcctaa

SEQ ID NO: 67834 - DNA, 392 bp, Glycine max
cccacgcgtccgatcaaaacaagcatagattttaaggacgatatattgcaggattcggcggtggcaaatacactcccagggcttcaatcaaacaaacactcgcttatcctttactgattgacctagaaagccaacggttgacctgtcaataccatgagaccagaaatgttaacttgttggacacagctacatgagaacatggaatgctggttctcggctacataatgacgaagcaataaatgtttacatgactcatgtgaaacatcttctgtaagcactctctatgcctgcttaataacattatcatgcattgctttcttattctgcgctacaaacacccaactgttggcaactacacaattgcactgcacaaagctctcattatcataaat

SEQ ID NO: 67835 - DNA, 357 bp, Glycine max
cccacgcttccgatcaaaataagcattttttttaaagactacatattcaagaatccggcggtggcaaaaacaaacgccgggccttaattaaacaaaaactcgcttatcctatactgattcaccaataaagcctccctctgacctatcaatctcatgagaccctaaaatgttaactttatggacacaacaacaccataacaatgaacacctatatttagctatcataatactaaccaatatatcttcacatatttcattaaaaccaacttctgtaacacctatctctacgttattaattacataatcattaattgttttaatatgctgtactatacacaccacacattttgcaaatat

SEQ ID NO: 67836 - DNA, 196 bp, Glycine max
aatttctatatgaattgcacaaattgcgtttattatatccaactcctagcgaatcctttcgttctcataaacatcctggttcagttactactcttctacattttcatcatcaatctactgttctcttacttcattaccctcactcgttaatccttcaccaacatatacttctgcttcttctctctctctatcaacc

SEQ ID NO: 67837 - DNA, 334 bp, Glycine max
gtgattgttgtgactcgttcttcttcgtcgatatcttcttcttttgttgtttgtgagtttgtggtttgtctcacctgaaaatgtcttgctgcggcggtaactatggttgcggaagctcctgcaagtgcggcaacggctgctgaggctgcaagatgtacccagacttgagctacaccgagtcaaccaccaccgagaccttggtcatgggagtggcaccagttaaggctcaattcgagagtgctgaaatgggtgttcccgctgagaacgatggctgcaaatgtggagctaactgcacctgcaactcctgcacttgcaagtgaagtgttggagagct

SEQ ID NO: 67838 - DNA, 410 bp, Glycine max
atcaagcgtgaattgtctctattccgtctgttcaatttaatggctattccaattatgtctatgtttttgactaaacttctgactgaatatttacataaactatttgtacgcccaacgaaaatagtgcgagatttccaaaagggaaaagctgttggtccagtcactgttcgtgttaaatgtgaagaaacgcgagatggaatcaaggattctacgggtgaactatctggtactacagtggatgctcgaaagctttgttatatattttacgggaagatacatccttatgttattgttactctcgataatcatgttatacgcagcataaagcacaatctaactactgtaattcgacccgcttgaatgccaatttggaatcaagaatttcatatgcttgtgttctaccctaggaa

SEQ ID NO: 67839 - DNA, 459 bp, Glycine max
gacatacatagagagagagagcgagtctctaatactatcgaacctaaatgcaatacgtgtgtggcaaacttcactatactattgcacaaatccatattaggaaaaaattatcacattacaaatctatataattctctatactagagaatataaagtttgcagctagtccttttcaatcagctaatcataactttcactaggaacaatatcaagatcactccctcttgctacagaaacttatataaacagtatatgaaatattttaccaaaaaatactttataatacatacaatgacgcattgactaatattgattgaataaaactaagaacggattatcaaaaactttatatactttaacatcacttataacgagattcaacaaaaaaacataaaatctaattctctgactaaattcataatatgtatatgtttagatattacggattctcatttatat

SEQ ID NO: 67840 - DNA, 324 bp, Glycine max
cggggcgacccacgcgtacaagaatattcttataaacaggaacagctcagatcaccttacaatgcttataaaagccgtgtctggttctaatatgtgggacggaagcaacaacaaattaactgttcaactaactatttccatcaaaacaacacctttttatcccgacttagatataagaatgtgcgctacgttatcgaatgtcttagcacaggtatgttgtgaagtaaactataccttttaactagctcgacatcaatcactgatactctatactatgagcaatattgaatggtaaacctagatggactaatatatccatttttt

SEQ ID NO: 67841 - DNA, 342 bp, Glycine max
gaaatacatccaaaaacccttcgagctccttttaccattcaatcattatacaatccatgtatggcaattttatattgttatgactcaacaatttactaactccccaaacaaacttaatcatttcattaacatccttatattaagaaatactaaccagaatatattctacttcaattaagccattaatatacgtttttaggaaaaatacatatatgacttcctaaacttaaaaaaattattcataaagaaaactatacgcttcatacaattgaaatttctgaaacatacattgttctaacatataaaattatttttttgtcagtaaacaccaaatattataaa

SEQ ID NO: 67842 - DNA, 245 bp, Glycine max
aatagccgggccgaccgacgcgaacgcacaagttgaaaattgcggctctcgaggccgtcaacaaatcccatgcacgcggcagctatgggcctcttttaaaacggcggtctcgactgccatagtaatgtttttaaaggcttctacatggaatccatcgcgtttaatcccagcttgttcccttttcattcctcccttgtctccttcttcgcctttttccgttttcactacaacctgattgttttttc

SEQ ID NO: 67843 - DNA, 350 bp, Glycine max
atcaaacattcataatcccttactaatctatcttttatatacacctgaaatggactggttagggatgacttttggggccctcaaaactacccatttcactgtactgaactcctatatgaaaagcctatcatctctctgaagatgacacttctaaattcagatacagcggtcagtgacaagaagatcaagactgacaaaccttatggaaataatggctgactggcttttacgtacgaaactgttgcatttgtctggaaaggaatagaaaaagttgattaccagtttgtttacaaatacgggactaataaaaacgggtacagacctatctacaacacctaggactagattcc

SEQ ID NO: 67844 - DNA, 263 bp, Glycine max
acgttaaaacaagcataaacagtaggagcataagcaatggcgctgaacaagccaagaaccaggagggggaaccttgatggggctaggggcataggcttgtattgaacgtaacacatgaactacaagacgggtatctgggccatcaaggacaaaaacggtgatgttttgggacgctactatcacaaacataaattggaggacctggaccagaatacggccaatttctatcaatggaacgaaattaagaatttgctagacaacaa

SEQ ID NO: 67845 - DNA, 211 bp, Glycine max
atacgcctacaacatctctccaacctaacaacacgcatttaactcaagctcgatgagattcttaaggtcaactacagaccatgatactactcctaaatcatcatcctccctagatctcaaacctattcccaacacttcctaattcctatcaacaaacataccatatccatacgaccaacttcatatatatcaccctataatacttacagcc

SEQ ID NO: 67846 - DNA, 284 bp, Glycine max
  unsure (1)..(284): unsure at all n locations
aaaaaggggcgcccacccttccccacaccttcttaactttntaaaaatttacactcaatacataccctactttancggcacatctcaaacaagatagccttccattttcctttctaacaaataataacattctttctaataacactaattattccaaaattaaaacaaatatttatatcatagactgatctcttcctctacatttgaaaaccaatatctccttccttaatcaatataggctacctaaacccacttttatttttcactatacctattctccctat

SEQ ID NO: 67847 - DNA, 224 bp, Glycine max
ggcgcgacacacgcgtccgaatacacatccttccactcatacaagtcttttgctaggttatgctaaacttctacaggggcgtttcaaaactataggtgaattcacatcccaccatctctaagagctcagctgaactatccgaaacaaaaggaactgatttggaatacatatgtaatagaactacgagcaaagccaaatgttattccccggattcatcatatgat

SEQ ID NO: 67848 - DNA, 244 bp, Glycine max
gaaacatattacatacacaagttatataacttatatataacagtgtgtgcatatatgacagatgtcgatatactactcgtattacatccaaatatcatatatctctgataactgctgatgtacaaacaccaaatttacttggaagttctcatataatatataacccacgtcggatgcaaataatctttctggtgcacccgaaagccacggaggaatcctgggccctgatgacatgaatagccca

SEQ ID NO: 67849 - DNA, 395 bp, Glycine max
gcgcttggaatggtcaaagcccttggttacattttcactttcctgtggaagctgttcttcacctgggggaagcagcagaccacagagcaaaggtgcaaacagaacaatcagcagaggtgcaagcaggacatacaagggtgcagatcaaggaaaagcccaaaaggagagtcacaagactaaattaccttcgagactatgcttgagggcaggaagggaattgagtagcaatccttatcgtgtgatgctgttgctagagcaggggacaagcttaacggatttgattctgtaatattccttttgcacaaaaagataagaattctgttagtagaggatagtataaataagtatgtaaataagccagaatcataaatgaatgaaaatcgcaaagttccctt

SEQ ID NO: 67850 - DNA, 256 bp, Glycine max
  unsure (1)..(256): unsure at all n locations
aaaaaccggccgaccgacgcgtacgcttacaattntcaaagcccttccttacatttatactttcctgtccaagctgttattcacctgctctattcaaaagaccacatagcaaaccttcaaacacaacaatcaccagaagttcaagcacgacatacatacttacaaatcaaaaaaaatcccaaaaacagattcacacgactaaattaccttcgaaactattcttgagggcacgaaatcaatttaataacaatcctta

SEQ ID NO: 67851 - DNA, 366 bp, Glycine max
  unsure (1)..(366): unsure at all n locations
aaaaaaccnncgcgacccacgcatactctcacacgtcctaccctcatcccaccatttttactccttctgaaacagaaatccaacttcgttgtttttcataaaccctcacaaatcaacaacctactcaattagatataaagccaacttcaaaaccagaagtgcacaacaaaccaaataccaaaccaagattcacatgattaattaacactacaacatatattacactccaaaataccaatccattattcattctaataacatcaacattcttccacaaataatatcaaccttcactgacttcaatttacaacattctacatcatcaacacaataactatcacgatattatcttatagtatgacttac

SEQ ID NO: 67852 - DNA, 145 bp, Glycine max
tacccaaaatttaaccatttgccctttttataccaatcagtgtcccactctaaccccctttaaatccgcgaaaactcaaacctctttctttctaataaaccagaaacaccttctctatcccctattttcttcttctcccaaaata

SEQ ID NO: 67853 - DNA, 294 bp, Glycine max
gtacccttttatgatctgaaacagaaatgattgatccatcgtcatgcttgaggctaaaacggaccatcttaacaaatcggtggaattgatctatgcaacacgacacacaccccacacatgtgatcttactaactccaatattgtggcctattgaaacacgatttcaagtaggcagatgtctatctttccatgatttgttcacttcccatgatgactacgatcccattacgatatatatacatctaattaatccttttgccatcgtctaggacgcaagccatagtgagaggtcat

SEQ ID NO: 67854 - DNA, 197 bp, Glycine max
tcatgcgagaacataaatgcacaagcactcaaatcaacatgatctgttatgtaactatccaactctaggatacaaatgccaacattaaaatcactgttatctatattactctaatcatgactagacaactctcattttacgcatcttaatcactacccagcatatcataggatcatacagacctttttctacccatc

SEQ ID NO: 67855 - DNA, 377 bp, Glycine max
ttcccgttcgacccactcatccgtgcactcacacatcctaccatccacaaaatcttcttctcgatttcaccatactaactcctggaacctcactgacacttttcatatgagagcggtcaaaacccccctactcttattctaaaaccaaatcttctcaaccaacatctctaactaacatatccccatccaccctacttcctttctacccatcataaattaattattcacattaccttacactacctcaccaacagttccaatatcaaaacacactgaaacttcttacaaatcccaaactctaccattttatcacccaactatctccactaccccatcctctacccattaatctaatagaacacttcaaaattcatcac

SEQ ID NO: 67856 - DNA, 264 bp, Glycine max
tcccaattcccgttcgacccactcgtgcgagttattgatatttattactgaacaaagtacacactctgatttcatcgatccaaccgaatcgaagcctcagtttctctgaaacgtgctggctcacttactactgttcgacgctttcatcaacatcgaacggaccccttacgtcatcatcctcacctgccagtccttcaccgtcctcatcttctacttcttcatctcctagatcaaccttccaatcgcctgcaccagatcaaacac

SEQ ID NO: 67857 - DNA, 227 bp, Glycine max
aaaaaggggcgcgacacacgcgtgcgcaacgcttccacccattcaatccaaacatttaaaacttaaaaattaacatcactacgcccgttttcctataatttcccgggtcagaaaacacaactcgatttagatcacctcgcaacacacctttgaacatcacagcttactccccgaccgcacaaaaggcaactggttccaacctacttctctaacaataaccttctaga

SEQ ID NO: 67858 - DNA, 203 bp, Glycine max
tcccccaaatccatcatacacacaatatctctcctcacatccatcaactaacctacttcctaacaactcctcttgttcatcctctctttttcctcatattctccaacttcttcaacattcaacccactctcttcctcattgactcaccctaaccttcccacacattccttccttcaacctttctttcccacttcaacctcaca

SEQ ID NO: 67859 - DNA, 171 bp, Glycine max
ttctaagattgctttgtttgagttaaacgcttcaaactcaaatacgtgtgcattacaacggctaacccctcaccatgctcttcttctctctcattcatacccctccttttttatttgtattctcagctttgttagattccgtttctggtttttcccaattccatagtactc

SEQ ID NO: 67860 - DNA, 283 bp, Glycine max
ctcacgcatccgaatcattccacttaaaagtttacaaacatatacttatataccctttacctgttcttttttaaccttatctctcactaaaaaacatatccaattataatccattcactcaatatactatcggtatctatatagggcgaatcatccaacatacccaatcttaaattcacatacctaccacctattcattcttctatatggtcacctatatacaaaaaatatcacttcattcaacatcaaacccacttcaaaaccctatcattacccaacttaa

SEQ ID NO: 67861 - DNA, 350 bp, Glycine max
gttctatcagcttctttgggaaattgaatttttctttttcctcatggttaatttctgccgttccttacttaaattatgttgagtttcttttcttgattaactatatcataggctaactgattctcttttctacgcatggatgcagtacccactaggtgctgaatacaaacatgtgcttcaaatgctacgaagaattataattatgcaatcgcatgactgacaaatattctctgaagaagtttgtacaataaatggcctaattcttatttccataacatataaagatgcatatctaattatctaccaaaaaaaaaaaaaaaaaggcagacgctctaaacgatccaagctta

SEQ ID NO: 67862 - DNA, 105 bp, Glycine max
cataataaacgaaatacatcatttcatattgccacaaaaaaaggccttactcacaatgatcactacctttatacaatgcatttgttcaacatcaattctacaaac

SEQ ID NO: 67863 - DNA, 310 bp, Glycine max
gtccttattggtgtccaatgcaatagcatgcacgtatacagccatgtctgtacttcttggggtaagaaacagaagtacaagcaaattcttgaggtcattgatccgctggatcgacacattcatagaggctttgctatttatacggaactgggctcgtgacgcactctgtatcacttactacaaaggaaactctcatgtgaattggaacacggtgtgcactgactttgggaaatgttgtgatcaaacggctgcttcgactgatgtgtcactgattggatcattatcattactattgctcgtggttattcct

SEQ ID NO: 67864 - DNA, 414 bp, Glycine max
  unsure (1)..(414): unsure at all n locations
ctttgttcactcttcttctcttgcggctagggttttagcgcagcttcttctagatttagggaagatgggtaaggaaaaggttcacatcagtattgtggtcattggccatgtcgactctgggaaatccactaccactggtcacctgatttacaagcttggaggcattgacaagcgtgttattgagaggtttgagaaggaagctgctgagatgaacaagaggtctttcaagtatgcctgggtgctggacaaacttaaggctgagcgtgaaagacgaatcaccattgatattgctttgtggaagtttgaaacaacaaagtattattgcacagttattgatgcgcctggacataaggatttcattaagaatatgattactgggacatcccaagctgactgtgctgntcttatcattga

SEQ ID NO: 67865 - DNA, 313 bp, Glycine max
cacagagagaggggtttgggattggagggattgacgctgcgtctcttcctcttctctttgggtccatccctcattcctaatcctccaatccaaccacctcagcctcacactcacatatacacatatctgaacgcgtatcgtccctcctatggcttcaaagcgcatcctcaaggagctcaaggacttgcagaaagacccaccaacttcttgcagcgctggtccagtagctgaggacatgttccattggcaagcaacaataatgggtcctgctgatagtccttatgctggaggtgtattcctagtcactattcac

SEQ ID NO: 67866 - DNA, 99 bp, Glycine max
gctatacatccgggggggatgaaaagagcctttttatttgaggtaactgattgcttcagtgagatgcattcctggagggatgaaatacaaacgagaaat

SEQ ID NO: 67867 - DNA, 160 bp, Glycine max
cccacgcgtacagcgggtctcaaaaaagcccttttctatataatcactcaatgcttcaccttgtgcccttatgctgcaaggtttgcaatcacaaacctatgcacatacactggctggtctacgtctgtgcctgttggcgatagccttcaattaaacccgg

SEQ ID NO: 67868 - DNA, 283 bp, Glycine max
tccacatcaaccgatagctttcttaatacacaattcttaaattaaaatacaacaaaactcaccaaaaaaacaataagattttcatctccctattcaacgtacaattacacataccacctcaattcttattccaaaccactattaaaaaaaaagactttatcctcttatttaattagtacaatcttcaaccattcacctttcccttcataaaacaaataatttctacaacaaactatcactttaaattcctatactttttacataccacgaaaaataatcatac

SEQ ID NO: 67869 - DNA, 320 bp, Glycine max
cgggccgaccgacgcgtccgctcactctccttcttccgctcctttcatacttttcatacatctctgacccctatcacatatgaatgttttgactcaaatgctcgcccttctcaactttaacaaacttatacaaatctatgcatactatcaagatatgacctcaccttatttctgacaaccacatgtgaataatgtttataacacactatgtaaaataccgctgaacatctcaaactacttaacaccaatacaattaccaaataacaagattacatactttaaggtgaataataactttaaaaccacatacaacttcggct

SEQ ID NO: 67870 - DNA, 355 bp, Glycine max
cccacgcgtccgctaggtttttctctcaaaatttcgaatccccgattttctctcaattcgggtctgccattcatcgtaacctatattattacatagttatattatctctctgcgtatctttcagcaattttctattttctcctctcatggcttcagattccaaaaaagatttccctgcttatgacatacctggaacagaatagagtcaaacatccactgatgagacttcatctaaagattctacagcagaacatagagcgacatcttctttcggacctagacctggacctgctgggcatgcaagcaacccttttgatctctcagcaatgtctgagctgctcaatgatccaagtat

SEQ ID NO: 67871 - DNA, 261 bp, Glycine max
cgaccgacgcgtacgataacctcaaacataacccactcattctcttttccctccccatctctccatcctatccttgtcttttcttacattcaagccaaacatcctccaaatcaccatatccacatattgaaaaccacaattcaccaaattcctgcacccaccacaataaccaccccatcccctcttgatccacacaacatttacattccctccattcttcacattcaaaaaccatcttctactcacaacccactacttact

SEQ ID NO: 67872 - DNA, 386 bp, Glycine max
gcaaggcacacggtaaatctttccaacgtgatctcgtatccgccaagatgggaataaacgagactatgatgagtgctggcgtgtactatagcatagatacatgatatctatgcgtacctttcagcaattttctattttctgctgtaaaggctacagattccaaaaaggatttcgctgctgatgacaaagctggagacagatgagagtcaaacatccgatgatgagactgcatctaaagattctacagcagaacatagagcgacagctactatcggacctagacctggacctgctgggcatgcatgcaaccctgttgatctctcagcaatgtctgagctgctcaatgatccaagtatcaacgaactggctgaacagataagcaaaga

SEQ ID NO: 67873 - DNA, 311 bp, Glycine max
cccactcaccctttaaatctttccaccattatctttaatcccccaacttccctcacatccagactatttttaatactaaccaaccccaacacataaatacattatatccatcaaaacctatcagccatatattcctttatcctctaaacattatcaataacaaaaagattttcgctctcttaaacaacaacctaacacattaccttcatacatccacttatccaacctcatctaaatatactaccacataacaaataccaccctcttctacattacctataacctcacctattttccattcacacaacttt

SEQ ID NO: 67874 - DNA, 165 bp, Glycine max
  unsure (1)..(165): unsure at all n locations
aaaacccgggccgaccgacgcgtacgctcacaaataccaatcattctcccaacttattttttctctcaacnctcccaatttaacatagaccctatttttaccaccgcaacaccatcaaccaccttttcctttatacttacacgcctactaaaagcccactccttt

SEQ ID NO: 67875 - DNA, 227 bp, Glycine max
  unsure (1)..(227): unsure at all n locations
taccaatagttctcccaactctatctttctctcaaccnncccaatttatcaaagaccctttttaaacaccggaaccccatcaacctcctcttccttcatctagacccacctactagattcccactccttatctcttcaaatacactcccaattctaattattcactaacaaatcctccacaccccaataaactttacatcaattcttctctaactcccatacacccc

SEQ ID NO: 67876 - DNA, 133 bp, Glycine max
gcgtccgataacctcaaacataacccatccatccttatctccatcccaatcacaccacccaatcctagagtcttttttaattcaggcaaaccaacccccaaatccacctatacatttctataaaaccccaatt

SEQ ID NO: 67877 - DNA, 235 bp, Glycine max
acaacggtaacgttggctaatggcttgaccttttcatggtccggttcttttggttcacattagcgttgtttgtttttggcttagttttacacctttcctcatttccgcagtagcaacctgcgaatcaacctctctgagaaaaaaaatggcgtcgaacgggaatggcagcgttgcgaacggtaacgggagcgctaggaacggacttgcgaagattcagacgcagaagaagcatgac

SEQ ID NO: 67878 - DNA, 446 bp, Glycine max
acccacgcgtacgcatactctctttctgtctcttatacaatttttttcatacactcatcaaattatacactaacgttgttcttacattgcacacacacaacacaactattaacaatttgacatcatcaaaaatgagttcaactatccacactaaaacttgtaccgtaacagcaattgctggattggttgaggcctcgaaagatcatgctatctgcatgtgaaacatcgtcctcagatcatcacaacaccaatctatacataatacgatgtctttgtcttaaaccaacaaacttttttcttaaccatcttctatcgctttagccaaattgaaagatcaaaaacctaataagtcttaaaagtcttttataaccgcttatattataaatcttttaatccaactaatcaatgattcatatattttcaattttcaatttcctttttttctt

SEQ ID NO: 67879 - DNA, 330 bp, Glycine max
  unsure (1)..(330): unsure at all n locations
gcagcttttacaacataaaacataagaattgtcttatcatgtactatggatcgtctataccaatccttcgtctcaaactntgattcaagcacaactaactaactaaaggaacatactccacagggatgaaaaccataatgcactcaaagggtttcatcctcaaacactctaaccaacgccatacccacatgtttcgtgacatcattttgcatgcgtctcgcagttatcacactactgaaacacatcttctactcacgaccgactacccactgttacatgcttgtgccgtttatccttcaactccataacgctagtcttaacctctatcat

SEQ ID NO: 67880 - DNA, 332 bp, Glycine max
ctcgcatccaatcctgtggttattctcttattcatacttctcttctgaataatgcagagagcgttctgtccttttatcggacgcgcttaatccgaccggatctgtctggattagatccatatctacacaccactggtggttttggccggatctttcataaatctgatgcgtagaggcgtaaatctacagcaccgaggtacaacagataatcgatgacaagaactcaaatacatcggccgatccatccgactgcgcttgttatatcaatacagacccctgtattggatcattaatctgctcgtattgtgcgaaataaacgtgttgcctatggg

SEQ ID NO: 67881 - DNA, 301 bp, Glycine max
tgattttttaaattcgctgctctcacatctcatcaaccttaacctctcatactctacttatattgttatctcaatactacatattaatccgtttatcattaatcgaccttattatcaaatcatatactctcccataccatttatctatcccttttaaaccttcccaaaatttaacttattatttttccaccacacgccaatctccttgaaaatacatttaaatttattatttacccactatcccttttcattggatccattcaataatgatcaacaaatttcttttcttatctttttatac

SEQ ID NO: 67882 - DNA, 247 bp, Glycine max
ctcacgcgtacaataataactgcattttcataaatacaattacttcacaattcttccgtgagacataatccaggaaatgttcaatgaattggtttattatcactgcctgaccgaagtgtatcttgaagccttcacagattgtgctcttaacgatatcgacctgggtgaatatgtttgaactcacgacgattgcatggatgtcatgtcttccaaagggttgagcttactttcagttgatgttgctggt

SEQ ID NO: 67883 - DNA, 129 bp, Glycine max
accacgcgtccactcaatattcttacagactttatgctgctctctaaaatagctttcgcgtgattttaaaaatgtcggtgctctcaactctcaccatccttaacctcttaaacactacttataaaatta

SEQ ID NO: 67884 - DNA, 59 bp, Glycine max
  unsure (1)..(59): unsure at all n locations
gcactcgtaacgntccacctctatcaaaatccccacaaaacttttcctttctcttccac

SEQ ID NO: 67885 - DNA, 167 bp, Glycine max
ttcaatcttacaataccaattgctccagtatcttgcactaaacaacatggcggacaaagcagtcaccattcaaaccaggaagtttattacaaacatgcttctctccataaagcagctcatccctcatgtccttcatccaaggaaggctaatatttccaacgctgaac

SEQ ID NO: 67886 - DNA, 466 bp, Glycine max
gtggtggtgatcataatcccttgggttctgttggaaatgatggagataggcatgcagtggaagaatattacaagaaaatggttaacgaaaatcctgcctatccattgcctaattctttatataacactttccccactcttctgtaacaacccttggccattcccttgtggtggccttccccggttccattatccatccatccaggttttccgcattaggtaccagttttccaactttggcccaaaaccttcccaatttgttgccccccttatacctatatactcccgaatatttcatgcttgaaaatatgagttgtaaccttacctcaagaactttctgctaagcatctttgctggtgggtttgttctagtagccatatttggagccgttattggggtttccaactttgatccggttaagagaacttaaagcccgcatgctccaatgctttttaatttcatatgtc

SEQ ID NO: 67887 - DNA, 208 bp, Glycine max
gtgatcgtcaacattataacttgagttctggtggaaatgatggagataggcatgcagtgggagaatattacaagagaatgggtaacgaaaatcctggggatccattgcttatgaggaattatgacaatttcgggaatcttctgtaacaaccctgggccattccatggtggtgggattcccaagtgccattatcaaaccatcaaggttt

SEQ ID NO: 67888 - DNA, 255 bp, Glycine max
  unsure (1)..(255): unsure at all n locations
gaccgcacgnnngtccggtggtgggtgaatcatttaatcccnnttgggttctaggatgggaaanntgatggagaatannggcatgnccagtggagagaaatnnattacannagataaatgngtgtaaggggataaatnncctggggaaaatccattgnntttctgaggggaatnntatgctannattttttgggtatcaagtaccannaacaagaaactgtgaagnnggagcagagnnngagtattnnattcccg

SEQ ID NO: 67889 - DNA, 92 bp, Glycine max
ctttctttattttctccttcctcttccttcttcttgtttcatcttccgctgcttgtgatcgctgcttgcaccaatccaaagcttcctatttc

SEQ ID NO: 67890 - DNA, 156 bp, Glycine max
cggacgcgtgtgctagggaataaaccaagagatcatatacgtatacgcatgaattcatgagggaatcttcgtcacatctgtctgcaatatcacctattgctctttctccttactgccctatccactctcgacggagtttcattctctacattccta

SEQ ID NO: 67891 - DNA, 317 bp, Glycine max
  unsure (1)..(317): unsure at all n locations
cccacacgtncatgccccctcctaaacctgtttctccaacagggatgcttattaaacccagggggtttattttgcgccatcttttgcccttttatcctacgttcggaacttattcatttgcctacgccaaaacaatgtgcttaattgccctttttgcagggcccctgccggattgcattaccagttttttaaaaaaatccaccaaaaatccgttgcgattggggatttatatgacaacccccatatcctataccacccttgctccaaccgctccaatagtagaaaacctcctttctttttttttttaaatttttccc

SEQ ID NO: 67892 - DNA, 369 bp, Glycine max
cccacgcgtccgcgcccccacctgcacctgtgcctccaactgggttgcttatgaagcggtgcgaagttcatttggcgccttcttttgctctctaatctcgcgtttggagcttatctatttgctcgtgcaaaacagtgttgttaaattgccgctatggcggcgccatggcggtatggcataacaggtttttcaaaaaatgccaccaaatagcggtggcgttgcgggtttcatatgacagccgtcatagccttaacgaccgtggcagaacggcagaaatggtggaagactgctttttttgtttttttgaaattttcgcaatgggtcgtgttgggctgacccgacccaaccctaacccgatttttgcatgca

SEQ ID NO: 67893 - DNA, 229 bp, Glycine max
cccacgcgtccggaggaaatagacttgaacactgacttcatttttgagcaaagatttaagagggcctattctgcaggagacattacttttgaacaactcgtaacatatagcagaaagcttgattatacagagattacaagaaatgatctgcgttgtgcagtatcagtgacactcctttccgaatatatagaccagaaccagaaccatattttgtgcttacagggaagaa

SEQ ID NO: 67894 - DNA, 284 bp, Glycine max
attagtgttagggacttcattatcgactctgtatgagttataacatcagatatgcttacggagaagcttttatacaacacgactatcgatcatgtatctcctgaggcttatgatccatcgtaaccaactgcgaaagtgctgtatcctgatctgacaggctttatgtcctttgaagagcatcatcggaaagaagaactagcatgtggaagtatctgacaacaccactcataatgctttcgcgaacgtgaattatgctagtgcaacggatttactcaaggtagaca

SEQ ID NO: 67895 - DNA, 316 bp, Glycine max
gagaagcacagttcgaaggaactaatagcatgggtcatctagcctcctagggtgctgcctgagccgctaccatcaatggccgtgctgcaagctccctatctggaactaaggtgtctcacaagccctataggctcagtgacaaacgcaaaaacttccagagtggcgccggggtaacaaagattggtgacaacagggggtacttggatcagtgggatcggtgcatcactacatatcggggagacttgaatggatcacatgcacctcaacgctactaacgtcttgataacgagttatgttacacattcgctgctacatg

SEQ ID NO: 67896 - DNA, 330 bp, Glycine max
cccacgcatacgaaaaaatatatttacacataaatattatcttttttctctacccccatatctctccccgcccctttatacaatacccccctccaaaatcctatctctaactaaactctctcaccatcattaaaaaccattttacaaacaaacaaacttcctcaattctcctacattcacaaacattttttacaacaccaaataccttaatcattaacatctatccaacactacatatcatcaaaacctaaatccatcatatccactacaacccatctaccctcttcataacaaattattctacacatttactactccattcacaaacac

SEQ ID NO: 67897 - DNA, 282 bp, Glycine max
aaaaaattataaaatcaaattattttttatttaatttatgaaaaattttaaaaattaaacattttttttatacaaaattttaaaatttattaaaaattaaaaaaaaattttttttttattttataaaagtttgttgggttttttaaaaaaaattttttaataaagatattatttaaacttgttaaagggcaccaaaaatttaattttcaaaaaaaatgcagtttgccttttcttattcggccatatttattttttaaagccttaaaacacaattaacttttt

SEQ ID NO: 67898 - DNA, 281 bp, Glycine max
cccacgcgtgcgctcacgcgtgcggaggcgatctggcttccagattcgactacatgcgttggtgttccttattagcacaaattcgctcactgaacaacggggttagttaactgttgagattaacaaggcgttcttagtcacacatgaagaatcattgcatttggtgaagctatacatgcgcacttgtgctactgatcgctcacgaccggtcctgctgcctatttggagcaatatcttataatgcgcaggctgtcgcaaacctggcagactcgatagctgtt

SEQ ID NO: 67899 - DNA, 122 bp, Glycine max
gaaccgcccatacatggaatacgttgagtagtcaagcagattctgattgaagctgttcgtggggtcacattaatcaatggggaatcatttggattaattttttttaacggaaaagttcaagg

SEQ ID NO: 67900 - DNA, 205 bp, Glycine max
gactgactgacaaggcatcaatctcctgaaatgatcataacgggctccttgcacagatatcgagcgaactgaattacgacaactacaaggacaagaacatgacctatctgttgctcgatcggggctcgcataaatacttctggaaaacgaatccattggctgctattacagatggtacaagtcaaagtacgcgttggggaaacac

SEQ ID NO: 67901 - DNA, 126 bp, Glycine max
cttttctgtcttaaggctgaaaccggggcatttctgctatacaagcaagagctactttacggggagttgcttatacaagtggccaaatctctaatactggttcactcaccatttgctcaaataccc

SEQ ID NO: 67902 - DNA, 206 bp, Glycine max
  unsure (1)..(206): unsure at all n locations
gactcacgcaccaggcttatctacgacgccatggactgaactgcagccttgcacatatacggagccngctctactggacaggctactctggccagagactgcatatgtgctgctagatgggggctcgcttccagactactgcacaactactccgtttgaagatactgcgcatgtcactggtcaaattacaacatagggcatctcac

SEQ ID NO: 67903 - DNA, 205 bp, Glycine max
tgaaattttaaaaatgactgggataaacttaaaatcaattatgaatgaataagtagcattaatggatggcgatggttaaaaaatgagactactccattttattatttgattaccacacttgttgtttaacatttttttgatttaaaaattttcgaaattgatctatttatatgcaataatctactactttgcctgagtttgcctg

SEQ ID NO: 67904 - DNA, 91 bp, Glycine max
  unsure (1)..(91): unsure at all n locations
ttctttctctcttctctctctgtccgaagatggcttcacgcangttcgtatcttctctgaggcgagtcctccttcgtagatctcaatcaaa

SEQ ID NO: 67905 - DNA, 305 bp, Glycine max
aataccactcccaccgaccaaaacgcgctttacgttgttatttaaacgtctctgaaactgatgggcgttgtcagcgaaaactcgaatccagacccagatgtgatacatcaggtcagggcttgaaatatggcattctaattacaacttatacgcgaactcatcgtccactatacttgaatgtagatggacacagaatttcccggtgttgattttcgaccacacctggacctcacataaccctacaagcacggatgcaacaatcgtaatcgacacttcgacgactacctgcttgtatagttcaacga

SEQ ID NO: 67906 - DNA, 228 bp, Glycine max
ctctttcaatctccattatactcatttaatatatatatatcttactcaaatccgctattctttaaacatctaaaacttaacacctatttaatcaccaacaattatcatctaataccttcacagttttaaacatcaaatcaaaactcgtctcatctatatcattcattcttacatacgcgtgcatactacctcatacatattctataaactcacctaacttcaattcac

SEQ ID NO: 67907 - DNA, 255 bp, Glycine max
acggtacaggatgaccataatgcccaatgtcatctatctctgtcgcggcattctactagtatgtgcttaggatcatgctcaggagtatgacctgcatgatgactactgcactgataatgcacacattgctcgttatggacatacgtgtcgtgactgagctcatgtagctcactgatgtagacagatgcgtcgacactagcttctcttgtgcatacgaacctgtacgtctcagaggtgctgaaacaagcagagatc

SEQ ID NO: 67908 - DNA, 308 bp, Glycine max
cccacgcgttcgatatatttggttattcatttatttttagaaaaagtggtgagccatatggggtttgacgagcacgaggaccaacagcaagaagaggaggtggaggaggaggaaatgggattttcagtggcggcggcggcgagttacaactcgttgggaaactgccgtgtgaggcctaaaattatcggctgtgatggtgttgcagacaccgagaatttcggtcggaaagggacggtgagatacagagaatgtcataagaaccatgccggctgtataggcggtcacgccgatgacggatgctgcaagtt

SEQ ID NO: 67909 - DNA, 331 bp, Glycine max
  unsure (1)..(331): unsure at all n locations
aaaaaaaaaccgacccacgcgtacaaacacgcattcnatatatttatacactcatttatttttaaaaaaaacacatacccaaatcccgccgttttataacaactaccaacatccataatataatctacttcaacaagaaatttcattataaatttcatccccattcaaacacaactcactactaaactcccactaaaaatctaacattatctacaaccaatcttctacccatcacttaaaaccccgacacaaccccacatttaaatacaaataatttcataacaacccttacctcaacatcaacccccacccccatcacaaattctaccat

SEQ ID NO: 67910 - DNA, 149 bp, Glycine max
gcatagccagtgacacttggggttaggccaaatcatggtcaggctggtagagttagctaacgagcgcctgcatcaaacggatgtgaagaaccatatatagggcgtacaataataggtactgaaaatgctgggctatgatatacatatga

SEQ ID NO: 67911 - DNA, 187 bp, Glycine max
cgttgattcaattcaattgtggtcctgccggtgccttatctgactcgacgatgtcatcaacgtgtgcaggcgaatccaggaggtacatcactataccaagaggacgtcataatttgactacgcaaaacaagcctgagatttacgaagccattgcgctatgttatactgattgctcatagtctattga

SEQ ID NO: 67912 - DNA, 190 bp, Glycine max
gcttaaccaatctcaattgtggtcatgccagatcattgtctggctcgtcgatttagtcaacgtatggctgcatcaacaggaggtgcagcaccatatctagagcgcacaataattgagcctggcaatacaagcgctatgatatacgtatccaaaggccaaggttcatatgctagttcttatggatctattt

SEQ ID NO: 67913 - DNA, 414 bp, Glycine max
cccacgcgtccggaaacttaatcgatcatcacttcacttcactaatacatcatggcagacgagacccagaacaagtatgagagctctgaggttgaggtccaggatcgtggtgtttttgactttctcggtaagaaaaaggatgaagaagacaagcctcatcctcaggaggaggtcatcgccaccgagtttcaaaaagtcactgtctcagaccaaggagagaacaagcacagcctcttagaaaagcttcaccgatctgacagcagctctagctctgtaagcttcttttcctttattttctttgcatgcataaacattatatatatataacttggtcatccttgaaggaataactttatattaacttggcttttttttttaatatttattttataatttaaaccaaacttaatttta

SEQ ID NO: 67914 - DNA, 460 bp, Glycine max
  unsure (1)..(460): unsure at all n locations
gggccggcccacgcgtacggcaaacaagttcctcatgaagcagccgtttttctgtccaaaaaagagcgacgtggtccacgctcttttaagcattatgaaggtctcatttcctcatgatgaacacatcccccaagcagcngnagcagcaactggagaatatatattattaaaaggtatctgtagaggacactcaacctgaacctgcagctaaacaaaggaacaattacctgaagaaggtatgtgaatagaaagacatggtcagcttaagaaacaagtccgttggaatgttggattggaaaagttgagcacctgggctagaaagaacttggtgataagtgacctgtatatcttggaaagaaaaatcttcttcccctacaggcacctgcttatagcaatgtttgccgatcacatagttttcactctgtgaaaatcgacattgtcaggcacacaggtaacatgc

SEQ ID NO: 67915 - DNA, 160 bp, Glycine max
gacattcatagaaatagctatactaaaatttaagggagaatcatcactagaggatgtagcagggagccaaattgaattggctgaatattattacaacctctgtcatatcttaacatacatcactctatttgcaaaaaaaaaaagctgttatatttggaaa

SEQ ID NO: 67916 - DNA, 315 bp, Glycine max
  unsure (1)..(315): unsure at all n locations
tgaatgaatatcacaatctgcttcattgcttactaccgctgaaagcataagggcgcttatgganaacgattctaggtaacaacgatattaatttaataacacgatatccaacatgcaatgcttgctttgagcaaaggcaaacttttaactaagaaagtcttgcttaagtattgaatgaccaagttaagcacaatgctcactatttactgagcattcgtacagatcatcacaccattgggttatctctcgcacttgctcaatcattgacatcagggttccatgctggcagctattatgctataaatcctattgatg

SEQ ID NO: 67917 - DNA, 80 bp, Glycine max
cggggccaaccaagccttccgccaacgcttacgaagaaacaatggaccccctttctgtcttgtgcaccggagcccttctc

SEQ ID NO: 67918 - DNA, 123 bp, Glycine max
  unsure (1)..(123): unsure at all n locations
acaaagaaacaatggaccccctttctgtnttgtgtgggcctcttgttcaaggaggccacccggcattttacccttctgggtaaccatcaatcctattcaatggggttatgaattattcaatgt

SEQ ID NO: 67919 - DNA, 232 bp, Glycine max
cttccgcttcttgttattctatggcaagcccaaacaagttcatcttggcttaaacttttttttcattcgaggggctttgtggctctttaacaattcaacttctgtcatgttagaagccacttaggttaacttgtaccgtccttctatcttaaaagaccccctaatcaggcgtttcaccaacttaccgttatcccttaaattgaaacctttttaaccccagtacattccctcc

SEQ ID NO: 67920 - DNA, 207 bp, Glycine max
aagaacaaaaatcttattttggtgtgaagcgattaaaatattccgattaatggagagggggaaggaagggccgaaaaaaatccatggttttgaattcttatatggaaagggctatggggtatcttattaaagggagggggataaagcattaatcttaatcaattcatatctatttatatatgaattaggtttttacggaaacaaatt

SEQ ID NO: 67921 - DNA, 291 bp, Glycine max
cgcgtacttgctacatgttatctatacaggctagtctcggacatacaacacaccggcccctacttgacaacgaagggaccaggaacaccatgccattacccaacttaagatgctggattgacatcatttgtcttcaagctggcgtaatacactaacaagaagttaccgcatcgacctaacaacatttacagcagaactgactggctaatggcacacacgctgtccttgacatcaaaccacaaagctgatgacactactcacatacactctggtacacatggaagcacccta

SEQ ID NO: 67922 - DNA, 185 bp, Glycine max
gtttggattctacccaccttggattccctggtaaaaggcctggccaattccaatttggttggtttttgccttttagaattccaataggttaaatgaggtgggttttttaattggagagaaccctcgattggatttttggaaattccgattcaggtttgaccggggggtatacaaaacaacttttt

SEQ ID NO: 67923 - DNA, 218 bp, Glycine max
tttttattttttttccgcctttccgcgttttttttttcccctcttcccctttttttttttttctttaaaccccaacccccccccccccttaacccatgttcccccccccaatcttcccaccaaactcccaaacattcccttctcccaaatcccctcccatcccccccacatcaattcatcatcaccttttctctccccctcccccatccacccttact

SEQ ID NO: 67924 - DNA, 283 bp, Glycine max
attcaatggaattacggatggggtttccttcgaaatcaatcttcgcctgtttatctcaacagggatagaaccaggcttaggttcgattgtctacattatgcttcttgatgcgtgagatgtaaattccactagaagctcttgttggagttaaggacgttgccctgacctagcaattcaataacctatattggatttttttttatccactagaagctcttgttcgagttaagagccatttattattcaatgagtaattttttttataattttgtagttttcatta

SEQ ID NO: 67925 - DNA, 84 bp, Glycine max
gcgagataaccaatttctttggttcattcttttccactttctaccacaaatacttttgggggattaagcaactttacacaaaat

SEQ ID NO: 67926 - DNA, 377 bp, Glycine max
aaacactcataacacaaagcacaaagcaaagctcatccttgagttaaaaaatggcagcagcttgttccatggctctctcatccccatccttggctggcaaggccgtgaagctgggcccatcagccccagaagtgggaagggtgagcatgaggaagaccgtcaccaagcatgtctcctcatgaagcccatggtacggcccagaccgagtcaagtacttgggcccattctctggcgagcccccgtcctacctaaccggtgagttcccaggcgactactgctgggacactgctgggctttccgcatacccataaaccttcgccaagaaccgtgaactcgaagtgatccactccaggtgggccatgctcggagccttgggc

SEQ ID NO: 67927 - DNA, 335 bp, Glycine max
cagaaattgattgaactcacacaaaaaacgttttcccgctgtcttgtttgtctttcctttcattttccaagaaaaagtacaatttttgagagtgaaaaactgctgtctcattgcctatctaagcaccattaacagaaagaaccttccataagttccatttcttttgctggcaaagacttcaacttttcatcattctgggtaaccctttaggctttagtttcatgcaattaatgtttcattaaaaatattttggttattgtttcaacctttatatatatatatatatatatatatatatatatatatatatatattccccccaaggagtagatcta

SEQ ID NO: 67928 - DNA, 224 bp, Glycine max
cggcgtacgagttccggaattgcccgcacgcgtcccgcctccgtcgaacttagcttactcatgacttcaagaggtggaaactcgcctgctgatcaaggcttctgctggacagttctatagacgttcttagcacaaggctctctctatgtgcaacacttcaccagacaatattaaatctgccactggttatgtaggaagctggtctcctcatggtactatcttat

SEQ ID NO: 67929 - DNA, 207 bp, Glycine max
catcttttgagctcagtttaaagatgcttatatgagtttaaaatgctggtattgcaattcaggatggcgaggaatgttttaagaccttctgatcaacctgcttttttcaagtaccatgcctccttcaacccttataaatcttccacttgatgtgttggaagcaattctccccataataattgcttaaaaattaccaaaaaaaattca

SEQ ID NO: 67930 - DNA, 415 bp, Glycine max
ctggcatatcccccaccctatgatggcgtctctctgacatgctcctccatggaaatcaaggccgttttgcgttgatagtacttcaattaggctaggtttattgttgatgttccctagtgttttggtgaataaagaaagggaatggtgttagatgtttatgagttatatcgtgtgttggtgtgctgtttttttttttatgatttatgatttttaattgttttttttttatttttttttatttattttattttattttatttattttatttttttgttaattatatattttagttttttttttttattttttatatttattatgtgttatatttatattttttaattttattttttattttatattagttgaaattttatattttttttttttttaattttttttttttattatttt

SEQ ID NO: 67931 - DNA, 454 bp, Glycine max
gaccggcccaggcgtccattaaggtcaaaaaaaattgggacttttctattttggcaacaaaccttgactagcagggctagaggaattttcaaaaaaacatggcacattttgcacccaaagatgatatttcaactaccaacgctctgcctatgaactgcagtggcattctgaactctctactccggagatgtgataataaggtgtattttgcacgcacttctgatgatcttctagtacattttatgaggcagacttcaattaaagagggtggctcaacttcctttattgctcctaaaacaaatcatggtgctgatgcatctcaatgaccttctgatgcaagggcaccatactttgctagaccttcaaaaaatatttctacctattattactcacaaccatttatttcatttctcgggagcagggctctgatttaaagacactttatcctcctaca

SEQ ID NO: 67932 - DNA, 398 bp, Glycine max
  unsure (1)..(398): unsure at all n locations
ctttccaatcaagtgggataaagcttggaactttcaaatctgtaaatgagtccttgactagagttgctgtttatatttctttaatagcattgtattgtcttggaggaagcaaggttaaggcgggtgagctctctgttgaaccatggcatnctttattggattatacttcactntaacattcgctgttcaaggattgggtaacacttttggagatcttcgtggaacttttgctgcttgtgagaagatcaactcttgtttatctggagctcaagttgatgatgcccttgcctatggcttaaaaagaaaactgagacaaaaaacactggatgatgaaaactattaattgatcctatcaaatatttctactgagaataaccaaaaacattatttgcattaca

SEQ ID NO: 67933 - DNA, 169 bp, Glycine max
tgtaacaacactaatcttcctctcaaaatagactcttcaaatgagaatactgccacaaaatcagacccaatctcggttatatcgtaacacaataatatttttaactccagcccaacccatgaatattacctaatgaataatcacatattaacctcccatatattaattt

SEQ ID NO: 67934 - DNA, 302 bp, Glycine max
aaaataactatcagcaatcattgaaactgaaaaattacttttttttttctgtttacattttgttgtttcggctccttatctaaaatagacggccccacaaacatatttttccaaatcatttaaaaagtcattcattacaaattcttcttcatattggctttcttgtacaaagaaatatctttataataaaccattccaacacttttatacaacttcttattaacatctactgcattaatttccccttacaaaaatttcaaccatcctcaacttaatcaaacactctctgtcaaacacataat

SEQ ID NO: 67935 - DNA, 369 bp, Glycine max
  unsure (1)..(369): unsure at all n locations
gcggaagaagaaacttaatcgatcatcacttcacttcactaatacatcatggcagacgagacccagaacactttatatatttaaggaattaggtattgcatggttatggtaaaaaattttaaacttgtattccaatactaataactatgtattgtaagtttttaacttttacgattactattttaaaaagtcttatcaatgggtgattctaattggttggntgtagtgtaaagattttataccaacagcgcataactattaaacttgtatcatttaatccattggctttatggatcactgctgtgaggttatatttatganaataagtcagaatcaagttgagtgttaattgtgaattcttgatgttac

SEQ ID NO: 67936 - DNA, 118 bp, Glycine max
caagatattaccatcactggtgctagcaccttgccttcagatgaggtggagagaatggtaaacgaagctgggaaattttcgaaggaagacaaagagaagagggatgctattgacacaa

SEQ ID NO: 67937 - DNA, 287 bp, Glycine max
gtatgagagctctgaggttgaggtccaagatcgtggtgtttttgactttctcggtaagaaaaaggatgaagaagacaagcctcatcctcaggaggaggtcatcgccaccgagtttcaaaaagtcactgtctcagaccaaggagagaacaagcacagcctcttagaaaagcttcaccgatctgacagcagctctagctcttcaagtgaggaggaaggagaagatggagagaaaaggaagaagaagaagaaggaaaagaaagggctgaaagagaagatcgaggagaaaa

SEQ ID NO: 67938 - DNA, 149 bp, Glycine max
aattccattcactcacccactttttacaactttatgacttgtaaaacctttacattacccaactaaacaacctttcaacacataccactttctccatctttcctaataacaaaaaaacccatacccttctccctttccaacaatttcac

SEQ ID NO: 67939 - DNA, 341 bp, Glycine max
  unsure (1)..(341): unsure at all n locations
gggcgaaaaacacatacacttttttctgcatctctcctacactttctttttcttatccncccaaacccacccccgcatatgttaatttttaattccccccaacccaaaaacaataacttttttcttcctcaatccacccaccctcttctctctctctatttctcaacacacacaagcactcctttttataaaacccctaccttatatcaaattttaattttacatctatatttccctaatcaaaaccatgatatctcattccccatcttttttttcaataacaaaaataatcatattttttcttctacatcattctacaaaattttttctccatctatccc

SEQ ID NO: 67940 - DNA, 57 bp, Glycine max
  unsure (1)..(57): unsure at all n locations
ttattatanaattaactaaagtacgaatgttataatttgttggggggagagatatat

SEQ ID NO: 67941 - DNA, 367 bp, Glycine max
  unsure (1)..(367): unsure at all n locations
cacgcatncgtattaatggaaattatttctttccggtttggtaaagntacttggggggatgttgtaatcttaaacaatcctcaacaccctaggcactttatgaccaaacttgtagtcaaattttatggtgatacccttacatacatttccaatcctaaaacctattaatattaacgccatatttatacaacacatttccttttcttattaacgggaataattttaaaacaattttgttcccaaaggttcccatttggtttaaggaaaataccaattttaccaccattattcaaaaaaaatttgtccttttccttattaccttattgattgcaaaattttcttgaagataaccccactttaaaaattt

SEQ ID NO: 67942 - DNA, 434 bp, Glycine max
  unsure (1)..(434): unsure at all n locations
aaaatttccattccaatcataattttctcaatttcccnncanaaaatttctcctcgtgatgttgtaatattcaacagcaacagctccatcttcttctttaacaatcattactttgacctcatggtctacttccaatgtttaataatttgctataacaagacctatctttctctttttccaactatatatatacaattacattaattttttttctcatctttttataacatcttaaaagtctctattcaaagccatttcccttactattcataccccatatactactactcatataatcttatatcaacaacatattcacatttcctccatttttcacatttaataacttttaaaaattccaccttttaaatatagacaaatcttatcactcttgacttccttcatatatatcttttcaaatagatcgtacttta

SEQ ID NO: 67943 - DNA, 483 bp, Glycine max
caagtagttgagaactaagaaggagaagcaaatggcttcctcaatgatctcttcccgcagctgggaccactgtcaaccgtgccggtgccggcatggttgctccattcactggcctcaagtccatggctggcttccccaccagaaagaccaacaatgacattacctccattgctagcaacggtggaagagtgcaatgcatgcaggtgtggccaccagttggcaagaagaagtttgagactctttcctacctgccagaccttgatgatgcacaattggcaaaggaagtagaataccttcttaggaagggatggattccttgcttggaattcgagttggagcacggtttcgtgtaccgtgagcacaacaggtcaccaggatactacgatggacgctactggaccatgtggaagctgcctatgtttggttgcactgatgcttctcaggtgttgaaggagcttcaagaggctaagactgcatacccca

SEQ ID NO: 67944 - DNA, 110 bp, Glycine max
aacaccactaacattgaggccagagtcccatatatcttctaactttatcatgccgtcagttgcaaaatttcatattattgaatcatttaacttataaacattattccttc

SEQ ID NO: 67945 - DNA, 218 bp, Glycine max
tcttcttcttttggtggggtgtgtgtgttttttctctcacctgaaaatgtcttgctgcggtggtaactgtggttgcggaagcgccttcaagtgcggcaacagctgcggaggctgcaagatgtacccagacttgagctacaccgagtcaaccaccaccgagaccttggtcatgggagtggcaccagttaaagctcaattcgagagtgctgaaatgggtg

SEQ ID NO: 67946 - DNA, 246 bp, Glycine max
tcgcccacgcgttcgcaaaaatggacaccaagccctccacacattcgctttctcgaaggctcaactgggcttggcccaaatgcattcttttctttaaaccacaacaacttctttaaccggctctttagctataggtccttcttcttcaaagattctgtactatatacctcaagggaagaagagaaaggcctaattaaacaactttcaatggggtaatcatattgcaagggttatggggcatttttc

SEQ ID NO: 67947 - DNA, 441 bp, Glycine max
  unsure (1)..(441): unsure at all n locations
ccacgccttccgatttacagactcacctttaagaaaagattgtttatggagggaacaaaatgccaacacttaaaaatcatctacacttcctacctaattttataaccaccaacacacaacttgtttgtgagagaaaaatgatctgtcacctacgcaaaaatcatgcgagtttgagctgccactccaaatattacagatagcagaaagtacagatttgaagcagtttcgagctgctgatgaattttctgatgaggaggcatccccatgaagatttttttgtctttgctgaagaagtaatggnctcttttttccatccttttccgtttaaagcaaaactggggaggggtttggtgcagagatgtgcctcgtttccattatacagcatcctagtttgtgtttattaataggaaacacggatatatacttgtaatgctactacta

SEQ ID NO: 67948 - DNA, 120 bp, Glycine max
atcacgttaaattttaattgcatttttttccttaaataaaaaaacctaccaatggcttccggaaaggggagaaaaaaaccccggggaaaaaaacccgccagaaaggcccccccgggaaaa

SEQ ID NO: 67949 - DNA, 165 bp, Glycine max
tcgggctcgtcacttcttgctcttagcccttctcctcttcgccgccgtgggcaccgccgcgatgggggtgggcgcgttctacgccgacgacattcttattcgtcaggtggtgccagatgtttgcgaaacccaaaaggaggacaaccttcttaacgccgagcacca

SEQ ID NO: 67950 - DNA, 248 bp, Glycine max
aaatatcatcgtgcttttttacgaggtccgcacacaccaccttcctctcttggtcgctttccgccaaattccagtcaaagttggtggtgccaaacatccaagaaagggtgctattttgaaaccagggaagagacatgacaaacatgccatcactttatatgacctttgtctgaaactccatttgattatttcattactgataacgaaagtatcaacaaaatacataacagttcatagcatagcaaagc

SEQ ID NO: 67951 - DNA, 119 bp, Glycine max
gcttaaagcagcaccactaacattgaggccatagtcccatatatcttctagctttatcatgcgttcagttccaaggggtcatattattgaatcatttgacttataaacattattccttc

SEQ ID NO: 67952 - DNA, 245 bp, Glycine max
  unsure (1)..(245): unsure at all n locations
accgggncggaanacgcggttcgacgagggtgtccaagcaagggcttaccttgcagcatccactgctgatgcttcccttggaatgtgggaaatgctgggaaaccccatcaacttcaggggagccacaaggccaactacatctgcttctaatcctgcctacttcaagactgtggctcttttctccaaaaagaacgctacaccaacacctgcaaaaaaagctgctgctgctgctcctgccaatgatg

SEQ ID NO: 67953 - DNA, 212 bp, Glycine max
atctccaaattccaatgcttattcttacttattatttcagattaaatcactagtgttgttactcgggtacgctcttgattgtccactcttaaacactaaatgtatctatctgcctaatacataagatagggcagactcacaacaaaccaaaataaaaccctttccaaagaaagaccttgttaagcaatcagcgcattacagagagaggctta

SEQ ID NO: 67954 - DNA, 167 bp, Glycine max
aatcttcttctattcttatactgatcactgacacacactcaccctgaaatgttgaaaatgctgggacacgctataaacttcgtggagaccgcaaggtcacaccgcatctgcttgtactgctgactcctttaagaacatgcttattttttccaaatggacaactacac

SEQ ID NO: 67955 - DNA, 136 bp, Glycine max
cgcaagcaaaaagaaagaatcccaggcgaggagaaagatggaggggaaggagcaggatgtgtggttgggagcgaacaagttccccgagagacagccgattgggacggcggcgcaaagccaagacgacggcgaggac

SEQ ID NO: 67956 - DNA, 155 bp, Glycine max
ccatgatcctattcatatgtttaaaccaaatctttaacataccgcacgatggatcgattcgcgtgttgtctctggcatataccatctctaattaaatcaataaaccccccccccatcacttttttgaaaaaaaaaaatcaccaataaattaatat

SEQ ID NO: 67957 - DNA, 209 bp, Glycine max
aaaaaaggaaaaaaaaaaaattttaaaaaaaattgttataaaaaaaaaaaaatcgctaaaaaaattgtataattttttaaaattcaatatatattctcaaacattattattttttcttaataatttattatcttattttattaataaatttcaattttttattcttatatttctcttaattatttatttatatattattttaaattatt

SEQ ID NO: 67958 - DNA, 155 bp, Glycine max
ctaattttgtatgcatatttgcaatactgttgtataagatacaacattatgaatgtatatacggactgtatgggacaaagactataattcttgagtcctcaattgaattatccgatcacttctttgtattaaaactgttcgtatttttttcctct

SEQ ID NO: 67959 - DNA, 351 bp, Glycine max
  unsure (1)..(351): unsure at all n locations
cccacgcgtncgaccacgcgtncgntggtttttaattcaacgttttatgccagcgtcatcagcgtatgaaataggggcggaggattataaagaacaaaggaaaaaaaagggtcctcattctaacactcaaacacatacaggctaactgcctggatgctttatctctaaacaaacattggaagcttcgtaaccaaaaacattccctatcattttctatgcgcacttgtaattacaaaaaaaatgccattggtgaattctacacccgttgcacggaattaattacacgcgttgaatacaccccagagactgtccttacatacactaaaaggtcagtcgatactggatcacaac

SEQ ID NO: 67960 - DNA, 385 bp, Glycine max
  unsure (1)..(385): unsure at all n locations
aattcctnttnatcctccaaaatctcaaaaaaaaacattttactactctnattaanactaaatgctgcctacttgtgtttattttttcctgaagaaatatatcaattctgtcatttcttactcttttttcccgagttatttattactttaacacgtaataaaaaacgttagttataaatacattattcaatcttttcatgttgtagcatgcacccatctttgctttcttttgttttttcttaactttaaatgataattttttattccacattttttatctttctagaattttcttataatttacaatttccacggtttgacattttaaaatttttaatttattaattaattaatttactattttcaaaaaatacaactatcattc

SEQ ID NO: 67961 - DNA, 125 bp, Glycine max
ctaattttgtatgcatatctgcaatacttttgcataagatacagcattaggaatctatctacgctctttatgggacagagactatgtttcttgagtcctcaattaaataattcgatcactttttt

SEQ ID NO: 67962 - DNA, 113 bp, Glycine max
ttaaacgggggtgccttatccaacttaagaccaaattacatgtgtttttggccaataacaccaaagaagatgttggtgactttaaagtcaaaaatagtttggttggaaccatc

SEQ ID NO: 67963 - DNA, 153 bp, Glycine max
gggcgacccacgcgtcggactctatggttttcaacttacttcctagagagagctttagtgataattgtgattaattttgtttttgacaggctaggatcatgatattgtatggttacattttacataaaatgtcttgatttgattttcttccta

SEQ ID NO: 67964 - DNA, 461 bp, Glycine max
cggacgcgtgggcggacgcgtggggaacaagtagttgagaactaagaaggagaagcaaatggcttcctcaatgatctcttccccagctgttaccactgtcaaccgtgccggtgccggcatggttgctccattcactggcctcaagtccatggctggcttccccaccaggaagaccaacaatgacattacctccattgctagcaacggtggaagagtgcaatgcatgcaaggtgtggccaccagttggcaagaagaagtttgagactctttcctacctgccagaccttgatgatgcacaattggcaaaggaagtagaataccttcttaggaagggatggattccttgcttggaattcgagttggagcacggtttcgtgtaccgtgagcacaacaggtcaccaagatactacgatggacgctacttgaccatgtggaagctgcctatgtttggtgcactgatg

SEQ ID NO: 67965 - DNA, 249 bp, Glycine max
  unsure (1)..(249): unsure at all n locations
taccggnccggannnnnnnnnngggngcgcgtacccgctcaacttggaacccacaggtttgagggtttaaaaatgggaattcgatggattggccttgcttgaaccgacaatgacccttttcaaaaacaaggttggatatttggtattcaagattccgtcaagaagggaattacattttttggtactggcggtggttattggggccatggttattgacttttgggttggaaagctttgaaacaactggcc

SEQ ID NO: 67966 - DNA, 96 bp, Glycine max
attgcaaacacgaacaagtaattgaaactcctacagttgaatcagaaacactgcacgcctacgctattgccttataatacttgttccacgcttttt

SEQ ID NO: 67967 - DNA, 151 bp, Glycine max
cgttattttcttggcacatacttcttaacttgaaagaccttaactaaagggggtggtttaaattgggcccaccgggtttggtacctttttgaattttattggaagacatggattggtcatcatggattaacactttcttggatctcaacat

SEQ ID NO: 67968 - DNA, 104 bp, Glycine max
tattttcccttgtcgatttttgctaacgatcttgtgcttaccctccgctgtgttacggtattagaaactcatgcaattgtcttgacttgtgataaaaacaaaac

SEQ ID NO: 67969 - DNA, 151 bp, Glycine max
gagactcaatctctatctctctctttctttgccctctctttctccatctataaatgtcagagttacgctgccagatgatgcagcagccaggacccggcatggcaccttccaccatgggccatcaaacgccgcaacagtaccaacatgctcc

SEQ ID NO: 67970 - DNA, 74 bp, Glycine max
ttttcttttcattatcatgaatcattcattgcaattttttaatttttaccttcttaatgttcctgttatgtttt

SEQ ID NO: 67971 - DNA, 56 bp, Glycine max
  unsure (1)..(56): unsure at all n locations
tcgtctcgtaatcaactcnntagctgttgcnnaaatttctaccctatttnnttcaa

SEQ ID NO: 67972 - DNA, 290 bp, Glycine max
tcgagactcaatctctatctgtctctttctttgccctctctttctctctttagaaagctcaggtttgcggggcgagatgatgcagcaggcacgacccggcatgggaccttccaccatgggccaacaaccgccgcaacagtaccagcaggctccgccgcagtatcagcaaccctacgcaatgatgccgacgaaggtccaggccccgcaggcaatgtgggccccttctgccaaaactcggcctaagaaaaaacccccctggcccatcaaggcccaaaccctttggaccggga

SEQ ID NO: 67973 - DNA, 133 bp, Glycine max
aaaaatgataatgatcaataagcgcttttttctttttcatttatcatgatatcatttcattgtcaattttttaattttttaccttctttatggtcctgttattgtttttgtaagttatttgtattgggtgggt

SEQ ID NO: 67974 - DNA, 111 bp, Glycine max
gatcagcctcctaaaacaatggcttctttcaatctgtcttattcttcctcaccagacgtctcgggtactctggcgagcaaacatgctaaatcattcattgatgcgcctgtt

SEQ ID NO: 67975 - DNA, 216 bp, Glycine max
gctaggccttccaaaacacctgcttcctcatttctttcttatccttcctcacaaagcctctggtgggctctatcaaccaaggatgctcaacatttccttgatccacctttattgcgcatgaatcctaaattttacactaagcacacttcttttgggagaaatcaagctatactgatcactgatgaatctgatctactttcctattacaacctccat

SEQ ID NO: 67976 - DNA, 207 bp, Glycine max
gcacgaatatcttgttgtttggagcgatcctttaaaaactatgacaacattgattcctaccgtgatcattgctagagcggtgttgcttgcagtggactcgtggtggcaccagcaccaccaccaccacatcatcaacaacgtggatttttcgttaggcttggagaaggcgacgtgtttcacgatcttatcaagacattgtttattcgt

SEQ ID NO: 67977 - DNA, 118 bp, Glycine max
gcttggaagttgaccttgatttgctgaagaaaaagtcatctggatatgccacggccaagaatgtggctattcaagaggcgagcaatattttagacgttgaaaacataaagcacttaca

SEQ ID NO: 67978 - DNA, 119 bp, Glycine max
ctacatatctgactcatctacaactttgtacataaacctatacagaccttaccgaaaagaacttgagacatgaatacaccactaatgctacacaagtaccttttcaaaaattattgatg

SEQ ID NO: 67979 - DNA, 430 bp, Glycine max
gcaaggaatgaacattgaacgaatcaacactttctgcacagaactcaagctcaacactgactggagaaccaggttaatagaggtccaaggacccacttgactttaaggtttgaaccgactgactacaatgcactgctcacttacaaatttcttatacaatccatgattgtgctacacctttttgctgctccccttacttcttgcactaccattacatgctctaaacatttttcccatgacaaccactttgtgcgatcttcaacggctccgcggatatccctgaaccatgtcagaacaaggatattcttatgtagtgctagaaatcgacagaaggatttgaatggtccggacttcaatatagacattgctaaaaaagatcaagagcttgacgatgatggtgaccatgggttttccgctcacggaatgtatg

SEQ ID NO: 67980 - DNA, 235 bp, Glycine max
cagaagccatggtcgtaaatctctctccctcttcacctttacattcaagttccataatcagagtggcaaattcaaagtcacccatttcagaaccatggttgaggctcaaaacccactttccaaaaccgctcctttccccttcttttgcctgcccaagtgtgaacttcacttgcaagaagcaatttttgcatggtaacaacaggaacgtgttggatttcaggacttggtctattgc

SEQ ID NO: 67981 - DNA, 307 bp, Glycine max
cttggaatttgaaaccctggtgtggctagtgacatggcacacaccttctctacgtggaacgagtgaacggggctataaataatacctaacgcctacaggcctctctcgtgagccctcacagagaaagcattggggagtagaagtagaagcttcactttactcttgtcaagtcttaatggtgcataaaaaatttggctctaattttggtattttctttctctctcctctttgtgcattttaatagcaactcttaatttccaatgtccaagatgttgggagtgtttgtgggacttttgctgttggtggg

SEQ ID NO: 67982 - DNA, 298 bp, Glycine max
gcaaaacttcatcttggagcaactgaacgtgtatagcaccaagttcggtacagacaagaacgagctcgtcaggtagcatttgctgaggaagcccgtctaaaggactaagatgccaagaaattttatatggaatggagataactagaagatgaacttatgcgagttcaacatcatgttgaacattttacgcgttttaatgaaccatggtatagcaacatgcatttaaatccgagtatattgacagaatatctataaggaatagggaacttgaaatacaaaaaaaaaaaaggttgaaaaa

SEQ ID NO: 67983 - DNA, 62 bp, Glycine max
tccggcatggctcctgcttagttccatggctcattttttctaaaaccctaacgcaaatcaca

SEQ ID NO: 67984 - DNA, 74 bp, Glycine max
tctgagccaaccttccggtttttgtccttctaacttcaatctttcaatttttttttaaaccaaagccaatttgg

SEQ ID NO: 67985 - DNA, 122 bp, Glycine max
cccacgcgtccggttgtggtgtttcatttgtgaaactaacaacaacacaaggccatcatcatggcagctgcttccccaatggcaagccaactcaagtccaccttcactaggactcttgtagc

SEQ ID NO: 67986 - DNA, 98 bp, Glycine max
ttcttttttgatactcatcaatcctttctattttttttccttcaatcttctttaagagaaggtttttcttcacctaaagcttcctttcccaccacccc

SEQ ID NO: 67987 - DNA, 372 bp, Glycine max
tcggttttgggccttctaatttccaactttcaattttcctataacccaaagccaaataggaccaggctctaatacccagtgattgagttctggtaacagagttcaattgaaatttgaaacatgtattggcttcaaggagacaccctcggactatgaagcttcactaccgttagtttagcgattccgtctactaatccgtatcagtttccagatgtaaccatcgttaagttcgctgaggctcaaaccttgtgctgtcttataaacgagaaacacatgctggatcgtctaagttcgtcgtatactatgataattcgctgcttccgagactacttcagtttttagaaccgcgttaattactacagtttgttccta

SEQ ID NO: 67988 - DNA, 160 bp, Glycine max
aattcccgtctgcgccggcgtcttccccttgttttccaggaatttaaaattggaactttaccagttaccatgttttaattgccacacggttaatttttctctttatgaagaaccatggacaaaattcccggttctttaccaacctgcctagtaacctgct

SEQ ID NO: 67989 - DNA, 125 bp, Glycine max
gccttcattggtttccgttgggccttcctttgcaattccagttgttgccatttttaccccgggttccggccaaaaaaatggtccaggaggtggtttcttaatgggaaggaattgtagggtgaaaa

SEQ ID NO: 67990 - DNA, 189 bp, Glycine max
cgcgtatcggccttcattgcttctcatcaatccctcccatttttttcccttcaatccgtttctatggcaggtgtcgcttacatcaaggcttccttttccgacaccccatttctctgttccaaacccagaacctatattcttccatccctagccagacctcgcataggaagctcctttttatccttttct

SEQ ID NO: 67991 - DNA, 145 bp, Glycine max
acgcttccattcaaccaaagccttgtgtttgaccacaggtgtccaagattccttaattcgggtctattgctgcggcaagctgaacctgctgttcaagttcaagctttgaccgcaacctttcacacttgttccaggcttatcgact

SEQ ID NO: 67992 - DNA, 367 bp, Glycine max
ggcttacattgatctgggaatgctgactttgtagggacattcgggcgaattctgtagccgatgttgaaccttggctgatcattgccatgccacggacttgaaagctgatagcctaaaatttgctgctcaaaatctagcagctgtcatgagatcagacggatctgagcgtatgaaacaaaaaggtccatggctacaatcagagatactgcagacaattgctgtgcgtgaggatgaaggttccagtgcagagctaaaatctcagagagtctggggccaactcttagatggtcgtgacacgaatggtacaacggtcaggcagacaatctgatatatgcttgcacactggtatctctatggctatgactct

SEQ ID NO: 67993 - DNA, 180 bp, Glycine max
gggaccaactctccttgaggctcttgaccaaatcaatgagcccaagaggccctcagacaagggactcaagcttccattgcaggatgtctacaaaattggtggtattggtaccgtgccagtgggacgtgttgagactggtgtcgtgaaacccggtatggtggtgacttttggtcccaattg

SEQ ID NO: 67994 - DNA, 175 bp, Glycine max
cgaccagcctactagagtgaattataatggcttttcatggataattcaccttggattaccacgtccttggacttcatcattaatcgccatagggttcacgaaaaacttcccaaaaagcaggtgttaaacaatttttactcattggattgggaggtgtagaaatcttctgtaaaac

SEQ ID NO: 67995 - DNA, 264 bp, Glycine max
acgcgtacgagattgcgcaacacagagtatcttagatggtgcggtacatcacagtggtgtggtgcgcggaggcggcgctactgcacgcctgtgatggcacatactgggaggaggatgcggctaacccgattcaaatggcggcatcacgtggaggaggaggaggaccgctaaattgggcagttccggcgcgcgcaggagtgcgctaggtgcatgagcacgttctagatgagttaccgcagctaggaaaacatgatggagaagtac

SEQ ID NO: 67996 - DNA, 128 bp, Glycine max
gtaaagtctaaggccactggttctcccctttcgactgttccgggctacgatctatccggtgtagctgttaaagttggcactcaagtgaaggaccttaaagtgcatgatgaaacctatggtgatcgtaa

SEQ ID NO: 67997 - DNA, 133 bp, Glycine max
  unsure (1)..(133): unsure at all n locations
cgagtgttgaagataacacgaaacanaaaccatcatttagttgccatccatctgccaccggggtccactcccaacaccgattccggcacggcgccgtcaccgcgccccaccatcacgctcccttcgcgcccct

SEQ ID NO: 67998 - DNA, 348 bp, Glycine max
acgcttacttccaacccttctgattataatgggtcttgtctgttagctcaagaacacgggtgcagctatcactctgaccatgaatcactcatctccctgcgctcttaactattgccatattactggagacagagagagagttaattatcacacctgcaactacgccttttgttattgtcaaccgacggtggccctattcaatggatgtagacaactctggccactcgatgaatagaccggatctggcgattaccattgactacagtgcagtgaccgggaaccctataggatacgaagatgaagtcagagaaagcagcgacgagtctagatacggagctattgacgtaa

SEQ ID NO: 67999 - DNA, 95 bp, Glycine max
tcgctgtatcaacttacctctgcctattcgcactattctttcatgcacttcatctcaacatattctgtgcttccgttagctatgtttttaccaat

SEQ ID NO: 68000 - DNA, 246 bp, Glycine max
tcggattagtaccacaaaaatggagaaattgaattactgaatatcgcatagctcaaaataaaggttgaaccaaatgccattcatattaaaaaaggcgatgtattgtttaccaagaaccacaagtctacgcatttaaaaaaaaaagttgaaaacaatttagattccatcttttatcctataaacttatcaaatatgcagattagaaagaactatatatttatggatatagatccctattttaaggtg

SEQ ID NO: 68001 - DNA, 154 bp, Glycine max
tcggccacgcgttcgcttaactagcattaaaatcacgtttggaattctgcggggtcttttcccagcctttattatacggacatattcattcacccacccttttacttcccattaaaatggtcacctttacttaataaatttattggattggaaa

SEQ ID NO: 68002 - DNA, 284 bp, Glycine max
cccacacttacaattaccttcacaccagtctcacttaacaactgacaaactcttacaaagaatcgctgccaacacattgatcattccttctacttcagcctaacaacctctcctttcttcatcaaataccacatttatcacccctattcccttttctaactttaatgtcatccataccatttacaatggactatctcttacagacactaccactacaatccatcctaaaccccctgatctttaattgctaacaccttactacttattaattccaaccttatcac

SEQ ID NO: 68003 - DNA, 75 bp, Glycine max
ctagaaactgaggacttagctcgtaaatatttatgcctgaattctgcgtgacatgtggtgctgggttcatatgca

SEQ ID NO: 68004 - DNA, 317 bp, Glycine max
taccacgcgtccgaccacacttcctcccactctttctctcactcgtaccagaaaaaataactcacagatagcattaacaaaggcttctcaacataagctagatcgaactatttctaccattattcgtttttgaaacattacgcaatctttgtcagcattttaacgtcttatcctgtttaaaaattaatcaaatgaattaacagattacaacattcttctctatcattctggattatattaacagtcacttcaatacctgacgaactaccgatatcttaataactcatctactcaagaattatcatcatcaaactctc

SEQ ID NO: 68005 - DNA, 127 bp, Glycine max
actacacgaatatcttattacttacatctatctcttaaaaactctgtaaacatatattatttaccagacacctttttacacatgatgaccatctctataactacttaccatacaactaaatttataa

SEQ ID NO: 68006 - DNA, 276 bp, Glycine max
cgaccgactcataccatatgactaacaacaaattttctaacatttctgcatcaataccaatacaattccgttgatagagatttttaaaacagtgtttcgcccatcaaagtcttgtttccaccaccaccaccaccaccacaacaacaacaacatgcttttttcactaggcttggaaaaagtaacttttttcacgatcttatcaacacaacgtttattcattgcctctgcatacttccacctaaaacctatgttttctcctttaccctaaacactttc

SEQ ID NO: 68007 - DNA, 255 bp, Glycine max
actaagcgttcgtaacccactgatcatggatttccattatcgatacgatctgcacctacttggctcagcttacatagccactagagacatatcatcttctgaattaaagcctaatgatccatactactacaaaattccttagatacacgtattctaatttacttaacgtactctaatgcagtcaataatgccttacatgccaataacatcaatgatgacacggcaactgcaaaatatatggattagacaatcata

SEQ ID NO: 68008 - DNA, 280 bp, Glycine max
attcgagggacgactgacgccatcggtaacttaatcactacgtcctccatttgggctttttctgcacaaatccaaagtctagaactggggctatttgaatccatcctagcgttgcctccgaccatatatcctaccctatttatatagctgcacacaccaaatattataggataatcggagttgcactgacgtggagaaacattgacggcggatcatcccgacgattgccacagcctgcgggcaatcgacggcatacagtgcatttaagacggaaaggggg

SEQ ID NO: 68009 - DNA, 295 bp, Glycine max
agtgcttagatttccctacgaccatatattataccatctatacatatcttcacatacttaatactatataatcatgggtgttgaactaacgttgaagatcacgagggccgaacttgaggcctttcgacagagccttatggcagacatcggcatccagcggcgtacagacgatgatgggaggagaacccacaagattggttgctactatgaacatgatgatggaaagggtaccttaatctgtgtcacttgtggagtttcctacttaggtcttaccttggtcaaccatctattgctc

SEQ ID NO: 68010 - DNA, 319 bp, Glycine max
  unsure (1)..(319): unsure at all n locations
cccacgcgtccggaagaaaccctagccactctcccggcgtcacgatgcagatcttcgtgagaccctaacgggtaaaacgatcacgttggaggtggagtcttcggacaccatcgacaacgtgaaggccaagatccaggacaaggaaggcatccctccggaccagcagcgcctcatcttcgccgggaagcagctggaggacggccgcaccctcgccgactacaacatccagaaggagtccacgcttcacctcgtcctccgncttcgtggcggcgccaagaagcgcaagaagaagacctacaccaagcccaagaagatcaag

SEQ ID NO: 68011 - DNA, 141 bp, Glycine max
tataccgcgcgaggccactcaccattctgataaacatggctccatatcctaattaccacacacctcaaatattagcaccatatatattgtacggaccacatctatactacatccatgcatttgaaaatgcagatcacacca

SEQ ID NO: 68012 - DNA, 253 bp, Glycine max
ctcctcaatttaatcaatcctttttggtggaatagagctccactcaggatcgatagcatgtgtagctgattgtgcatttgctaatcatgctcatctcagtcttctctattcttctgcatctggatgattaaaattaggtttacaattaagttctggcgaagtttctatagcatacaaaagcaaagagaaactttgtttcgaaaagtgcaactctattgagtattgagtattgacaatacaatatctccttgtc

SEQ ID NO: 68013 - DNA, 94 bp, Glycine max
tcggtctctgaattacccgggctcgatcccacgtcgtacacggtgtctaccctgaattccctctgttataatcgtagtatgtcagttagctgat

SEQ ID NO: 68014 - DNA, 146 bp, Glycine max
ccaacacactcaacctccacacaaccaaactttcctatctcaaacctctttatctctatacagacaataatctgatactataatcactcaatctcatatcaatttactaattcaataccttaatccatcacatatactctactata

SEQ ID NO: 68015 - DNA, 316 bp, Glycine max
cggtcgaccacgcgtccgcaacactctcaagcttcacactaccaaactttgctatttaaattcgcatgatctatacaaggtcatgtctcttactatcttcatcaactcagatagatatctaatgaataccctatactctcatatctctatgtatctgttttacattacttagcataccatcttccaacgtcagtgcttagctgaattaaacatatttctccatatcacattcctgtcttcatcctttttaatattcctgttctagttcactttcaatgtttcagcgttctttcttttcgacactcattgatcatat

SEQ ID NO: 68016 - DNA, 469 bp, Glycine max
cccacgcgtccgttcctccgcacttagcatatggccctgaacctgcagggtgcttctcagggtactgcaatatacccgccaatgccactcttctgtatgatattaattttgttgaggtttattcggggaacagatcaaagtgaagtcagtcaaaactggtcagatacatatatacatatgaaccacagatggatgggtttagagcaatgaaatggacattttgctagagaatatggatcaacttgtttggcagaatcttcttcctgattacaactacctcaagttactgttcctggctagtggagttgtacatgattgacctggatatcccttttgagagtaatgagcaatccttactggtgatatatattaagataattcatgtggatctgtgcacatgacatgcgaacagtttgtgcatctttaagtgtaaatgaattttcaatactgctcttaatgataaaaattg

SEQ ID NO: 68017 - DNA, 86 bp, Glycine max
attgcaccgacattgcaacttattttttattctttccagctgcgatccaaacagaacaagctgtctcgtgactgagataacaacgt

SEQ ID NO: 68018 - DNA, 241 bp, Glycine max
caattgactactacagatatggtgttactattagtggcctgtatatggtcatgggtgttgcgggtgtaaaccagttagcggatattcaaattgatatcagaactgacgatgcatcatgatacatctgcatcaattgtccttgtaacaagttcatcatattgactacagttagccacaaaaggtatgctgctttatgtagaagcttgaactaaaccacatcttaatctattggatgcttcaa

SEQ ID NO: 68019 - DNA, 64 bp, Glycine max
ctttagttcttcataaggtggtcctaatatggctaggttaagaacttaataacaggatcaggca

SEQ ID NO: 68020 - DNA, 349 bp, Glycine max
ctcacgcatggaaaaacgtcagatcatattctataacggagtgaaaaacaaagctatcgatggtatattttgattgagctgggagtgacagttccgcaaggaaatatctgcacacttgtctcagaataaacatgttactatttcacatattctggtgcactatcctgctttagatccaatttacatggtgcgagaatgccttataatctacaggctgaacctactgggactctagaatatatcaaaccagggcatacttgatatctgatactaagactatcatactatcactaaaactcacatctgcattcctttcaatttactaattcattcgagaaactacattgac

SEQ ID NO: 68021 - DNA, 276 bp, Glycine max
actcacgcgtccccttcaattcacaacaaagtggaccttatatttttcggtttagaacttaataacaggaacaggcattgaactggcattaaatgtattattgaattatgcatacgataggtgcattccggaattaatcacctgcgtatactcttgactctgttgatgaccttatatggtgttagctgctttaaccccggctctccaagtgactaataaagtctgacaaatccatggagtgaatgagacatagaatatcttcgatgcttgcaagca

SEQ ID NO: 68022 - DNA, 334 bp, Glycine max
acgcctacgcttcctaaaaacctaactgtgccgtttaattttagcccacgtccaataatcccgagcatgggtttcttcctcaaggtactcacgatcatggtttaagcttcacttgtaacatggtcataacgcattactcaggaagctgtatgaagtctgtgtagtatgcatccacatagatgcatgaacatgctccactatctatgagcaacctaggtctaaacttccatacagaattgattctctacaatgaacaggtttgtacgctaggtgctgtcttacaatacctatacatcgaaagcttctcatatagaagctggcttcgtcaattaaa

SEQ ID NO: 68023 - DNA, 86 bp, Glycine max
gatatacccaaaatacaattttagagaaatgtgataaatcttaaatgtaaaataagtcaaagggaataattaaaacagtacaaacg

SEQ ID NO: 68024 - DNA, 205 bp, Glycine max
  unsure (1)..(205): unsure at all n locations
caatataataaatnctatcttgcatcaaaaggatctttcttattcgtngaatatatcaacaaaaagattgatctctaaaaaaattacttcatcttattaaaaaatcgttattgtatacacattttattatcaaaaacatatataaaacttcttcttttaaaataataaaaaacgaaattattcaatttaaacatacaaactctac

SEQ ID NO: 68025 - DNA, 285 bp, Glycine max
ctcgcatataaaatcctaagcttcaaaaataatcaccccaacgcccttaacaatattgtgtccctttacaaatgatcctgagccaacactcacaaccaatccacctttcaaatctctcacacgaactgcttcaacctgactccacacttccacaacccatagcactactactaaatcaaccatatccgtaaccctaaccctaaccttaattctcgccctgtcattcttaacaatcaatcgattttctataattacacttacaataaaacaccttaactctctctt

SEQ ID NO: 68026 - DNA, 187 bp, Glycine max
  unsure (1)..(187): unsure at all n locations
cccttcccaatctatcttctacaanccacaagccactccaccctctcgtcaatttcaaaaccctttacgtacaacccacatcttccttattaatctatttaccacaagcaacaacccttacatacattatcaaaccaatttaattctccactttaactccatcatccttatattacctatattatct

SEQ ID NO: 68027 - DNA, 242 bp, Glycine max
  unsure (1)..(242): unsure at all n locations
gacccacgcgaccgacgaaacaaaccaaggctgaaaacaacaatgtttacaacgcgaagcatnactaccctcggtcgattttcaaacgaataccgcccacccaatcctacaacttggaatctaaccatctccaaaacaatctcaagggactacacctcaactctgttagcctcacgtaaaacaacaccatgaacaatccctatctcacgatgcactctgacaaaacctaaaacaatgcctat

SEQ ID NO: 68028 - DNA, 380 bp, Glycine max
  unsure (1)..(380): unsure at all n locations
agggcttttcaaagtttgagtttaccatctacacatattccctacaatangataattctgaagctttattccaagtttttgccttctccttcttgtgctcatatcaaacccagaataatttctacctcaactcttccaatggattcctccgcttcttcccactcccagtcacaatatgcacacagcgataaatcttaagcacgcactgatactattgactataaatctttaaccaatgaacagtgtcataaacctctcacaaatgaacatttctatattactcttcagaagggaacttaaacagctttcactgtcgaatactggaatactaaaacccccgtgatttaccattgtatatgattccacacacctttattcca

SEQ ID NO: 68029 - DNA, 370 bp, Glycine max
ggctgactgaatccctctcaaacttgcatttaacatttatttgctcttatacaaaagcgtgcaagtgagtagttcactgcaagctcaacatattgaatccagttccagggaagaactccatacaattattctttaatagaaaaattgactgtgacttatctatggactacacgattcttaaattctacgatgatctcaaaccgtcacagaggaccttcaacttttcttttcttcaacctgtcaaatatcatccgtctcaacgccttttcgacaacacagccatcgatttcgagttccaatccacccatgacgccggcacggtgcctcccaaaccgacggctcctgtcagaactaccgcggtccatttact

SEQ ID NO: 68030 - DNA, 455 bp, Glycine max
gttcttttgttctatagttatgtttcttttgtctatatgatatataatcactgtattcatatagttctgtctgaagagaagagttatgatatattaaatataataagtggtttttttcttcttcatttccacgttccatcaaatgaatatgctctttacagtacagccaagtcatcataacgtatgttggggagttcttatagtactaggatggatctgaagtttgtgttgttcaagatctgtgtggtttttttttttcattgttgtttgcttaagatatatttgctttactaaagtaatttttctctttgcgtgtaggattaataattagctcatagtttttttggaagagttgtgaaaatgggacttgtggagctttttggggtggcatctatgcccgtgatcaaagtactactaatcactgctgttggcttgcttcttgcactggacaacgt

SEQ ID NO: 68031 - DNA, 475 bp, Glycine max
tcgactacgcgtccgacaggtcgaagttaatcgaggcttttgcatttaacaccattggcaactctcaaaaaaacggggaccattataaacacgaacacatgaatagagagcacattacgattcagccaaactcaatacataagttccagtttcagatatgtctcaatacctgattacattagaaagcgctagcagaggtgattcgatccttcatgcaagcaaaaacaacagtgactatctgatataattttcgagaggttatcaaatttcatgctgaagatcctttgcggaatgagagcataagataatgcatttctggccagaatatgttgcaagcaatacggcaagagagttactagcaattagctacttaagcattgctagtattatttcaggttatccacttgacactcttcgcattagattacagaactcgaataatgcctctgacttcacaattcttaaacaaatggag

SEQ ID NO: 68032 - DNA, 407 bp, Glycine max
cccacgcgtccgcccacgcgtgggcggacgcgtggggtgaagtttgtttattctgagaaggaagagagaatagaacgccatggatgagatattgaacaaggtggggtcttactggttcttcaagaagggcagcaagggatttaactctggcggcgatgatatcaacttactgtgaaccagtattgaagggggaacccaatgggtggtcaacaaggttaaagggaagatgccaaaggcgttaacacgaatgctataaggagtatgagactatccatatgaatctttcctctcgatgcgacacactacgaatttaacgcaaagacacgagagctcgtggtgtacacttctcaagtgtgtgaggttggctacacggattcgtcagagctgcgtgtctccaccagcgtgag

SEQ ID NO: 68033 - DNA, 159 bp, Glycine max
atcaggcctactctttgtctatttgaccaatttcaaacccagaacacagaataaaaatggggtgtgatgtgaaccataagctgctgataagaattaaggatgacgaataagaagaagatttagagttatcattgtccaataggctgtggaatgatatca

SEQ ID NO: 68034 - DNA, 312 bp, Glycine max
actaggccaccgttcttagcaccggcactggcttacaccatgctcaaagtcaaggagctggtatcatttataacctgggccacaggatgagatgatcacatgactcttctggcaggctccttacattggtgctagacttgcatctctctaactacatggctccatcagggccagtcactataggtacaagagacttaatgcaaccgttcacgcttaatactatctggtacaacatatgagatgatatcaaagtttatgctgatcggggtcataggatcgagatgatctgattatggatttctggccagaata

SEQ ID NO: 68035 - DNA, 324 bp, Glycine max
  unsure (1)..(324): unsure at all n locations
cggctnggccgccgtcgcttatcacgcggcacctgttttcaacgcctgctgcggggtcttcgatgctgcgtagtcattttcaaccttgggccttcgggtgtagatgatcacatggatctgtctgggtggagacctttcattggtagctgcgacttgcagcacgtctaccacgcagtgtcgccatgatgggacagttcccttcaagtctcaagtgctttaatccataccgttcatgcctaatccagttgggaacaacataaaagatctgaacaatgtttctggagttcgggttcattgcatttagatgatctgattatgtttttt

SEQ ID NO: 68036 - DNA, 350 bp, Glycine max
ggaaattggagctggataactattatatggaaaattacatcagagagaatataaaccaagttgtcatggtttggacgttgaatgatgcctttctcttgaccatagaagatagttgctctacctctaccatgatgttaaatcaagttcggaaagttcatggagaagagaacttgaaaattttgttgttagagtctctacttggttgttttgaagcagaggagagtctgatgccaagtgcaaagtgtgagatcaaggaacaatgcagggaacttgacttgggttcggaatgaggagacctacatgagcatgaaatatttgaagactggataactgcagaagaacaaacattc

SEQ ID NO: 68037 - DNA, 399 bp, Glycine max
atttgagtatatctgttatagtttatttactactgaaagatggattcgaagaggaagatagcattacttatcttcggtctgctggccatgctccttttcatctcctcagaggtggcagccagagaactgaaagaggtcactggtgctggcttgtctggtggccgtggcgtaaactttggtggctttggtggcattggtggtggccctggcttccgctttggcttcaataatggcttccccctcttcttccctggattccccagcttccgtggattccccggcttccctggattctccggcggccctggattccccggcactggattccccggcactggattccccggcactggattccccggcactggattccccgcatcttccctggctttgggtgtg

SEQ ID NO: 68038 - DNA, 206 bp, Glycine max
ataagagcgtctctactataatctatctacttttattacacctactctgatagatcactggtatcatttatcttctcgatactgtcaatgctgtggttctacctctcataggtacattattcacatctcaattacgcaactacatcattcaataccattccacgtaacacacactgtttcatacaatacaccaaatcatactgaac

SEQ ID NO: 68039 - DNA, 322 bp, Glycine max
cccacgcgtccggctgttcaagagcaggaacttcagccattatgagcttcgtttgtactagcgctactgcttaatggtttgatgattagtgtggctggcatattcgagtccatcaatgcaagagcaatatacacaatcatatagacatacaaccgatcaagattttgggttctaagaaatcgagttggttggcatgatataatgaaaccctcatagatgtatattaagaattctttagaagttggatcatttgcaaacgcaattttggtttgggggtattgcaatataacagtgaacccaaaagggggtagctttaaggtgg

SEQ ID NO: 68040 - DNA, 215 bp, Glycine max
actaggcgtccgtacatagtaaagccactaatgtcaatcgtgtcatttgtgaacttgctgcgatcatattaatcagggaacttaactaggatgacctcgcatatcggctcgtcagaaccgctcatagctcttgacataacaatgctctaacatcagatctctatgatgggccttacgtatgacgccaagctgaccatccagatggcatatgctta

SEQ ID NO: 68041 - DNA, 413 bp, Glycine max
aacgaacgcacggtcataacagctcatggtccttcggacaaagtggaactcactgatgatgcatatgagttcgctaagattatacgaaagcacaggctacatatcagagaaagagctgatcagtcattgactaatcatgaagaggaattagcctcggttgttgtgaacttgataaaggaaacctggcaccaggataggagtactgctaactagatcttgcaatatcaagccatgtgaattcctactgatgacaatgatcagcctttgacatggatgaacctgactttgctgctctacaacatatttgagctctgatagttgttgcctatgaaagtagtggatcttgcatcatcgtgaaaataacggctaaagcagtatctggaagtgttatttacctgtgatcagatcatgta

SEQ ID NO: 68042 - DNA, 62 bp, Glycine max
gctcgtacgtccacgcttactctaacgcatccaacctcatttacgcatacatgcaaattctt

SEQ ID NO: 68043 - DNA, 478 bp, Glycine max
ccaaactcaagttcaccacttgcaagctgctctggcacatcacggacatactaccacacacgagtggagtactacaagcgctgccactcgagatagctctgtaagcgcgtcagtcgcccatcactgtcaccgaatgaatgaaagcctcatgacaatcgctgcagctttcaaagagggcacctctgaccataaggaactgcaccaagctgcacagcgtcaagctgcagctgctacactacacattcccctcattgaaaaacatgtcgaaattgctgaacaacatcttactgtgatacaacaaactcgtcctcgtcattattcacaatctgatgtatggcatcttctagaggaatcaagagtcacagatccatttcgcatgaacgttcatgaccatttatgtgataatgagcacagaacacgtaagcttcttggcctaccacctgatatgagaggagaagctctcattcaaatgatgact

SEQ ID NO: 68044 - DNA, 429 bp, Glycine max
ccaattttcaccccccaactttgaggatgctagtccacaaaatggtcaaacaaatcctagtggcttaaatacttcaaggggtacaaaacggaagagaaatgtggttgagttagttgaagatcaatatgagcgaatgaatgaaagtatcatgacaattgctgaagctttgaaagagggaaattctgtttctaaggagctgcaccaagttgcagagcgtcaagttgaagttgctaaaagacaagttgcagtcattgaaaaacaagttgaaattgctgaaaaacaacttactgtgatacaacaaactcgtcctcgtcattattcagaatctgatgtatgggatcttttagaggaattaagagtcacagatccatttcgcatgaaggtttataaccatttatgtgataatgagcacaaaaaacgtaagctttt

SEQ ID NO: 68045 - DNA, 282 bp, Glycine max
attgtcacactcctccgtttgttcatcctatgatctcgtctctgacataacgacgacctttgctcgggataaaacggccgagccacgatcggacggtccttcattgttactgcgtccatgatctgcgatcgcaattttccgtacgacgattacgactccatcttcgactgctacatcggaaggaacaccatctcgccggaagattcctccgaccgggaagacaccgtcgaaactgatgttcacagttccttcaaaggcccttcgcataccatcaatgatcta

SEQ ID NO: 68046 - DNA, 249 bp, Glycine max
acgcgatcgatcgcactgatcgagatgctggggattaccatgaatgtttccgctcgtgccaaagccgacggggccaactacgacttgggtccctcccaagatgactctgtcctcaaacacaggctactaacgctcaccacacccaccaattgtgaccctccctttaataatctctataacaagttcaccacattcgtccccgaagcctccaaatactaatacctctactaccactactgtgactatctc

SEQ ID NO: 68047 - DNA, 292 bp, Glycine max
cccacgcgtccgaccactcgttcgttctacctacttcttctccttttgtgcaacttagctcgcggtggataaaaatgaggataaagaacatttctcctctgatgaaaatgtaagaacaataggtttggaggaacctaatccaatggaatttgacagcgaagtatcatcatcagcgtcttatagtcctattcctgaatctactattgatgcagaacatgctgaagattctgatactgcagaatgctttgataatcatgcactagtagctttagttccagctttcgagcaaaat

SEQ ID NO: 68048 - DNA, 410 bp, Glycine max
gggtatgggaatgggtgcaccttccttgccttccatttacaacccgatgcaattgccaaaagtgccacatgatcaagccatgtctgtgcctcagatgccaaaccagaatttaatgtgccaaaatcaagttttgggtgcctttaattaccaaacccacatgcaaaacccttgccttccagaacaatatgcaccttacatgggttaccattttatgcgaagtgcctctcagcctatgaatgtgttcagatatggttcccaagcagtgcaacatagtcaaacaatgattgcaccaggcaataatagcagcggacccatgagtggaacagctaatattgatgatgctgttagtggcaaagcaagttctttcacctttaactgaatagtggatagcaataccttaaaattaccca

SEQ ID NO: 68049 - DNA, 194 bp, Glycine max
actcagagcgacccgtccgtccacacgtctgcacctgacaaagacttttctcttcatgcgcgaagcctgcgacaagagcgtgacatgaacatatcgtgcgcctgcctattatgacgatctcaacacactatttgatgaatgcagataccaatgtctggttcttcaacatcactatatgcaaaagcccatacttt

SEQ ID NO: 68050 - DNA, 147 bp, Glycine max
ttcctctttgacaagtgagtcctaaaatctgagctgtcacattcactactagtcagatgcatgtgacagctcagattttaggattcctctttgacaagtgagtcccatgtaattaaaatttgaataataaatatgaataatgttgat

SEQ ID NO: 68051 - DNA, 422 bp, Glycine max
acgctcctgtttgacaagtgagtcctaaaatctgagctgtctcattcactactagacagatccatgtgacggcttaaatactgtgattcctgtctgacacgtgattcctatttcattcactgtcctatagtccatatcaataatgttcatcaaaaagaccaacaatgacattacctgccttgctatctacagtatccaagcttacttcctcctgcattcgacgccatatctcttctataaggtcaccaatattcaataccctggccacctttttacaacatacttactggaagaagcataatacctccttacgaagggatcgatccctagattggaatttgaccagcagcactaatacctataacgcgagcaccaatcgcccttaccaacctatgctcaaccctactggcccatgtgacacc

SEQ ID NO: 68052 - DNA, 302 bp, Glycine max
gtaacgcgtacggatccatcaccacggcaagtttcgacgtgctctgacgaatctctaatgcaggcgtgtttacgactgagatctgggattacttgccaaccactggcacaagagagcatcactgcaaagctcgtaccattatgatagtacaataggccatcttgagctcaatatgcccgatgcatgatctcttctgcacatttttgtataacaagtcaccttcactgacactcatgaggctaaggcagcataacctgagattaatagcttaccattcatcaagaatattactcacagagaca

SEQ ID NO: 68053 - DNA, 340 bp, Glycine max
acgcctacgcgtacgcacactatttctcactccttctaatgggatcagcacgcaattttggcatggcgattgaattgctgaacactgattcactacttaatgatgtagaaaagatttttgcttcaagtcctccatattcaatggagctttagaagccaaagcacatgctgaaagagcatgagcaaacacttgttgacgccattgcaaggattgcatatgcatctgatggcgaaagtgatggataacagccgttcttgcagcatggtcaattaatggaaaggggattagagcacaggaaccaactgcatgttcgaggaaatctgtctttagagcttaaatc

SEQ ID NO: 68054 - DNA, 211 bp, Glycine max
acatacactaatgtacaacccccaatataaccactactgcaaacatcagattcaaatgccttgattcatgaattgataactcttctatgctaggtatgttctcgtgaaaaaaacccgctatatacaacaaaaagccgggccataatgcccttgtcgaccataccataatttcaaggccttcatactaatctgactggacactacaatataa

SEQ ID NO: 68055 - DNA, 264 bp, Glycine max
ctcacgcgtacgcgtactcgtgggcagactagacatacactacctagctcgctctggagattggcacatacacgacgattactattatcatcatctactttctagcttatcgttcaagagttgtgatcaagaatgtgtacaacaagccgcgcttgtacttggacacgtgcggctgatgtcggagcggtgaatgccttgaatgaccaaggcatatgtctgtgagtacagcacgaagagatcagcacaacttcatgctggacataa

SEQ ID NO: 68056 - DNA, 185 bp, Glycine max
cttaagtgtaaaaatactactaaacagacgagtcatgcacgacctatctctctcgaatcagtgtcagctacctgcggcttcttattatactcacttacccttatcttatccttcaagtacttgcatcaattcatgtgcaggacaaacccctcgtgtcactgacatcttcgccagagctactagac

SEQ ID NO: 68057 - DNA, 365 bp, Glycine max
acgcccacgcgtacggattatcctaagtctttgggaatagtgctgcaatggcttcaagtcaggaggaggtgacccttttgggagctactggaagcccatttgtgtgcagggttcatattgccctcaagttgaagggagttcaatacaaatatgtcgaagaaaatttgaggaacaagagtgaactgcttctcaaatccaacccagttcacaagaaggttccagtgtttattcacaatgagaagcccatagcagagtctcttgtgattgttgaatacattgatgagacatggaagaacaaccccatcttgccttctgatccttaccaaagagccttggctcgtttctggtccaaattcattgatgat

SEQ ID NO: 68058 - DNA, 243 bp, Glycine max
  unsure (1)..(243): unsure at all n locations
cgcgtacgcccacgcgtncggtacttatgcagaatggagggctggtttgctgcaaattctgaggcgaggtgactgaaaggatgggaccaggtagctcctatattgaaagaaataatttgtaaagtcgtctcatagccaggtgcatgagtcttcaacatgcagccttctatgatccataaccatgaggtgctgctccctgggggcatggacttatggtccgcggttacttgcctgttataaata

SEQ ID NO: 68059 - DNA, 245 bp, Glycine max
cccacgcgttcggaaaacggagacggcgtacaaagctccaacagctacatataccagtgctggcagaatctttgattctaagtcgactccgcaatacaccgattgtctcacacgtttagaagaatttaatcatgatcagaatgaatgtctacaacattctggtggttacaagatgtgcaagaaaatagagagggctgcactgttggaacgaaataaacaccgatccttattctagtgaaatctta

SEQ ID NO: 68060 - DNA, 374 bp, Glycine max
  unsure (1)..(374): unsure at all n locations
ttaattaaataattaaaatgggtttttaatttaaagagaaaaaaaaaataaaaaaanntcgtaagtggtttaaattaaaaaatatatttaaaaaaaaaataaaatataaaaaaataaatataaaatatataaatataaaaattaattattaaaattataataatatattaaataaaaatttttttttttaattaaaataaaaaaaaaaataaaattattatatattttttatataatataaaaaaaaataataataaatataaaataataataaaaaaaatataaaatataaaaatatttatattattatattaaaataaaaaattttttataataaaataataataaaaaataaataaatatataaaataaaa

SEQ ID NO: 68061 - DNA, 319 bp, Glycine max
tgcttgtattctgatgaaaaaaaacggtcaatatcaatattggttggacctttgttttagtaatttagctctgagaaatgttgctaaataatagtagcaattgtttctctaacactattagctgaaatttattaaaattcattcattttagtaagttttatttttccatatgactacggatggttgtaggttcagactttattttgataattgatatttcgatttgagtttgagagcgtgagagattacgatggcatggcgttcttttcaagaaattttgcgagattcgtattttgtcatgctgattcgattagatatg

SEQ ID NO: 68062 - DNA, 312 bp, Glycine max
  unsure (1)..(312): unsure at all n locations
cttggaactgcctgactgtgtctccaccacaattcccctgtttggttttgttccttctctggttggccttgttcctatgtttgtgaattttcctttcctgtctggtaagagtactacttggattggtgattaaatgttggactccggtgacaccattttacggtaaaaaaaatggcaaaacaataatctaatgcatcttgcttactcatacagttganaaaaaaaaaaaaaaaaaaaaaaaaaaaaaaaaaaaaaatataaaataataaaaaaaaaataaataataaaattaaaataaattaaaaatatttt

SEQ ID NO: 68063 - DNA, 250 bp, Glycine max
  unsure (1)..(250): unsure at all n locations
aaaaaaaccgnggcgacccacccatacgaacaaanaaaatttttttaccagtttttcattttatttacaaaaatataaaactcgttggttctcaacaaattaaattggatctatcctcttcacttcaaaaaccatacctcttattacaaactaaacacattcacgtcacatatttaatattgatttctcaagttctctatgctctaacacacctttcacttctttatatatatttacaaaattttaatcc

SEQ ID NO: 68064 - DNA, 258 bp, Glycine max
atccccatcatttttatatccttatttttacctaaacttttcttacaaactctctgttccatatcttcatgtgccgcacctcccttcctcattctcttacactttcaaaacctttcttcctctcttctctccttctcttacaagccccattttaaaaccaacctttctttctatcctcttcttttcaaacccttccaatttcttcacataaaaccccaaatcaatacttttccttcccttttctcccttttttcttca

SEQ ID NO: 68065 - DNA, 450 bp, Glycine max
agccacgcttaatatcaccctaaaaagttctcttttcacacaacacaacacaaaccctgtgtgtgtttatataaatcatcatcgcatcaacaacatcttggtttgtgttgtcacttaattttacaccctccaccacaaactcaaaggttgtcatgttcaacacaaaaaacaacacttctatgctttttgtaatgtcttcatattaaccttcttcgtgatcacccatcaccgtcacatccctatcttaatcttaaacttaaccaaaatcaccacctatttgccccaaaataagtgctaaagttaaaattcttaataatgaattttactcgtacaaatccacttttttcaatttttgcttttttatcaagacccaaaacactctcttcccttttttggttctattcacaaaatcaatctattccaatttattaaccaacaacttttcttttt

SEQ ID NO: 68066 - DNA, 136 bp, Glycine max
aaaaataaaaaaaccgagctggcccgacacaaccgaaaaaaaataaataaaaaaaattattttattttatccaatacacaaaaaacacaacgcgacgcgcttatatatataaaatcaccccccccccccccaaact

SEQ ID NO: 68067 - DNA, 382 bp, Glycine max
  unsure (1)..(382): unsure at all n locations
accgaatcggagtttcgggctagacgtacgcgtacgctttattaaaggatatcacctggcaacaacccctgccacagtaatcgttgtgttccgaaagaaggagacctatgaacgtggatctggaatcattggcagaggcaacttctggggccataggatcactgatcagcaccactattctctacccacttgacacctgcaagaccaagtaccaggctgaggctcgttcctcangtcgaataaaatacaggaatctcactgatgtattattggaggcaatatctaaccgtcaggtgctttcactttaccagggccttggaacaaagaatcttcaatccttcatttcacaatttgtctacttctatggatacagctattttaa

SEQ ID NO: 68068 - DNA, 66 bp, Glycine max
aaaaaaaaaaaaaaaaaaaaaaaaaaaaaaaaaaaaaaaaaaaaaaaaaaaaaaaaggggggggga

SEQ ID NO: 68069 - DNA, 294 bp, Glycine max
acgacccagcgtacgccacgcgtgctacgagagaagctgctcctttttatactagtgctgtaagatgaaactgagatcggtggacatgtgcacaaagagcccaacaacacttgtaagtagaaacagattaacaccaatacctcatcgtactgttccgtcatcaaggcttgcgtctaaggacacaattggcttgatacattctgaagactgcatcacacatgtcgtgaatttgatgaataaagagtatgcaatctactactacatactacggtctactataagtgagctgaatat

SEQ ID NO: 68070 - DNA, 208 bp, Glycine max
acacatatctcgtatctcaatttgagttttttgtttaagatagagagagaatcactggtacatttgataaaatttgcaactaagaaatctttaaacaattagttttcagtttcttcataacaacgctttctctttcacttatccttttcaccatcaatatcatacccattcatcgctctattttacctcattaccacatactctcttt

SEQ ID NO: 68071 - DNA, 145 bp, Glycine max
aaacctttaaacaatataccctcatttttatcataacaacactttctctttcacttatccttttcaccatcaatatcatacccatacttcactctcttttcactcactaccacaaactctctttcaccctataacaaccgtattc

SEQ ID NO: 68072 - DNA, 462 bp, Glycine max
cccacgcgtccggtgaaatcaggcactggagagcaaagagcttgtggtgtgagaagtggccaaaaagctgtccataaaggctcttctgtaggagaagaagtacaaatcactccaaagtccttgaaacacactattcaatctgcactttctgagaaatcagattctcggaagaaaaccaagtcggagaaggacaacagagcttccatgcataacttaactgtaccaccaccagcaaaagtaagctgggttctgtctggttccggggggttctggagccctttccttgatgattccattgtaccagaacctgaaaagatgaaatggtccaaagcatttgtactatcaatccatgatgatggagatattaatggacttaatagctgagctttgcagggttcacaatggagatgactggaaatcttggttctatcacagggttgcacctcgaaacaacttgggaaa

SEQ ID NO: 68073 - DNA, 388 bp, Glycine max
attctctctgtgtatttccctacctctcccttcaagatgcagatcttcgtcaagaccctcacgggcaagagcatcacccttgaggtggaaagctctgacaccatcgacaacgtcaaggccaagatccaggacaaggaaggaatccccccggaccagcaacgtctcattttcgccggaaagcaacttgaggacggccgtacccttgctgactacaacattcagaatgagagtactcttcacctcgtcctccgtctccgtggtggcatgcagatcttcgttaagacactcaccggcaagaccataaccctggaagtgaaagcttcgacaccatcgataacgtcaaggccaagatccaggacaaggagggtatccccccggaccagcaacg

SEQ ID NO: 68074 - DNA, 244 bp, Glycine max
gtgggtcttgcgaactgttggaatcccaagttcattaatggctttaatcctgaggtcttaggctattatgattatgatttgccacacacgcagaagggcataaaatattgacgacttgatctactactggtggagaatgatggataacaacacagctgcttacacttagagagcaactaatgatatgatcattgctgcacactggatcatgaacatatgactttgtgatatcactaatattgac

SEQ ID NO: 68075 - DNA, 314 bp, Glycine max
gccaaacatacggcctcacattcttttacctataatatgaccacacttcacaaaccgcaagggctgctacacacaccatgcgtaactcatctctacctgataacatatgttctgaaatacaatttcttccatgtatcatacccttatatatgctcctctcagctcttcctattacctcttacttatggatctttaccatctcaatctaccaattccatcacaattctcaatacttctttcatacccgattactccttcctctaatagatttccccaatagctaacaactagatctccaatttactaatcttata

SEQ ID NO: 68076 - DNA, 148 bp, Glycine max
cccactcgtccggaatcctaattcactgttttacattatcgaccttcatcatcaattgtaaggtttttaatcaagttctatcaatatacaaaacatattatcctttaaacacaaatacagtacattacctattattgctaaacccatt

SEQ ID NO: 68077 - DNA, 467 bp, Glycine max
gccaataataaagattaaaacttaaaagttaaaaatgattgtcctaagttgaaagtcgaaacacagtctatgacttgcaactaaaagacaaaagttgctaaagtaaaaacaaaaatacaatacattgtcgtttagggttaggccggttagggctgtgattctgatcatctcttttctctgaacagctagatgcaagtgcagccatgagtggaacagaagttaggatagcagtgcagcgtgacttgcccactccgcttaagccaggcataatggccctttgaggagcagcagggtgccgcaactccttaggcctaacagatcctacgcaataatcgtgtaatttttcactagattacaattcaggtctgattcatgcaattcaagcgccgaaacgattagctcactgattcatatcacaagctgctcaaaccgtatcatatcacagatcgtgcaatactgataactac

SEQ ID NO: 68078 - DNA, 130 bp, Glycine max
agatctctctaaatgcccatgatcctcatatactctctccgtatctaaatcaaatctggtatggtttaaacatgaggaactgaacagcttgtaatcgtttgacagtttcatctaatgccttcacattttt

SEQ ID NO: 68079 - DNA, 166 bp, Glycine max
acgcccacgcgtccgcttcttctatgggttggcttagtctgttcataacttccgtggctttctggtccatcttagttatattctcaccctatacactggggtcaaaatcaaccacactttccacctacctcaaactctctcacctcctctacttcttcaccatctt

SEQ ID NO: 68080 - DNA, 193 bp, Glycine max
cgtacgggttatcaagattaattgccaaccataatgcttttttggtcaacacttatccactccatctgaactctggtgttcttaaaaacttacccgttcgtgtactgatacttccccttttcataaacttcttgcttgtctcttacctagtctcccttaacgaaaagctctacaccaacgtcaactatttctt

SEQ ID NO: 68081 - DNA, 124 bp, Glycine max
ctcatgcatacttagctgcaaatcaactccttttcttgctatgaacctactaccacgggattgtctctaaaaccagaatccttctctatatgaacgtcattaaagctctcatcactcacatatc

SEQ ID NO: 68082 - DNA, 173 bp, Glycine max
cggccgacccacactccgcttaaccattacaaaacacttctgcactcttttactaccacgcccacatatcaacgcttgattctacacatagtgttctcacatatctacctcaatacctcaatgctcacctatccttcatccaccaacacattcatcacatcaaccctctctaa

SEQ ID NO: 68083 - DNA, 144 bp, Glycine max
accacacatcctaattcaacgattttagggttttaaaatataccaacaaaccggcttatttggaaaatttgtaaatcggttcttacttcttcaatcttctatattaatacagtaagtatacatattatatatagatcaattatc

SEQ ID NO: 68084 - DNA, 194 bp, Glycine max
ctacggattcgtaaaatcatgcctcctaaagtacggacattatatattcatgcttgaatgatcataacgggactatagtggtgcacaatgtgtatgcactacaaatgtacaattgatataataatttgaggccttttagcttttctgtaaaggatggctattctgttaatatatttatctgacgtatactgatt

SEQ ID NO: 68085 - DNA, 331 bp, Glycine max
  unsure (1)..(331): unsure at all n locations
actaactaacatcactcaacccagataacctagttcttgacatcacataccaattcgtataaatgtataactacaacaactacctctcctccactaacctccccacacattatatctcccaccatttctacctctccatatccaacacctacataaactacttcttctccccaaaacccttctacaacaacaacacttgcttcatcacaccatacaacatcatcacctgcacctccactagnctctaactctcgcaagacttcatctcaatccaatccaccaactgttttaactcctatactaaacattatcttatcacgcttcttattct

SEQ ID NO: 68086 - DNA, 229 bp, Glycine max
ccaaaacaatcaaatccatttattccacacccttctacatccctcttggttttgcgctatcaaccttcctacattttcccataaactctcacactatccattcccataccattcagtcatctcttctttcattataccattatgcatctatcctacctatcctatactcttattcagctccttaatgatacattcatactttatccatacttacctttcacttctaacc

SEQ ID NO: 68087 - DNA, 300 bp, Glycine max
cgaccgactcgtccgatctaacttatatcaaatcacatttctggttgttcgtcatggctccattaactgcggcgaggcctattctgtcactgtcgttattgcttttgctaccgtcttttcttccgatcgccgtcgcttacagacccggctacatcgttcccatgagccgcatgggtcaataccactcctcgctaaccgtgtgtcatgacctcattggccgtcactgacctatattcgcattgaatcgctatgtgttgatgcccatacccaagctcacgggttacactggtgcggatgctt

SEQ ID NO: 68088 - DNA, 278 bp, Glycine max
  unsure (1)..(278): unsure at all n locations
acgagcttatctaaacaaaatcagattcctgaacacaccttccaacacaccgaatcgggaatatggataccagcagcctatacctattatggaacatcattctcaaacatcatccatttattcatcatccctgcatatcatctatacaacaactatatataaaccttcactttaagatactgcacttaataatccatcgtataacttatttttatatcnagaatactgattagttacttatactcactgacgttcaatacataatatatatgcattac

SEQ ID NO: 68089 - DNA, 443 bp, Glycine max
gcggtgaagctgagttggagtcgctgttggaggagtaagcgatggatgccaagtggacgctagagcctgtggtggcacgaagaatcgaaggaatgtggctgggggtgcgggactttgaaagaacttacagaagtgaaggcattggaattacttacttttatactggggttagcgccgctacactagtgcccattctcaattaccgaaacaacaggagtggcagcactagttcaatctccaaagccctgttgacagcttcaatcggtggctacataccatctgcaattgtggtgttacgggtttatgaattctatggtaggtaataggaagaatcagaatggagtttgctgtgttgattgagtgaatatttagtgatggcttccaaaggaaatcatatctaggcatgtgtggagaatcaaagacagacattaaactgtgaagaa

SEQ ID NO: 68090 - DNA, 209 bp, Glycine max
gaggatataactttctcagtgatagggggagataaattaggtgaggaatattgagtatatggagggactaatttgttaggatacggtgatgtattgatatggtactgacataaacatcatcgatggaaatgccagcttgcaccccgatcaggcactcctcgtcgccttcatcgccggcggcgacggcgactacgaccggattgtgggtg

SEQ ID NO: 68091 - DNA, 337 bp, Glycine max
  unsure (1)..(337): unsure at all n locations
gaggatataacttttcagtgatagggggagagaaattaggtgaggtatattgaatataggaggggacgaatttgttaggattcgttgttatattgttatggaatggaaaaaaacaggtttgatggaaaagcatgtggcatgtggcatgtggcatgtggtatgtggtttagtgcgtctggcgagcatgtgaaagctgatccactctcgcaaaattggctgactgccacctctttcttatattattatgacccaccaagcatcatgctgttttgtgcatcatgcatggcctnccatgtgaatgtctgcttcactttcacatatgtaatatcctcactat

SEQ ID NO: 68092 - DNA, 195 bp, Glycine max
  unsure (1)..(195): unsure at all n locations
cacaagttgaaaattgcggctctcgaggccgtcaacanataccatgcaccctacaattggtgcccctacggcggtccccttttagactgccaatgtgatgtctttaaaagctcctacctggaataccacaatttgaaacccagcttgctctccgtcctaaccatcctcgtcgccttcatacgcctctgcaagggc

SEQ ID NO: 68093 - DNA, 183 bp, Glycine max
  unsure (1)..(183): unsure at all n locations
gtaccatgccatagaagaaaagnatactnactactactactactaacactacaaacacttgttgcttcaaatttcattctaaaaattgtactgagaaacagatacatcaatnaaataagccttctcagtgngcantataaaaattaccnttgaaaaaaaaaaaaaaaaaagtccttcccctag

SEQ ID NO: 68094 - DNA, 184 bp, Glycine max
ccacagctgaccaatatgatgcactatatgtttttcaacgatcagtcatgaacatcatggcccggtgttcaaccactcggtgccaggcgagcctttgcaatcggcaaagccctaacgctagctcttgtacacaacgaagtctttatcacgcatcgaaatttctctgatgaaaactaacacacac

SEQ ID NO: 68095 - DNA, 302 bp, Glycine max
gtcaaacatacggcctcacattcgtttacttataatatgatcacacttaacaaacagggagggctgctactgacaccatgcgggactcatgtctacacgacaacatatgttctgaatatcaagtgcttccatggctcatacccttatatatgctcctctcatatctttctatttcctcttacttctggatatccaccatctaaaggtgccattgacatgataattctcaataagtctttcatagccgattattacttcctctaattgatgtcctcatgagctaaaaactctatcctcaattt

SEQ ID NO: 68096 - DNA, 284 bp, Glycine max
gctaagcttacggcctctcattcatttaccttttatatgatcacacttcacacccttgaatgactgcttcttacaccatgcgttactcctttctacacgacaacatatgttttgaagaacaaggacttccatggttcataaccttatatatgctcctcctggctctttctttctccgctgacatctgaatatccaggatctcatggtcacattgctttttgagttttcaacaagtgtttactcgccgattgttattttacccttattatatttccccttttgct

SEQ ID NO: 68097 - DNA, 293 bp, Glycine max
aatgtgatgcagtataactaagacaggcagagctggctatgacaatcatattgatactaattcataggtcgtgaagtatgaaatgctgctacagtacctagcatattcggccttttgctggctgagcggaatcctataggaagcttgagacttgaacaaagatggtgacttcaatggtttatacctgaaagtgatctactgcaagttggtagatttaaggtctgtcaagcgttgctgtactcaaattgcctatttaatacatcatggtaaaagttggagagtgtcatgaaaaa

SEQ ID NO: 68098 - DNA, 280 bp, Glycine max
  unsure (1)..(280): unsure at all n locations
tcgattattgtatgtacagaatgggctgagtgtatcattgatgtncgtatttcttcgagtcaaggtcaatttaatgggcagtctgtttctcattaatctccagacaaaaaatgctaccttgtttggtatttttagcttccatatggcatgaaaaattccttctgtgttatcatctttttggttcttgtccaatgattggtattcacttctaactgtgtgttttccagtggtatcatttgtccatacccatttatccaattgttggagatttatattaaag

SEQ ID NO: 68099 - DNA, 288 bp, Glycine max
gttaaacatatggcctcacattcttttacttataatatgatcacacttaacaatcatgaagggccgctacatacaccatgtggtactcatgtctacacgataacataggttttgaagtgcaagttcttgcatggatcatcatcttatatatgatcctctgatgacttcctataacgtctcacttgtggatatgcaccatctaaatgtatcattgagatcatagttcacagtaagtttttcatatacgattaatactgtttataatggatgtgacctagagctataaac

SEQ ID NO: 68100 - DNA, 357 bp, Glycine max
actacaacacgtccattatcaaagaatatcacctttcaccttatagactaaccatcattggggcgcagaccattcactacttttaatcgtcagcaccacatcaactcacaaacacttctcaaagttaatattcagctaaatatgtggcttctttctacaatgcccattaatcttcttcttcttcttatataccataattcatgcaatttcaacgcctcgtgaatgctccctattaaaccaaattgtagtacaatcgatgtcaagtaccgtaagaatttatggaaacagactattaccaagatcttaacagcatgtactaacaccaccatacgactgtaacaggatttatcacattta

SEQ ID NO: 68101 - DNA, 151 bp, Glycine max
tcgggtgaataatgtatagggttcctgagagagatgaatgtgatgtacaggatgtagatggctggtagtggcagtgtgtgtccctttgcgcgacttgtaatcattttttatggtggctgttttattttaattaaaagtaatctcatctttt

SEQ ID NO: 68102 - DNA, 126 bp, Glycine max
acgcccactcgtcctagcactatatatgcattatgtatctggtcgatttgcattatctggggggggatcatattcctagatatatagctaattatgatttcatgagttatatagggaacattggtt

SEQ ID NO: 68103 - DNA, 328 bp, Glycine max
  unsure (1)..(328): unsure at all n locations
atagtattggatttcttttcttcttaaacgaaactgagattctcggatggcgttccttcagtaggcccccagatccgtgttgccctatttcggagatgaagaaccagaggaagaagaagagaccgaagctgcagaagaagcttgagaagaacaaaggcgttgttagctgctgctgatgtngttgccgagaacgaaaacgaaagcgaagaagaaaagagaaaacgcagcattttggaggcactggttgaggccttctccttgtctttagtcagggaagcttccttggcctataacattggncggcggtgaatgccgacaagggcttcgg

SEQ ID NO: 68104 - DNA, 259 bp, Glycine max
cccacacatgccttatctgtagctgcatctacacctgcgcaaactttcactaccgatggcgggaatatcgtcatcaaaagataccgacccaagcatgacttacctgactatctcagacacgggtcgtaatgaacatcccatcaagactggtctaaagcatctcactgatttaaattcaaaccatctatccgcctactcttctgcagacacaccaacgcctataagacgtgatcaaacaatcaaagatatatatcaatgt

SEQ ID NO: 68105 - DNA, 365 bp, Glycine max
tccactcgtccgcactcttccatagattttgtgtacatgcgcagacactgtgcctatagtcgcggtatgatcaagtcatgtctgcgcctcagatgtccctccttactttaatgtgccaaaatctagtatcgagttcttttaattgccgaacctacatgcatatacgtttccttcctcaacagtatgcacttttcatgggttaccatttcatgccaagaagctctcctcctatgaatgcgttcagatatccatcactagcaattcaacatagtcaatcattgattgtaccattcattcatcgcatcagacctattttttgaacatctaatatagatcatgctcatagcatcctatccagttctttc

SEQ ID NO: 68106 - DNA, 133 bp, Glycine max
  unsure (1)..(133): unsure at all n locations
ctaccactgtaatatcatatgaaaactacaatgaaacaccagcatctgaggagagtgcaatcaagatacgaatccagctgaaagcggacgaatagaagatccgatacagccgccaccaaacagnactaacact

SEQ ID NO: 68107 - DNA, 251 bp, Glycine max
acgaggcgtacaaacagccatgcgatcacaatctcaaccacacgacaatcgaggccaggcttctaagatacgtaggtcatcaccatacatagcgaatgatgacacgggggcaacatggaatagagtaatggaatctacaatgttcaagaatcgacctatggaccatatgctagatgctatattgacttgaaccaatagactgtcaagaactcacggatagagtgaaccttgccaagaaacgcctagctgca

SEQ ID NO: 68108 - DNA, 326 bp, Glycine max
gttggaggcaaggcatcttgtcgtaggaacttctctatggatgttgttctatccgatgctggtggacagcctgtagataaggagaagaaggttttgcttcacttttggatgccgaccccggggcaccaatggagaatacaagccatgattaaacaccccttttagctagttatgatggaataaaattttcctcttgtgaaaaacccaataactttttctgggaccgtgcttcaattaaagctaaaaaaacttaagttttaatccaatgtgaccaccaggtggttcttaatagcttttggggttccaaacttggaaattaatccttt

SEQ ID NO: 68109 - DNA, 260 bp, Glycine max
  unsure (1)..(260): unsure at all n locations
ccaccgcgtctccaaaagctccgccagcacccccaccgcacaccgacccacttcaatcaccaccaacggagtccaagtgctataaatctccgacngcagcngaaacggcctagaaaaaaagaccatcacccccgaccataaaaaggaactcagaggaaaatnctgtcccaacagcctctccaacatcatcaaagaccacttccaaaacggntcccaaaaaagcgnntgcagcatcaacaacccctttgacccatgggttg

SEQ ID NO: 68110 - DNA, 181 bp, Glycine max
ctctctctctccaagagctcgggttcttcttcttaactcgcataaaatgaagatcctgcggggcgacacacttcttacattgaccaagttcccaagacctgttaaggcttactgcaccagatgatgaaagctaactccacagatgatagaatattcacgggatctacatgactcccattat

SEQ ID NO: 68111 - DNA, 345 bp, Glycine max
  unsure (1)..(345): unsure at all n locations
cggccgcgtgggcctgtnnnnncaaanngnnnnnagctgtgtaaaaaaaaaaaaaaaaaaagggaaaaaaaaaaaaaaaaaaaaaaaaaaaaaaaaaaaaaaaaaaaaaaaaaaaaaaaaaaaaaaaaaaaaaaaaaaaaaaaaaaaaaaaaaaaaaaaaaaaaaaaaaaaaaaaaaggggggggccgttttaaaggaccaaagtttacttccccgtgcttgcaaagtaatagtttttttttggggccccctaaattaaattcctgggccggggtttaaaaacggggggacgggaaaaaccttggggttaccaaattaaatcgctttgaaaaaaatccccttttc

SEQ ID NO: 68112 - DNA, 275 bp, Glycine max
ataaaaaaaaaaaaaaaaaaaatggggaacggggaaaattataaaaaactaaaccacaaaacaaattactcaataaacaaatctaataaataaatagaaaccttcaacttgttcaacaaggacgagtgatgattacatcatagcgccggcccttttaaaatatcaaactttcattgccccaaaacccaactgaatgctttttttatggacaccctaaatgaaatttattctgctgggaattataccattgacttccctgaaatcctaaatttcac

SEQ ID NO: 68113 - DNA, 339 bp, Glycine max
  unsure (1)..(339): unsure at all n locations
cccgcccggccccncggncggncngnaactgttcgcataatattcatcagaccatctgtccggcctggggcaatcaggacttccaaactacaaaccgtggccttcgtggtggccacggcggtgctactacgatccctcgcgcgctagtacttacacgctgaacgtctacactgacttcgatgcatactgatgcaactccgactatctgattatggttcgaactgactatgagaataaatgactgtcacggtctgacacccaatcttactgttcaccggcgtgcaactttatctcaaacctaacgcggcccctgatacaaaacgactgcgcgccaccctg

SEQ ID NO: 68114 - DNA, 426 bp, Glycine max
tcgccgcaatccgttttgcccgagttttgttccccaagtttctcttatgggggctccatggagctcatggctgtcccaaaacgcaaggtttctccccataaaagaggaataaggaatggaccaaaagctctgaaacctattcctgtgattgtcctatgcaagagttgtggtcgtgctaggcttccacacttcttttgttgtggtgggaaaccaaatcagggtaatactggtgaacataaaggtagtacaagctaagctaatcaagttgtttgtgaagcagcagatgttggttcgtgtgcagggccacccgtaagtaggtccatttggtagtaatgctttatttccttatttcttaagcaatgccatcattagatccgaggttttttgttttggaagataaatggagtagttggtggggaaaatact

SEQ ID NO: 68115 - DNA, 111 bp, Glycine max
  unsure (1)..(111): unsure at all n locations
cccacgcgtccgcccacgcgtccgggaaagnnagtgcaaactgacgatatgactgtgctgacggtaaggggtggantaaggggcgtctacaacctccgtcatctttttgcc

SEQ ID NO: 68116 - DNA, 305 bp, Glycine max
aagatggcgcgagtgatcacaggggagtggtacacggaggctgtgctattatgcgccaaggccggtgcgtcatgcgtggaggaggcggctaacccaatacgaatggtgtttggcgtgtaagcagaagcggatcggatgatcgttgagtgccggcgtgcgatgaagtttgctaggttcgtgagcaaggatggaaagagttaccaaaactgggaatatatgaatgataagtatgagatattttctcacaatcttaagttattcggtactacaacatgaaacgttgggcctatactttgtctgttaat

SEQ ID NO: 68117 - DNA, 144 bp, Glycine max
tatccgactctcggcattgctctgaatcgttttcctcatcttccattttcttcaaaatcctcgtgacagatctaatctaatcttccttttgtgggtgttttaaacattgcatccatatggttggttatctaggatgctataaaa

SEQ ID NO: 68118 - DNA, 399 bp, Glycine max
gtcccacacacccgcgcacgattcgaacggaacagcatctccgacttttcctcccaagtttcccttcgattttcccgagaaaatctcgttccgagaaaatctagctcaatctctgcaacactcatatatccacagcgcctcatactcatggatcggaggagaaacgcgagtccggtgtacgcgcggcagtggagcggcggttccagcagcaccggttcttcgtcgccggcgatgtcgccggctcatcctcagtcacgcctcggccctacttccgccaccggtctgtacaccgtcaagcgcacgcaaaacgtggccgtcaaagccgccgcgcagcgacttgctcgcgtcatggcgtctcaaaccaccaccgccgatgacggcgaggacgacgacgatctc

SEQ ID NO: 68119 - DNA, 257 bp, Glycine max
atacagtgacgagaagctcagagttagccggggaaacaacagtattcttttcgtacatgttcgtaccgatgcattgaggtgacctagtacatatgtgattgtttagaagaatagacgaaacctttgcgagtgacaattttaaatttgtgttcaattgggtatttaactgtacgacaatgcaaactaaatataaacataacatggacgtactacttgttcagcttccatttcccaaaggaaactggatcattttagat

SEQ ID NO: 68120 - DNA, 189 bp, Glycine max
  unsure (1)..(189): unsure at all n locations
aagcacaacnncnnncaccanggcananacaagagacccacnngcncnnncncncgganagaaacaaaggnggggncnnnnaacgggaanagcnngaaacngagagnaggcagggagagcnngngccccnngggaggngcagngnnnaaaaanggggaagagaaggggngcaagagggaaaagagggcg

SEQ ID NO: 68121 - DNA, 422 bp, Glycine max
gtaataaggaccacatgtctgctactcggacaatggataattctgtgcaggaaaaacgggatgattatgacaaacttgtcaaacaaatggggttggaaatgcgtgctcgcccttcagataggacaaagacaccagaggagattgctcaggaggaaaaagaacgtttagagcaattggaggaagagcggcagaagaggatggttgctgctgaagattcaagtgatgaagacaatgaagactcagaaaagccatctgaacagaaaccaagatctatatctggtgatgatcttggtgattccttttctgttaatgaacaaattatgaccaagaagggttgggttgatgagattcttgaaagaagagatgaggaagattcttctagtgaagatgatgatggtgaagatcctggacaatttggaagc

SEQ ID NO: 68122 - DNA, 439 bp, Glycine max
tgttgcacaactagaggtgcaaaaataaagtacaatgattccattgtgcaatgttttttgcaattctacttatgcaacaaaagtgtattttcattgtgcattgggggaaagatatttttgaaattttgaaatgatggtaaggaccaatagcaacccccacatataaatgttctacttgaattttaaatctttaacattatgtatttttttggaaagtccaatatgtaggacagtttcagacgcagttcatgtgcttgatgtcattgttgggttcgacccaagagaccatgaagcgacaaagtcagcggctaagcttatacctcctaatggatataagcagttcctaaaaatagatgggctcaaaggaaagaagttaggaaatttctagggacacctagcgttttgctggtacatccagcagaagatgaaaaagtctaat

SEQ ID NO: 68123 - DNA, 423 bp, Glycine max
  unsure (1)..(423): unsure at all n locations
gcgcccacgcgtccggctttgtgaaggtgatgaaggtttccagatacggtcgtttgttctaaattgttagcttgagctgactttgcacacagtttgggatgaatatcttattcattgatacaaatttgtcgatgacctaataataccattaagcgttcattagtgccatctgagatgtatttctattgctgaagtgcggggagaaaaaaaagaattaaaaaagcatgatgattttgcccccccccaaaaaaaaaaatgaaacatggtgattgatttgttttgtaaaaaaaaaaaaaaaaaaaaaaaaaaaaaaaaaaaaaaaaaaaaaaaaaaaaaaaaaaaaaaaaaaaaaaaaaaaataaaaaaaaataaaaaanggggggggccgttttaaaggatccaagtttacgtacgcgtgcttgc

SEQ ID NO: 68124 - DNA, 144 bp, Glycine max
cacatatttctctaaaccagtaagttatcttctagtatttttcaaggaacttaagggttcaaacctaagaaggtggaaggcatggcaacaacattggagggcgcaaccaggtctggcacttttaaaaccacttcttttcttagg

SEQ ID NO: 68125 - DNA, 182 bp, Glycine max
cttttgaaaacactccctctctactcatattcttcttctttccttctcacacccctcttatttctcaacaaaataatcttaatttattaccatcaacctatttttactcacctctattacattaaaccatcttcttttttccacaacataaactttcattcatatccatttctaaattttaa

SEQ ID NO: 68126 - DNA, 201 bp, Glycine max
tcagggcgaaaaacaccacaacccgctttccacaccacggacgagattataagccagaaaaccatctggttacacacacaatattcaagcctttgatactatacttggttaacaagccacgatgatctttggggtggctatgaagggtacacaaacatttatcaggatagccactttgtggggctatgaagggtacaaaaa

SEQ ID NO: 68127 - DNA, 193 bp, Glycine max
cgtcgcgtcaagcgacgcgttcgattatggcgatatcgaaaagcccggatgtcgaggaattgattacggaggaagtggaccggctgatgggtccggaccaggagtttccttcgattgagcaaatacgacaaatgcattacctgaacgcagtgattcacgacggcttgatgctggaccaaccgattcagttata

SEQ ID NO: 68128 - DNA, 133 bp, Glycine max
cccccacaaacacaacttccaacttttctaataaaaaatattcccggcattaggtaccaaattatcaattcctatcatgatcaatatagtattgccattgctacacatacaattcattacaacaccctttaac

SEQ ID NO: 68129 - DNA, 246 bp, Glycine max
tgcctgctcaagtacaagtgctacactcagactgtcaaatgttgcagagagcacaagcgtgcagcggcgtaagtgttaccctaatactaataagctgaaagttatagcggggtttggaagttgttctggagtggcagtgggtagcgagagaaagaaaaggaattggaaaggttagggttcggattttggcgagctctatgtccgacgaagcaatgagtgctcattcaaaagtgactcagaaagtat

SEQ ID NO: 68130 - DNA, 206 bp, Glycine max
caaagtcatttagatccattaggtaactaaatgactatgtagacgcgtgtgtcgtcacgataattacgtaccgataatgcagccgatctagcatctaaatgggtgtgtaatattattgtctctaattcattttattcgcactgtaaacaaaattcagattacacaaatcgttcatcattacatgaacatacagattctaggttcat

SEQ ID NO: 68131 - DNA, 283 bp, Glycine max
  unsure (1)..(283): unsure at all n locations
attctcctttattaatttttaatcctttttttctccaaatctaacgggcccctcttcttggcaatcattatatttctcttcactcattctatctaataatttcacattctcttttctttttttcttaccatttactttatttcatctctaccatattacatatccccaaactatttcattacttttccctataatcaattccctcatgtttgctcactctgtaaaggctgtatcncattcttncactcgccggactttcaccgtctgangagaaccaccaaac

SEQ ID NO: 68132 - DNA, 128 bp, Glycine max
cttcccgcatcacgcccaccaccaaattatcctcatccaaacaaggcacaattaccatgtccctaaccccacacccctactacctccattccttcaaattccatcccatcaaacaatccatcttatca

SEQ ID NO: 68133 - DNA, 176 bp, Glycine max
cccacgcgttcgtacacgcgtttgtccacgctttcgtccacgcttgcgcaccgagcttgggacggaactttttgataactagctgagtgaagacgacatctgccagccattccaactcacagagaggctattatcaattacctttccttgattgttccgtcttatactctctatag

SEQ ID NO: 68134 - DNA, 263 bp, Glycine max
ccctcgcacaggcttcaggcgagtttgctgtaatttgaatccccggtattggcggcaatggtagctatttgtagcccccaaaattctgcacctgtcaaacaatacccccattaatcctcttatctttttcggggctatttccataaaaacacccgccatgctctttttagatggattgtcactctggagacttcatacatatacgattttgctggtgtttattcccggatatacaacattgtagactactggatcaccctcta

SEQ ID NO: 68135 - DNA, 308 bp, Glycine max
ttcaaattacttccctatcaactttaggtggtattataaagggctaccatcctaaccacatgttaccaataattataattctattccataaatgcaaccttataaatcattaccacatccaattaaggcagcaatctctcaaattacccaatcctcacaccctaatttattaacaataaataacaatactcttctcattcaatctcctaattttaatcattacaatctaaatcccttaaccattatccattatatttcaaatcttataccaacatcctctgtaatttcatttccaataacatatattt

SEQ ID NO: 68136 - DNA, 321 bp, Glycine max
ctttgcaaaaaccctaaaccctttctcattctctctcaccaactctgcactcagcaatctgaacacaatcctcagaccaagaatcatctaataaagtcatacgacaactacatttatatttcacctataacaaccttctcacccaaccttttataaccacaaatatcactcaaatcgattatacctttatttcttaccctcctatttgcccttttaatttaatacaaaattaccctaaaccttttcatccaaaacctcaacaattttacccacatactctcaattctacatctcaaacttttaaaaattcaaccacactca

SEQ ID NO: 68137 - DNA, 215 bp, Glycine max
aaaacccggatacttaccctaaattcatccatcaattttaatcttaaaatctctaatccaaatttcaactcatacactaactcatcaaacactatacttttatctcaatagacacaaaataccccttctcttatttcctaccacactctaaccccacaaaaccctacaaccacctaaacaacaatcataaccttcactccaaacactaccaactc

SEQ ID NO: 68138 - DNA, 391 bp, Glycine max
tttctttttattaagtttcatgtttttagaaacactgaacaaaaaaggtacaggtacatttagttgaggaggcagatgaagctgcatttcctgcagcaagtgaagctgcatttcttgatctgctttcattaatcatggatagtcattattataaactattcccttaactgaatatacataattcacatacttattactactattctaataatacactgatcaatatctcacacttgcttcatcttcaaatagtatccatcatactaatatattatactgtttataaaacatttgtattgaccaatctttcttcatattcttctatttctaatctacacttctctctatatatatattttttatatcatctaaatttatttaccaattaatt

SEQ ID NO: 68139 - DNA, 471 bp, Glycine max
  unsure (1)..(471): unsure at all n locations
gctactcaatccggaagcactgacaccgtcattaatcctccatctcccatcaaacgacgcgtgaagtggaagctagcccgcaccaagaaaattggtgacatgacatctgaggcaacaaaggaaatcgctgacaagattgtaaatcactttcaattcataattgtaattattttttattattgtgtgattgagtatagaataaatgtgttcttcacaggatgcgcttgaggagcaggcctcacagggttcctttgttacccatggacgtcatgatatattgactgctgccattgggcgaccagaacaccctggtcgtgtgcgtgctgtaggagccggtataaccatcaagcaatactttggatcagcttcaaggacctcctncattgctcccgaataactgcaacagttgacgcaacaaatcaaggaccagctgaaggattcaatcacagaaaaagtcactcgacgactaat

SEQ ID NO: 68140 - DNA, 224 bp, Glycine max
ccttacaccttacgaagtattaagtttacataaacacttaataaatacggctccatgaagcttattactgaggaagcggactatacgtcattcacttaagcaagtgaacctgcatctcttgatctgatctcacttttcatggatattcatttgtatgagctattcccgttactgattatacataattcacatacttattactactattttgataatacagttat

SEQ ID NO: 68141 - DNA, 449 bp, Glycine max
tcatttatatgataatatgacagtcatgttcaaagaaaagtgctaacaatacattgtttattatgggttaaaatttagtagaaatttcaaaatgagactcattgtataagtagaacctgcaaaattttgtaatttcacataaatttcaatcaatagtagaagactagagagtattcaaaaaagtgtattagagagtgttggtaccatttctcaaatcatgttaaaatatgacatgagactaatgagaagactcattatcatttttgtaccataactcctattctttattacatacaaatagctacaaaaagaaattgttctattttgttttattcaatttcattaggttggaagtaccattagtaataataacaatgagcaaaatgatgtgagttgctggcaacgacctgaagatatgacatatgagagaccagtttcaatttgtgatg

SEQ ID NO: 68142 - DNA, 254 bp, Glycine max
cacaattatacttattaactaacataaacctacataattttctaatttcacataaaattcaatcactaatacaacactacaaactattcaaaaaactctattatacaatattcataccatttctcatatcatcctaaaatattacattacactaactaaaaaaactcattatcatttttctaccataacttctattctttattacatactaatctcttcaataagaaacttttccattttcttctaatcaattt

SEQ ID NO: 68143 - DNA, 205 bp, Glycine max
ttttattaataaaacctccaaaaattttcaatttcacataaacttcaatcaataatataatactacaaaatattcaaaaaaatatattacaaaatattattaccaattcctaaatcattttaaaatattacactacactaattaaaacacttattatcaattttataccataactcctattctctaatacataccaattacctcc

SEQ ID NO: 68144 - DNA, 269 bp, Glycine max
ttcttattcatcacttccctattcttacactccttactttaaatcattccactcctcatatatctttcatatccactttaaatatatcaaccaatcctctattctattatccatatatttcactacctccttttttcacccttactaattcatcactccattgtttaaccacatttccttatatttttcaaactcttacttcctcaatatcaacatttactaattatctaataataccaactattttaaattttaaacaattcctacta

SEQ ID NO: 68145 - DNA, 191 bp, Glycine max
  unsure (1)..(191): unsure at all n locations
aaaacccnnacccacaacacnacacactccannacaagaaaccnccanacaaatagaaatcaacagcacacacacacacacatatatatatatatatcatgtttacctttaatcattcttctgatttgtaccatatttcccctaatctctcatcttccttgtacacatcctttctcacttctaaaatctct

SEQ ID NO: 68146 - DNA, 468 bp, Glycine max
cttccgatcctgtttttgcttcctctactatgacttttaccaacgttttgctgagcccgtggaaaaaattaaccaggacagctaactacaatgcatgggccgctgctgttcagctttggttccaaggccaaggccatgctgatcacttgacatgcttcattgtgtagtgtcctttggttctcttgctcctaaccttcaaccacaatttcaagcttttcccacttgttatgaggtatggaataaggctaagaaggtctattccaatgatgtccatcgtctttacaatgtcataacctccttgaagaccatggaattggagaacatggatatgcaaactaccttggtaagcttgaacgtttaattgatgattataacactctcatgccttttacaaatgatgcagatacgttttatgaggaacgcagccagttctttatggtccttgcccttgttggccttgcacctaaa

SEQ ID NO: 68147 - DNA, 244 bp, Glycine max
  unsure (1)..(244): unsure at all n locations
accaaatacaagaatacacaacaacaaacacccacaacaacaaaaagaccatttaaaaacgcagggccgcccaaaacacantaccacaacaccacnacacaccaaaacaacaaacccaaacacaataacaacaaaacataacacacacacacacaaatatcaaaataaaacaaacccaccaaacatccaacataaaaacaataccataacacccccatacacaaacctaacccaaacacaacca

SEQ ID NO: 68148 - DNA, 400 bp, Glycine max
gatcctgttattgcttctatttactatttactcttaccaacgttttatctcagcccattgaaaaatttaacacagcacatctaactacaatacatcttcctatacttatcacctctgtatccaaacccaattccattcttatcactttacattcttcattatctactttcctttgatcctcttgctactaaccttcaaccacaatttcaaacttttcccacttgttatcatttattaaataagactaacatattctattccaattatgtccataatatttacaatgtcataaccttctttaataccatcaaatttcaaaacatatatattcaaactaccttaatcatctttaacatttaatttatgattataacactctcattccatttacaaattattc

SEQ ID NO: 68149 - DNA, 306 bp, Glycine max
acccacacccacctttccaccaacatccccttcctcacctccccatgctaccatctaaacctgcggcacgtccctcccatccttccaccccaattcccctctccacttctaaaactcctccctccaccactccaccatactcccctacattcactaattcttcataacatccattctatactccctcacccaattatcctaccaaaccctaaacccatactccaaaccctctatatttcctacttccatctaactcctacaatcatcacccatctccaacaaccaccactaccacttccacaccca

SEQ ID NO: 68150 - DNA, 206 bp, Glycine max
cccttgacttggggcgcacggtactgtgaaatattatgcatggtatcatctctaggtgaaatgctactaatttttcattttgttgaaacctatatatattcctgaaaaatccgcagataacttcctagaatactaattgacattgctaaatacttgcttagacactgtgaatgtatggttgaaagaaatttttcatgtatttaatt

SEQ ID NO: 68151 - DNA, 337 bp, Glycine max
cggacccaggcaggctttatttcacctacattgcatgatcggtgtactgagatgctgcatgggaacgcaaaagataacgctgcctatcagagatggtaatgacaagccatccactatagccttacatcctgaatcagaagcatactcatctaagacacactagataaactactctcgtacaaagtggctctggcagtgatcatgtatacacaccatctgaccctattgaactatgcaactcaaggccatggaatacatattaagaactaatcagggtcacaaacggcttcttaacacaaaatctttaggactacagaggatccgactgggtgaataa

SEQ ID NO: 68152 - DNA, 363 bp, Glycine max
cggacgcatgcaggcttgatttcacctactcggcttgatcggtgtacggggatgctgcatgagaaggcataagagaaagctgcctgtgagaggtggtaacgacatgccaaccactctagtctcatatcctgaatcagattcatactcatgtaagacacactgattaactgctcttgtacaaagaggctctggcagtgatcatgtatacacaccatctgaacctggtggactaggcaactcaaggccatggaagagatatgaagaactaatcagggtcacaaacggcttatcaactcaaaatcttcaggactacagatgacccagctgggtgaataaaaggagccttcctgatcggagagacat

SEQ ID NO: 68153 - DNA, 281 bp, Glycine max
cacaacgtccccttttacatggaatttgcatttctacaaatagcaagcgatacctaataatggaggcgggtccatcgactattcaaggagatcggaactcaaaccttatgaatcaagccttccaacatcaacagcttactcaccaaatcaaaacttaccaaagaaattttatgaattcaattatagctcctaaaactaaccctttatccatatggaaaactcatcctaaaagaataatgtctgaaatgcataagaaacttataccaccttattcactatac

SEQ ID NO: 68154 - DNA, 353 bp, Glycine max
gacaaacgtgctcttttgcatcgtcctacggttactaatgttagcatgcgtaattatgaaggggcggaggtgctaaccactattgacggagactagaatccacactttaagaaacctctcggcatcaatgaaaagtattctcaggaaaggaaaactttccaaggaactatatcatagtcaggagtaactcctgaatctaaacctttccataaaattgaaactgctcctcatataaataattgccaattagagaagatagtgcaactaccatacgcagaaaacaatcactaggactctagatgtcacacaatcagtgcatcagtgaccaatgctccaaacgtagccattttaaa

SEQ ID NO: 68155 - DNA, 405 bp, Glycine max
cacacgcgagctcgttacgtaacattgtgctttttctgagaatcaagtggatacctaataagggagacgtgtaagacgaataacaataagaatatgtacatcgtagcagctataaagatattccaacatcgacaacttatcagtggcttccgaatcaagataattgctcttatgtatgtcataacacattcaaagatgaccgcgaatccgatactttctagcatgccatacttcctacaatatgatatgctactgaatcctagattcgaccattcactagcagcattatttctgactttacagctagtgtaactgttggaactaaccctactaataacatgttctattattagcacaaccactaatgatttgacgcatgttacctaagcatgaggtcatgtgtct

SEQ ID NO: 68156 - DNA, 438 bp, Glycine max
aaaacacagtagatttagaacaatcacaaagttagtcaaccaacccagacaacttaatacagggagccttgaaaaaccaaacacaatacaagcgccgattgatctacttaacctgatatcaactccagaacctatcataaaaaatccgtcaagccttgctcactctatcttagccatgacctattataacactacacaagaaataccaatcacgacaatcacgatacacacatcttattgaattgagccacatacacagatacatactcaatacccttggaacagattatgcactagagtacccttatgaaacacactgatcttataaaatcctcaattctatcctataatcaatttcaactttttctatatacttaatatttcatcactatatcatacaattcattttttactgacatattcttatacttataacaa

SEQ ID NO: 68157 - DNA, 336 bp, Glycine max
acgcacccatcaacagtttatcactatggaacctttctctcactcactaggtatcatatcaagggggagctgatctgcatttatatcgcaaagtagaaacaattatgctcgaaaaactcccaaatggtaaatactactacacttaaacactgataccgacttcatctagctttagcccatcttcatatgatagagccattttttatctactataactcattatcaaatggatgcgatatataatcccttattttctcatcaagaggcgtctctctggatcattacaaacacaatacacatttcttaagatgaaagattgctagatgcttattgaaa

SEQ ID NO: 68158 - DNA, 404 bp, Glycine max
aaaatattttagtggtggtagtatcacagtacgagtcaacttatccggacaatctaagccaggcattctggaaaagctaaaatcaatggaagagctgattgggctacttaacctgttatcaatggaagaacgttgcagattaatagcgtcaagccttgctcattctagcttagttatgacttcggagaacattacagaagaaataagagtgaggggaattacgggtagctccttttagtgaggggagccacctaggcagttttgtattcaatacccttgtagcagctctgctctgggttttcttatgaaatacactgtcctcataaatagcactattctattctataatcatcttttacttgtctcaaaaaaaaattaaaaaaataatttataataaaaattaa

SEQ ID NO: 68159 - DNA, 402 bp, Glycine max
cccacgcgtccgcctcgatgctcacttaaaccaacccgatgtcaccacgttttacacacatcatcctgtgctttcttcaacccaaccccaagtaatgttattatgattaccagttagcactcatcttgcactatcacaatccctccacttggacttgtataattaactaactaccatcatcttctattatggctttcctttccctattcaaaccatattctgtttcggttaaaaaaaaaaaaaaataaaataaattataaatataataaattttatataaaaaaataaatatataacattataatattatatattatattaaatattttaaatttaaatttaataatttttaatttatataaaaaaaaaaaagggggggcccttttaaaggacccaattttt

SEQ ID NO: 68160 - DNA, 150 bp, Glycine max
ctattattgtcatatttatcattcatttttgctttgtgtttttcctaggggacatgatctccttataattaagtgataattaactatatatgtgtaagaaaaaggattgaatttcatgcaatcccataaccggtatttgtaccttttatc

SEQ ID NO: 68161 - DNA, 245 bp, Glycine max
attataaccagattttccgtataacagcatgcgtaaactcatcagtacactctactcccggcgtttggacaaacctaacattaaacaaagctctaattaacgctacataaccctgtatcaatagctgaacgttccagatcaatatcgtcaagcaccacttattataacgtaattatcacttcggagaacatcaccaaagaaataagagtaagcttaattactggtactctacaatagtaaaaaga

SEQ ID NO: 68162 - DNA, 398 bp, Glycine max
  unsure (1)..(398): unsure at all n locations
aacaatttaccagctatacttgttccttttgaaggttagaagtgctacaatacaaacaatggcagctactcaggaagatgtgaagcttttgggtattgtgggaagcccatttgtgtgcagggtccagattgcccttaagttgaagggagttgaatacaaatttttggaagaaaatttgggcaacaagagtgatttgcttctcaaatacaaccctgttcacaagaaggttccagtgtttgttcacaatgagaagcccatagcagagtctcttgtgattgttgaatacattgatgagacatggaagaacaaccccatcttaccttctgatccctaccaaagagccttggctcgttttctgtccaaattcatngatgataagattgtgggtgctgtatgga

SEQ ID NO: 68163 - DNA, 273 bp, Glycine max
aacaaacctttcataacttcttttcttcctccttgttcttcgggttgctgttgtatacgcatcgcgcatggcagctgtccttcgactctggattccacgatggaagatattatcttgtccaccctgacttgatagcaaatctttcatgaaattgagaatagctgctgctaataaacaagcttccattgatatgggggagctcaccgcgagtggtgagtatgtgactatcggctaatttccttcatccaggacatattactcaagtaaagtttc

SEQ ID NO: 68164 - DNA, 176 bp, Glycine max
acgcgtccgcccacgcgaccaagaactcttgcacgcgcatttatccaaccacgaataagccaaaaatacctgggtgcactacaacggctaacaatcctcctctaacagtcaataacgcaccataactaactcctacccttcatatgccaaaccggacctcatcgaccccaagacac

SEQ ID NO: 68165 - DNA, 403 bp, Glycine max
ggcgggtgcagcggttatgcgaatggaaacccggacccgaacgagatgggagaggttaggacctagaatataggatgcgaagtcgaactcatgcaaggactaagctatcgctaccttaatatctgactgaacacagaaatatactgcagcagatggcgaccacatgattacggcaccaaacacttgatccagcggaacgcgaacttcaaccactagcgactattcaaggtcaacactgactctatcaacataattcacaacggtctgactctcacgaaatgctgcagctagattaccgacctggacggaaactggtgcatatgggaatacaactatcgtgacttctacgtatctcgtgacacatacgcttgatactccatcgatctaatccgtcatcagggca

SEQ ID NO: 68166 - DNA, 151 bp, Glycine max
ttcgacccactcttcctcttaaaagccatagtcttccctacaactccatacacaaactcatcagcacacatttaaacctgcgtctgcactctcctaacattcaacaaagctctaattaaccttacatattcttaatctatatcttcacctc

SEQ ID NO: 68167 - DNA, 276 bp, Glycine max
tgccacgcctccgtacacgcttccagacgaactgttcgaacatcacacattcgtgcacttcatgcactcaaatccttctctaggaactcttgctacatttatagaagaaagacacaccataagatagacataaccatacccttccaccattattcacagaactgataatgccactgaactcattatatctccattggctctaacatctcaattcccacttactatatgaaccctataataagtcaaacttaagattccccattctgaatttatata

SEQ ID NO: 68168 - DNA, 377 bp, Glycine max
  unsure (1)..(377): unsure at all n locations
ctgaggcattcactcatctacacctaagcattttagagagctcatgcatgtcggtggcctaggtaacgatgaattgaagagccatgtacaaaaatacctactgtatacgcagagagttcctgttgcatgaactaatcaaccatacgtgggtctcggaggtttgtagatgtatcaagatcattacaatgactcttcaaaagttagcaactaagngcacattctgctcatagatctcttaattactctgcacgatatctacaaggtacattatctactgaaagttgcagtttagaacatgatgaatatgcaattaactgtaagtatatttgggaaaatgatatgaacaaaccaagaaaagttgatgtataggatactac

SEQ ID NO: 68169 - DNA, 211 bp, Glycine max
gcgtacgcccacgcgtccgcccacgcgtccgggaagaatggcttttgggcgagatatcgggaatattgggggccatttgctaaattccaatcaagttgatgtggttcatatgaaccgtgtgaatataaacgtcctttgacaaatggagctgagccacagcagtgaccagcgcacgaaggctcatgaagcaaatgaacacttatgaagatag

SEQ ID NO: 68170 - DNA, 311 bp, Glycine max
aaaaaattttctcatcctatatttttaaaaataacacgagcctatttcaggactctttctaccccatccttcacttacaaatcccacaatcttatcccatcatccccctaattctcaaaatcatcattaccaataccctcaccaaacaatcctactcccaaaacccattttactacccaaacacattcaaatacttattcccattctctttctaacccccttactacctcactatccaattcccaaattaactaccctattacacatctatactttcctcctacccataaacctttaccataaacccttaa

SEQ ID NO: 68171 - DNA, 214 bp, Glycine max
ccgaacacccagctcccataatacataccatttaaccacacccacccatcaacattgcaaaattcggcaatcttcacctccaaaaatccaccaagaatcatcctcctcttaacactcttatccacacaaatgcttacccacctcgatccaaagatacaatctactacctgccctcgaatcgtcaaccccttcatttcttatgactatgaaccca

SEQ ID NO: 68172 - DNA, 466 bp, Glycine max
tttcatgccaaaaggtcaacgtaacctgctacgattgttataaactggagttgttatcatcacaatgttggatgtgaatggtagttgcgggttttatatctctagttgtgttctccacttagctgaatggcacccattggaatagcaacgttgagtagggcttgaagccctgtttttacttcctctatcaagtaagaaccttagcctagtatttcatctggttgacaagatgattgattgaggatttgattttttattgttgttggcgtagtaaattgtttttttcctttctttttttagattttttattttttagggtgagagatacggcaattacatttaagattcaatcttcagatgctcaataagactctttcttttgcgatggggtgctggagttgctttgggttcatcaggacacctaaccgtcaaagtcaaaggtctaagcctactactaacaataatc

SEQ ID NO: 68173 - DNA, 369 bp, Glycine max
cccacgcgtccgcggacgcatccccatagaactatctcgcttcatcatgaatcggtaattcacgcacatatcatcctactacggctcaacaccgcatccatttcaaccaacttaaaaacagaagattctctatgatcaccatgatgatgcatacaaaagtcaatatgattgaacaaagtaccttccaattttgtaccaataaaatgacgtctaaccaattaccaataattagtataaaaaagtcatatgttctaatcacaaaaaaaaactcggccttatgactctttacatatcattaactaccaaattgattgaaatcaattaatacgacaatattactcatatgaatcatctcacattgacattcat

SEQ ID NO: 68174 - DNA, 167 bp, Glycine max
cccacgcgtccgggaagaatcactccctcattcatagccacaccacaccatggcctcaaccggcgctttggctatatccttaattctacgctctcccaaccgccagactctgacccgaatagcgaaccataaattaagagtgacttaccggctaccgtataaccggt

SEQ ID NO: 68175 - DNA, 226 bp, Glycine max
aatctttaacataacaacaacactgaacaatttttggctctctactaaatataactaaatctttcatctacactcactctcaataaccttaactttcaccatttccctaaccatccatacttcttcattattttctacccaaacaacaaactctccactctcttttactaaatcttctacacttactctaatatctaccaaacactcacaatttctttaccaccaa

SEQ ID NO: 68176 - DNA, 451 bp, Glycine max
cccacgcgtccgcaagaagttgggtcaaatattgatgaagcttcaatattaaaagtgtagatggtaatatccctcttagttatattccctcctaggattgccttatctagaagcactccaaagatggtttactgttaaagcgggatatcatcaagctgtcgatgctaattgtagattcttagcttactctagccacacccctggagatttatggaagacactcaggaagatcaaaactttacagaagtgccagaaccttgcttggacagcctgtaaaaatatcctcacagtaatggtaaatctgaaatctagaggaacgaatgtggatgaaaatgatcgtgcttgacttccaatttcgagtttatgggggagaatttgtgaattagtctagaaatccgatcaaattcaatcttcaatctggaggaatgaaacttggcctctgagatgagct

SEQ ID NO: 68177 - DNA, 233 bp, Glycine max
cacgcacgcactgagatactcacaatcacatagcccttttaaacccatcacatccattatggcacctggggctttcacaatcctctagcacatcttatctaattctacgatggacaatatcaatgccttaattaaagtatcataaactgttaatcataaccccaacttacataacgcatccatatacctttctcaggcttctcttaataatacaaaaaaatataatcctgaac

SEQ ID NO: 68178 - DNA, 236 bp, Glycine max
ctgacgcgttcaatggcttctgatgtccaagcgcatatgaatgtatccacttacaggaacggggactttcatagcatcctaatattatgaatggacattcacagcatccttcttaaaacatttttttcaagaattccaatctcaggatctacctccagatttaacttgtttaatcacttaacatgcattccataaggcaagtgttacccttcttaatagtccactaagcctaaaaa

SEQ ID NO: 68179 - DNA, 476 bp, Glycine max
aagaaattagagggattcctccaaacttgaaaactttctctgcaatggattccccagccttgacctcctcgagcataagcatgttgctgaatcaggaactgcatgaggctggagacaccgactttagtttgccaagagtacagattccacagtggtttgagcacaagaatccgggacggccaattcgtttctggttccgtaacgatttcccagccataggtgcttgcattgctaagtcagattttcagggagttttcgattatccagatctcaacgtgttcattaatggaagggaacataaacattacggtcgtacccctgtccttgaaaaaccttgtacagttctttttcatcttctaatagaagatgatttagatgtatcactgttagagaacgaatggaaccgtgcagagattgtatgttatggttcatgggacgaatgctgaatccatgtattgaaagagctaaatagcatg

SEQ ID NO: 68180 - DNA, 467 bp, Glycine max
gaagagcaactgaaccaccaccattgtttaggcatgtcctctcaacgtggtggtgacacttttacaactcaacagtcagcagcagacgtggttgccttaatcttttgtcaaaagaatgttaacaatggcaaaaggatttgctcgtaagaatttaatggaagattatactggaagttaaaaaggaaaatacttgcggtgaaatttgttctggtcattggaagaacaagaaagaaaaaaaacgtggttattaaaacctttttttttttacaataaacgtgaattcacatacccatagacttgtagagctaagttctgccgtgaatgaaaggcagagttgcagattaatcatggaatccttggcacaagtgttcaagttggcaatgtgccatattttggtacaattttgatacaatttggctttgcaggaatgtccataatttgtaaattcaccgaggatcaagggctta

SEQ ID NO: 68181 - DNA, 327 bp, Glycine max
  unsure (1)..(327): unsure at all n locations
gacccacgcgcccggaagagcaaccgaaccaccaccacngnnnaggcanggccccncaacgcagnggggacacttggacaacccaacagncaggagcagacgngggcgccccaaacatttggcaaaagaacnggaacagnggcaaaaggaanngccccgaagaaaacaanggaagaaaanaccggaaggtagaaaggaaaatacattccgcgaaatttgttcttgttattggaagaacaagaatgaaaaaaaacgattttatttaaacctttttttttttacaataaacgtgaattcacatacccatagacttgtagagctaaattc

SEQ ID NO: 68182 - DNA, 432 bp, Glycine max
gcgttatttcctaggctgctgctattaatcaagtccaatgcccatgagtgataaatgccttttattgtgtgatgcatgaatatggtgtttactagagtgataaataatttctactgtatcaccatgagataatgaactagatgcctgatcaaatctttaataatgattgaacatatgaagttatatggttgcttttggttcaaatttttatagttttgttctctgtatgtattccagtggcagatgcacacacatttgttctggaaactatcgaagttttttttctcttagaaaataatacttttgaagtatgcacagcatatggatcatttaacagaagttgcagtactgtataagagtatggggttgtgggctcaataagtaagttgtgtactggtgtataagtatgtggagataacatgtttttttttc

SEQ ID NO: 68183 - DNA, 175 bp, Glycine max
  unsure (1)..(175): unsure at all n locations
ctaacacatacactactctntctctctctcttattgnntggccaccaagagganancactagagatcaccagaattanggaaacgagtcgacaaccggatctggacttccaacgcacctactctaacttcaaggaggggagcatacaataacggctcagagcacaacaagaaccc

SEQ ID NO: 68184 - DNA, 343 bp, Glycine max
cccacgcgtccgcagagccaagaagaagaagaagaataccaacataatccacgagcatcaacgggataaagcttgcaaatgagaagaatcttcagattaaaggtaataagaacacacaagaataaagagaagatgaaacgctcgcgaatgaagggagaattagagttgccacctgtgttcagatttcaccctactgatgaacaattggtgaatcactactctggtaggaagggcgctgggtaaccagatgctgttcccgtcatgaacatgtcgatttgctgcaatttgatgcatgggcgcttgcaagatcgattagctacttatgggttaccttttgcgtgaa

SEQ ID NO: 68185 - DNA, 251 bp, Glycine max
acgcatctttactccaatgcaagaaatgactggataccatcgaactcgagaactcaagagcaaaagtttgaagatgctacttcattgacgaacaaacataagatgagctcgcatggacaaggaactagcactgagcatctcgaatgatggcagaatatgggtttacaccagggtttggatttcatttgactaataaactatcggatcttcactacatgagtgtgaaaacttcttgtcaaaaggactttact

SEQ ID NO: 68186 - DNA, 279 bp, Glycine max
cttgggactcacgcttattttgctctctcattctacctagctaatcccgtgggttatcaacgggatacaaagatcatggcagaaagtctcatcaataaacattaagaagatcgagtagtaacatgacgtgattatacgtgcagaacagacaccgatctgcaaaatagcatgtactaaagaggcaccggtccgatcgcaatatccagcagatgctcagtctgccatgataatgggacatttactttaactctgtatttatagcgcagcctgagccattta

SEQ ID NO: 68187 - DNA, 283 bp, Glycine max
cccacgcttacggacacaccaggggcaatatcgatggacctcatgagaaggggacaattgctgcggtcaacaattgaccttgcagctttccattcgagggtctcctactgctacttgtggttgttcccaatctggaggcaaaatttgcccttgatccaaaggctatttaatcggtaattgcatgtacattggcgctgggtttaaacaagggcttaccattacttgtactaacgccttaacttttaatgaactggttagaatggcatacgaacctgttaaattt

SEQ ID NO: 68188 - DNA, 259 bp, Glycine max
  unsure (1)..(259): unsure at all n locations
gcacactttgctgtaacatatcacttnnnnttctgtatgnngggcattcagcgtatagttcgagattttattatactttgtataagattagctggaacccaaccattcaatattcctgggatccttctaattgttgacatgacaaaatatgttgcaaggggccatttttcttatctttaggctaaacatatcttagacaaacttgatttggatagatattattctgattataacagtattctttgcaaacagtaaccta

SEQ ID NO: 68189 - DNA, 183 bp, Glycine max
ataagtcacatatccaatttaagcgcgtgcacgagcccattaacgtatggcgagaatatcgggttatcttcagcccccaaatatccaggaagggagcgatgctctttttaaaagtgcttagctcctagcaaaaggttgggcacctggatttcaagataaaattttggtggctgctcggggaat

SEQ ID NO: 68190 - DNA, 330 bp, Glycine max
cccacgcgacggcacacgcgggagcgagctcacgaacagaacagcgacggggacaaagaggggcagctactaggcggaacggaagccctcatgggcacgcggtagcaagaacgagaactggcggcatggcccaaaccggcgatacgtggtcccaagggtcgacccaagcaacaagctgtcgacgcgcgtgaccgaaaccggggacactgacgcgaaatgcgaccaaacgctaacaatatcggtgacaccaaagcctctctaggatcaaacgttgtacatcgacgcggcgcacgcacggctcgcaggaggacaccaagccacttatcggct

SEQ ID NO: 68191 - DNA, 403 bp, Glycine max
gatgaatttggatcagattatacgccaaagatggcaatagatgaccctttaaccagagcaaggtttctgcctgcacttgggaatgggcagtctcgtaacccgatttccaaattggatgaatgcattgaggaggaagaggaagaagaggaggaagctgaaggagaatctactcaggggtctgttacttctgctgctgaataaaaaatcccaagtgattcagaactttctgtgactctgaaaaataccatgttagatgggaaaaaccagaatcagcagaaatattcatgaggaaaggtggagaatggtcattttgcaaatacattatctggtcacacgagtgccaatgagcatgttgcttcaagcataagctatgaggatgtgaccgaaatgaccgatgatgaat

SEQ ID NO: 68192 - DNA, 291 bp, Glycine max
  unsure (1)..(291): unsure at all n locations
cccacgcgtccggggaagaaccccacacgttccatcaattgcattgttnncaacccnaccttgtattctgcgcgggcgcacctaaatgacctggtctcaccataatccccaacgatctaccactgcacccactctagggaccatcccttggcaccagcagccatatacgagcccaaatccacgctcacctctctctaatcctctatctacccgcgtcgctctgagcgctttctgaccctcaacagttccccgttggctaaaccaacctcgctcttcaacctacaccacacc

SEQ ID NO: 68193 - DNA, 200 bp, Glycine max
atcagacttacagactcgctttcaagagttgcatcactatctcttcctcggaacctatccggtctaccactttcctcacctgcgcactctacttactatactacatctaccaagctaaacagctatactattactgtacatactcatcataattacatccagactctctcaattgatcctccagcacatcaacatgatca

SEQ ID NO: 68194 - DNA, 244 bp, Glycine max
cacccttccccttatccttacttttcactctctttccaaaacgctccatttcaggatccccttacccttcttctgtgtctcataatctatatatacaataaaatgagaccaaccttcactcataaatacttctaacacatctagtctttcactgcttagaactctatcttccaatttatttatgtatcaacaaagataataagtctcaacatataacgaacatcaacacatcctaatttattta

SEQ ID NO: 68195 - DNA, 456 bp, Glycine max
cccacgcgtccgcccacgcgtccgagtgtgtccacactacttgggagtgtgtgcccaccagagactctaatcaactgtatactactacacgacgcattgaagaagatgagaacgaaacctatcatgagatgttgcacaccacgaccaatgatactcaattaccaccaccataatgcttaccgcgagctcaacctcaagatcgagaatcaggaggaagacattgtaagatccagccacaaacacgtgcataaccaccatactgagactcatgagagagataacgtggtcgaggatgaacatgatgctgtgatgggcgatgtatatgaagagaaagctgcttataacgacgagcgggactactctaccatgtattgaaactggacagatggaagaacacctataacgttgaatcatgtggatatttattaagcaggctacctagtataccaaaagcac

SEQ ID NO: 68196 - DNA, 202 bp, Glycine max
ctcggtggatctgatgtcgagagcatataaattatatatatctaactcccacctcataaatttgtattcctccgtttatacggcatttctattatgatgattcttgtgactactgaattcccttgttataatgtagatgtagttagtgataattgatcctgtttcatttgttatgcaaaaaataaaaaaaaaagaagacata

SEQ ID NO: 68197 - DNA, 257 bp, Glycine max
cggacgcatggaatcgggtaaaccccatttcaccaagaacccttcctgaacttagcgccagggctgcacctcgtgcttaagcctcatctgaggcacctgcttctgcactacaaccagtacctgcaccaagagttgctcgaacagaaccacctatggaagctgctgctccaatgccataatggatgccccctggctctggtcttgcacaaaatgacgcgaggaatcctacagctgatactggaacgcacagaatgtga

SEQ ID NO: 68198 - DNA, 284 bp, Glycine max
  unsure (1)..(284): unsure at all n locations
gccacgcgaccgggggacccgacgcnggccataaanagagcacgaaacccagcccccgcacacacaccaaagcgccnnacaagcaccacgagagaaagagaaggaaaaagaaaaagaaagacgcncacgcaancaccaagaccangaaagaccccagagcacaaaanacagcgangggaagaggacaccnnggancaanggnggaaccaggnaaacncagacgaagccaccacccngcactgaccaacaccaagcagagcctaaccccacccggcaaccaagac

SEQ ID NO: 68199 - DNA, 65 bp, Glycine max
taacatcttattctactttatcctttaagatgctccaatctaaaaacggggttctactctgggga

SEQ ID NO: 68200 - DNA, 332 bp, Glycine max
tctgatcttaacagattgagggtggcttctgtgtcactaaagtcaagactagaccatgagaagactgttctggtatgccttaatcaaagtctgcaaaagtctaggactgaggttgtgtatcttcgacctgaactgtccaagtctacgtcatccatagcttggatacagatgatggacattgaatcatgagagatgatgtctgagttgccctacatgctgctataagcatcatatagaggctgatgaggtcaaatcacttgctcatgcaacttaggcaaagctaatcgaagcacaagacgaggttgaaccagcctatgctacatgcagcacat

SEQ ID NO: 68201 - DNA, 309 bp, Glycine max
cgtccggaggttcgttccctgcaaccatacctgaatatgaacttagatttacacctgctataattggcccaataacgtggtctttgcctaacaattttgtatccttgacaggttcatctccttgtagcactattgttagaattttatattatgctgactcttattattattcctcacccttaccctttaatcattgaaggaacgatgaacaactatattaatatctatatcgatatctatcttaataacctaactatcatgcatgagcattgtgttatgatctcttaaagatggatgatatcccttata

SEQ ID NO: 68202 - DNA, 307 bp, Glycine max
  unsure (1)..(307): unsure at all n locations
agacttgttgagtgaagagatagctgaagaggaacttagaatgacacgtgctataattggaccaatgacgtagtatatgcctaagaatttcgtatcctggacaggtacatatccttgtaccactattggaagaactctagatcatggtgactgtgattattattgcgcatccttagcttntgaagcatggaaggatcgatgaagaactatattagatatctatatcgatatctatgttaatgacctaattagtatgcatgagattgctgtgatgatctcgctagaatggatgatatcggttatatgc

SEQ ID NO: 68203 - DNA, 288 bp, Glycine max
tgacgtcgcatgcgcgcatacgtaacctcaggcttccgctatacgcctaatcacgagtctccagcatcaccatggagggggttatcaagggcttcatcaacgccggtctggacgctgatgataccaatcgggaagaacaacaacaccgttatagaccatctgagtataaactcttgcgctgaactgaatatcctcacgatcaacaatatcaccctatagctcatcaccaacacatggaacactcatcgcctcactacgaagagcctcaatctcaaacttcctacatac

SEQ ID NO: 68204 - DNA, 336 bp, Glycine max
atacactcttaaaactattggttatagtcaatgggtgtatctgtacaataaccaatttttggggattaaatgaattgaagcggggacataaagaaacaaaacgcgccccccttgacgacgttctaagctaacacactcatacacacaacagacccgttcttgtatacgtgcaggtagcttaaatttattacctgtctctccaccattctctgaatggccgaacacttcctctacgccgttcattcctttaaacacgcatctgacattttcgacgtcatattctagcgatacgcggtcctcgtggcggctttcgtggtacttgccgagaccgaatgg

SEQ ID NO: 68205 - DNA, 138 bp, Glycine max
caaagctttccctcagcaacggaattcaccttactctcgcatcaaacaacccccatttctggcgcgtggcagcgaaaacgtcacctcttcttttatttgtgtagaaaaaaaaaaaaacgggttatacggggtgttttt

SEQ ID NO: 68206 - DNA, 297 bp, Glycine max
catacgtacacttaaaaccacacttaattagatatgtcaacattgcaacaacaccaaaaaaaattgcagaaatttacatttcatcatgtctaacaaacatattataatccttatattatattaaacctctaactacactccaccatctatccaatttaattattatgaaccacttttatataccttatgattaatcttattcacacactatcattatttcaacaccaattatatccttctttttttctttacttctccctcatactatgttattacactcctcttaccaattattat

SEQ ID NO: 68207 - DNA, 399 bp, Glycine max
atgatagctggtcttagcatgccagaagttgcatctcgccatgaatgacaggaagacattgctcatgaaataactgcactgtgctgccttttctactatggatagcgaagaaattcacatgactccatctaattcgaattctgaaacaaaatcactattgaagtcttacacacctctatgtgtttagagctacaatcggtattgcactctgggctgcttgccggtattttctgtctctgatggctctacttcaggactggactataattcagcctatctccttcaatcgtttaacctatcaactatgatgatatatacggactggctaatggatcaaagtcagtccatggttgccgttaacgaacctgcatacgccattcaaatggcactagatgactg

SEQ ID NO: 68208 - DNA, 380 bp, Glycine max
cagcaactatctataatccttattaattgtgtatacgaaacactaggcacacacatggctacggataccaagactttcatataggaaccaccaatgtgtgatcactcaaagtagcttttttattgataccgttcttttatacgctatctaaccaaatttaaaaccttgtacagagcgaattctcggcgggtggtttcaaaagccacagcagctctcggtgacaagaagacagaaaagccgtacgagagagttcatacgagtccacaccgtggaagagtgaaagtcggtcctcgaatgccccaaagactggctagcgggggtggaatactctgccaaccacagcgcggagagcagcctaatataccgtttcatggaggagc

SEQ ID NO: 68209 - DNA, 228 bp, Glycine max
  unsure (1)..(228): unsure at all n locations
tcgggcttagaatagctggtctacancgcccgccagtattcacatattggaaagaattagagcgccgaggaaaaccgccgttcacggcggtgaaactcgtcttcgaatccagagcctatctcggatgctcactcttatcacattgagcgcaacgccaaaaaagtcaattttacgattgaagaattggagcagtggaaggaacaactttcttacttagctaacctagct

SEQ ID NO: 68210 - DNA, 135 bp, Glycine max
  unsure (1)..(135): unsure at all n locations
naatagatngagagcgagtgngtatattctttttaanacccagaattatctaagggatatctctatctatcattatatcattttcctaaaattgtcatatcaataaatttaatcttttgttttaaaaaggaaaaa

SEQ ID NO: 68211 - DNA, 394 bp, Glycine max
cacaaccaagccacccatgataataacaatttcctgcttcggctctaccctcggcactcgggactcacagttctcaactcaaccacccattattaaccctcaccgcaatctatgattcgatctttttcaattgacgggtttcccatataccacaaggcatacgcctgtgtgaatgtgtgatatgctgagtgattgtcggcaagacccaatctctagtgtactactttaccaacctatagcgcacgattagatgtttttctattggaatcggacaaaggttccactgggactgaaactgtcagaggccaaagaatgctcgattcggaccttctggcgctatccttgccgagccttggcatgagcggggtattgatcgcgtacattggccttcttt

SEQ ID NO: 68212 - DNA, 183 bp, Glycine max
atttgaaccagatctacacgccgatcgtggttttggacaggtcttttatatatctggagcttagccgcttagatctacagtaccgaggctcaacaaaaaatcgatgacaagaacgcatatccgactgtagatccagccgatttcgcttgttctatcgctacagacccctgtattggatcatta

SEQ ID NO: 68213 - DNA, 118 bp, Glycine max
aaaaaaaaaaaaaaaaaaaattttaaaaaattataaaaaaaaacaaatataaagatataaaaggaaaaaatttgaccggcccttctaaaacataccaaccttacgtacccatacattc

SEQ ID NO: 68214 - DNA, 129 bp, Glycine max
tccaatacacccagattttctatcgactcaacaccaaccgtactacttttactataatttctaactcccttataaacaatacccctaacgaatattactactacgacaaagctattatcattttctttt

SEQ ID NO: 68215 - DNA, 458 bp, Glycine max
  unsure (1)..(458): unsure at all n locations
nccacgcaacactgtgcttttatcttgcattttttcaatacatataaaccggggatattcgatttttttaagcgacggactaaaantaataacatcttttaaaaaaaattgaaccgtggcggccatctacatctctatgggatcatcactttcgttactttcatcatcctcggaacaaaccgttaggcatacactctttgctacttacttctaacttcactattccttccaaagatggggctcttattctgagatcatgcagcttcaaaaaaagagaatcagaaactactataaagggtacctctactaccaacacttcaagcaaattgaaagattgcacgctcgaacacatgtttctcaaaagaaacctttcgtgcattaacgatatcctgatcatgggatcagacataagtgtacaattacagcacatgcctgtgcctgttctttctctgactaaa

SEQ ID NO: 68216 - DNA, 206 bp, Glycine max
cccgggccgacgcacgcgtacgactacacccttaccctctgtttttttggctttctacgaaattattttatattgtggctctgtctctgtgacaatggcgaaaaaccgatgcaaagggcttgaaaccggaaaaaccactgcatcgaacaacgacaaagacgaggataaaaaaaggcctgtctgtctttcataccgagctgagatcc

SEQ ID NO: 68217 - DNA, 391 bp, Glycine max
gctgcacgaacccccacttttatgatgatcttgctaaaactacttaaaaaggggaaaatgggcctgatcactaaacggaatagacacattaacactttgtaaaaaattgaagaactattaattgctactggtccctgcagattgatcgatatgatactttgcaacgaacactgaacctctataacttattttttgtttcccattgaagtttttacacgatttatctttacatgttctattgtgagagattaatactgtaatatttaacacacattttttgtatcattgccggtagcttactacgtcgttattatgaatatgttggctgctcaatgctacctcaatttgctgcacacatcatttataatctatataagtaagcttggagatg

SEQ ID NO: 68218 - DNA, 440 bp, Glycine max
ttgtaactcgttcttcttcttttgttgttctgtgtttgtgtttgttttttgtctcacctgggaatgtcttgctgcggtggtaactgtggttgcggaagctcctgcaagtgcggcaacggctgcggaggctgcaagatgtacccagacttgagctacactgagtcaaccaccaccgagaccttggtcatgggagtggcacctgttaaggctcaatttgagggtgctgaaatgggtgtgcccgctgagaacgatggctgcaaatgtggaccaaactgctcctgcaacccctgcacttgcaagtgaggtgttgggagagcaagcttcaagcagagatagcccttaattaggaataatgataaactattaatgtgtagctaaaaacttatgtattatgtctgtgatggttttcgtgcactctggtgttttgtgttaaacaaaca

SEQ ID NO: 68219 - DNA, 259 bp, Glycine max
atcttattattcctcttccatctctattctccataacacccaccacaccacttgtgaaaaacctcattaatatcacacactgacatgtatctcttatctccaatccaatacaagaccacaccttgtcgtgtcagacgaaccttggtgtctgttattttttttattttttcattattttctccgaaaagatcatgaacgccaaaattgtatgcacctcaacagcggcagtttatctgaactgatccattttaaaggagcc

SEQ ID NO: 68220 - DNA, 223 bp, Glycine max
gcgcagaccttaaaatgattcagtgaaaaacaaactgactgggatatctcggtgtgcatgcggtgcatccttcgggatgaagattcagctccgaaccatctcctgtattatatggctccaccaggatgcacatcaggtagtcgtggccctatgcacaacaaggatggatcggtcggtactgctagggactgaaacacaagatcaatctggtgcctataaacac

SEQ ID NO: 68221 - DNA, 264 bp, Glycine max
  unsure (1)..(264): unsure at all n locations
atacccggtcgaccgacgcgtgcgcacagccttntccacatttgacataatcacataaagcgaatattgctgcaatgtctgtattcggaacttggatacttgcatgataatgctgatccacatattattcatcgggacatcaattcaacgaactgtgctaatttcttgatgatgatcgccgctaaatattgcagacttttgatttatcaaatcagagctccctgacattggccgaaccgtattcacttctacgtcgtcgtcctt

SEQ ID NO: 68222 - DNA, 134 bp, Glycine max
  unsure (1)..(134): unsure at all n locations
cacatcataatacactcctccaacatctatattctccataacacccaccacaccactngtcaaaaacctcatttatatcacacactgactataatctttttatctcaaaccaacacaaaaacacaccttttctt

SEQ ID NO: 68223 - DNA, 121 bp, Glycine max
cgcacgcgtattccgacacgtgtacagacgacttgggtcgtgaacgacaagtgagaaaatgttacattgagaacgaaaatgactcactgacactacgacgctgtaactaaatgcactatgg

SEQ ID NO: 68224 - DNA, 401 bp, Glycine max
cgaccgcacgcgtccgaaaattctattaatccatcattttcaaggtttcatcatatatatatataatatgctcattgttttgctctcatgtcccctactcacttaaatatcaaaggacttgacaaaaccatcagatcactccactgtcaaacccatatttgaaagaactagacaatcaaatgaatataaagactctatttttcctaaatcagaaacctaagtacctcgatcttaaccttatacatttaaataatcaaaaactattaaacaactatattaaattgcaagttaaaactataccggaaaatacactaaattcaaatctgcacaataagaaactcaagactactattaacaacgagagctcacagataatccgtatgtttaatactgaattcaat

SEQ ID NO: 68225 - DNA, 311 bp, Glycine max
gcttgcggacgcctactaactccttcctcataactgatctctgattattcatcatgcaacagatacaccgattgcatggtcccgatcttccgacgacgacactcatcctatgtgcctgatggactacctgctccagtccaggcaataccatcttctgaccgtgccgcattcggccatcgacggcagaaacagacactcctacgacgacgggtacacgctggtcctcggccacgaccacgttttcatgcacatagacaggagattcctctacatgaccgatcttgacatcaacctaagtattaccgggtggt

SEQ ID NO: 68226 - DNA, 357 bp, Glycine max
gccgcacaaccaaacaccctttacataaatttccgaacaaaaccccctagtgcgggtttcgcagatctcactacccaatttaaacaaatcaacactctaccctaaccccactctctaccttcctcccatgtatcgccccataccagatatcttttcctatttgttgatcgcagccacgacacccacataagcccacgactactgactaagtccgcactattaaaaaatatcacttatctaaagacaatactgtattgaaatacaaaatttgaaccaatctcataacctattccgcagatcactcagcagttctttaactatgacacgattctactgcatatcaaatgtctcacaaaa

SEQ ID NO: 68227 - DNA, 222 bp, Glycine max
ctcaatccttacatactcctttccatccttcccatattgtaccccatacccaataactaaacttatttttttatcctaatcccaaaactcacaaaatcaaacttcatcaaaatatacccccactttttacaaatatcaattttcattattccactcctacttctacatcatcaatatatactactctactatcctattacacaaacctcttatccttcattt

SEQ ID NO: 68228 - DNA, 141 bp, Glycine max
aacaattcatgctcacactcacacccttgtgactccattacccaaacaagacccacaaaaccataatcagtggtggcgccaccccaaaaccatcaaacccagtttcaatcacagtatgatcaagttcaacaccttgcacac

SEQ ID NO: 68229 - DNA, 89 bp, Glycine max
  unsure (1)..(89): unsure at all n locations
gcgcccacgcgtncgatcaaaatttcacatcagccttatgcaatttaaggtttcgggtccttgggggaccttgggcggatcaaaaccct

SEQ ID NO: 68230 - DNA, 331 bp, Glycine max
  unsure (1)..(331): unsure at all n locations
caaactccttcctaattactcatttctaagcttacaccaaaacaaaaaaaaccgcgaacatcgtcttgttctnattactactatactcattcaaactgcaaatactggtaataccccaagacgacgcaatatcaaaatcctaaagtgaaccctaaggttatcatccccatcgagaaacactaacaatcatcatagatcgagaaggctcacctactccttctccctctccccctacatattgcccaccttcttcaccaaaaccactataggaagaagaatctctcctctcccgtctctataagagtaggagttcggtaacctatatatattc

SEQ ID NO: 68231 - DNA, 54 bp, Glycine max
gcgggctaagtcactttcaatgtttggcttttgcgttcacctctttatcaacct

SEQ ID NO: 68232 - DNA, 386 bp, Glycine max
agaaaaatttatttggatctttaaattcttttgaagcctatataacaatgggggcttatcgtgactattcattatcacgctcgctctctttcgaccaattaaaactgatatactggacctgtaatccacaatactgtggcgccattgaacacagttcatcatgctcaacggtgacattacctattttaatacaaccagaaggccatccacgtttgaacatattgcaccatagaatggactcattggaaaagattcctgaaacccatgaatatctttatggcccttaattacacgcgctcttgtgcctcacatttatctccactatggattgagcaccacacaatatgattggttcactagtacacaagttcacagctagttgtttc

SEQ ID NO: 68233 - DNA, 210 bp, Glycine max
cgaccacgtacaaccacccgttctcccattcgtacgaattcaacaacattgggggcgcaaggcagctatacaaactggacaatactgtccatcaaaacacaggcaaatactgtctccatgcataccttttattcgcataacaaatagccacaggtctcaaggacccggataatccgatactaataccagaagctttcaagatctatagga

SEQ ID NO: 68234 - DNA, 290 bp, Glycine max
gcggtcttcttacattatactactttaccacacttatactttttatttgaaataacaaaccatgggataagtggaatcatcaacaaagcttggattgtactggattccgtccttttaagcaaacgactcggggagttttggggtgaaaaaaaaatgtgatttggagaaacaatcaattcagtttttcgggggacattaagtttcaacaaagatgatagatgttgcacactcatacgatggagactaacaaaattgtaatccgtgcggtcgaaggaaaaaaatgatcttta

SEQ ID NO: 68235 - DNA, 325 bp, Glycine max
tctttttcctctttaacatatcttaatatctttcaacatccaaaaacttctggtatcacccattccatattatctcgagacatttacaaaacactttctatttataactgttgatgacattaaaactcaaacatccaataaaattaactctattgtttttcctgttactaacttacttctcaaatccttacttgcaaaggaaaaaattgaatcactatgtgacctatcctttctagcaacatatgaatcaatcaaaacatttatctgctctcaacgaattgacatttctgaatcatttacacaagcttttgcctacataactacc

SEQ ID NO: 68236 - DNA, 212 bp, Glycine max
  unsure (1)..(212): unsure at all n locations
ttttatatccacacataccnccncaacaccttaatctgatccaaataatctatttacctcatccaattacaaatgcacgtatgtacagtactatttttgaaatttttctaatatatacacatcctaaaccttcctggccacttttctattctttaaaattgaaccagtccttaccattttcaactggccaaatttgcctcccattatcatta

SEQ ID NO: 68237 - DNA, 453 bp, Glycine max
  unsure (1)..(453): unsure at all n locations
agctgtcgcaaagctcttggtctgccattgtaagagccaggaagatatatggatgctagtggttttggtaaagatcaatatgatcctacaagtcctctgtatcgttatgactactggggggaacccaagaattcggagaagagcatgcaagagcggatgacagatctccataacaaaaaaatcgtgggcaagggcaatgtttggtacgaaatgtcatatgaagattgcatccagcaacagatggaaagtgaagcccagtctaaggagcaagaaaacgatgaagatacaaggcaaggtcaagctgatgaagatgaggatgacgaggatgatgatgatgattttgacttcagtattctgagcagtttcggtagtaatttctccgatcagcctcatgttaatgggaccgagtcttctacaatatcangtgagggcatgtttgacgattgatgctac

SEQ ID NO: 68238 - DNA, 277 bp, Glycine max
aataaccggcccgacccacgcgttcgttgtgatcgtctcacataagaacctataattctcattctgctgttatgctcactcggggcaaatttcgcgtaactcgtgcggaggatcatctctgcgcacatatgtgaggaacctaatgctgatctaactgggactcacatgctcctcaggctgctgccatactgcattgactatggacttgcatacacacttactaagactggtactataaatcatgtgagactaatggatgttgggtactatgcatatt

SEQ ID NO: 68239 - DNA, 307 bp, Glycine max
acccacgcgtacgcattgtgctgcaccattcatagccattccatatgattaaccaggctaacagtaaatttagggtatggctttacttgctgaagagaccatccgcaaattcttgcagctactactgcacttaatcataatgaacattaatctgtaattgtacagctatcactaaaccagttcttaaattactccttaatcaccaaatcttcttggtctcaaatcttctaacaacttcttaatatatccaaaattaaagttccatacaatgatccacaacaataccataactttcacagtaaccttt

SEQ ID NO: 68240 - DNA, 233 bp, Glycine max
cataggccaagattccttctctagtttgagttttcttgacaagctaaacctgttgggagaggtgaaactttcaccacagccattcacgttctatacatacatatctactgtactagtgcgtataataatcaaccttatattgattctgctcttaataagcctttctatgatatttatttcaatctttaatacttatatatcactaacaaactctatttttcatatcttacacc

SEQ ID NO: 68241 - DNA, 203 bp, Glycine max
cattgattaccaatgccctcaaataatgtaatcttaggttgaccttttatgtagcattattgaataatcttaattgcatattagtagctctgtgcccatatgaaaagagattttaaaccgatttgcttgtaaactttgaaacagcgataagttttccagttagattgactaatgttatatattgaaaattaaattttgacccg

SEQ ID NO: 68242 - DNA, 125 bp, Glycine max
cggacgcgtgggctttttttgtacacatatataccctcatcgtaagtaataagagtaagaagcagtaatttttttctttttctttatttttggtttaaattacttaatataggagggtttaattc

SEQ ID NO: 68243 - DNA, 84 bp, Glycine max
tatgatccaaacttactatcgcttgcatgctttttgttttctcttctatattgtcacctaaagtcaatgtattatccgacatgg

SEQ ID NO: 68244 - DNA, 225 bp, Glycine max
aaaagattttagttttctcgaggggaaacatcttagttctgtcataatggtacggtttcttgatttaaaatgtagctaacgttgaatccttgtcctgttgtcttctctaaggttgattgtgcaaagcattgtatagaacagttggctgcactaaggagcctaaagaaagttcgtttcaaattcctagtactagtaaaagtcacattgacaagtactcaagtaaaa

SEQ ID NO: 68245 - DNA, 439 bp, Glycine max
cccacgcgtccggccacatgaatgagagattgcggaagaggaagaagaagatgatcaacagcaacaacaacaacaagcaacacagcaacaccaactgaaacatcatcatcagaatcatcatcatcatctacgaccctaaattttttcactttctctctctctctctctctctctccctccctctctctgtctgtgtctgtgtctgtgtctgtgtctttttttttttttttttttttaattgtgagagaggaaggagataaagaagatgaaggaaaacagtgatgggtttgtgagagcggatcaaattgatctgaagagcatagatgaacagttggagaggcaccttagcaaggtgttgaccatataaaagaaaaagcgctctgaagggggcgaagaaaatgctgctgctcatgatcatgttcacaccaccagtgccact

SEQ ID NO: 68246 - DNA, 125 bp, Glycine max
gtcactgacaactgaatccatcaattatacctttatcacctaaaactcatttaaaaatgtggaactatgaatatctgtttaggaaaattttgtttaatgcaaattgttgtttcttgtgtgttttg

SEQ ID NO: 68247 - DNA, 291 bp, Glycine max
tgtcaacgtctccttaggccttgaccagaaactatgctatttagataaatcaaacatttgtgactatgttatcttatagttgacatttactaaatagcatagtttctgtcaacgtctccttaggccttgaccaatgactccgctggctatcgctgctgcgcactgtctttccaagaacaagtttctggtctttgcctatcctatctgatttaattacgtggacaatgttggaaacattgatgtgagtgaatatgaaaatggaaaatggaagaagtttttaatttcctaaaa

SEQ ID NO: 68248 - DNA, 99 bp, Glycine max
gacacacgttcaggcaatagtaacaacgcttattacttgttattttcttcattttattatgatgtcacatcatggtgcttggaagatcaaacaataatc

SEQ ID NO: 68249 - DNA, 72 bp, Glycine max
cccacgcgtccgcccacgcgtccgcccacgcgtccgcccacgcgtccgcccacgcgtccgcgcacgcgtccg

SEQ ID NO: 68250 - DNA, 285 bp, Glycine max
gccacacgtccagaatagacattcaataacttttataagcccatacctatatacagcaatgagatcctttccggggaacctgagtaacaaaatcgaaattcttacaagatactattaatcatgaagaattatcagaataccgccattgcatacttgggcattaataacccacacagatacattgagtcttaaacaaaacatctacaatatctttttacacattcagacttttcttaacaaatatgcaaaaggacatttgctatctaatcttttataaagaacatc

SEQ ID NO: 68251 - DNA, 239 bp, Glycine max
atcaacgtactatacggtttttcatcatgttctcagctcaatgggacagggggatctacggggacctcacgaacatactcagacactcaacaggtatcgagacgatacatgtcctctatggatcatcatatgaccttatagatagcattggtaatgtacttgttctattcaatactatagtgaatcgttacaaactctacacagaccatgatatcaaatcgctgataaacctagattca

SEQ ID NO: 68252 - DNA, 237 bp, Glycine max
cccacgcgtccggcagagtctgatcacaggtttaacataccccaacctaggcacaatgacggggaagctagcgcgagctagataggtcgaattagtgtcgtggaatagagacagtgcatgagatgacggctcagtttatgcatgatgaccatgagagtatcatacacgtatacatagaagtcgtaacttgatcacagaaccatagataggtaccgatctacgcacatgaaaaccatc

SEQ ID NO: 68253 - DNA, 278 bp, Glycine max
acttactttatatgttttatattctattaaagggtaaatgcaatgggatactatacaaataagagtacagaaatgatggaccttggacactgacagttaaattacaaggagctttctgttacataaatatgatgcctagagtaagcagaatgtaaatcttactaggagggattcagtacaacgacatacatattaaccgctgcaacttactgatagcgacattttacaagaatatatacattaagacccagagtattaaataggatgattattataca

SEQ ID NO: 68254 - DNA, 446 bp, Glycine max
catagagttaccgcaaagccagatcactggattaagcacctcataagtcatatcattcataggcacctcacggataatgaagagaaaagagaaaaagttggaatagacagatggatcaagagtatttactttaaactatatatatatatatctataggtgtattaaatattcatacaaaagctagctcgttagtatctcatctgacttctacatgcatgataggaatggataacaaagagtcactcctacaatcactgtatcattaatagctgcattacctgaactcagtattcagtagcatcggcataaagagacgtgatgaactgatcatgtgtcaatcatgatgacatcaattctttttatcgacgattattaattattaggtttcgttagcaaatatcgaaccacattgatctttctgctttcctctaccactacggatggc

SEQ ID NO: 68255 - DNA, 357 bp, Glycine max
ctcacgcgcattccaattatctacatcatcttcggatctggttaagatgaggggtactacaggcacctcacgaatttacgttgacaagccaaagtaggcacatagagtttccacatcaatagatcattctatgcactcaatattatgtctcttaacatttatgatctattttctcatctcaggaagtgttacttactttagacgtataaatatatgtatactctgatacaccttgatacattgttttgatttatgataaggacgtaaatcattgtttaaactgtaattttggttgaatctaagttcacttaactttagagattcctttttatagctttatattggccatcgaactga

SEQ ID NO: 68256 - DNA, 124 bp, Glycine max
atcacacgtgctatttggtgtgtcatcatgttctgtgttaaatggttcagcggcatggtcgtggttgtcataaccataatgtctgcctatgtgcgtgtatagatgatcactgtccaacattcaa

SEQ ID NO: 68257 - DNA, 318 bp, Glycine max
accacacgtccggtagtgtgtgaggagtagtttacacatgagctgtgatcatctcatgagacgcacaccttagggagctacatagactgaatatgacgtaaacatctcagacactggatactattctttgaaagtcttaacactatcgtatgcaaatatctcaatacttcacagttcaaacatatctgcgaagctcacatacactgcgcgtataaaacatcaagtaatgggacattcttagatcgaagctaatatgcttgatgagcttaaatcgcctactatcatatttaagtctatacctaaaccggtccgaacaac

SEQ ID NO: 68258 - DNA, 450 bp, Glycine max
caaaaagtaaccgtaaagcaagaacacttgactaagcaccgcataagtcataacattcagattcaggacacggagaaggaagagaaaagagaaaaagttggaataaacagatggatcaagtgtcttgagtttaaattttagatatatatatatatagttgtattaaatattcatacaaaagttttctcgttagtattttatctgatttcaacatgaatgataggaatggaaaacattgagccgcacctacaatcactgcaactttaattgctacaatacctgaactcaatattcagtagcagcagcataaagagacgtgatgaactgatgatgtgtgaattatgatgacattaattttttttattgacaattattaattattagtttttgttagcaaagatggaaccacattgtttttccttcttccctacaccactacggatggcgttc

SEQ ID NO: 68259 - DNA, 331 bp, Glycine max
aatgtattttggggaaaaacagctcatggtttaaaaacgctaccatttaacatgcctatagggaaccatgcgtatcacactcttcaaatgggtcattgaaatattgctaagttaatgcacatctcattccttggacataatgcatttgatctcctatcttattgaatactactacaatatcgaattccttggtaggcctagtctcttctgtgggccttataatattgcttgataaatgctcaatgttgctataaacctataccacataagagcatatttatgttggagtaatcatactcgaagatgatatagacgattataggatagactc

SEQ ID NO: 68260 - DNA, 252 bp, Glycine max
cccacgcgtccggaacagctagagcaccggttttaaaatctactccatagggtgactcatacagaaattaccagtatagaacttcaccaaacctatctagaactgctactactaatgacaatgcaatcagctaggctgttgtcgatatgatactgaaactacaggatctggaccatagacagttactacattactacatcgaaacagatctatacggctaaatcagacatgaacctaatctggcataggcac

SEQ ID NO: 68261 - DNA, 415 bp, Glycine max
aggacgcgtgggaaaactctccgatcacgaaatggcatccaccgccggcgcagccgcgaggtctattttccgttcatgttccgctcgccgtgcctcgttccgtctcggctccgatgctaaagcggctcggtctccgttccgtgtcgctttcaacaaacctctctcgcaatctacactcaggtgtcccgttgaattgagcttttgtgtggaatccatgctaccgtaccatagcgcaactgcttctgctttgatgacttcgatgctatccgtctatcgccacagctatggttggcttcctgaaggtagcttacaacatctgtaggattccttgtgttctttcttcaattgaattttcgggcacagagaagactatttgaagatcaagaagcaaggttggcatgacatggacctcttt

SEQ ID NO: 68262 - DNA, 68 bp, Glycine max
cccacacgtccacaacacctttatcacatgttttatattcaaatctttaatggtacaaatgggtaaat

SEQ ID NO: 68263 - DNA, 68 bp, Glycine max
ctcaaacatacaatacagttttttattattttttgtactcaattattcagtggaacatttgggtaatt

SEQ ID NO: 68264 - DNA, 114 bp, Glycine max
cccacacgtccggaacagcaagcgcacttattttagataccactttctaaaacaactcatagggaaactaccgggatagagactcaaccaaccagtatcttatagttcatacaa

SEQ ID NO: 68265 - DNA, 196 bp, Glycine max
cccacacgtccggtacagactgctaacaggttttacatgcaacttcctaagattactcagggggaaactaccgggatattcattcaccacaaccagaatcttatagacctaacaatttatatgatacccgtactgccctataaatatgaagctaaatgtacattacacaaacgatccgacgtttaatcattactac

SEQ ID NO: 68266 - DNA, 207 bp, Glycine max
ttcgtcttaagcagcggtaacaacgcatattacgcggttctagattttccatttcagaggtacacaccgcagatctgtgcaactgcatcctccgccgccgctgtcgacatgggtatcgatctagtagctgatggttaaagcaatctatctaaatgaactgcacctagatctgatgatatttacctgatactccttgttaagctttat

SEQ ID NO: 68267 - DNA, 237 bp, Glycine max
gtcacacgttcgttccactcatccacttttctttacaacagcatttcaccattttccacagtggctatctaccggtattatcacgtggcataccacactcatgaagtaccaaagaatccaatgccaccgatccatacaccaatatcacgatgccatctctgaacacatttgtcatcattgcaaaacaagcaaactgccatatccacgtaggaaaaaagttgtttcaaggtttaaaac

SEQ ID NO: 68268 - DNA, 404 bp, Glycine max
gttatttgaccatacaagcatgctccaatttttgccactatattcaaaagggtcgctacctgatgaaatttccacacagaatcaggtatcaagttcattgacgactttctttatgcaaatgcatacttttatggggctcaacacacaatggacgacttacaaacttatcgttctagtgtggagaaaccctgttactttattgcaaatgcttgcccgatgtacaagcttgtcttatattaacttcatgaaagcattcccatcaatgcttaaatggtgcgattcaatggaccagctacttgattcagccgaagctgctactgcgtaacctgaagcttttgctggtcactactatgatgaccttgatctcttactcgatgagactgtcgaagacaaacaggtgtcac

SEQ ID NO: 68269 - DNA, 374 bp, Glycine max
cccacgcgtacgtacgccggaacggctgatcttgtagagggatagtcacacggtgggcaacgagtctcaaactcgaaaacaaaagctcgagcccatcatggattcacggaattaaatacatgtgaatcggagctttacgcatcaacttgtatcgcacctcaagaaattcctaagaggcattgactagtccccagagtacatggccggatatgctcatatgactgatcaacttgactaacctaagaacaagctctattgtctagagatgaccagacccatcatctatgaaagggaaaatttgaagagcattgatgacacggtcaagacctgtgcaagcaaattccatgaagagatgtctagaaccatcatagaca

SEQ ID NO: 68270 - DNA, 298 bp, Glycine max
cggagatagattatttaggtttacattatcacatccatgcaagtttccaaacctacaaatgtgtagtatatagacctcctccctttttcgacttgcttgttcaagagatcaacttagtacttgttattataagataatatgttgacagtgtatatgtaattgattgtagttgtaatattttagatgaattttagttgactatgtagatattctggtaagccatggtcattatttgttagggttggttgacacttgaaataatttgactctggatatatatataaaatcattttttttc

SEQ ID NO: 68271 - DNA, 176 bp, Glycine max
gtcagcatacatatacttttaaatgttatgactcaatattcagggtaacattgggaaattctaaatagatatgatcatcaactatgatatcaagagacaagattaacatacttacaatgtaaaatatagttttaaacttatactactggttcaatatgaaacatatgctcttcatt

SEQ ID NO: 68272 - DNA, 126 bp, Glycine max
cgaatgcaccttgactgcctaaaacaagctttttgagcatataactatgcgggaacatgaaggcaaactagagggaaaatcagaaatataaccggaaaaggaacaggataagaagaaacagactaa

SEQ ID NO: 68273 - DNA, 389 bp, Glycine max
cccacgcgtccgctcgcgggaactgcatttctttataagatagattacccgcatctacaacgagtctctgataggaatcaattgttatatctcagagtcattcagcgagttcatttcattgtaactgagctttccacaaccctcagatctctcctctcgaacgtgcaaagagtcactacttgaccgaatgctgaagcggctgaaatcggtctgagaaatatgattcttacgatacctctactaccctatggactcctagtacaccgtatgcgcccttccttggacctaaaacacggtagattctcctctcatagtatgagacatgttcaaacaagtgacatgagtaagtggcttagatcacattacgagctctctttacttctgtgtac

SEQ ID NO: 68274 - DNA, 241 bp, Glycine max
tcgccagagggggagttctcaattgctatacacttttccacggacttgctcagggagcctgccgatgggttgatctacttgcacccgacagctataggttcccaggttatgtactatacatgattccagaagagatatataatgttaattagacaccaatcataagtgataagaccttgatgaaaagaagatgataagaataggtgtttcaaggattatatgatatataaaatcctatata

SEQ ID NO: 68275 - DNA, 128 bp, Glycine max
cccacgcgtccgttcgcgcgtccggctttcctttacaagatatattcaccacatggacaacgagtcacttacaggattacattactataactcaaaggcatacaacgattacatttcattctaactag

SEQ ID NO: 68276 - DNA, 381 bp, Glycine max
gtttgaccaagggtggagcagctgaatatagagcagatgcatatggctgcatgagcagcaagggctgctgccatgacaaagctaattggatattctgacataggccgcctatctatattattgaatgatctcattgatctacaactgaccctactatccacaacattacacaatattatacataggaattggatgagagatgatcttgcatagagcatacttcaggttaacccaaagatttgaacggagagctacaactactaagtcatgctagacttatacatacgttccaccaagaatgatgctgaatactaatatatgattattgtataatgaggatcatctatatacgccgttttctctacgctgaagatggatagc

SEQ ID NO: 68277 - DNA, 452 bp, Glycine max
gataggtggcattgacagtattctacgatactagctggacatcagcacaggagctgagtcagctgatgatggagaagtgtatgatgattctgattaagttactgttactgcagaacacattactttgttttggaagaatggggccttcaaaaatgaataggatattaccgactattgttgtaagactgagactttgccctaagattgctgatccataagatgtgtatgattcactcattacgtttactatgctttatacatagtgcatttcacgctattagaccatgtatgcatatggcaactttgccagattgtgcactgactcatcaagaaataactcttaggaggacatgacacgaagagttatatgctaaatcaatgactcatctgaagtatatactatgctttggttacatgattgatgattcacatactatatctccgtatgaaca

SEQ ID NO: 68278 - DNA, 264 bp, Glycine max
gtcagacatgtaagacgcatggctcaaggtttttacgcataccgtttcgccggaatattaaggtacattactagcattgtgagatacatttgttctggtgcaaagccatatgattgctaagactcaaatatttactaacggcaatggttactcatacaggatcgttactcaattgagcataacttctagatgctagcactgccttattatgatgacgactagttaccactactcatgatcacgatgaatggatgcatccacatt

SEQ ID NO: 68279 - DNA, 173 bp, Glycine max
cccacgcgtccgctcacgggaaatgctgtcattcagaacatatattgctcgatatgacaacgagtcactcattgtcgtgtgttgatttaacactgaggcatacagcgagctaatctctttgagaatgaccaattcccatcgctcagaagagtcttctagtaacttctaagagg

SEQ ID NO: 68280 - DNA, 387 bp, Glycine max
gtaagactttgtggaaacagagtgttaccaatatctcaacagcgtgtacggacacgatcatgggactgggacaggattgatcaaagttgataaaaatggaaatgactttcacatagaaccagatgatgacactggttgccatcactcttgcaagggcaatccagcaaccaatgattgtgttcctgctcattctactgaggtgggtttcaattcatgcaaacctaacaggagtgacaactagaaatggtggagtggctacatgaagatatcaatatgtcatgttaatttcagattgtgtggattacatgtgttgattaaaatgaccttccaaatatatatatatatatatatatatatctctatatatatatagatctatatttagat

SEQ ID NO: 68281 - DNA, 96 bp, Glycine max
agccttccgccaaaccttccggtaaacctatctttattgctttatcaaaaaaaaaaaaattttctttggcggaaaaccattcccatgggtgatcta

SEQ ID NO: 68282 - DNA, 159 bp, Glycine max
ttctaaatataaaaatttttatattattccttaaaacattactacattgtcttatcaaaacgtggcactgaatgctaacaattatataattatattttcaatatccaacctcaataacatccactcctcatttccttcttacattttcaaatcattttt

SEQ ID NO: 68283 - DNA, 296 bp, Glycine max
atcataccgaactagatctcagagatcttacatgttcatcacaatcatagatgtggggtgtgctactacaaggctaaatttgatagaacccattggtgcaacattgctgcagcatcaagttgctcctattgctgaagttatattagaaaaacggatgaatcaagttgttgacgaagcttgccaaactatacctttgctagatactgtgcaaggatgccatgggtacttgttttgaagactgttttcatactagaacgcaaaatgtggatattgcacttaatattgtgatgtgtaaa

SEQ ID NO: 68284 - DNA, 300 bp, Glycine max
ctaatcattacatattcaaatatacctacagtccatcgaactttttaataaaatcgattcagtgcctgctgatgcgtctaattcacattctatcaatgaaccggctaattctagtacggctgaagagaccgacagacaaacttctgattctgtagcctccacgcaagataattctgcacatgacgcataatctaggctatctgacaccggcatatcggcctgggccacaaactcgacaatttctcacgcattttctggccaccaagacaactgatcaagtggcaatgcttggaaatcaac

SEQ ID NO: 68285 - DNA, 361 bp, Glycine max
accacacttacaaaaactctttctctttgtctttttcctaatctcacacccaaaccgcgtgtaaatctctggcgacgaacgtcttaattatatcaagatcatatattgctgcaatcattactggaaaaaatgcaccattaattcttactactacaactacatttattcatgccatcacttgaataactactactctagcttgttcaacaatccctttaatctccacgaactcattctccaatattaaaaacacattcttttttcaattattaacacttatccatctgttacttaatttttcacaaactctagcttctaaattcaaaaatacttcttcaacatcttcaaatacttccactat

SEQ ID NO: 68286 - DNA, 226 bp, Glycine max
cttatgcgtaccatcaacttcttctgacttctaaactctgtgaccttcctactctacatgccgatcctagtggccggagtgccgctgatctattatgacaccaccgaccgctaaccttatctgaaaaaattcttgatttcacttcgacacttactaatttctcgatcattcatcgatctcgttcatacatgcttactacacattttattactctagctttaccttc

SEQ ID NO: 68287 - DNA, 272 bp, Glycine max
ccgataaagaatactgtcttttcctcccaaattcattatctcaagactttcaaccattaactgcggaaccacacataccgacttcctgccaatctatattatccattctacttttccaattttacaaaaaaatatttgttttcatatgtcaactaaataaatttcactcttccccaacacacaacccgaagactgcaaaaacacttgcgttccccaaataaatactttttctcaaaattcccctttctccagctagttttttaacgaaaaac

SEQ ID NO: 68288 - DNA, 399 bp, Glycine max
cttttaaccaatacaaaactataatttatacatatatatacatcaccttatttaccaggagattattacaccgggggccgcgccacaccaaatataacacattcaactctattaaatcaaacaatatctctcttcaatgttttttaaccagatcaaataaaattaccttcctgacaaaatacaaatatcagatttatgaatcacaatattcaccttaaaatagacgacacccatatctgatcaaacttatcaactctaacattttctgttaacaacctaattacttctaaatcctttgcaatggatcaaaacttataagccaaacactgtattacaatcgacaccattttataacactagctattttatcataaacacatatttattaagaatgattat

SEQ ID NO: 68289 - DNA, 331 bp, Glycine max
attacacttacgaaaactctttctttttttcacattcttaatctcataccctaaccggggggtaatcactgggggcgaacggtttaaatatatgaagatcatatatcacttcaataattaacagaattaattcaacattatttcttatttctataacaacattttctcattccaccactgacataacaactctatgagtttctacaacaatccttttaaactcatctagctcaattttcaaaattaaatacacatccttttattagttattaacacttatcactcttttattttatttttcacaaactctagaaactaaattttaaaatac

SEQ ID NO: 68290 - DNA, 254 bp, Glycine max
caacaaacaacacaaatctctaactaatattcatcctttatttttcttcttattcttaactttaccacttatatatatgtaactacttttattaatatgtgagctttttttggaaacttatccaatttacattatatccaaagacgaacgtaaaaaactactacaacgacatctgtacattatctcaaaacttttctctctctatatctaaaaccatatccttcttcaatcatctaccataaacatttctatac

SEQ ID NO: 68291 - DNA, 296 bp, Glycine max
tcctttgcatatctgtaggctgattttcttctcatggaatcagaacaacgatacaatgatgaatcagtacgaagagatatatacatcgatgagtgacatgataaaagttttgatattaattcttctgcaccacattccaatcagaggtttagcactggagcatcaattgactcacccactaatcagaacgtcatttcgcacccgtttggatactttcactattcccaacaaaatggttcagagttattaacaattgcccttacatgatcacactagctaacttctagttcacgact

SEQ ID NO: 68292 - DNA, 242 bp, Glycine max
gtcattacttagggtagatggtgctcaactttttcccttaagtggaggaggtttttgaggccgtagcccttctgaccccgtacgatgatgtatagattatgatatcgaaccaaatttatcacatgcgagtcttgaaaaccataatcacagctttgcagatccatacaaagggacagatgtcgagccataactggtaggatacgaaatatgaatgataacgaacacgttgctgcatatatgta

SEQ ID NO: 68293 - DNA, 224 bp, Glycine max
ctcatacctaagtaaaaattattataaaatttttatcttaatttaaaaatatttttcaggctaaatccaatgtgggtggatccactgtattaaataatataatatccaacctaatataattaattatttactttaaaacactaattatagactttcatatacataaaatgccacaaatttcgtgctatacatgatattatactattattaataataacaaacct

SEQ ID NO: 68294 - DNA, 340 bp, Glycine max
cttttaaccgaggcaaaactgggatttatacactatatatacaacatcttatggaccaagagagtactacaccgaaaacgatgcaccagccaaatataacctatacaaacctctaaagaatcaaactatatgatctgctgtgcaaggtttgttagcctgagatgatgagaggtaccttgcctcgcagaacatacaaagttacagtattggatgaataacaattattgcactcgtgaaagataggacgaaactcacatatctgatcaaacaagatgaaactcgcaacagctgcggtggaaaatgctaattgcttctcaaactagttgcaggggatcgaaac

SEQ ID NO: 68295 - DNA, 53 bp, Glycine max
acaagggtcagttagatttcctcaaaaattgcgttcaccttggttccaaaacc

SEQ ID NO: 68296 - DNA, 166 bp, Glycine max
ccgaaattcccggtccaacccacccgtccgacaacgcttacattaaatttcctaaaagttttctttcaccttctttacataaccaacacgagctctcacatgggtcgacgtacatatgcttttaatatgctacacatacatttttcaacaatgaacgatttctata

SEQ ID NO: 68297 - DNA, 245 bp, Glycine max
  unsure (1)..(245): unsure at all n locations
atcacatcactaggcacaccaccgcatgttcgcattatcaagatgcccttgcattgctggcctttgaacgtgcggcgtgagaggatcccanccacaccatcaaatcggctttaaactcctgcaccctgacaatggactacgtactatccgacttgcttctcattactaaccaaaatactggactaacaaatcctttcaataaatatattaagatatcaaagcttgatcctctggacctttatata

SEQ ID NO: 68298 - DNA, 61 bp, Glycine max
cctaaacaaaactataatttatatatatacatactacacattatttattgggggtgtatta

SEQ ID NO: 68299 - DNA, 205 bp, Glycine max
cttcgtccaatgaatactgttcctatattattcaaccttcaaaacatgctcgactcaagggttaactatgtgggacgtacgtataacctaaaggagcatattattccgttgcaaggattaacaaacttactgcggcattacttcatctatcatgggcgccaataaaagcagcatgtgcatatactacaacgctagctgaggagac

SEQ ID NO: 68300 - DNA, 437 bp, Glycine max
  unsure (1)..(437): unsure at all n locations
tccgatttaccaagtctttaccatcataatnacgcttattctgacgcagaacttcattttctgttggttaattaactccgcgtgtcctccttaaaaaaactttatttccactttaaatgatcaaatatttcccacccttccatgttttatttacatacatagacccctttctctaaacaattatctctattttatagaatacttaaacaatttacactaaattatcaacacttcaccaaaattccatttaattattgttcaacaatcttcctgacattgcaccaacaaattctcctctaaaattatcatcctttgtcaaaaaactatccatcttttccaccaaaaaccttactactttatgttaatctcctttacgctttgttctcttttaacccctctctaaccatttccacaaatgttctttcaattttatccct

SEQ ID NO: 68301 - DNA, 376 bp, Glycine max
ctcaatctgacttgcactcttcaactctactgaatcagccctgcaacagacacatcacaacgtcattacatacggcgaccactgatcaaagacagcacacacggacccgaaaacgcgccaattattatcaaaagtatgccttagcgtgacggtaatggatactcgacaccaccctcacacggtggtgactaactagcacttgttcttcatgatccatgcgatctacacgccaatatacatcccgttttcagaattgcggttcttccacaaattgttattctacaaacccttattaacatgctaactactggtctgcgcttgaaaatctccatgtcactgatgctttcatgacagccatctccaaaattgctcattc

SEQ ID NO: 68302 - DNA, 248 bp, Glycine max
cataatgatataaaaatcaccaagcgttctttatatgaaatgataatacattattctggggtagaactgccgtgggggggggctgtaatcaaatcaaaatccatcgctgatctaacgtaagataatttttccttatcacttacctccctacttgcaatgtatactaaatgttgactatacaacaatataatctattttgacatgtttctatactccaattatttttcatcaactttacactatccact

SEQ ID NO: 68303 - DNA, 445 bp, Glycine max
cccacgcgtccggagccgatgacccttctcttcccttgtcctttccttctctcaaacaggctaaacaagaaccgtgttccactaaaagcttttgcagaaaattttcttggatgtgttcctctgccttcaacactgtctcagattttggatggagtgtattgaagagtagcatcattagtgatgataaaacaccgataaggtttggagacgaatgagccgactatcaaccattttccatatcaagcatgacattctccattgaccacatcagggacatcaaatcaaggctcggagtgacaataaatgatgtggtcactggaattgtcttctatggaactagattatatatgcaagatatggactccaaatcaaagaccgcacactccacagcattggtattactgaatacgagaaacgttgaaggttaccaatcgatcaatgatat

SEQ ID NO: 68304 - DNA, 147 bp, Glycine max
aactaacatattctatcgctatttcaaatgctcgaaacccactaccaccccaaaaactgggacgactaccagcgggccttctacgccggaatctccggaaaaggttacgacttgaacgacgcaatgattacgctcgccgacactaac

SEQ ID NO: 68305 - DNA, 348 bp, Glycine max
accggacggatcccggtgcgacgcgcagcgtacgcgacgcgtcgagacacctgactctttcgccatttgaaatccaatcctagtgggataaatgctcggtaggcccccataattggccacgaattttctgtattccatcatcctggtttttttgccaatcacacactactggaaggggaatgccataccaattggctaaacccttgttttttaaaatgagaaggaacatccacttttgcccttttaaaaagtggcaagatttatcttgccaatgcacatgatacagggtgctccattgaggacaggttgacaatttttgggttcaacccgtgttaaggaacaaaggta

SEQ ID NO: 68306 - DNA, 261 bp, Glycine max
gaaaacccggatgcgcgcacgcgtccgcccacgcgtcctcacacattgaaatttattttccatgtaaattatatcaaaatattgcgggttctacaagccggtgtgtctgttgctacacataattttcaccattattgagaaatgacgcgttgatgctactgatcatctttttgacatgactgcccacacatttgtttgttcgtctatccaactatcatgtatatttatctgcagaatccttatatttgttttataattatg

SEQ ID NO: 68307 - DNA, 184 bp, Glycine max
cttagaaacgatatggaatcggttgtcttgtctctacgagctatacgtgaaggtcggatgaatgaacattatccgcatgttctgtatactgtcgcattggatgttcatcttatgctaaatcagcttacattgattccatgtatttcatgcagaacactataacgatgtatcaaattgatatatt

SEQ ID NO: 68308 - DNA, 205 bp, Glycine max
atccccatcactgaacaatatataaaataattcataacttcactccacaaacaaaatacacaactattttttttcactatacttaaaaaacttttacctcttattacatttttttctaatattattcatcatactttttctcaattattacaaataacacttttcatcacttcctactataaatctatctctccaaatatcatta

SEQ ID NO: 68309 - DNA, 207 bp, Glycine max
ctttcccattttttctaatcttaagtttttaatttttaaaaatattttcttgttttggcgcttttttaatcccggatttattcattaaagccaaacataattccccattcattttttttgtttattaaatttattcttatttaaagcaaatatattctttaatttttttaaataatgattaaaaaaaacaaacccttaattcacttt

SEQ ID NO: 68310 - DNA, 312 bp, Glycine max
ccatttttctcaattcttaacttttcagtttatagacatatttatttggataaggtcttctctaaaccgggatttattcattaattccaaacacaataccccattcattctttttattcatcaaattcatactattatatatcaaatatatacattaatttttttattcaattatcaaatataacataccctcaatcaactttttacataaatttatctattctatttctaataccactatcattatcattactactactaacatctttaacattcttcattctccattatttactccattactattttata

SEQ ID NO: 68311 - DNA, 172 bp, Glycine max
acgaaacaatctccttggttttcctgatgattgatctaaagcctttttctcccctctatctctagggtgaaaagtctttgtgagggatgataatcattttatgtaatatttggatcccctaaatattcagtcttaaatgttgaattgaatatcatgtcgatgcaagcaatat

SEQ ID NO: 68312 - DNA, 174 bp, Glycine max
atcatcatactcattaccatctattatcattatcatcattctcccattcacacacacacacctaatctcatatactccacacccaccatcttcattatcataatcatcatcatcatcatttacataaccatactcactaaacatcatttcattcaaataatctttattatatat

SEQ ID NO: 68313 - DNA, 266 bp, Glycine max
gttatttcccgatttgagcttacaaaagagttccttcacgaatccatacatgacgcaatcgggcccgttgatctgagttaacatgcttaactctatgattttaattactgctgtctttaacttgtctacccttcttcaactcgatcctgtctctgaccaacatgcatatatctatcttatccacgcatcataactgacttatcatatgttcctcgaacacgattggttcaatcatattttaccaataaaacgctgctgattactat

SEQ ID NO: 68314 - DNA, 314 bp, Glycine max
ttttacacatacctttactctcctcaccacactaattcttctcccgaacgattttaattaaaaaaagtgaattccatctaccaactcctactatcactccaaatttcaataccattttaaactattctacaacctctcaatacacattctcaatcaaaatctaaaatctactctaatatcttataccttcactctctccacaaaatatatttatactacatttcttcattcaacattattattcttaatcttaacattatttcaactccatctattaaatatacaatcctacctgacattactctcaaaactat

SEQ ID NO: 68315 - DNA, 300 bp, Glycine max
atacttttcttcttcaccacttaacttttccgcaagattttattaaaaaagtgaattccatcttacaactcctttttccactttacatttcaataccattttaaactattcttcaattctcaaatcacattcttaatcaaaatctaaaatctactctaatatttcataccttcactattttcacaaaacatatttttattatatttcttcattcaacatttttcttattaaatttaacattatttcaactccatctattaaatctacaatcctaccttacattactctcacaattataat

SEQ ID NO: 68316 - DNA, 394 bp, Glycine max
ctctctctttctttcaaatctcaaacttgtccactacatgaaaattcctccactgttcatgtacagctctcatctaatatgaactctactttcttatatactcaacctttcattatcttaatttatattctatatcattaactacatctgcatcgatcataaattacaccattacactccttttacataccctaattacatacttacattttatgcatcatttatatttcctctcattttaccaaataatctatttttacctcatattcctttacattaaccttttatttttattccttatttaaacatttcttccacttcctattttattttttatcaaaatcttcccttataataaatttataccacttatcaacataccatttataaccta

SEQ ID NO: 68317 - DNA, 389 bp, Glycine max
ttcttgtcatatctcaaactgtttcactacatgaaaattcctccatctttcagatacagcttttcacgtgatatgaactctacttactactttattaaacctttcattcactttttctatcttttatatcattaattacatctgcatatattataaatttcaccataacattccttttacataccctaattacatatttacatttcatacatcaattatatatattctcattttaccaaatattctatttttaccttttttactttacattaaccttatatttttattcctcattttaacattactttcagattcctattttactacttatcaaaatctttcctcataaaaaaatttataccactgatcaacataccatttataaccta

SEQ ID NO: 68318 - DNA, 147 bp, Glycine max
  unsure (1)..(147): unsure at all n locations
caaattgaaagattatagatctaactagtcagaacagtctctganaaccaggctgggctttattggctgacgtcccaactaaacacatattcatanattttattcaattctatatttctttttttcttctcttcttctaatattaat

SEQ ID NO: 68319 - DNA, 337 bp, Glycine max
gacccagacagcaaagttgcctgctttacatgcaccaaaaccaactttggcttagcttttttaaataacgaccaaggccaacgtttactactataatataattctttacaacttcatgaacattatctttctcttaaatgatttgttacttgattcccacaacttcaaagtccttcataacatttatcatcataacccttatattgctcaggtttacactttcaccttaccaaaaaacctgaataaatttgttcttgttaccaaattcacatttttttctattccacttattaaaccccttaatttataccatttaaccattttttttcaacaaaat

SEQ ID NO: 68320 - DNA, 268 bp, Glycine max
atcccataccaacttttcatagcttctttaaatcacgaccaacccaacatttactactataacatatttcataacaccttcattaacattcacttcttctcaaatcattttatactttatccctacaacttcaaattcctcttcaacattcatcatcaaatccctaatattcctcatattttacacttccaccttaccaaaaaacctcattaaattattcctattaaccatattcacatttttcccttttccactaattaaacccctt

SEQ ID NO: 68321 - DNA, 345 bp, Glycine max
  unsure (1)..(345): unsure at all n locations
aaattttnaactcattgttctatatcaattcgatcatccaggcattttccccttatatagcacatttcaaaactcgaggttctctatacattccctcttaatcctcttaatatgtacaacttttttatcaaataaccaataaagctcgcctatcaaaagatgattcactattctattcatcttaaatttttgattctctctaatacttacataatttcgtattcattacatcatgattttaatcccataaaacttattacttacacctaaacgacatactaaaataccctatttttctaccgttatacctatccatcatttccaaaatacctttcccttcaaatt

SEQ ID NO: 68322 - DNA, 301 bp, Glycine max
  unsure (1)..(301): unsure at all n locations
gacgtacgcttatctaccatcaaattatttaccattaactaaacactccttcttgataaaaaccaatgggcatagccaccttactggctgggaaccattatccacttcttcccaanccactcttacccatatcgtgaagcaacataaccattgacattctatcgaatttataacctctcacttccgacactctcataaagaaaacactcttatagtttacatcctatattaaaacttgctctagattatactaggattcttttcacaccacaccatcacttgcatttactcttttcataca

SEQ ID NO: 68323 - DNA, 317 bp, Glycine max
tcctactatttctctctccttctcctccttcttacctgcaagtttttcacaaaccttggtcccacactaccaaccttttcaataaaaaaataattctcactactgttcccactacctcttccccgacaagaacttctcctatctctatcaattccaattcctccccctccaaagcttccacaaaaactccaatctcattcttctcatcttattcaaattctttcactcaacccctcttaattcctaacctcttaaacaatatttattccacaaaattttcattcatctaccacattttccattacttattttttaca

SEQ ID NO: 68324 - DNA, 160 bp, Glycine max
cacaaccaaccttatcaataataatataattttcactactgttcccagtacctcttccccgacaagaacttcttctatctctatcaatttcaattcctccacctccaaagctcccacaaaaactccaatcgcattctccccatcttctgcaaatactttc

SEQ ID NO: 68325 - DNA, 396 bp, Glycine max
aattggaatttcggagccggccgacccgtcacgcagtcccatactttattcctttgtcctccctaccgtaaccatgtctcagactgttggggggggacattgatatgtcatgtgacacatatgccttatcagtgctgagagctctagtaaaattgtatggaggggaatcatataacattgatttcaacgaacaaaaagtgttagttaaaggaaatgtccagccagacacatttctgcagaccgtttgcaaaactgtgaacatgactacctcctgtgaacgtgacccaggatcatctgaaactatcacagcaactgcctataacatttgcctctattctgtgcagaacacgttactgcgtgaatcaaatactatttgatggtcttgaaataatgatg

SEQ ID NO: 68326 - DNA, 335 bp, Glycine max
ctctatgctgtgtacgtgtaccaccagatagcatggatgagttaacaagacatgatgaagggccgggattgcctcctgaaggtcgatatccactgcgatggccgggaacagaaagtctagaaaatcctgcagaaaattgatggggtgtattctgtgaacataggatcctaacgatggactgtgatctgcgtaggacatgtctattcagctgaaccgatctaaaaactctacaagtgatggtagcatgcctgactttgaggtggccactgaggcttgatatacaaccaatactaccgcacctaccctcagttcgagaacttgcacatagatcacac

SEQ ID NO: 68327 - DNA, 399 bp, Glycine max
caaacaaaaacttatttcttttgccttcactttattaatcaaaaactgggatatatgtgcgtcccttcaaaaagctgactaccactcatgccttatcctatctgattacatctctatcaattatcttcatgtttagtttttaatttctacatacatctttaatatatgcttaatctgcaaattattgtagagttgttgacttcgctgactctttataataaccatgatcatgactgcagcaatcgaactcatcaatttggtatttgaacgaattgaaattgatttcatccaaatttcccaactttccatgatgaacactaatcttgatatcaatggtacctaccctccaatcatttgttcttttcttcaaaagattcttcaagctgatagcattctctt

SEQ ID NO: 68328 - DNA, 218 bp, Glycine max
cccacacttgctctaaatcattgctatttctcatgaagcctgctttgaatatcctgagagggttgctccaaaatttttgggtattgaaattgccaccttgaaaaaaatggcgccccttctaatgaatccattcttacttctcttgcactcacaatcttaatggacacaaaagataccttaattgaaaccaccagccgaagctttacaaagattatacc

SEQ ID NO: 68329 - DNA, 382 bp, Glycine max
ccaacacttactctttatcattgctatacctcatcaagcctgttttgaatataccgggagtgttgctcaaaagtgttggacaaccacatctctccaccttaaaaaaaatggcgcccgttctaaagattccatctttacatactcttgcattactacaatattaactgctacaatcacgataccttaattcaaaccactacccgaagctttacaacgattatactggtaataccctgctgtttcacaatttaatcgcccatcagctcatatgctctttcacacaatggcgtactatgcattaggcccgcaccgatcctccttctctacaattgctcactctatttgcttaatgggaccctccctataccggttcatcaatctc

SEQ ID NO: 68330 - DNA, 65 bp, Glycine max
  unsure (1)..(65): unsure at all n locations
tatccaaacttacttactcntgcattcgacttcatanctcttgtgtggtgtcatctaaattgagt

SEQ ID NO: 68331 - DNA, 292 bp, Glycine max
gggggggaccgaagcgtacgcccactcgtccattccctaaccccttccccctaccacctccactccttcaaattccggcccgattaacaatccatcgtgtcacactaaattacactcctctacattacctacattataacctactcctacaccaacatcttaatcgtcaataccacttctgccttgctctacttctcgtacgatctcatcaagaaccctcccgtaatcatgaccataatcaaacattcatttatccccaacaacaaaacataactcggccggcagctcttct

SEQ ID NO: 68332 - DNA, 363 bp, Glycine max
attcccttcacccacctacctaacttcccattttcaatcatttctataccactatctcttacctttagaaagttaacaaaaatttttttcaccaaattaacccattttctttccttattatttcatatttttaccaaaatcttccttaaaaaatcacctctaattttttaaaattttccatctatctaatcttatatccatacaccaatcaatatctatactctatatttatatatccccaaaaacaaaaaaaaaaattttcttcctctctttaacatcaaaacttacctacacctccattccaacttcttacctcttcctatattttcacctaaattcaattaactttaccacctttttaca

SEQ ID NO: 68333 - DNA, 121 bp, Glycine max
gccccaactaccttgcgaccccacagcgaccctctttcagtgctatcaggcctcgatgcccgtcagacccacacgtactatcatttttaaatgggctcttgattaatcaacccatattttc

SEQ ID NO: 68334 - DNA, 262 bp, Glycine max
acaacttcctcattttataattcatttccaataccaccttctctacttacctttcgatatgattcaacaatactgtttcttcacctaatcaacctcactctatttccatttttatttcatatttctgatccaaaatcttcctcaacaatatcacctctactcttcttaaactatccattaatctaatcaaaatccataccaaaatcatcttctatcccatccatatacttatacccaaatacaataaaccaaaattactttc

SEQ ID NO: 68335 - DNA, 431 bp, Glycine max
aaatcaacaccaacaacacctgatgatgaagttccaacaaggttctggtgatgaaaacaacgatggtggatcaatggtggattacatgcctcaaacaacaacaacactacccccacatggtttttatggtactgctaccagtgctgccacaacatcctatgacaaactcagttttgcagatgtgatgcagtttgcagattttggaccgaagttggctttgaaccaagcaaaaagctgtgaagaatctgcaatagacccggtttattttcttaagtttcccgtgttgaacgacaagatggaggaggatcatcagcagaacatgatggtgaataatgatgaccctgatggtgatgaagcagaaaatcatcatcatcttgatgagaggttcaatttggtgagtgtggaaggcaaagatcaaggaatgatgatga

SEQ ID NO: 68336 - DNA, 396 bp, Glycine max
  unsure (1)..(396): unsure at all n locations
tctttaaatacttttcattgtataccccacacaaactcatatcaacatttacgactgcgcccaatattgagaagtttataactaacctatcatttantatttcacaccaccaccaataattttcaacatatcaccaccctaattctcaccatgttctcaacaataaaattgtttattaagaggatattattttattatcccgcctcatccacattcttcaccaccacccttaaactcattataaaatcaatgtcgtggaatattaacaaattcctttacattcccctcttctattaatagaaaaatatttattacaacgatcgttactactctccaatgtattttaaatttacaaatgttaaaacacctataacctgttttcatatgtctttttat

SEQ ID NO: 68337 - DNA, 274 bp, Glycine max
  unsure (1)..(274): unsure at all n locations
tcacatatatctanacatcaacctcttttttctctctcaccacaaacaccctnagaggctagcacaaataataaagacgtcctccccatccttctttttaatatcacttaattccaacactttcacctcatactcaatcatcctcattttcaacacaaataacaaccctctctatactttttataaaatacttatattaaccatcattcataaacaccttcatcatcacacaccctactctacttaaatcttaaccaataccaacaccttattc

SEQ ID NO: 68338 - DNA, 176 bp, Glycine max
cacgcttaagatcacccaacatagaacctaatacacacaacacaacacacacacaccgagggggaggagaaatcatcaaggcatcagctgcatccgggtttgtgttgtcacttaaaggtgcagctgccaccacatactcaacggtggtcatgttcaacatcaaaaacaacgctcct

SEQ ID NO: 68339 - DNA, 133 bp, Glycine max
atgtgatggagccggaaggcgtgatcgatagatactggaatgagagtgatgacatcatctatgacatgaacctactacaactgcttctcagtggcatctacgcctatcgtttagacaagtcctatgacaaaca

SEQ ID NO: 68340 - DNA, 290 bp, Glycine max
accaatccttataccacattcacatttgatcatcaaataattaatgttccttgaggcctattagatatttccattctctcttacccaactaaatttatcaaatccaattccaaagcacaaactacccttgcttacttttaaacatctacctcaactattaaccatataagacccataaatacttccactcatccacttaactaacaattagacattacaaatcttatcaatgactcttctaccacatatcaaccttatataccataaaatgctatcaatttatacctata

SEQ ID NO: 68341 - DNA, 280 bp, Glycine max
tcttacaacaagtatcccatttttctcaatctcaacttctgatcatctaaatatttttccttcgttaggctcttttcaaattcgcgatttatcaaataaaaccaaacataatcccccctacatatactctcataataaaatttattctttttaaacacatacatttactttaattttttcaatacaattattaaatataacaaacccttcatcaactttttacacaaattaattaattatacaataatacctttatcattatcatttcaactactaacaa

SEQ ID NO: 68342 - DNA, 219 bp, Glycine max
tcaaagcaggaattcttacgaagtgaattatggtccaaaattttgatgaacttgtctctaaactatgtaacatatacacattctcatttttgagtggcattatggaatgtgttcttctggcaacatgttttccttataaaaatgacttctgttataattattatgtcagatattttaagacacatatacatatatgtctgatatatctttaacttgaaa

SEQ ID NO: 68343 - DNA, 262 bp, Glycine max
atttaatgtagccggtgggcatcatagaaaagggactggagtcatattactgacatcatctatcacatgtacctactacaactccttctcagtgccttatacgcctatcgtttagacaattcctatgacaaacaactctcatccatttataccttgtatttatgaatatcatgtcatagctcaaacccagaaagaccacttcactaacggacacattttccatacttactacgctacacattgacttataatcataaaccac

SEQ ID NO: 68344 - DNA, 307 bp, Glycine max
tcaacatcattctcttctcaatctttccattcctgagttctcagggtggttctaaacaacggcgggcctcatgtattcatggtttttggaactaatggtcatcttatcaaaaaatcttttcttcattgcttctttaagcttgctcaatacattacattattttaccttttttttagttcttttggagttcgtttcattgtgcgctgtcactccatatttgtgtgtacatatttgtcaactatttcttaacacaagtatcatcaaacaatttgtggccaaaagtatatacttaaatgtgtaaaattct

SEQ ID NO: 68345 - DNA, 185 bp, Glycine max
ccctccgtcagcacggatcaggcactcgacaggccgtcgacccacgtcgtccgattccatacttagggatgggctcataaatggcgacgacaccaaacttatctcatatacttaacgctacaactggataacctatttccactaaccataagcaccaatactgccaagattaataccacatcctc

SEQ ID NO: 68346 - DNA, 232 bp, Glycine max
tatcaacctatagactatatatagcaaatgttcatacaatagtcttcaagactatgggtcgacttcttaaaacacattgtgtgccacataaacttacccaaaattactcctaatcttaatattacttacctaaccccctttaacttgtatcaccctatatattatctcaccctaaaaacaatttatacttaaaaataaaaaacaacttattcaaactttttaaccacccctc

SEQ ID NO: 68347 - DNA, 433 bp, Glycine max
gttacatgccttaagatggtcatgccatcgttctacacaccgtctatccgtgtaacgagcgactactaagtggacaagacttctaaaaatcgattgtggtggatttaactgcttcctaccgagatccatccctatgtattgccaccactcttacatacattgctatgcatactcatcaaccgatcttgcttatgatgaatatccattaattttaggcttattgctgaccaatatatcattgaacccattacaaccttgatcttattaaaagataccttgatcctatataaacataattactctaataatgtgcaactgtatcatctcatatcctagcatagatctactattactacttcttatatatacgcagatttatcacattcatacagatccttactcatgcattttaacgatctcaactcagctttca

SEQ ID NO: 68348 - DNA, 262 bp, Glycine max
gacccacacatacaatcactactatacttccttataaacaccaattacaactcatatctaccctccaccagaacgtattctatctaaaaccgaccactaaaacccactttacttaccaaaacacataccaatcattaatttaatctcatccatcttcaatttctatcttccatcttcatcaactcatatctactcctataccaaaaaatcatataaattcatatctcctcctttatataaaccaaatatcaatccaaaatca

SEQ ID NO: 68349 - DNA, 151 bp, Glycine max
aattcccgtctcgaccgcactcatactctcactacctatcttacttataaatattttctccaactcacaactaacctcctacgcatcgttttttatctaatacccaccatttaaatccctctacaatttaccataactcataccatttata

SEQ ID NO: 68350 - DNA, 199 bp, Glycine max
taagatcctccaatcacagcctagcgggcagtctacacaactcgtaccgacactcacacacagcagaatccatgccctgctgagacgcttcttgtttcgcttgaacaaccctcggttccttccgaaatggtgactgtaaccagttgcagattaatgcctctgaactcggagacattgcgcgccttcattgacatgattg

SEQ ID NO: 68351 - DNA, 462 bp, Glycine max
aattcccgggggggccgacgcgtacgcccacgcgtccgcccacgcgtccggtgcttttaagtctatggagaaggagcctagggctggtcagtttacgatctttggggctgggcaagttgttgtgtttgatgattttcctgctgaaaaattggaggagataacgtcattagccggcaagggaatatcccaaagccaaaacacctctgcttatgctcacactcataaccagcaagtgaatcatccttcctttgttcctaatatctcccctcaagcaccgtccagaccacttgtttgtgatctgccaattgctaggaaagcttcacttcatcggttcctttctaagagaaaagatagaattgctgccaaagcaccctatcaaataaacaatcccaactctgcttcaagtaagccggctgaatccatgtcatggcttggattacgtgctcaatcaacacaagtcta

SEQ ID NO: 68352 - DNA, 348 bp, Glycine max
caaggaaggtcctcactgttattacatctttctttcctctgtgcaggagatataaagacgtgctaaaaaacaacaaagtcttttcttccaatgcaaaatcaccttgatgtaccaaaccaacctaactggtatgttttgtgtcttcatattttcaccttctgatactgatttgggtctaagctcctaatgatttaatatccaatgcatctggtattctatcttgactcatataccctttttcttaatgctatatttctactttctttatctcccccattttccaatcactcataccgttatcactattttatattatattgacttccattataatgcttaaaattaaaa

SEQ ID NO: 68353 - DNA, 189 bp, Glycine max
taaagaatgggcaacgtgtcaattccagcctcgcacaacggtgttctccatactcattttccgagcgtccaaactctcacgtggcacccctacaccttcaacgctcagaacttctcactctgcagaaactgagttacatggacctcatgacactaaggcaggatcgcttaatgtcaaagtaatctaaga

SEQ ID NO: 68354 - DNA, 227 bp, Glycine max
ccactcatccaattcatttacattaatatccaaactcaaccttgaacagcttttttataaaaactacacctccaccccaatccttcacctctctttccaaatcaccatccccctccctcactctcaaatctttttctttaaacacatccctaccttcaccacaaccaaaaccttaacacaccatccactaatatctttccccaatcatcctctttaactccatctac

SEQ ID NO: 68355 - DNA, 258 bp, Glycine max
acacttgcgagattaccgaagtgcctaccgggctggacaaaccctagccattggcactatgctgaggctaggcgcatatctctcacgtagggaagcttactaacgctatcttccataggtactgactgcctcataacgatatcccatgagtgggatcgcatttgctaggtgcatgcctagcactagatgaactagggacctatgaatgagctggtgatgctccataggtgctcactgcttatgggacagatacttgac

SEQ ID NO: 68356 - DNA, 432 bp, Glycine max
aaatcatactctataaaaatgacctatccttttgcgcatcaatcacataacaccgggcaggtcctctttggtctgtagaggcgatccattcacaatcttataagcattactaccatatagattaagaacaaaaatcacaagcacaaaagacttatccacctcaactcttgtttatctcaacgccataactaattctactactactttaacaacaacctctactacaactacaaatactcatacagattataatatagtgaaccataagctcatagctaatttcaaaacctctgcttccaccctcatatacactctgactatcaacaaacgaattgatgatacttccaatatgcattgcaattctcctattttacaacttgttatctctgatcttcatcccaacactgaactttatacatctacacttaactc

SEQ ID NO: 68357 - DNA, 144 bp, Glycine max
aactttagaccgcgggcgcgcctttcctgaggcattctactgaactaaaccatggattgtggtctgttcttcatcttcagggttctgaaacctgtaaagatccttggattgcgaggcgtagtttcacctgacgcttatatcatc

SEQ ID NO: 68358 - DNA, 224 bp, Glycine max
cttcatcttttataggagaaaactgcgagctacgtgaggcaaataacattttgaaggccatacatgtggtgctcgaaccaggactctatactcgattacactgcctcctttgtgaatgctgtcctggactgactgacggagctgtgcctgatggttctaaagacgcaccttatgctgctgtacagagttgatataacattccacctcatacaaggagacatgac

SEQ ID NO: 68359 - DNA, 383 bp, Glycine max
gctgcgagaagacgacagaagggtatatatattattaaactatgcataattcggaccatcgagctgacctataaaatcatgactactacttcaaaataatcatatttcatgttacaattttataatatttattatggtatgttggatgaggtatattaatgtgtgctttaatgttatatgcttataataaatataactaatttatactatcaactattatatcaaatatttaacataatagtttataatataatgttagcataatactatcgtaattttattataaatttcataatccaatatttataatgtatacgttatctgttacataaattaagattccaatacatattagctggtaaccgatcatgatgatatgcata

SEQ ID NO: 68360 - DNA, 97 bp, Glycine max
ccaaaaccttatcctacaatctcttcaacaattccttgacgcacttcatcttccggtggaaaacatatcacctgtcatttctctacatccacctctt

SEQ ID NO: 68361 - DNA, 387 bp, Glycine max
gttcgactatctcaaacgcccatcatgaaagagggcaacgcagatgattctaatatagaaaaacaagatttacaaaagagttcgatcatatgaaggttagggattttctacgcatcgaatagtcactcaaattcgactcatatttattaaattagataaacttaagcattactacctatttaagtatagaatgaatgtgtgacatcatacgacttaaagcactgtaaatacttggaaaataaatagtttaatggaaatgaatatattatattttaaaatctaatcactttacatttataataagctccccattttcaagtccatcaaggactttgatgatgatgaggcaccagcttctactactccgaattcacaaatacttcattc

SEQ ID NO: 68362 - DNA, 135 bp, Glycine max
cccacgcgtccggcaaagagaagatgctgagtttgagatgatcttactatatttttcatatgggaccgtcttcctgtataattgtgagttacagtgtccacttaaattgaatttggtgccttttccttttgtcct

SEQ ID NO: 68363 - DNA, 117 bp, Glycine max
gaacagccatagatacctagccaaatggtgactctataaactacgagagtactggttcctgcgcttcagattgtgctgggcttcatattgactgtgacaactgatgttgcaaatctt

SEQ ID NO: 68364 - DNA, 375 bp, Glycine max
gacgaacctgccgctgctggaggtacttactccttctatatatcatcacttcatttgcatgctcacaccatcgtatatttcatcatccgtgcatgtgcacaacacgacatacacacttgaataccaagccatttatgagtttataagatatacatataatctgaatcatattggacagatgctgctgatgctactactcaacctgcttaagtggcttataaaaataatcttgtacagctaactgaagctaatatgagctacttatttatataatatattaagagggtatgtttgcctatctctcaagatgggttgtagccaattcgaaataaagttttcaggtggattacataactgtacattttgtaactctta

SEQ ID NO: 68365 - DNA, 390 bp, Glycine max
acggccgcgcctccactgatgggtccattgttctgagatctcttgtataggaatataaggttgtgctcaaacacgtggataattatgacggggacaggatttcctgggcttcgttcgcctattactagtatttaatttacttatgattattaatagattattgatactactaattcctactttgtgttatattagtaccttgtttactgataaagattctatgactaatacctgatttagtggtacaatgttaacattatatatgttattattatttaaatttgactcctttttattcccatttttctttctccaacaataaattttcaccgttgccatttatttcatgctcactgaaaattgtaaacaagaacgccaccttgtttcaac

SEQ ID NO: 68366 - DNA, 368 bp, Glycine max
  unsure (1)..(368): unsure at all n locations
tcaaaaagtcgaccaactgcatccaagcacgaatcaaatcactgaaccgctagccgtccaggcctgcacactctgaggcagacccaattcgagaccaactgatcaactgaacaactaaaatagaaggaccagcagcgagagaagaaggagcgagaatatcacgagaatccaacataatgtgactgtacctagtaaaccataaccgaattaatccaaagaactgatactgaaggatgaacctaacacaggagnacagacatcaagtaatacaataaatggagtccataagaagcaattcgatgcaacatgcatgcttagcagagcgaattatattcaaatactcataggttactgccatagcctgaaaa

SEQ ID NO: 68367 - DNA, 249 bp, Glycine max
gcgtccggatgtaactgaaccaacagtgcttagcacgtgaattttagcataaactccacgaatctagggttttattcgagcccagatcactgcgggtataggttccaccgaataatcttaaacactcactgttgtatattttcaaatatttcattttttctaaaataactgtaatatttcaccaattatatttgtttaccgctattcaatcactcatgattcattttctaaatgtcgatggtatgcttc

SEQ ID NO: 68368 - DNA, 333 bp, Glycine max
tcctccgattttgcgttcttaatttctttttatgagttatatgcttggaagccacagggcactaaagttaaaaccattctgcggtttggattcccaatttcatttttattctcttaaattcaataatatttttttaatattcccattatttcaacaaattttttttttcattgttttatttcacaaaatttgaatgattttgctcaacgcttattcactgcatctgatttaccctctctatctgtgtccaatgtccattgcacttgaaatataactgatgcaaagatccataaaagtttacttaccatcccatttcaccgattttgaaatttt

SEQ ID NO: 68369 - DNA, 59 bp, Glycine max
gccgctcctacactaactctttatcctcctatatccactgcattcaccacataataccc

SEQ ID NO: 68370 - DNA, 117 bp, Glycine max
tacgactgaactacaaccccagatcctggaaatatataaaccttcaacggcatacaacaagggtaagattaaataacccaaactaacccatattacaaataactccttacaaatcca

SEQ ID NO: 68371 - DNA, 106 bp, Glycine max
atccaattttacttacgctttcattctacgtcatatctgttctatagtgggacctatattcaggtgactggccgtcaatttacaacgtcttgactggtaaaacctt

SEQ ID NO: 68372 - DNA, 259 bp, Glycine max
cacactcatactctaatgtatttccaggctcaaatcctaatgctaccattgcctcgccgggcatgctggttcggtcggcaacaccttctccattctagtcaccactcatttcttgtacacgacccaacggctcttaattctacttagcatcattcgtagtcacatactcaccatctagactcttgacctaaatctcactttggtataccattcacagaccactctgaattagacctataggctcatcatatctgatatt

SEQ ID NO: 68373 - DNA, 301 bp, Glycine max
  unsure (1)..(301): unsure at all n locations
cacngaaaaacacacttacaaatataattctaatttaatatattttaatcaatttccatatcaataagattttgatcttgaatattagaaaagatactgccatccaattaataggttctaaaactaatgcatcaatctatacatcacaattattactattaaaagttactatacttagtctgtactcactcttttatcttttgcaatcatgtcacacaaatggatctctgaaagcacataaacttgcattgaaagttaataacctgatgacaggctgcactgatttacccaatttgacttt

SEQ ID NO: 68374 - DNA, 57 bp, Glycine max
cccaaacctacttgaacctataattcgaattttctctgaatagaatcttgatgcatt

SEQ ID NO: 68375 - DNA, 409 bp, Glycine max
  unsure (1)..(409): unsure at all n locations
acgcngcaatataaaggataaaaaattatggaatcctactgtccaaagtcatcatcttctgttccccttctcnatactgctagtcactttccaactttgttccactgaaaaacacacttacaaatatattactaactttttctcatatactaacgcacctttctactagtatttgtatctttaatgttttagagggtactgccatccaattaatgtgttctaaaactaatgcatcgggctatatatcacaatgtattttatcaataatttatttttcttgatctgtgctgtttcttttatcttttggtagcatggcaaataattatatctggtaaagcatataaacttgcattgaaagttaataacctgattacaagcttcactgttttaccccattttaatttttaat

SEQ ID NO: 68376 - DNA, 378 bp, Glycine max
aagaattgatattcaggctatgttaattttcacagcgatataatttagagatgctattgtaattctgtctatgttgttcaatgaaatttgttcttgttgttctagaaatttacgtcttcatgagtgaataactcattggataacttgaaagctataagttcaagttccatcaaagccaagaatccacctttacctgatcaagcattgttaggtgcaattatagctgatgttattgctgttgttctctacatttttaccacatctatttaagctactctctttctccaaacactttcataaaatttttaattcctccctattacaataaccattatgtcaattataaatttctctgttctaccttgctacatttttcta

SEQ ID NO: 68377 - DNA, 360 bp, Glycine max
aaattgtttagtagtagagatgacccctatcatgttccttctttgctaggggcttctaagatatggagtgagaaccctcatcttgcagaagatgatgaccagcttagctcgcatagtgcctgagaacttggatcgaatatgcgatctgttgtaacgtcttttcagcagcttacttcgtatctcactttcactacactcgctaattgatatttctaatccttaaaggattgtcaaacattctttagcgcttcattctctgaaaacttccagcaaagcgacccaaacgattaaccctgctcgaacatactacttaagcttagaatgaccagagctgcagaagatggatgctgcactccatta

SEQ ID NO: 68378 - DNA, 376 bp, Glycine max
tacggctgcgagaagacgacagaaggggtgtgcaaccaaatatagggtggtttataatgggggcaaagactagaagtccttaataagtccttattgtatgaacagccaaaaatggctagtatagatttaaaattgattttacgattttagtaataaatattacaagagtgtatagatataccattacatggattccaatgtacttaaacaaagaagcaacaattcatttctattgagtaaactttagttcatatgaatttagaaataataacaaacgcatgccaagactttgagtcacaataatacgagccaataatactctaatgatatgaacatgttggacgtacatgaggtatgttccaagagtttacattta

SEQ ID NO: 68379 - DNA, 398 bp, Glycine max
cagtatgatgaaaatgaaggtccttgttttcttggttgctacaattgtggtagcgtggcaatgccgtgcttacgatatggtcggtctccgaatgaacactggctatggtgcccgtactccttaagttaatgtctcatgttgattgctttgttaggaaacacactaacatatttggctttgagaccattcctgaagagtgcgttgaagcaacaaaagaatacatccatggcgaacaatatagatcagactttataacagttaaccatcaagcttacttttatgccagagacctcgaaatccatcccaaagacacatttgtgttcaatatagatggcaccgtactctctaatattccatactacaaaaaacatggatatggggtggagaaaattaactcg

SEQ ID NO: 68380 - DNA, 469 bp, Glycine max
  unsure (1)..(469): unsure at all n locations
tagaaacagtgtgatgaaaatgaaggtccttgttttcttcgttgctacaattttggtagcagggcaatgccatgcgtacgatatgttccctctccgaatgaacactggctatggtgcccgtactccggaggtgaaatgcgcaagttggaggcttgctgtggaagcacacaacatctttggctttgagaccattcctgaagagtgcgttgaagcaacaaaggaatacatccatggcgaacaatatagatcagactccaaaacagttaaccaacaagcttacttttatgccagagacctcgaagtccatcccaaggacacatttgtgttcagtatagatggcaccgtactctctaatattccatactacaaaaaacatggatatggngtggagaaatttaactcgaccttgtatgatgaatgggttaacaagggcaatgcaccggcactggccgagactctaaagaaatac

SEQ ID NO: 68381 - DNA, 237 bp, Glycine max
tttatctagtttctatcaattaataattctatactccataaacttttgtcattcatcctttggatcttaataactttttttattattattttttattttatttttattaaggtttcaagattaccatctttgttatcagcatatcattttattcatatacttatattacattccatagttcatcttatctagtcaaatgtgtcacagattttaaatctgctcttcatacaatttttt

SEQ ID NO: 68382 - DNA, 128 bp, Glycine max
acgtacggatgcgaaaagaccacactaggaggattcctcattaactacgctttcctgtcactgctgtgtttcaccgaatttgggcctatagatcataaccaaatcgtgttctcttacattggcaaaca

SEQ ID NO: 68383 - DNA, 432 bp, Glycine max
gacaccatacctgatgccaacacctcacttacacccagtcccttataactatctctatggcctattcagggtcctcttaaatgtccctccactctctgttataacaatgatgtccatacaaacattccttcatactaaaatgatatttctccttacatgataagccttgctatacctaaactacctaactacatcaacattttttgaacatggactaaatcacctaaagccccataaaacccattattaccttgaaattgactaaaactaatacataaataacataccattacccatgcttctataccccatactactctattctcgctccataatcttcatgctcttcctcaaacgcttaagaaagctcaccttatcttgtggctctatcaccattgcattcgacaacatcacgagctattctattatctc

SEQ ID NO: 68384 - DNA, 119 bp, Glycine max
ctcacacacacttaaaattttattaaacaattctcttttctttatcaacttcaccactaccaggggtcattctaacctacacagaataaactttttcacagactcctaattacacatgc

SEQ ID NO: 68385 - DNA, 53 bp, Glycine max
  unsure (1)..(53): unsure at all n locations
tcaacacactcatnaaaccttttccaccaccactctcttctttatcaacttca

SEQ ID NO: 68386 - DNA, 196 bp, Glycine max
gtaacatacaaccacttttcatcttaaccattttgacctttttatcatcggttaccttcatggagtccctttactgacataactaatctttatcaacaactccccatcaagatggggctctcatcattctaccacctaatcatacaatcaccctcccaactaacaaacaatatgagcctatatcatcttgcaacct

SEQ ID NO: 68387 - DNA, 350 bp, Glycine max
gtaacatacaatgacttttcttcttcatcattatcagttgatgatcaactggtacttttgggggatccattgagtgacatgaagaatctctttcaacaactccccatgaagagggggctatcaagattgtaccagcgaatgtcacaatgtctcacttcactaacaaatgtgaggagcttgtatgatcttgtaaagccagagaaccctcacaacaaatgattgaagccttacaagagctatgcacgatggttgacccatatccattcaacaagggttgtttctaatgggggaaagatgctttcaacaagatcatgagggtcatggtgttatttgggaaagggcaggggcac

SEQ ID NO: 68388 - DNA, 164 bp, Glycine max
taacatacaatcatttttcttcttaatcattatgtcttcttgatcaactggtacctttaggtgatccatctaatgacatgaataatctttttcaacaactcctcatcacgatggcactctcaagattctaccacctaatgaaacaatctcccactccactaaca

SEQ ID NO: 68389 - DNA, 218 bp, Glycine max
cattaacaccttattctaatgtggttttttcaacaccaatcactaacattaccccaaatccatcacacacttaatacataggttcttatctacacaataatctcaaatcctcactcctaattaaaacctatctcacctttcaccttgcactaacaacacctcacttccactttcataatatatactttcattttcttccacatcttcaagcatccctc

SEQ ID NO: 68390 - DNA, 51 bp, Glycine max
taaacaccttttaaacacttattcaaaactacttttttctttataaacttc

SEQ ID NO: 68391 - DNA, 294 bp, Glycine max
ggtcgaccacgcgtccgggctgcttccatccagttagcccagcctagctcttgagcctatcccatctgccaccaggctgttaccacgtgctgttatagctgtcttcactgactgagcaacaatgcggatcgacattattacattgtttcttatctacagaagaatctcggatacagactcttaattaatctctgtgttaccttgtagctagaactagcatcttatctcgacaatgtacataatatatagtttcattaaaaaacacatcagcatgggcggccgttctagatgatc

SEQ ID NO: 68392 - DNA, 280 bp, Glycine max
ctcacatctgccctttcacttactaaataattttctcaaattcatcaatctgttctaatggggcttctatctttgtacacaaaaattcttcttactatattcctgatgacttgggtaatctctggcatgtgacacatactgcgttcatttcctactcaattacgatacactaggagattgtattataactgtatacctgtgataacactcatatttaaacatattatccttcacagactatccacatatctatacttacatttatgacacgacaattacc

SEQ ID NO: 68393 - DNA, 334 bp, Glycine max
cttctacaaagagaatgatcacctagcaaattttagttgcctaattcactttacacctaccgaggctccttctaactgaattgcagttttcttccttatgactctctcagaccatgatatgctgactattttgccgcctactgacaacactctcaatttgaagcacgatcttatggcgcttggagtagctcgtagccgaatctttgtctaatgcgcattagcgtatgatcccgccagctacggagtcgggtcgagccgaacccattggccaaggctctgcgccatgttaagcagcaaggtgcgatctgaagaacaaacctcctgcgctgaccag

SEQ ID NO: 68394 - DNA, 379 bp, Glycine max
  unsure (1)..(379): unsure at all n locations
aatcccggtcgacccaccctaccttcattaaaatcnctttattatacaaaattttctttcattaaaaataccttctttttcagaatacttatcaatgaaaaaggacccccttctaaagattactgcacacttctacaattttctgaaaaatacccaaatatatcgcctttcactcttcacaaatcctcaattttaacttttttaaagcttcttacctttattatataatttctacataacaaaaacccatattaaagttcatacagagctacaacataaaataaacaacacctatcatatcatatataaacacttcattcaaattctaaattcacttgtaatttaaccaatcaaaacactttgaacacccttttatcca

SEQ ID NO: 68395 - DNA, 291 bp, Glycine max
  unsure (1)..(291): unsure at all n locations
cccacacgtncggtaaaactttgtacacaatatggagtgctacacaaggccaaacatgagtgagcatcacctctcaacagaggaagaagccaccatagattcacagaccagatagtacttttattgagtcacaccacatctccacacatagcctcaacgaagtgactattcagctcaatatgtcgatgctttctacaatgcccatcactcttctttaactataccagaattaacacaattgcaactcctccagaatgatccccaagagaagaaattggtgtacaatggaag

SEQ ID NO: 68396 - DNA, 163 bp, Glycine max
cgtactctaactccttttattattacataatataacttgaattgaaaatatcttctttgtcgacaaacttatcactacaaaaggatcgtattctaacgattactgcacacttcgacaatcttcggaataggacccccagtgatcgcctttcacccttcacaaa

SEQ ID NO: 68397 - DNA, 58 bp, Glycine max
cgtttaatttaatattaattttccatgaaaattatatgtaacccaataatttctactt

SEQ ID NO: 68398 - DNA, 57 bp, Glycine max
ctcacacgcacgcaaacatttcatccacaatttagggtgctgcaaaatctccagctt

SEQ ID NO: 68399 - DNA, 134 bp, Glycine max
  unsure (1)..(134): unsure at all n locations
ctcacacncacccaaaaatttcatctataatataggatgctgcaaaatctacatcttatggggcatatttcattggatatataaaatatttactttatagtcgtgatgatcttgcaattatctggactgaaact

SEQ ID NO: 68400 - DNA, 197 bp, Glycine max
ctcactctcactccttcatatattacataatctaactttacttgaaaatttctccttattcgaaaacttctcactacaaaaggatcttactctaatgattactgcagacttccacaatcttcggaataagacccacagtgctcgcctttccctcctcacaaatcctctgcatgcaatttcctaaagattcttgcctt

SEQ ID NO: 68401 - DNA, 424 bp, Glycine max
  unsure (1)..(424): unsure at all n locations
tcgttctgaatgntgggggaatttataaaaattcctatttattgggcctaggggatattttgcccggccttataaaccctttgggaataatttacagtccaaaatccttattataaaaactttgtgaccttaaaggttgcctatccaaaattttgcaccaaaattttgttgggtcaacttgatcacaatcaaacaatggcccttttcgctcactatgcttaactaaatgacaatagctcatacattcctgaaaaaaatcttttacacgagatcgtgatacattttattggttcaccatttgtgcttaaagtcacttgcggatcactctttgggcaaccttttgaaatgtgggaaaaaaagaaagatcgtttacaaaatcaatccaaaatggaatttaatcaaactgatttgttttgtcatcttc

SEQ ID NO: 68402 - DNA, 118 bp, Glycine max
  unsure (1)..(118): unsure at all n locations
aaaaccttttcgacccacgcctaccggaaaacccaaatattcatttttttcataatcctttttaactagaaantcttccctttttagaaaatttctattttatatacaaaccttttaa

SEQ ID NO: 68403 - DNA, 341 bp, Glycine max
gtgccacggctaagtgggtattcgggactacatcatgacggggccacttctacacaaaggcctaattctatgagcacgccgacaaacggactgcacgctgctaccctccttcttagccggcgctaatggaacactctttacccatcacctttccaacagctactacgccatgctggaagccacacccaagccttgagcttcttataacgccgggatgaagccgaactgaccctgggaacaattgcctggaaagaaaacaagaacggcgattcctgtcacgattacttggaagacagggcgagttttagcgaatacaagcttatggactatgaaagcaacgc

SEQ ID NO: 68404 - DNA, 144 bp, Glycine max
ctcacacacacccaaaaattacatctaaaatttatgacactgtaaaatctacaccttatcgggcatatttcattgcatatattacatacttccttcatactcctactgaacttccaaatatctagactaaaactaactatacaa

SEQ ID NO: 68405 - DNA, 417 bp, Glycine max
tgctgagtgtggggggaaatgataaaaatccaatattatcggtcttggatgatgtttggccgggctcagaagcccttgttgataagtttacagtccaaataccttattataagatcttggtgacttcaagggttgcatatccaagatttggcaccaagattttgttgggtcaacttgatcacaatcaagcattggcccttttcgctcactatgctaaactaaatgacaatagctcatacatgcctgaagaagatcttttacacgagatcgtgagacgttgtatgggttcaccattggtgcttaaggtcactgccggatcactctgtgggcagccttttgagatgtgggaaaaaaagaaggatcgtttacaaaatcaatccaaaatggaatttagtcaaactgatttgttttgtcatc

SEQ ID NO: 68406 - DNA, 176 bp, Glycine max
accggttcggacacacccgtccgaccgccaccacccaaaaaatccatttaaaatttatgacaccgtaaaatccacatcttatcagtcatctttcagggcctatattacatacgtccttcatactcctacttaactctccaatatctttactcaccctaactatacaatcattctca

SEQ ID NO: 68407 - DNA, 190 bp, Glycine max
  unsure (1)..(190): unsure at all n locations
cttgccgncgtcaaatagttttatctataatgtgggatgatgtcagaggaacaaattatcagacataaggcgttgtttatattccatttgtgctttatagtagggctgtacttgcaaggaacttgtctgcaaagagcaatacaatcaggtgcgatttttgaacatcataagatgcacatggaaaaactat

SEQ ID NO: 68408 - DNA, 333 bp, Glycine max
  unsure (1)..(333): unsure at all n locations
ttacgtcactctgctgtccgaacattactttctgttttatcaaangaagtaaaagagacgttcccagtgctagggtcagagcttaattttccaaataatccttatcccaaacaattttctctttgacacaaataaccagaatccatcgaaaccgacttgttgttcactcactcggttacaaacaccagacaacctccacccacgaacactatatcattgtctccccccattacatgatttcaacccttctaagcatgataactgaactcttctattacacagacgatatatcacctgcacaccctttcgggctaattacattcgcgttgcttt

SEQ ID NO: 68409 - DNA, 131 bp, Glycine max
aaacaacctgagggaacgtgaatccgtgcttcaatgttcagggaaagcgcatgtaccggcgcgagcagacaatccaagccaactccatcatcaagagacacgtaactatacactggaagaacatgaccagg

SEQ ID NO: 68410 - DNA, 253 bp, Glycine max
atcacacgctcctatacattttatctatacattattatacttgccaaccaccttcttatgagcgatcaaaccattgatcgatcgcatacctctttcatatcacgtctcttcttaacaatatctggacctattctaaatgaacacaatgttgaaactgtaacccctttcactattctaagtctaaccctattaacattttgtgcttcgattacctcgcatcaacttcatacactcttctataacaccttattat

SEQ ID NO: 68411 - DNA, 141 bp, Glycine max
atgacacggaatacaccgattacggtatagcgctgtttaaactaaatatttgaacgacagagggtgcctgccacaagctaagtatgatgcgcttatctaaatatggaatccttcaaagcgatggcgaaaaccagactctct

SEQ ID NO: 68412 - DNA, 127 bp, Glycine max
attgactcttgcgaaaaacgactcaatatactgtcaaaccaatatagacattggagcgtcttgaatgttgtttctgggacattggatcggaaatgtaataagctctacgaacagacagtctggacat

SEQ ID NO: 68413 - DNA, 316 bp, Glycine max
attaattattgtgaaaaacgactcaatatattaggaaaccaatataaacattggagggtattgaatgttaattgtgggagattggataagaaatctaatatgcttaacgaacagacattttggacatattttgttaaaacatgacctgtgcgtgatgattgtaaaatgaatatctggaaggtgatgaggttgacctgtgaaaaggaagagatgatgaaatgtaaaagttctgattgactatgatatgcaactaggattcaagtttaagaagttatctcaacagcattaatgaatgatagtgagaattttcctgcat

SEQ ID NO: 68414 - DNA, 273 bp, Glycine max
ccggatacccggtcgaccacgcgtccggttacatataatatacctattacaaaataacgtgaattaatacaactctttcaacgacagaggcttcctggcatatgctaaagatggtgcgcttatctaaatatctattccttccaagcaatgacaaaacccagaccctcttgctttctatacaatacaggatcgttcattcgattttgcactcatatattctcttctggaacgacatattgatccatcttatatcgtttgatcataacaatggct

SEQ ID NO: 68415 - DNA, 251 bp, Glycine max
ctcaaatataatatacctattacagataacacctgttttatatacaactctttgcaacgacatatgcttcttgtcataacctaagtatggtgcacttatctacatatcaactccctccaagcaactacaattaccatactctcttgctctctcaacaaagccagcctcattcattcaattctgcactctactattctcttctggaactacatcttgatccattatacatcttttgatcataacaatggctc

SEQ ID NO: 68416 - DNA, 314 bp, Glycine max
gcaaaatataacatcccatgaacaaagtcacgtgtaattatacaaacttctgaacgatttgatggcttcgtgcatcacctgaagagggtgcacgaatttacatacactacttcctaaaagcgatgacgatacccagactctctcgctgcctcaacattaccgccctcgttcattcgattctgtactcaactattgtatactgggacaacattatgatccatcatatctagattgatcctaacaacggctgctgctgtcactgtcatgaccgaggttctagaatcttttaccgctctaggagtatgtgccaacac

SEQ ID NO: 68417 - DNA, 363 bp, Glycine max
  unsure (1)..(363): unsure at all n locations
actcatacggaaaacaacataatgnnattaacaaggtcattttttaaataacaccaacaaaccggcaaatggggcaattttattgggtgcaagagaaaccaaattatatattgcagcatcgagataagagattctgatacagaggagttgtttgtgataaatctgaacgacaacgagcctttggctctggatgcaattatagaagactgcgagatcaccactgagtactcgcttgatattgatattcacgacggcggtagcggcaactatgatgatgttgttatgtggcactaggcaaggatggagattagagcatggaagctctttcatgggcattgaaacaccccgtgacaccatctgcca

SEQ ID NO: 68418 - DNA, 343 bp, Glycine max
attaactattgtgaaaatcgactcaatagacttttaaaccaatatatacattggatcgaattgggtgttgattatgagtgatggggtcggaaatctaataagtttatcgaacagaaaattgggacatatatatttaaaatatcactcttgcttgatgatcggtgaattaatatctgcaacgtgataaggttgacctgtgaaaagggagtggtgattataataaaaagttctagttgactatgatatgcaactaacattctggttgaagaacttatcagaattttattgatgaatgatagtgagaattatcctgcatgcaaagaaaaggaaacagctctattga

SEQ ID NO: 68419 - DNA, 281 bp, Glycine max
attaactcttacttgaaacgacccaacagactaccaaaccaacatatcctatgcatcgaactgtatgttgattttaggacgacgggccaagaaatctcatatgccccgaccacattcaattcccacacactttatcactaccttactctatgctccatgctctgaaaatccttaaccgccgcactatcaagcacacctgagaaatgctcctcctgctttcatctacaagttcaactctactacaatctgcaactaaccgtctgattccacatcttatcaca

SEQ ID NO: 68420 - DNA, 291 bp, Glycine max
attatttcttttttgaaatgaacttatgcacttctacttcaacatttactatgaattgatcagtgggagcaatacaggtgggcgggccacaaatctcatattccctgaccacattcaattccgacacacttaaacaatacctaactctatgcacgaagatcactaaatcatgtactgccaccctatccagtacacctgagacatgcatctactgctttcatcaacaagttgaccaataatataatcctcaattaaaagtgtggttcaagatccaatgacatgacaactgag

SEQ ID NO: 68421 - DNA, 186 bp, Glycine max
acgctttaacttataataacaatactattaaaatttcttaaaaccaataattaatactgctactgggattactccaaatatgtgcccgagcactatcttataacctacctaatttaaaacaaaacactatttcaacataaactatataattaataacacgacaacttaacttattatctaatcata

SEQ ID NO: 68422 - DNA, 261 bp, Glycine max
  unsure (1)..(261): unsure at all n locations
attaactcttatttaaaactactcaataaactttaaaaccaacataatctatccatcatcttggatgttaattctggtacctcgggtcanaaatttaatatgctccacaaacagtcaattcacacatacatttttaaaatatctctatttcatcatgctctacaaatcaatatcctcaactacaaaaatttcatctcttaaacattacctttgcttcaatctaacacttaaaattacactcttatatgctacaaaccctct

SEQ ID NO: 68423 - DNA, 160 bp, Glycine max
attaactcttattaaaaactactcaataaactttaaaaccaatatattcaatccagcaaattgaatgttaattatgatacttcgggaaataaatttaatatgctcctcatacatacaattctcacatatattattaaaacatctcaatttcatcatcatt

SEQ ID NO: 68424 - DNA, 425 bp, Glycine max
cttaactactgatatcaattataacaaaacattgaaggattattagggaagttgtagtttgaaactgcaccaattatatatacaacatgtgtcgtggaacttttgtggttgaaggatcaagggtattgcaaaatgaacagcacaatgatgaagttggtggctcaacatgccaagaaccacatagggtcagtaactgaggccaagaagctggcttctccttctacttctccttctacttcttcttcttcagtaacttcaaataacctgagagatgatgagaagagaaggatggcagaggagtctctcaaaacagttatgtatttgagcacatggggtcctaattcttagagttagaaaacattagattaatatcataaatatttagcataattcagcagggcacaaaaaatatgatgccagtgatc

SEQ ID NO: 68425 - DNA, 313 bp, Glycine max
cggacgcgtgggcggacgcgtgtgctgactcgttttacggacgcgtggcgttgttgtacaacgaagggtatttttctttggtggtctgttctgaggtcaatttaccttcagtacctagaaacatttggtggttagattctggggccactactaacatcagtgtttcaatgcagggttgactcatctactggaagccaattgattctgaaacgatggatctacgttggagatggtaaatcggcggaagtggaagctatacggcactttagattattactacgtactagcttttatctggatttgaaagacactt

SEQ ID NO: 68426 - DNA, 326 bp, Glycine max
ggtttctgcagcttcaattcaatcttttgccacaaggcgtaaactccctccgactccgtcccaacaacgccttaaacgtcaccaccttaatttcttcccgccccaaccggcccaccacacctttcgtcaaccccgccaccgcccgccgcttaactaaaacacaactatgcgctttccgggaaggccgtgccaccccttttttccgggaccttgggattccaaaaggccaacgggggcttattcttttccccaacctcattcaatttccccgtttgtgccttgccacgattttccttggggccattattaacaccaccaaacccctt

SEQ ID NO: 68427 - DNA, 431 bp, Glycine max
ataatttctccgttgatttgcttttattctagtttaatgtttttattaatagcaaataaattgatctttgttgatttacttttattttactttaatgtgacataaacatcacctaatagcaaataaatttaattttagtttatcatgtactagtataattatacttcttttatgggcaaacaaatgttaaattttttttaagatacctggaaccttgctaatttagcttcttttttttttttgtgcaatcaaaattggagtgtccaatacctagaaccttgctactgttcatattgaagggaaacaattttattcatcggacagctattttcgaatttatgtttcccgtccactcccaatccactatgtagaaccttggcaagcaatcaagtaattttattcattggtcactctaatggggggtgattttt

SEQ ID NO: 68428 - DNA, 226 bp, Glycine max
cccacacgtcctcaaacaaaaaaatttttttttttgtcaaaaaaatttacacagactaacaggggaatatgatagactcgtggtgctaactacaaacaaaagtatattcaaataatcaatcattaaattcaaaccaaaaattacgttcattatcaactgttaaccattctatttatttaatgtgctcatttcaacattttttccttctctaacctttgctgtatat

SEQ ID NO: 68429 - DNA, 295 bp, Glycine max
aatcacgcattctctcacattattttttcattctatttcaaccttcaccacctattaactcttgccctaatacacatttctgttgtttactataatcaccaacattatatcattctatatactttccctaattcaaaaattattatattcttcaaatatctatacatctattctcataatcccatatctttcacatttttttaactccttatattacttccaatacatatctttttttttacattttatttccttacttaccaaattaatctttacctctatcttcttccaccct

SEQ ID NO: 68430 - DNA, 256 bp, Glycine max
  unsure (1)..(256): unsure at all n locations
ccgggacgacccacgcggacggacacacataaaaaccataatccacgaagatctcaaaacagtgagcancaaacgaacnctttgtgttttgtgctaaaaacgagagggggcgagcttttttttataaccaaacnccaataacccacacaccaacaaaccaccaagccacaccaaaaactaagaaacaaaaaagcacaagccacacacactcactgtaaaacagccccacatcccacgccccaagatgaaacacaca

SEQ ID NO: 68431 - DNA, 192 bp, Glycine max
gttacgcgttcgaactaattcttattttattgttgatctccctaaccgatatttggttcattggactataaaatgactgcggtggggtgctaacttgttctacataaaatcctgatagagctccaactctttaacaacctgaataaatttcctatactagatctacacattttaaacaatcacaaaaatctt

SEQ ID NO: 68432 - DNA, 257 bp, Glycine max
cccacgcgttcggacaattatacacgtaagaggctagttcgctaacagagattgagtatttagtgattgcaatgattgcgcattttacctacactagtgccaaaatcaaaccatgtagtggattatgtatttaattaccaaagtacaccttatattaaggacgctcacgttaaagtgacagacaataattttttggcatcttgtatgcctactgaatttgcttatgaacagagcagatgtatctaaatgtataaaat

SEQ ID NO: 68433 - DNA, 182 bp, Glycine max
tacaaaatctgggcttattcaattttctgatccgaaaatactttccaaaactcaattccaaattctatctgaaccctctatcatatccacttaatttttatgaactctaatattatcctactaacactttatttccattgcattaaacaccacattacatatttttaaaatcttataaaaca

SEQ ID NO: 68434 - DNA, 405 bp, Glycine max
gtttgttgttgtaactcgttcttcttcttttgttgatctgagtttgagtttgatttttctctgacctgaaaatgtcttgctgcgggggtaactgtggttgcggaagctcctgcaagtgcggcaacggctgcggaggctgcaagatgtacccagacttgagctacactgagtcaaccaccaccgagaccttggtcatgggagtggcacctggtaaggctcaatttgagggtgctgaaatgggtgtgcccgctgagaacgatggctgcaaatgtggaccaaactgctcctgcaacccctgcacttgcaagtgaggtgttgggagagcaagcttcaagcagagatagcccttaattaggaataatgatgaactattaatgtgtagctaaaaacttatgtattatgtct

SEQ ID NO: 68435 - DNA, 294 bp, Glycine max
gcgacacatgagatactggccgcgcatacttaaaaagctcgtgggcctctaactgatgctacagacattagtttattcaagatacggatgctatacatagtggccaaactgagagagacgacctcatcaagcccagactccgactcgaattgatcgtattcaacgaatatgtgccatattgcgcaagttgcccgatgcttcacgatctatcacacgcatgtattaatggtctgatcacaaatattgatcatctagacccatatggaagacttcgcctatctacttacggcttat

SEQ ID NO: 68436 - DNA, 86 bp, Glycine max
cccacgcgtccgaaaaaaaaaaaaaaaaaaaaaaaaaaaaaaaaaaaaaaaaaaaaaaaaaaggggaaaaaaaaaaaaaaaaggaa

SEQ ID NO: 68437 - DNA, 230 bp, Glycine max
catacgcattctgaaaaacctaaattgcctcatcaaaaccaaacttttggaaaggtggaatggtcatttgaagaactttgatttggagaattctatgcggaccttgggtcacatggatctattgtgtctgctacatggttgaacagtgctagccattattatgtatgactgaactaaatgcacatccatattttggacaactgtatcactgtttaaataatagtgaggct

SEQ ID NO: 68438 - DNA, 170 bp, Glycine max
gatcactctagctgctgcacactgctactatataccaaaggctcttgcacacgtggagtgaccttgctgcgtcggcgggctagcctgggtcaacggctacgatgcccttgctaaagccttgccgatctacggcgacgttgccgaatcctacagctatgaacgacccggag

SEQ ID NO: 68439 - DNA, 383 bp, Glycine max
  unsure (1)..(383): unsure at all n locations
tacacgcgtaagaactcgtcataatgattctaccaacaatgctgctataaactactgaggggtatatataaagggaggccaaacagttcatccaaactcgttcagtataaaagatccaagattacgtacacatacataccatcctctaactgttatctnaagcctccatactgcaactcactctaccgagattaacatcaacgctacatggcataaccctggatctacctatcataatcaccttgctactcacactcattatgacagctgacatactagcgaaaaatctcacaccaatcacacttcccatcatcactatcactctgaataccataagaaatgcaccctataacgttccattcagctcacactgaattcatcct

SEQ ID NO: 68440 - DNA, 214 bp, Glycine max
attagacctcgagcggatgcacttaaggttacaatacaaagccctgtatgtgcatgtcggcggacacggtaatgatattgtctgagtcacacatgattaattctcatatgattttctttctctagaccattaatgaagtttgatgatcatcagctgctacctatcgtggacctcagtaacattgcgactatggctaacaacgtgatatagtggc

SEQ ID NO: 68441 - DNA, 407 bp, Glycine max
  unsure (1)..(407): unsure at all n locations
attccctgctctacccacacgtccgactataactccatcttatncactcaattttatcatccaattccctaactgcacatacccacctacacgtgatttttataaagtgagtcctctttttctattactcctattaatttttatctctatatcattcataactatcttaattaccacactctaacttatccttctcttttttaacccctcctctattaaaaacaacattaaataattacatcattatatacaacttcaataacttcatatatattaactcccatctaccatcaattctcatacttctatttttcatcttttttcatcttcattctttccaccttttcttctatttattacacaatatcctatatttttacccccattaattcccacttatcttaatt

SEQ ID NO: 68442 - DNA, 135 bp, Glycine max
ttacttctcatcatcattttaccaacattctattttttagttaataatgttataatataaatggactccaaacttttcatccacctattttattataacaataacaatattatttatataaattaatctcctctt

SEQ ID NO: 68443 - DNA, 146 bp, Glycine max
aacaaacataacaaaaacgcctgccttgtataggatcacagactaacgaacgcgatccatgggagaatgataaataaccatatagtatacacactaagcatcatataaacgtgtgccattcgctaaacaaacaaacagaaacttgg

SEQ ID NO: 68444 - DNA, 254 bp, Glycine max
aaaatactttatttatatcttcacctattttctaatattatccttatatttcattaccgcatcacttaaactccgagcataatataacacccaatttaaaatatcctaatcgtccaactttttattaatttattaccaccattttttcacctaatattatttctttcatatttttatatatttacttttacttaaaaaaactttcatgtaattctaaaaatttattattcaaattttcatttttttattaaccc

SEQ ID NO: 68445 - DNA, 273 bp, Glycine max
taaaatatccttaggtccaactttttatgattgtatttccatcattttttggcgtaatattactgcttttatattttgatatggtcattgtaattttaacaaacttacttgtaatgctaaaaatttattaattaaatttttattttttttataacccattttcacaccatttaattacctttttaattcttataaattttacttataaccatttattccatcccttcaattataattaattatatctacttcaatttaaaaacattatttttt

SEQ ID NO: 68446 - DNA, 426 bp, Glycine max
gacccactcggacgatttttatctctcccttagtcaaatgtattcatcagacttcttcccatgatatcttataaaagctaaatgcataacatttactgcggggaggctagatatcccaatgttactactatgacagtccttctacttatgatcccattcacagcattctctggcgtaaaattatctctatcacatattgatatcttgaacatcaaccaactaaactatctatgaacctctccaaaattgttttgtaaatcattacctgttcaagaacctattcttaagcacttatatttaaaagcatgtctttgaaactttccttataaccatctctttctacaccccaatcaaaactcattatctttaatctaatttaacaacatttttttcttattgaaaaaatacaactcccatcatttctta

SEQ ID NO: 68447 - DNA, 259 bp, Glycine max
ttttatcttgctatttaatcttttcagtttttatctcaacaattctcccgacttttctgtatagtttaaaaggtaggggcttcctctctatatgatccaatcttacctactctttcatgctacttcatatctcttctataatttcacctaaattcaatttactgtccgtctctttacaatctctttaacttttaaaaccctttcattaccctacttaatcacctttcatcacatacctctttcttctatcttcttttta

SEQ ID NO: 68448 - DNA, 72 bp, Glycine max
acggccaaacatgtcagtaagccatctagagaacagtgagaatgatgaaaagcaaggtggaagggtttgatc

SEQ ID NO: 68449 - DNA, 325 bp, Glycine max
caaatgacaagattcctagaaacaaggtctgcccgtgtggttcccaaaagaaatacaaaggttgttgtggatctgctgtggggaaacaatcggctaagtttgtagttcaccaagcagctgactcaaaaaagggcaaaaaagaaaggaagcaaggaaaaaaggggatttctgcaaaagctgaagtacctagtgaatatgacttggtaacacctgacatgggtgcactttgtatttgaattgataatagataagttagttttgtgctttcccagaggagataaactattgaagatcgttctacctataattgagctcttcacaatac

SEQ ID NO: 68450 - DNA, 79 bp, Glycine max
ctcccctctaaaacatccaagcttacatacgcgtgcatgctacgtcatagctgtgctatagtaacgccggggttcaatt

SEQ ID NO: 68451 - DNA, 382 bp, Glycine max
ctcaacccactcgtacggtaaccaactatcactcgctaatccattcttattcctactaactttaactaccatcttccctaataccggcaaccacttactgacgggcgatccctaactatcactctatactactcacactatcacttccatttctataaacacaccttttatcaccctctaatctaacctatcctcacttctctcccataattaccactaatacaacctcatcaactaccttcaatatcatctccactacctcgacgcttacatctcccacatcatctccacactcttccaaacctaacacccataacgataacttactccacaataattcttttcttttcaacaccttcaaaaaacacaccctaaatttctc

SEQ ID NO: 68452 - DNA, 251 bp, Glycine max
atgcggccacgcgtccgcccacgcgtccgcccactcgtccgctacaacggaagaagaacttacctgcaaacttgggaaggatcaaagagaatggctcaagcaatcgcatcaatgactagcttacgtggttcctctcatgctgagttgcaagttacccttatctccacacccttgaatgttattgagtccaaacagttcgctctcaattacacacgcaacatttacagaccctgcacacaaacaacattttt

SEQ ID NO: 68453 - DNA, 444 bp, Glycine max
gcggccactcgtccgcccacgcgtccggacccatccaataagaactctgagccaacaagggccacaaactcgagtgatggcaacgccggatctgtcaaggccaatggattcagttcaacacaaccaccgaagcttaattttgtcaattgtgaagaaaatggtgggtcgctgaatcacagtagtaagcaaggtatggtgggttcaagttgaatttcatgagagtcctttgttgtgattcaaggatgctaagctgtattaggttgatatgatgtatattgcggttgctactggaagaggcttgcagctccacggcatcacaagaggctaaattttcatagaatgacaattttttctgggaaagaagtgtaagcaacagttaccaaatcgatttgtgtcctcaactgctgctgatactcccagaggtgatgctgctttgaaatggca

SEQ ID NO: 68454 - DNA, 143 bp, Glycine max
acgagtttattatcgttttcctttctcccgagtgttctcctttcttgcttccttctccggccagctttatcgggatggcggcatgtctgggaattgcttgccgtggaaacaacgccaaattagggatcccaaagcagcggtgt

SEQ ID NO: 68455 - DNA, 201 bp, Glycine max
aattcccggtccgaccgactcgaacgctatttctaactccgccatttctgccaccacctccaccgtcacgtcatacttttttggcggccgtctcagcaacgccgcaaccttaaacaactgaagattccacacactcctcaacttcagcaaaaacaaagcagcggcgccgtcaccgaataaaaacgaagtgaaagctaaact

SEQ ID NO: 68456 - DNA, 350 bp, Glycine max
  unsure (1)..(350): unsure at all n locations
aatganggaccgacccacgcgtccaaccacactctagttctctcttcatcaccttctttatcctttataataatttcatcaaggaggaggactgttagcgttaaacaaaggcatcctctacaatccttaatgcttatgcatgctaccgattgtgaacccatcactcactttctactaaagaaacaacaacctactgattcaccttaaactccaaatgacattacataagatccatccaagaattccttaaattcctgtacttcatcaattcaatcgatgtctaaatcaattaattgatctcttgatgaaaaatattcctcctataaagatccccacaaattggccctttc

SEQ ID NO: 68457 - DNA, 84 bp, Glycine max
ggcggggggcggccagaggatccaatcttacttactccttcattcttcctcatacctcttttatagtgtcacctaggtgcaatt

SEQ ID NO: 68458 - DNA, 118 bp, Glycine max
gtcactctttcgaacataccatgcaattgctctacttattccgtttttcattgccacgtggtggaatccctacgaagacgaattgcattgataaacgcatatagtgatgttgtgtatt

SEQ ID NO: 68459 - DNA, 126 bp, Glycine max
  unsure (1)..(126): unsure at all n locations
atatatcacaccccctactgctatctcttctcacttattgataaattnacactgacagcaattttcaccatctccttggaggctccctttctacaatccaaacattcccacacccatacacctatc

SEQ ID NO: 68460 - DNA, 111 bp, Glycine max
  unsure (1)..(111): unsure at all n locations
caacctaccatcaattttactaaccttttattcccaagagttttttacaatacaaccctttnaaaccaatgtctatctaattacctcacataaatacctaccttcttatcc

SEQ ID NO: 68461 - DNA, 308 bp, Glycine max
atcattcattagcttattcctctaattcttttttacattaatatcaactctcaacgtaggagaatctcttaaaacgtaccaccctccccttaacatcccctaactaatatctcattcaatgacatattcatcaatcacaacccctacatctacactctcatcttacttcccaaatcccaccaaacttacaacaaactccctctcttactatactttcactgtacccccttttacctcaaatcctccttctacttttttatccactcctatctaaacatctttcccttataaaccaactttatttccat

SEQ ID NO: 68462 - DNA, 51 bp, Glycine max
cccactctttcgaccacacgttccatttcttttcatctttactttatttat

SEQ ID NO: 68463 - DNA, 66 bp, Glycine max
agccttccgattttccttgctaaggaaaaaacaaaaaaactgcgaaagagggaggaggttattcgg

SEQ ID NO: 68464 - DNA, 133 bp, Glycine max
tggaaccaccccgtccgcggacgcgtgggttaatgggcaacctgcttccactgattatgatgaagatgatgaagaaaaggaggacaatcatggggcaagagattcctctcctgaggatgcttgagaatcttaa

SEQ ID NO: 68465 - DNA, 333 bp, Glycine max
cccttccggtttattttcaaaaaatccggctgttcctgggctggactcctaggcctcaaacaaaggcatgcgcgaccgctcctggtcacaatcttcagcttctaaaactcgcccggaaaagattgttcggaaaaaagttgcagccggttccgcctaatatcttatcatgttaaccacgtcatagtccaattttgcccgttgcctcttcttgagggtcatttgggggttaccggccgggtaacccaaccccggggggtatttgtcgacccaaatttttccatccacttaagggcctggttgttaaatccggtaaggaatcctttttttgaccct

SEQ ID NO: 68466 - DNA, 124 bp, Glycine max
cccactcttccgaccaccccttccatttcttatcatatttactttattttccccacgtgggggaatcatcatggattatcacttccatcgatcacccacattaatccttaccttaatcaccaac

SEQ ID NO: 68467 - DNA, 243 bp, Glycine max
cccactctttccaacataccatccatttcttaacatctatactttatatatcaccacggggtggttactcatcgaatatcacttgctttgttatactcatatctcccaattctgaacaggaccttctcatcaaatatcacctaccttacaaatccagacgatatacatgacagcttgtcaaagtctccactgtaacatgatgctagacatttccttctactctatcactggcaccacctacca

SEQ ID NO: 68468 - DNA, 106 bp, Glycine max
cacgctaaaccccgtctccaaaaatataaagtcgcatcgcggcgaccgggattgtaggtatcgcggttactttatcggcgtccgataacaccacaagcctttgacg

SEQ ID NO: 68469 - DNA, 297 bp, Glycine max
cccactcgtccgaccactcttcccatttcttatcatcttcaatttatatgccactcgggagttattcactataaagtatcaccacccttcatctcaccctcaatctccacactgttcaccaataacttcctaaataacagatccaccacaattgtttctcattacatctgttagtgaaaaaatctattctcaaacaaaattcaacaaatgccactccggctttacttatactattgaatgcaaaaaacatgaattctaaccaatctctcacaaacatgtgtgagaacttctacactt

SEQ ID NO: 68470 - DNA, 404 bp, Glycine max
cccacgcgtccgctcagaggagggtataggaatgatgcatatggcaagaagctcgaactgggcaaatggagactcgcacacccatactgaatatgcaagaggcaatggaaatggccatcatgctattaatgtggattccaattccaacagtaccaactccaaaatacatcatggtcatattaatggtcatgttcattcttcgcattgtagccataataaccatggcaaaaccagaaatgacaacgttcccttgggcttgggtcttggccttggacggaacagatctgttacagcctcatcatgatatttacatacatgtctggtgtttgaacctaacctgtaatgtaacataggcacacatctgggttggtttacgttaattcaatttattgtggctcttttct

SEQ ID NO: 68471 - DNA, 426 bp, Glycine max
cggacccgtgggttgatatttctatagtctagttgggcatcaaacttaattaaaatattaagagtctttaattataggaaattttctagcttttttatttggctgcctaataaataggacgtttctgggttgaacatgtaaagagattgagttactcttgagttgataaatgttcttttcttctttattacctccgtcatgatactctgttttgtatgagttcttcattttattttaacaagaaaacatcattttgaattttaagctagctgcactcaaatttattatcaaatctttgttccgacaacttctaccaacctttatgagtaccccctactttagaagcaaaaaaaattcctttccatctgggttttcattttaagaccaggagatgccatctaggtcacggttgctgaggaaaagggg

SEQ ID NO: 68472 - DNA, 158 bp, Glycine max
gattgaaaagccagtagtaatttatctgaataaaaccatttgctaatgaggacgatggcctggaatctctgataatggctcctcatgtatgtacattcaaactggatcacttccgaacaaaataaatggtagctagcaaacaactctgctttatttac

SEQ ID NO: 68473 - DNA, 130 bp, Glycine max
tcggccacgcgttcggttgagggggtcactttcttgaaccaaacacagattattcattggtaatggggccaaaacttggactgaagatgattttatgaaagttgttgaaggggtttgtcccgggggttaa

SEQ ID NO: 68474 - DNA, 56 bp, Glycine max
ataaaattcagtgctgaaacatggcttccgctactctctctgtagccaaaccagcc

SEQ ID NO: 68475 - DNA, 294 bp, Glycine max
tctatttctctttcatcaccaactttatccttttcattaagttctccatccaaggtgacttttatttttaaacaaacccttcctctacaatacttaattctaaccaatactaataataatatatccatcaccatccttcttctaacctatcattaacctacttattcacctcactctacccatcacattataataaatccatccaaccatttcttaaattctattcctatctcaattcaatttatttcttaaccaatctattaaactcttcattacaaaaaaaccacccttaaa

SEQ ID NO: 68476 - DNA, 233 bp, Glycine max
ctcaaactcccaatataacattcatcaatcatgatttctttactatccttagcatcatgtcttttctacattaacttctccttcaacaccattacttcatcatcattccctctttaaatatccaccaatattcaccttttacaccatcactttcactcattaaactttctctttctatactaatcaacctatacctatctatcttaactcctcttactctttactttaccata

SEQ ID NO: 68477 - DNA, 238 bp, Glycine max
gaccgacgcgtgcggtgagcaatatgaccccattttagacagcattcaaccatcatcctattctctgaaaaaaatgcatttagatcataagaacgaagctacacctgaatccaacatcattctaatgcccaaaaattcttacatgtctttatactctaatgataataacaatctttaacaagtttatcctgatatttctaccacttcttaaaatatatcattaatatcttaatataca

SEQ ID NO: 68478 - DNA, 89 bp, Glycine max
atttattcacatattgtaacaattggatgtaattattaaatattattttatcaataaaacggcatgaggcaggaatagttcttagagat

SEQ ID NO: 68479 - DNA, 273 bp, Glycine max
ccaaacaaaattttactttttacaaaacaccccaaaaacccaccttaaaaaattttttcaattacccgggttaaaataaaatgcattctttcccacccctaataatcttattttgtttgacccaaaattttttccgctaaccataacttttttttttgccaaaaaaaaggaaacttttttccacccaattggccaccgatttatccctttttatttgaatcaaggcaacccttggatccattttttcctcccttaacatcataaaattttttt

SEQ ID NO: 68480 - DNA, 280 bp, Glycine max
gtcctcatgaaaaaaaccgggtgtttttcatctattgcttatcaacgaaattagtattcatttctggggcaaactggctcttattaaaaatcttttttcagcccaaaaaagtgatatataaagaatacacaatctaggaaactgtcacatacaatgactgatctacctgctatcgaaaatgattaatggtcaagaactccatcttataaatctctttttaaacgacgaattcatatcaaatcttataacgaaatttctagcaatgacattcattgaaatt

SEQ ID NO: 68481 - DNA, 288 bp, Glycine max
tccactaatcattaaattttaattttatatttaaccttcaatatccaagatcacagttttttttattacaaacacatactacattcacttttctttcttttatctttttcttctatccataatttcaattccatttactctcttaacctattcattccatatctaatccacataactcatcactaattccacttcaccaacaaccaccacaacttcctaacattccctactcatttataattcatcttcaaactttttcattattaaacttatcctatatatcaatct

SEQ ID NO: 68482 - DNA, 231 bp, Glycine max
tcctctaatcattaaattataattttagatttaacctctaaaacacagcgtcaccgtgttttttattacaaacacatactacattcacttttctttcttttctcttcttcttctatccataatttcaattccattatctctcttcacccaatcaagctacggccaatctgcatgactcggctctgctcccactgcaccaacaaccgccacaactcccggacatgcccatca

SEQ ID NO: 68483 - DNA, 160 bp, Glycine max
ttttaatttgccttctacctcccaagtgaaacccttatttttgtcttcggataacttcacaaaacttccaggtaacttttctttgaatagaaaatatagtgacacaacagtacaaaaactagtttattgcttctccgctgctcaatcaccaccaccatca

SEQ ID NO: 68484 - DNA, 386 bp, Glycine max
tttcaattttccttctctttccaattaaacccttatttttgtcttcagaaatcttcacataactttcacctatctcttcttttaaattcaaaatataaccacacatcattatataaaccaatctattactcttcctctcctcaatcaccaccaccatcatcttcaacaacatctattccctaaccttcttatttcaatacatttcaatttcaaaaacctatttctttcttaccatctacatcttcaatttcaactcatacacttaatataactaacttatttcccataattatttaaaattcttatccttacttctatctctaatattactcttcttacttaccacattaaaacatttaatccttaaattcttaatcttaaaaatt

SEQ ID NO: 68485 - DNA, 180 bp, Glycine max
cacacagttatactctacactctaaacactctatctctctctctctccatctatcatacctggggggaatcaccaaaccgtggattaccctactttcaaactcatcatactcggtgacaccaacacatgtatgaccaacttcttgaaaatacatcctaccactgaattcataaagaaata

SEQ ID NO: 68486 - DNA, 253 bp, Glycine max
tcggaagattccacaacagtgggagggagatccaaaaagagagagtggaaaagatggcgcgggggagggcaaaggtgtggtgggcggtggcggtactattatgcgccgaatccgattcatattgggtcgagtaggcggagaaccctatacaaatggggtatagcgtggaaggaaatgaccttcacttgatacaccaatatccgcaaacgttcaactatgctatgcaccttatcaggatccctaagaaatactc

SEQ ID NO: 68487 - DNA, 316 bp, Glycine max
acttcttcccactcgtcctaccactcctcctcttactcttacaactatccaataatactacatgactggtttaacttcatagtttaccttaaaactacaaaccaacaattcactaaaatcataccaatctatactatccacaacttaattacacttatatccaaaaacttacatcttatataaattcacctatactcaatacaatcaccaatctataacaatctcacaacttctaaaaccctaataaccctcatcaaaatttctattcatattaaactattaatttcatcttcttctcttttcaaacattttaata

SEQ ID NO: 68488 - DNA, 414 bp, Glycine max
cccacgcgtccgtactgctgcataagacctcagaagggggatcttagaccgctcatggaggcatcttgagaaaggacatgctttctattatgaagtctaagtcattaataaaatgaaaaaataattaatatgaaaattaaaagttattacaatcaaaagcagcaatatacttactaacatgaacgcatctaggaaaagtgatcctgtaaagtagtatcttcggatttcatctgagatcttctagagatgacagtctttcattacttgaatcgctcgattcatcaccttcagaccctactccggctactattctgccacgcacttatctgagtatgatacactttgcacctatatcatagccactgatgtgtatctagcatcagcattagaaaatcttataagtctagctactat

SEQ ID NO: 68489 - DNA, 439 bp, Glycine max
agaagggccatcttcccgatcatcttgcttactaaaagcaatgcgataagatcgtcaaaaaatgctttctaccttcagtcggatggcccattaatgcctatgctcttctcaatcaatatggtcaaaacattactcacattgcacatatatgtaagaaacaatgtggcaaaatacctactaccaaattgcaacactgctcatctacatataaaccatagagactatgatgggaacactccattgcatttggcttccataaatgtatttcagcaagttatcagcttgatcacagaggataagaggactgatctgaatctcacgaatgaagaccgtttaacggctggtgatatcagtaagacctttgaacatccaatgttacctggaagagagattttatccatggagttatcaaaaggaactggaatccctgtaaatcaca

SEQ ID NO: 68490 - DNA, 174 bp, Glycine max
acaatcatcacacaattttttatcgagactcctgatgtacacatatggttacaattaaatgagtaggttatacatagatacttaatacgtagaattattatgcatatctaattgaatatcattatatcaagtttaatatttcatcataaacttaaatatcatacccattggaca

SEQ ID NO: 68491 - DNA, 226 bp, Glycine max
atacatttactcttctatataaagatcgattcttaaaaaaagttgcctcattatactactctttcattatatctacttatctacttacattcaattttaatctcattcttttacccttttttaacttatatttatccactatcttctataatttcaccatatcattttaacttttctccctttcttaaacttatatcaattcattttaactcttaactttcttcct

SEQ ID NO: 68492 - DNA, 323 bp, Glycine max
cccttcagcgcatctctctctacatttaaatcaaaggtgtgcctaaaagattagtactactattactaccacattccatgtctactcccatataatcactacctatactcaccatatttacaaccttccatacactcacaatctatttattcactattcacagatactagcttcatacattaacaatattatcataacttatacctagcctctagacaaacctaaacctgaccttctacaacaactcatccttacataccccttcatgcaatcttctaacaacaaaatactatcacctacatctatttctaccaccacatatt

SEQ ID NO: 68493 - DNA, 295 bp, Glycine max
  unsure (1)..(295): unsure at all n locations
agaagggccattttttcgcacancacgccagcaaaacgagacgagagcagacgtttaaacaaggcggtgaacctacatccggatggcccattaatccttatgttctcctcaatcaaaaaggtcaaaacattccttacattgcggcaaaaaatggaaaatataatgctgcaaaatacctaccaagaaattgcaacactggtcatctacatataaaccagatagactattattgtaacactccattgcatttggcttccaaaaatttatttcagctagattatcaacttgatcacat

SEQ ID NO: 68494 - DNA, 435 bp, Glycine max
  unsure (1)..(435): unsure at all n locations
ctcttcttctcttgcggctagggttttagcgcagcttcttctagatttaaggaagatggggaaggaaaaggttcacatcagtattgtggtcattggccatgtcgactctgggaaatccactaccactggtcacctgatttacaagcttggaggcattgacaagcgtgttattgagaggtttgagaaggaagctgctgagatgaacaagaggtctttcaagtatgcctgggtgctggacaaacttaaggctgagcgtgaaagaggaatcaccattgatattgctttgtggaagtttgaaacaacaaagtattattgcacagttattgatgcgcctggacatagggatttcattaagaatatgattactgggacatcccaagctgactgtgctgntcttatcattgattcgaccacttgtggttttgaagctggtat

SEQ ID NO: 68495 - DNA, 317 bp, Glycine max
gctacacgaccacacatacatgagcttttaccacaatccatttaatccctactacaggctggaatcaaagtctggggtcttaccattaattatcaagatactgcaatttcaattggtctttcttataaacttctgattgcatatatacagcaaataattataaatggcacttcatatgttgagtacaaaaatctcttggctgatgccacaacatagtatggtgtgaaatcttcaagtatataacaacataatctataattcaaaattgattctaaacatatatgccctaatatttccaatgatacataatcctttat

SEQ ID NO: 68496 - DNA, 429 bp, Glycine max
cccacgcgtccgtgaatgcatgtgctttgcgctcattggacatgtctaataatagcttgagtgagagagatttcaatgggaatccatcacttgtctggatgtgctagatattcattggaacaattatatctaggcatgaatcaaatcaatgacacactacccgacctctcaatattctcatctttaagagaattatatctttatgggaacaagctaaatggagagatttcacaagatattaaatttccacctcaactggaggtactatatatgcaatcaaattccttaaagggtgtgctcactgattatcatttcgctaatatgtctaagttagacatcttggacttatctgagaactctttattggccttggcatttagccaaaattgggttccaccatttcagttgagccacataggattgcgatct

SEQ ID NO: 68497 - DNA, 239 bp, Glycine max
cccacgcgtccggtttcgatgatgggtggttaatgttacagatcatatgcgagtaatgctgtggcatgctataatgacggagatgaaattaacatccacttcatttcactaagaaacttactaagtgatgataactctagaaataattgccctatactaattgctattaatgcacatttaatgcttacatatgttgatagcgtgtaatgcccatacatcagggggtagcatttagatca

SEQ ID NO: 68498 - DNA, 380 bp, Glycine max
  unsure (1)..(380): unsure at all n locations
ccacgcttccnatttccattntaaagttttttactttatttgtatccttctctcacattgtcctgcttataacgcctgtatattctctccatctctaaacattctcatcatatcataccataattttcttcagtttcttcaaccttttgccttgaattgttcatatcatcctattaagaatgtcaaactttttatctgtttcaactttcatcaatctttttctcctttttaagctcattcattttctctaattatttctaacactaaaatttcatcttcttattttcataatctctctccaatttttaccactaccttaacatctactattcttcaatgatttctaattcttttcctgtttattgattcttttttttctt

SEQ ID NO: 68499 - DNA, 378 bp, Glycine max
gacttatctcaaccacctctctatgccaatctctctgactgtgcttctataatgactaggagcgcgagatacatcactgactgctacaaataacttattctctccaaattctcatgttcatcattaaccaacaactgcttcatacaagattcacccagtagcaatcatacttatatctctaatgcagacagatactcatattgaactcataatttttaacatgctggattagctacttaacaaaacctcgattgtgaccaacacactgcattcatttatgaagggacctcaaggcattactgcctgtcctaaaggtataatcacatgtgccctgactttcataattatagtaacagacgtcactccctattgcaaaac

SEQ ID NO: 68500 - DNA, 413 bp, Glycine max
aattcccttctccgacccgagcgacccgtctgatctcacttgtcatcctatggtggtcaaagtagctatcaatccatgattaatagcaatgcgaataaaatggctgagcgggatgaatcactattgaaaacctcatgaattccttacaccataattaggaccgctgcattacaagatacacccggtgggaagcatggctttacctttgatgaaggttgtccagctagtgtaagtattagcaaagaacatgctacctttgcttgtgtaacaacttttgattgtgtcccacaaactgcattcattattgaggtggccaatggggataacaaagtttcagattggaaagaatgtttggccacattgacggagaaagcaagtcaaaaacttcagtgactattgacagggaatgtgtg

SEQ ID NO: 68501 - DNA, 392 bp, Glycine max
tccagacttcccgtttacacctacaatttattttcctttttttatgatcgacaaatatattatttgaactttaaaggtgtacttctaacaggggaatttctttaccatgatgcatatgtatattttctcaatttcattcactattcatttgttatacactctgcttaatattatcaatctttttgtgcttaatactacatatcctacttaacaaatccaattcaaattattcactcatttcataatcgtttaatctttcatcgttcaacattaactcaatttcttcgatgaatttttcattgatcagctttaacatttgacaatttgattaacattataaattttcacttatttactacaattttttaacattttataaaattcaaattata

SEQ ID NO: 68502 - DNA, 227 bp, Glycine max
tccctgaaaaaaaaattgaggaaggagagtgttagaaggagagataagaagaagaggagaatgatacctacccagcaagcaggatgtagagaaaaaaaaaaaagattaacaaactgttgatttgatttattttgatctgcttctgctgggtggttgtcaatgtctgcacctatgatcattgaccatatggcgatattgttaccataaactgaatcaacagcaattat

SEQ ID NO: 68503 - DNA, 80 bp, Glycine max
aagtactaagttgagagtaaaaatagagaagtgaatgtgtcataaccagtatcattatactggggacgactactgattat

SEQ ID NO: 68504 - DNA, 167 bp, Glycine max
  unsure (1)..(167): unsure at all n locations
aagtcaatagatagttagcaatgtatgatatatgaaatgtgaagttgagcacattgtatgcagagttganaccggcaaactcggcctaactcgtgtcgagcattttctttttccgcgtttgctccattctttcattggtcttctggctcttaattattttctatctc

SEQ ID NO: 68505 - DNA, 137 bp, Glycine max
cataaatgctatgtataatttaaatctaaatgaaagctccatcaaacaagtatttaatgctcgtgaaaagggcagatagatgtaaagaattgagttaatgcagaacttgttatcgagtttgcgacattcattgattg

SEQ ID NO: 68506 - DNA, 236 bp, Glycine max
aaaaaaaaaaaaaaataaaaaaaaaaaaaaaatataaataaaaaaaaaaaaaaaaatatataatgaaaaagtaaaattaaattgaggagtaatattaaataatatatttttatataaaattaaatttaaatatatttatataatttttattttacatgaatctatttttttaattattatttaaaaccttcatacattaaataaattaaaaatttgtttaaattatattagtatat

SEQ ID NO: 68507 - DNA, 382 bp, Glycine max
tcggtccggaattccgacgctacgccccacgcgtccgcttatggtagtgccgtagtggcactttgtttacttcgaagttggcaatgctacatagattatggttatcattgcaagctagtatgaatacatgtgaaaaaaatcggtggttttgtaattaatgcttatcatataatatggtcattgaggtattagtacgcttacattgcggtattagtccttgattttgtttgatgtaaaatgctagttttccataaaccaaagattgtggaactttcatcacatttacctggggtgcatccatgcttggagaactctaggatgatctcgactaagcccacgtgtaagctcttaatgaatagaagtttgacctattgtacctttt

SEQ ID NO: 68508 - DNA, 277 bp, Glycine max
actgtggttccattgtatatcagcaaccttaatactgccttctaacaaacagaaaagacattgaacttcttagaaggcagtactgtggttccattgtatatcagcaaccttaatactcatgcttcgatttttgtactatatataagatgtaattatgttagggagatgcacaaaacaaccgaataggtttgtactaaatttctaacgaaatgcatgtaaaattttcagttccattggtttataaaaaaaaaaagagcaaaaaaaaaaaaggaagaac

SEQ ID NO: 68509 - DNA, 122 bp, Glycine max
  unsure (1)..(122): unsure at all n locations
gcgaccattttcanctctccgtattcgcagaagtttcactttcaanaattaatcggaagnncaacgtgaaatgcatatcaataatcaagatgtgattaattaattagtaananntagcacaa

SEQ ID NO: 68510 - DNA, 402 bp, Glycine max
tggttcactttgcaggcacaaggcctcgatatcactgcagaggactaccacgggtgagaatgatctattaattatcttctagtgatcatcactttcatttttctctctctcccaagtctaaacttttcgttcttctcactccgaccaagtttcgtgcacggaaggctaccttacgactccatcgacactgatcatcagttacggaacctcctcttgagcatcaaacaaagaaaaattgtatgttactactctataatggatattttctttattattattgtattctaatcatcctaatatttttgcttttatcaggtttttactaattctgacaggattcacgcgatgagggcgctggataggcttggggtcaaggactgtttcgagcaaatcatatgcttc

SEQ ID NO: 68511 - DNA, 455 bp, Glycine max
cttctgtgaatgagccagtcactgaggttggaggagacagtaacaagaacacaactgacaacggaaaagctgtggatgagttggtcactgaggttggaggagacagttacaaggacacaactgacaacaaaaaagctgcggatgagttggtcgctgaagttggaggagacagtaacaaggacacaactgacaacaaaaaagctgtggatgagttggtcgctgaggttggaggagacagtaacaaggacacaactgatgacaaaaaagctgtggatgagtcggtcaatgaggttggaggagacagtaacaaggacacaactgacaataaaaaagctgtggatgggtcagtcactgaggttggaggagacagtaacaaggacacaactgacaacaaaatgggagtcaaacatgaatagattatgtaaattcttgtgaactggcttgggtggctaatc

SEQ ID NO: 68512 - DNA, 432 bp, Glycine max
  unsure (1)..(432): unsure at all n locations
atatattctcgccggccaaaattaaaattaaaattaaattaaataaaaaccctagcttcgtttttctctttctctctctctctctaactactctgtttctctctctacggtagatcggcggcgaggaggatatggacgacgacgacgagatccagtcgcatccttcgccggcgagcggatcccctccgtcgtcgccgagggcgaacggtcggataacggtgacggtcgcggctccggcgccgncaccaccgncgaacagtctggcatagcgctttccaatcagcaacccgccaaagggaaccggcgaagaagaagccgccgccgccgaagggaagattgctggagcgaaggtgcgacggccgtgctgatcgacgcgtggggagagaggtatctggaactgagcagaggaaatctgaagcagaagcactggaa

SEQ ID NO: 68513 - DNA, 155 bp, Glycine max
  unsure (1)..(155): unsure at all n locations
cgnntccgcttttgtctcaatttcgtaccgcccctcaacccagccgtgaatggacccctcgtctccgccacccgcgcggcgcacccgcatacccctccgtctaccccacttcccaggagccacctccgagccgcnctgcctccgcgtantccccc

SEQ ID NO: 68514 - DNA, 288 bp, Glycine max
gaaaaactgtaggaaagtgatagcacagaataggaggggagctgagctgacgatgattcagtatgagagcgagtataaaatgtgggacagctgcatgatcgataaacaggagttctcgccggagagagaagctgtgcctgaatcatttgatgatgaagttaactcagagatagaagaaggtggtgagagctttgatgagatcaatggatatgctgtctcagagaacactgatgagagcgggagcccaccatctggacaactgctattgaagaagaagaagaaaccttt

SEQ ID NO: 68515 - DNA, 437 bp, Glycine max
cttcgctagataccgtgtcttttgtactcattattgggtctgcaaacaaagacaaggagagagagaaagaattgatggaatagaaaaaggaaataaaagaatgaattggagaccacacactccaccgttctcatctaaaacttgcctctcactggttctctccatggaatagaaaaaatataaacgatacatccaaaggaagagagatagagaaaaaaaaacttgataagtgatttaataggaaagaaagagagaaagaagacattgaggagaaaatgatatggaagaaaaaataaataatgtttataagagttgaacgaaacaacaaggacaagtagttagtgtggagtgtacacttcaacttgttctaaaataaataaaattattttgttaattttgtttacacaatatgttaattattttctcaaatttttttt

SEQ ID NO: 68516 - DNA, 428 bp, Glycine max
gatgcacaaggcttgcctattgatggaaatagaaatgttctttaccagcgtgtacagaaagcaaggagaataaatcgatctcgtggtaggcccctttgggttcctcccgtggaagaggaggaagaagaggtggatgaagagctggatgcattaatttcacatataaagctggaggaaggaaatacagagttctggaaacgtcgctttttaggagaaggcttaaatggtgatcaagaaatgccaacagatgcagctgaatcagaggtccctgaagttctggatgacgttgatgctatagaagatgcttcaaaagaaggtgaagatgatgaaacggatgatgatgaggaggaagcataacaggcataagaagaagtagaaccagcagagaacctagatgtaaacaggattaaggagaacgaagttgaagc

SEQ ID NO: 68517 - DNA, 374 bp, Glycine max
cccacgcgtccgattcaaacaaccccttcttcactttcattcaaaaccaaagtcccacaccgaggaaaaccataaaattttagctctccacgtgtatttgaatcaaagtcttttctaatggtaggtgttgaatttggttaaccagtcttggaggtaatgctaatagtaattgctaagtgcttacaacaatgtttttcactttcttagacaattttcttttctccaacaccatgttcttgctgttgttgcttgtgaaaccgtattattaatcagtttatttatctgttcttccctgttatgtcttaatttgcataggtagatgtatagaactgattgttactccttggtgatttgagggtcttgcgttttgaagt

SEQ ID NO: 68518 - DNA, 384 bp, Glycine max
  unsure (1)..(384): unsure at all n locations
gtaagaacttgtttttctttctcaaactgctccttactagatttgaagaggaattgggcatggtgagttaggcacatggttatttgctttatttttgtcatatagctcttatgttaaactctgcttcgaacttgtcttgtaaaaaaaattgatggtgtaatttgtaaatccgtttccaataagttgttattgttgacataatgtgcataaagttaagtggtgtgttgcattattactaaatgtaatgaggacttaatcatttgcggtgagacagttactgctaatataattcacaaaaatttatgtgacatacataatattttctggcattatttcagcanatcttgcaagccaagatcaccaatttgaaaatatctgcaaaaa

SEQ ID NO: 68519 - DNA, 262 bp, Glycine max
  unsure (1)..(262): unsure at all n locations
tgaaattttaaaaatgactgggataaacttaagaattcaattattgaaattgaataagtaaacggtttaattggattggtcgaatggtatcaaaaaaatggagtactaactcccatttcttatttattattgaattaaccgatcaacttgctttgttatcgaacatttctttttgatttcaaaaattttccggaaaaaatttgaatctatttttatatgcgaatcaatcctactacttcttgtcctgangtttctgcgcttg

SEQ ID NO: 68520 - DNA, 428 bp, Glycine max
  unsure (1)..(428): unsure at all n locations
gaatctgattatgttcgttggaaccacgctaacccctgcattttacatttttaatataaatgggttttatttatttattaatttttctttaaaccttaagaaaaagtagattaagcgattagcatagcaaatttgaggcttgcttaatgctttcttcatcatcgggttagggtttttgcagttctttcatttcgaaaccctcgtcgattcaccttcactatctgcttctctcctaaatctcacgctatggggagcaaaggccgcatgccgcncgcccctcacctacggcgcccgcacccgccgggccccgccgcgatgccgcatccgctcgcggggccgttcgatctgctcccgccgccgcaggtgatggagcagaagctggcgtcgcagcacgcggagatgcagcgcttggccacggagaaccagcg

SEQ ID NO: 68521 - DNA, 253 bp, Glycine max
cccacgcgtccgcgtggctgagccaaagagggagcaggataattacatggaggtggcaaaccgtttgaggacaaagggaacccatgtaaagggaattgtgaatcccacccagcttttcaactggattaacaaggtattatgacctggatttttcttttgtgttgtgcctctaaacgcatgaatcaatgatcaattgtattatttgcacagcttagtttgaatttgatttaagtttggggattttgttgttacc

SEQ ID NO: 68522 - DNA, 426 bp, Glycine max
cccacgcgtccgggaagaccggaatagccaaccaaacccgtcgtcgtctagttatctatctccgccaccagcgaaaaccccaaaaccctagaattcaagaatcgaaagcaatggacttcgacgagtacgattacttggagaaaacagtggaggagcaagaggaccacgacagcagcagggagaagagggagaaggagaaagagaaggagaaggagagggaaagagaaagaagggagagggaacgggaacgggaagagagagagaggtctcggaggagtaggagtcgttccgagagagaaagagaaagagaacgggatttcgacaccagagatagcaggagatttagggacaaaaaagaggcagcggagcccgaggcagatccagaaagggatcagagaactgtttttgttaccagatgcccttaag

SEQ ID NO: 68523 - DNA, 353 bp, Glycine max
acgcccacgcgttcgtccacgcgtccgtccacgcgtccgctatacactttcttcaacggttaaggcctgggtgtactcgttgtatgttattatttttcgcgcaccagacagcccgagcgcaattgatggactctattgtaagacacacgcattgccagcgaagaagagcttgatagtttacttaaccgactatgatgctgtgacattcatactgatggacgacgctactaccgtgctacatgtacttagagtaggggaaactatgtatcaagcgacaattggatggcttatgatctgggtaaaaagcgcaactgggatctcttactccagggaggatcaaatgctatggcgga

SEQ ID NO: 68524 - DNA, 244 bp, Glycine max
actactcgtgctgcattggccaaacgtatcttattcgatgcgcatcctgccatactgagacaagtcatgcctcatgagctagcctgctctgactggcctatcctgacgacatagctcttgcgagatctgatataatgcgcatgaacctgcgtgattccacgtgcagagtccacgtgcaaggcatgcttctacaggatctaccgaagcatcacatcgcatactctatggctgtatatgtgatata

SEQ ID NO: 68525 - DNA, 257 bp, Glycine max
cgaattccagttcgacccacgcgtacgcttagtttcacttcttggaggagtcaaatgctgaactgctttgtaaggtttgagtgtctagtgattggatcagtataggtggatctggttcatagagttcttcaaggattcaagtgaccattcaatgctattgggatctatctactcgatgaagctgtctatgtccctatctgcaccttatagcaatatggggcattcttgtgtatacactagctttgatgtagtcttct

SEQ ID NO: 68526 - DNA, 383 bp, Glycine max
acgaaaaacaaaataaataaaaaaaaactataaaaaaaaaaataaagataaaaaaaaataaaaagcggaagggaagaacagaatcaacggattagaaaaaaatagaacaaaagaaaaccggagggcctctttaaagaaaccatgctgaactcgctgccgttcacgaccctagcattaccatagagtacctgacatacatgttaatgtacgacattttacatggacactatggaaaaccatgcataccaatttaatacattgtataaatcccgatttgccaagctgtattattagacacaaggcccctgccgatagcccttgccaaaaaattggaaccctcattggcgaatgggaccccccctttatcggcgcattaaacccgg

SEQ ID NO: 68527 - DNA, 283 bp, Glycine max
accggactcggaattccgggtacgactacgcgtacggtgacgattaaagcaatgacagtgacgacatcgtttgatgtctatgacgattgatggcttgcgtactccttctagttcaccgaatgcatacaccacctgatcaactgatatgaccatcttattctatactaatagcaccattctattactgtgtctgtatctctgtctgactctttttatggttatccaactttgcagggatcatacgagcaggactacagatttaaacttactagatgcttacaag

SEQ ID NO: 68528 - DNA, 51 bp, Glycine max
tccacgcgtccgaaaaaaaaaataaaataaaaatataatacttaaagaata

SEQ ID NO: 68529 - DNA, 332 bp, Glycine max
gtacgcgtgcgttctggcgtgcggtccctactgtacgtccgatccactactcacatcctaataacaggcatgtgcgtttcacaagcatacagcatggccgatggatctatcactagacattccgactacgaatagaccatgaggacactggcaattacggcaaaaagcactttcatatttaccaaaacggcttcattgttggaaaatcgactaatgtgacctacctaaaaccgccaagaagtggaccaatccgttttccactcaaaccctgggccaaatttatggggccggattaaacaacaaccattccaagttctataatgcatgtaatt

SEQ ID NO: 68530 - DNA, 67 bp, Glycine max
acctacacgtacgcgtgcgccgacgcgtgcggacacgactctcgttgagtacactacgcataaccca

SEQ ID NO: 68531 - DNA, 226 bp, Glycine max
acgattacacaaagcacgggccttgtaaattttcttgatgaacaatgggacgtacattgttcaggatagccaaatatagagaattgtgaacccttttgggatactattggatcagataacacgctgcacaagtcaggcaatttcatgtgcactatccacgaagctcgtgtaattagctattacggcttctgaagttgcatcgtgctggttgaatgctccatattaa

SEQ ID NO: 68532 - DNA, 171 bp, Glycine max
  unsure (1)..(171): unsure at all n locations
acgcgtcgccgtacgacagcatacatgcggatgctccgtcggcgtggccacccaagttcgtgagtgccgggaccaacaaggagaaggaagaagatttactcgccattaanggctcaaagctgtctaacagacccaaaaatagacctaaattcattcaacgaaccttcaatc

SEQ ID NO: 68533 - DNA, 443 bp, Glycine max
  unsure (1)..(443): unsure at all n locations
caattgtcgtgaatgtgattataatatagttattttatttgcaattcaaagatagtaaaatctgtttataatatataaactatatatttattaatagtgtaaaaaattatattaccttttaattataaatttattataattagtaagtttgttgaatttactattaatgatttttggaataatatttttgagtctttttgttttaaatattgatcgactttgttgactnattaattcttttgaaaaattaattagctatctttagtagtactaatatttttctttccgcaaatttgaatcccatttaatacatgtgggttaataacttttaatggagggtgaatgtaaatttttggtgctagttgtgcgtagaaattaaattaattaagtaattaatttattaataatttttttaattggggttcaggaaaaatagggtgaaa

SEQ ID NO: 68534 - DNA, 303 bp, Glycine max
tgaaaattcagcatacaccgattgggaacaagatcagattctcttatcgtggctccaatcgacgctttcaattttcatcctatctcgaattatcagatgtgttcattcatatcagctttaggagcaaatccatgagtactttcaaaagcaaacacgtgcgaaagctaggattctttgaacagaactcagaactacaatgcttgagtagaaaacaatgcgtgagtttcttctatgcattaaattcatagtcgatgtgcttggatcgtgtggaattcttgttctttcgcgtgaacaccttgacgc

SEQ ID NO: 68535 - DNA, 192 bp, Glycine max
accggaccggagttccgggctacgacgtacgcgtctgctcactcgtactacaagtcaggagtcagtgacaatgctattcctcgcttagcatggccacggggaccattcacatgacagaggctaccgttcatgagggtggtctcactatggccgacgagcatattggtgagcaccgtgccatgacatgcactg

SEQ ID NO: 68536 - DNA, 349 bp, Glycine max
acgcattcactagatggacctgtgtattgatggacgagctttcatatgtctgctgtgggtcagtgagtttattttaagattttgtttgagaaatatggtattggcttagattagagacaatggatttactggaatgaggctactattaggattgacttacgtgcacttgcttagaatatgatgagatatgatatcgctttacaagcgtttcttcaacttaatttctgggttgtccacttttgtgtagtaatttttggatagattcaagagggggggcgttttaggttccgagtcttgtagggctgcatgcaaagtcatagctattgtattgtgcaccttaatgcaattt

SEQ ID NO: 68537 - DNA, 409 bp, Glycine max
  unsure (1)..(409): unsure at all n locations
tgatgatgttgttatttgttggttaaggtggggatgtaaggccattgaaaagggaaattgatgtttggttcagaaaggaagcataattggttcacatggtgttttgtttgaggcaacaatggcatttgatttgtctaataaaggagatgttatgaggttcacttgtcaattgaagaaacatgcatttgttctggtcacgacaaaaattccgtgngagacatgaatatcatcggannaataagcccctagaagagagaataaagatgcttcatattgtacaaccttcatcattaaagttgtaagcattgtcaatggaaattcgtaacacattaaatctttatataccttagtaagttgtaaagagaggtttaaaccagagacttaatgctttaaaagatggaaaccaaga

SEQ ID NO: 68538 - DNA, 306 bp, Glycine max
  unsure (1)..(306): unsure at all n locations
cggacgcgtgggcttgcgtggggttggattcccaaattcatttcggttcctaattctcaatccgtcttcgattctaattctgattggccacacacgcaaaagggttgaaaatagtgggacttgattcactggaggtgtaaaaggatgctatcaactccacttgctgccgctctagagcaactagtgatatgctcattggtccagactgggcaatcaacatagacttgtgtgatatcattaatatggaccctgngcaagccaaggatgcttttgagatactcaagaagcgtttgggcagtaaaaatc

SEQ ID NO: 68539 - DNA, 273 bp, Glycine max
  unsure (1)..(273): unsure at all n locations
caaagttgggctacggtcaatttagaattatcactatcgtctcggacgatttgtcctccaaatctacttacttgaaaggggtaccttgaatgcgaaagatggaacagcgtgtttaggcatgcatggttccaagattgattattggactccatgtccatcaactgaactagaagtgactncaaaagggtttgtcaaaacctttttttgcagctgaccacacctcagccctgatgaaaaagctgttaccctaatggtttgcaagcccttaaccct

SEQ ID NO: 68540 - DNA, 433 bp, Glycine max
  unsure (1)..(433): unsure at all n locations
acgcgcacgcgttcggtaaaataacaataacagaggaagacagacaattacacagttgcaatgggagtagcagctacactctagagaaatggctactctatcaagctgcatcgctacgccgaagaatcccaatacccactgactctcaggttcctcattgacgatggacagatgcttcttgaacatcagctccagagaacactntccaggttcctctttaaagactaaagcaacacgtaacccagcacttggtattccagcaagtggtgaaggttgaagaaccaggtagtgaagtggctttggtggtgggtttggactgggaagactaattgctggagcattgggatggccatatgcaccttaaattagcaagggactaactggagctgacaataaagacttaatgaggaaactttcaaaattcatgtatgat

SEQ ID NO: 68541 - DNA, 422 bp, Glycine max
gatgggatgaaacatcaaacataccacgtcctgagagagtttcacaatggaagatagagcctgctcttgctcctcttgctctgaatcctctaccaatgcccaggcctaaaaggcctcgatctaatgtggttccatcatccccagattcctcggttcttactcgtgaaggtatggataggttgcttttaaatatttgatatttatttgagtctcatctttgcttaacatatgtaattatgtgaagcctgatctgatatcggagattcacagcttctaaaggtagcgtagatcctttgccaacaagtgggtttcaaagggtcttgcaaggtcaagaactttcgaccttgagaggtaatcttgcttgaagccacgaatcttatacggcagataagtactgtgtgtggccacctgccacggatgat

SEQ ID NO: 68542 - DNA, 83 bp, Glycine max
  unsure (1)..(83): unsure at all n locations
gattatcctaagtctttgggaatagtgctgcaatggcttcaagtcatgaggatgtgaccgtactcntagctactgcaagccca

SEQ ID NO: 68543 - DNA, 88 bp, Glycine max
cggacgcgtgggaaaaaaaaaaaaaaaaaaaattaaaaaattaaaaaaaaaaaaaaaaaaaaaagaaaaaaggaaaaaaataaaaggg

SEQ ID NO: 68544 - DNA, 183 bp, Glycine max
acccacacgtacgcgcgattcacatggtccaccacttccattgcctttcacgacacacagcactttgattttagggtctgacaaacatcgagaagctcaatcgactgcagaaaatgagcttccatctatctatatgtcagactactatcattccctgaacctagagattatatgatcgcaatc

SEQ ID NO: 68545 - DNA, 222 bp, Glycine max
ctacgacctacgcgtcacgtccacgcgtcagatctgtcgcatcctcagggtgctgcacaacgtgggtggaaagtagcggaaaaatatacgggttgctcgcaaaggctccccgctctacaggatccaagctgacgtacgcatgactcccaactagtaccgcttgcttagggcctactaaaatctatacgctaccactcgactcacaaacgtctgccttggaaa

SEQ ID NO: 68546 - DNA, 257 bp, Glycine max
cgaggctcatgataaaccaatctgcattgcgtcgctaacacatagtccttgcattcgttggtccgatacccattgatgacaactatccactgacgactatgatcatccaatctatctatacgtacacgactactacgtacactgtgcctagatcttatgctactcggattccaatttttctatgacatgcacttgattatgggaatgctcgacacaagcactgatgttggacccacctgtatcaaacgggttgctta

SEQ ID NO: 68547 - DNA, 377 bp, Glycine max
gcggcatctcgtccgacacatctctgacaggggtcttatacctgagtcgaaactggaaggcatgggtcactacaaaaggcacctgattctgcacagaataagtggtcagcaccttaagtgctcgcatgttatgatgacaccatcgaaaagtctattgagtagccattaccagtgatgcaaaccttgacccaaaatatattccctacccttgatatgcatgcttagaattccgaacaggcattcatgctgggataggcagatgcaattctacttctgcagaactgtgtctgccaactttgcaatacttctaaaaggtaatatgccccttgagctgatacgcgctatggtataatttcactgggagcaacagattatga

SEQ ID NO: 68548 - DNA, 297 bp, Glycine max
gtcacgcgtccggtcacgcgtccggagaacaacaagacattcctagccttcaacggactaggtctttttacaacttattcatctgaagtgctcatcttatcccactatttggggcacccatttctctatgggagaagcacccacattgcttgctgaatacgtacacgatagtgctcccaatggccttgaattgaaaaacgtaacttggaaaacaactgctacagttggcgataaggcctatgtcattggtggagctgataatggaactttgtgcattgaagttcaaatttttgaccg

SEQ ID NO: 68549 - DNA, 342 bp, Glycine max
cttttctctccgtgggttgaacttgaagaacctctgaaaatcctttctttctttgatcgagcactctctctctctagatctgatcaaatctccgaacatattccctccaaatatcattttccttaaccaaaccaaaccctaaccctttctttctgtatgaaacctgattcccccccaaaagccttatatttgagaacatttgtaaattctttacgtagtctaaggtagaatttttctgtaacattttaagagcttgaaatcgtgagatgaatcacaacaaccacaatatagcgaggtacccttccagaatggggattggtctcggaggttttaatcccaacc

SEQ ID NO: 68550 - DNA, 182 bp, Glycine max
cccacgcgtccgcccacgcgtccgtggatttttacgacattcctagctccgacgacctagggcttttgacaactcaccattctggaatgccttttcatcgatctataaggggcgcttatggctttataaaacggccaatcaaaccacaaaccccataagtctggcccaatcctaccttggtt

SEQ ID NO: 68551 - DNA, 299 bp, Glycine max
  unsure (1)..(299): unsure at all n locations
acccacntnaccttccactcgtcattttcactttttacgcgcctcaaaaccaccccgagtcgctttttatcacatatcgcacacatattntcccctctttaccttacatatgggtgctcacaaaacatagcttgttatctatttttaaatggccaaacagagctgtaccgtcaacgacaaaacctatgctagccgttctaaattattatcctttgaattgctgggatacaactataccatgattgggttcatccattacatttcttataagcacttcatacacaaaattataaagctat

SEQ ID NO: 68552 - DNA, 446 bp, Glycine max
  unsure (1)..(446): unsure at all n locations
cccacgcgtccgcccacgcgtccgctactttctcttctctcttgtcaccaacctcgatggaaatagacatggacatggacttctccggttacagcacaatcaccaacacaatcccctcttctgatgatgactatggttgcaactggaaccattggtcccccgtcgtcaactgggacgccttcaccggcgcccacgacgacttccaccacctcatcgactccatcatgtgcgacagcgccgccgcggaggaggacaacctcagccccgacgatcacgccgccagcaactcccccttcgcctccgtcacggaggaggaggacgacgacgccgacgaagaaaccggccccgtcgacgattccaagggcctgagagtcgtccatctnctgatggccgccgcggaggccctcactggtgctcccaagagccgcgacctggctcgagtgata

SEQ ID NO: 68553 - DNA, 398 bp, Glycine max
cccacgcgtccggtttaccgtatagaccacaacacgcgaacaacacaaagacatcaatctgttgttgttgttgttgttgtttttccagaatggacccttgtccttcatcgaacacgaacaccgtgaacggtttctacacgttcgtgagccggggaatggaggagctggagcgagccttcctagccaacaacaacttcatctccgtccagttcctccagaaggtggtgtccctcctccgctccctccacacccagctcacccttctcgtccacaagctccagctccccctcggcgacaagtggctcgacgagtacatggacgagacctccaagctctgggaaacctcccacctccttaagtccgccatctccaacttcgaacctttctactcacagggc

SEQ ID NO: 68554 - DNA, 449 bp, Glycine max
ccaacccgtccggtctaacttgttaagtgttaggtgtaaaacttctaccatacacttgtgagtagtaaaatttacatcggttgcaagaaaaagtattgttaacactcaaattttgttataaaattcaacggttgaaaatttagtagaacgattaatttttatgttagttgaatgaggtgaagattaatataagtgaatatagaattgatgacgtatcaatattaatcaaataaagttagtcaaatatgaacaaggtcattacatatatctacactattagtcgaatgatagaatttgactaatattaatgttagttgaatgagaatgagaccaattcagttgattgtgcagctaaataatcttcaatatttactaagcatgaaagttagcttaacatggataagatcaaatatattacctacaatgttagtcaaatggtagaattcggt

SEQ ID NO: 68555 - DNA, 181 bp, Glycine max
  unsure (1)..(181): unsure at all n locations
cacccacgcctcacaagcctctatctactcactatatatacatacttaaactctctattacatcccaanataacccgccccgcaattatacacacactatcctcaaccttcaactaaaaccctacaacaaaacttattaaatctacccctaacataactaaaaacattatatcaacaaccc

SEQ ID NO: 68556 - DNA, 219 bp, Glycine max
  unsure (1)..(219): unsure at all n locations
acgccacgcgtncggaaaggcaaataagtctaagtcaatattggcttggcaaaacaacaagaacttaatgtgggggccttgaaaacatttattaaaatggttttattattccaggccagaaccggccgttattccttttgggaggtattaaccaaaataagggcttgctttttgtggaagcaatcctttgggccgaaaaaagggtgaaaaagtggatgc

SEQ ID NO: 68557 - DNA, 325 bp, Glycine max
agccttccggttaattccaatttgaccttaatatgttcggatggattttttttaacgggcccccccaccgggcttaattcctaacccaatcaattcaaaatttggttgaaattagtcgggccccccgcatttcaatcccggtacctttgccattattggcccaactatgctagttaaatggtgtggaagtaataataatggtcatcttttgtcgatgggaataaaatcttcaagtactcaactgacttggcctttttgctctatcattcaagtcaattattgtgcagtagcctgctgcagctacaaattgcatgcttagatactg

SEQ ID NO: 68558 - DNA, 429 bp, Glycine max
tcggttcaattttaaatccaaacaaattccaaggcgggtttttttttcttttattttccattccggctgagaaggaagaaaaaagtgtttcctttccgccattgaaggaaccgaccaacctgaaccgggccttgattgattcttggcctgggccaatttttggtggaatttaacggccagttacctcccccttcgatgttataaaaattcaattcagggttagcttagagcccacatcttcatgggcttattacggaacgatttggctgcagcatcaaatacactggttgtttcaagcaccaaagacattctagagaagaagcgtcaggggtttggcggcaaatggccgcatgctatgttatccatatcagcttacatttaagtttacacagtgagaacttgccttgttttcaatcaagatacattatt

SEQ ID NO: 68559 - DNA, 262 bp, Glycine max
acgacccacgcgtactaataaattcatatcattttacacactttcctttctttttaaaagttctataccacgacgcgcttaattatccaaggtacatctccctacctttttaacttgtctcttcacacattttgttaattctttacaactaccattttcactcacgtataactgttctactgtctccaataaaaatttaaattcatctctctctcacaataataaattcacaacaatctcatcttacaacaaacatttcttc

SEQ ID NO: 68560 - DNA, 443 bp, Glycine max
attgtcatctcttcttccaccaaactttcggagttttctttggttaattagtaaaaaatggcttaattaatttgtccttccagaggatcgaatgagatagaaagggtactggaggggcaattaattaattaatctctagtgagtatatatataaatatggagagcctggaagaaagagtgtttatgttgatgaatgaacaatattattattccaattccaatgtatcagatcagctgcatatgcatcatcatcgctctgtgtctgtggagaatctaaacctatggtgggaaaacaacaccgactccgatgactcagccgagcgaattttgtattgggaatctcagatctcactgcttcagctgcttgaaggctaactcttcggattgcatcacctgtttgagaagacgagtggttgacgggctctgcgaaagaggattcagta

SEQ ID NO: 68561 - DNA, 444 bp, Glycine max
ggaccgtgcaggacgtatgcatggggacatttcgtgcttgttttgtatataaagagatgtgcatcgccaccgattacaaaactaaatcaatcgaaggtatgtgcatcttaatccaaatgtggatatgagaacgatgcacgactttggctccaaagaggactcctctcgtaatagaaaataaatcactcggacacaggtggttgcgacgtgaaaatcaacatattgacaatgatgatctgatagtttttcgtcacaaattggatatcatgaaacgatataaggtaagaagatcataatgtatttgttaaataataaataatatgtcatgtctcagtgaaaattagcaactgtgttgttgtatacagtttctgtggaagccttacacagcaactgttatgtcactgttgccttcaatttgtttggttggaagtgtaacgtggtggc

SEQ ID NO: 68562 - DNA, 301 bp, Glycine max
gacccacgcgtacgcatacacttttttaaatatataatttttatttttgcaacacattctctattccgcgcctcgttttaatttctacacctctaaactcaacctacaatacacaatataagcacctcttaataatttatttaaaactaatcaaatactaatttaactcattcccaaatcccttcccaacatacattacaataacacccttcaaacttgtaaaacactatcttctaaaaacaatcaaaacagatctcccacatcacactctcactccatctattattaaccaccactttta

SEQ ID NO: 68563 - DNA, 190 bp, Glycine max
cttcggtaaaaaaattaaaaccggggcggcttattctgaccgatttgaatgttggcctttgttcccccccttattgttggaggtattcgaacctgaaccggggttgcaaatttaaaaggccttttttaaacattggaaggtagggtcctcttttttgcccgttgccacgggccgaaaccacaactttttg

SEQ ID NO: 68564 - DNA, 213 bp, Glycine max
gcatccccgaaatctttaggaagaaattcttgcaatcgaagatgagaggtgattgattagtttgtgttgtaaattattatgtgagctacagtcaagagttcattaattcattaaacgtatgtacttgtctcatagaaaagttgaaatgaactataaatttttagggttaattaacattttaatccctgcaaaatacatattttttactcctaa

SEQ ID NO: 68565 - DNA, 66 bp, Glycine max
cttcgatcattcttccgtcccttccgtttcaacaccggtcaaccgttaaaattccccttgattttg

SEQ ID NO: 68566 - DNA, 278 bp, Glycine max
gttaaggttccagggatcaaaagattggcttgaaccaaaataagcacggctcttttcaacgttagggaaggtgatgatcttagatacggactcatagggttcggtttctaaggtaaaatgatacctaagttttgggggtggaggctatgtaaatagtggctcaatgcggttgcggatgaggtcagatgaaaatgtacttcttggaaaatacgtggcttgtgtatattatatgaaactagaatatcaagatgtattgattattaccatcaacgattata

SEQ ID NO: 68567 - DNA, 370 bp, Glycine max
ctcacgcgtacacaaaaaatgagattgtggcaaaacaggaagcttctgcttatatgtgaagaaaagctgcagatctgcacaaatgaggatgccaaagccggtgcatatatacgaacgagaaagctgaattgctatctgaagagcatgagccaggaaactatagttacaaagcatacacatttggtaggagagagcataaagattaaccgatcaagtgacactgaagaacttgaacaggtaccagaatgacacactgagaagaaattaaacatcaacgattatggtaatttcatacaggaggaataacaagagatggaaaacgaaactgaaacgcacttgacttaaactgcaacagaaagtgtaccataag

SEQ ID NO: 68568 - DNA, 248 bp, Glycine max
gacccacgcgttcgaagaactgtcgtctgttggcatagtttgtttttacaaagtgcaaaacgagaattggggagggcttaatattatgagatgctgaaattaagagtaatgtaacaaaaactgtacatgacgaagataaacggttttaagaaggggataagaaaaatcaaaataaaagatatcatatctaaactgcttaatgctatatgttgataatatcgttgaatgtatgttcatggcatctgatg

SEQ ID NO: 68569 - DNA, 260 bp, Glycine max
ttgcgttttaaccttaagttccggtcttttcgttcttttaaccaatttcaaggtttggaaaaagggcaatttccaacccaggttggaggaacccggggtcaacaaaggtcgatcaggtttcgtccagggatagcgggcacacttaactgtgaagtggtcgtgctagatggtgatcagaaaggcgtctgaggcctaatccgcaatgcaatgtgatgttggtgtatagctggatgtcatatcctgcagaatgacatggttat

SEQ ID NO: 68570 - DNA, 278 bp, Glycine max
cttcaaccagcatctgcgcttacttcttataccgtctacatttccatttccgtctgcaacatacatacatagctaggttcagagaacgacattgatcaacgctccctactctttgtttacagggtccaacctagatcctgtatctacgccttgcctttccaacgatcctgttatgcctcgatttccaaccaaaagcatgacgagatcgtgagggaaattctgcaataaaaccggcaaatgttcacatacgctcttacattctttcccattttgtgcat

SEQ ID NO: 68571 - DNA, 356 bp, Glycine max
cccacgcgtccgaaagttagggttggtaccttggtttttggctggcaaatctgaatcgagtaataatcaatcatcataatgtcgccggcaaaaaaaccactgaaagttcggcggcagcttcgaggggacagcgtgcctgatctaacataacacatatcgagacgactgcccacgggatccttgcaacggacagcaatctggcaaggacgatctgaagagcactgaggcgcaatccaaacaaacctcgagacactaaagctggacgccatttgtaggtcgaccagccacctttgactatctggtgcactatgaaataaagctgtggactactgcaactgaccgcatgacaaggagac

SEQ ID NO: 68572 - DNA, 400 bp, Glycine max
ctgaattatcgtgttttgatcagaatctgattagaaaatcacataatttcaaatcggagcgctcgtgtaaaaaaaggaagagaataaaatggaatcggaggatttggtcaaacaggaattggaggaattgcagaaacaattggggaagaagcaaaagtttgaagcttctgtttcgtctcttaaaacccttcttcaacgcacttacccatcagcttacccggcgcttcgtaaatccttttattcagttctatgccgacttgctactgtgttgaagaccaggtatacagcaccatgtttctggaatgctggactgggcctttttgagcaagctcatttgcttgtttctgatccttatgagaaggaccacttgaatgcttgcattgctcacgccaaggaacat

SEQ ID NO: 68573 - DNA, 398 bp, Glycine max
taattaccgggccgaccgactcgtacgtatggatccaccacgctcactgtcaatccattaataaccaaaagttttatttctataaaggcaacttcccatccttccgtggcatttattctgaatgactagctccaataacgctttcactttgactcaagctgagtacgctgccatatggtatcgcgtctactacaatggcaactgttttttgaccctatcataactcgttatagccttgttggatatttatcccaatcttaatcacaagcctgccatcatgcggtcttacaatgtcatcaacaaaaatgactattgtttcataaataataactaaatccgctatcttctgctcttcatacactactacaattaatttgtggaccaatttttaaatctat

SEQ ID NO: 68574 - DNA, 216 bp, Glycine max
gcgcttcacgcaagagtaaacttttacgctccattccgttctttcacgatgggaaaccaaaaggggctgggcgtctccaactatcgcgaaacccgccgggctttgtacgctgtgagctccagaggacttacatgctatgccgcgactgtctagacctacactttgttctatgaacattgctgatgctcatgatgatacgatttcatccgaagctag

SEQ ID NO: 68575 - DNA, 355 bp, Glycine max
aacacgcgtacgcctacgcgaaggtttaggcagggtctagagagaggaaaacgttggccggagaacacgaccggaaagcgaatatatgctgattccagaaatgtctagcatcaagtcctcacaccaaagataggataccagcgcccacatactattaacgcacaacccaaagttcaggaccaatgctactggacctctgacctcaaaacggtgcacttgcaggtaccaacatcatggacagcaccaatcgccaaggaagaagaatgtgaacaagctagcaaagcaggcaataatggcactagctgctgtagtgcaaacactggcgacagctcatgatgcatcatccgccaagact

SEQ ID NO: 68576 - DNA, 391 bp, Glycine max
cccacgcgtccgtttcgcgctcgctctgttgtgaatagagattcatcacttccactcggcccattctccgctttcttcaaatcgtaaacttttttgggattgaagaccgaatcgaaattttcagggtacaatggcttccaacatctcgcccgctgcctttgataaagaacaggtaggcattcttttctcttcctccaactttggtaaaactgatctggtggttgatgtggttaatttgataccccaatgtggtttcaagtttaaattttcttttttgggtgttatttgattatttagtttttggatgtggttcaataattcatgtggtcatggagcagatatttggaatggctgaaaaggagatggaatataaggttgaattattcaacaa

SEQ ID NO: 68577 - DNA, 462 bp, Glycine max
acgacttttccttcgattttttagatagttccacaagaccatagaaaacttctagcatccaggggcttgtattgacctgacgcagacgaaaagcgggatcgcaatcggttttgcatttaccgcaaacaggaggagtcctgtggcgttcggatcaatcgcacggcgccaagcttaccgttgtcgtttgggtgctggtggcgcacgaggcccctcgtcgaattgcacattgacgaaacacaatggcgaggcaatttcgaagaacaaatggtttgcacggtccccatacgacgggtcagatcagcgcatggattgccctgttggcaaccttggtgcaatttttgctcgtcgtttctccaatactgtcgttggaagctttcatccctgttacagttgtctttgtgggcctcgtgagtggttccttttactacggataccttgcgcagttcattgattcaatggaca

SEQ ID NO: 68578 - DNA, 280 bp, Glycine max
cgcatagtcactaaacatttggaaagccttatccaggtatgttaagcaagtcgggtgcgtgatgtgcataggggtgtaaatttctattcacatttatgctgttctacagtgttgtcacatagtggctatcgcggcactatcaaatttctattcacatttattcttctgctggacatggcttaaaaattcggaaacaggatttaatatcccattccaatactggtccagcaatattagggatgggttctgtgcttaaggggggctgggggggcttagagta

SEQ ID NO: 68579 - DNA, 450 bp, Glycine max
  unsure (1)..(450): unsure at all n locations
accacgcgtccgctcattcgctctctctacactaatcaatggacgactctcacaacaggaagcgactaaaccaccaattgacaatgcacccgcgactttgttgataactcctacgacactcacgcacttgactagacccagattaaactctcaggcgtagacccggaccttttcaacatgctcaatgatgcctagaacgtcacggatcgtgaccctaccatgcaaggtcttgactactgaatcaagagttacgaggaagaaatactttcttcggttacgaacccaaatctaagcgccgaagcagaagtgtntaatgcgaacctagggtacttgctggaagcatacgacgactagctatggttgccagcggcggtagcgcccggcgaggatgcgacagatccataaacacttgattcgggccgacttggatctgacggagtgcaactgact

SEQ ID NO: 68580 - DNA, 91 bp, Glycine max
caacacgccctcaagttcagccaaatgttccatttgataccaaccacacagggaaactattatgtgttgaatgacatattccggttgaact

SEQ ID NO: 68581 - DNA, 435 bp, Glycine max
cggacgcgtgggcgaaacaggtggggtcgtacaaagcgaaggaacgtctgtggaagacgcgtgctgtcgattctgtcctgcaggaacattctggatacctccagtcgattcaaaggtcgttgacggctaccaataacagcccgtggaagcgtaacgacttgttcctacccaacgaacgtatctggagtacacctcgtccctctcagatccgaacgcattcgcagtattcggacccctttccccatcaagagcgtcttcggcgccaacccacggaagccgaaattcgaccagacgcggttcttgcaacgctcgattgggaacccttcgaacgagcctggacctcgcctttgccagcccatgtgaccacggctattgctcgggactaatactactggacaccgaatgttcccacgtaccgtgctatggaaaaacgtt

SEQ ID NO: 68582 - DNA, 151 bp, Glycine max
tcggcagtattataatagaaagaggactcacagtttaagagatagggagctatagccatgatgaggaaaactttcaaagaggtgaaagcaaaagaattcttcttttccttttttatatatacttgggtgctaaactgtgtgagttcattga

SEQ ID NO: 68583 - DNA, 314 bp, Glycine max
acgcctacgcgtccgcccacacgtacgacttaatcaaatcagggtgtaaatcaacttgcgtggaagagaaaaaagaaacagacgaacgagaagaaagaaaacagaacagacaaaacgagacgagaacaagctatacattatatgaatgaatctgatcactggaaggctgaaaacagacgacaggctgtagagtgcttgccatggatctggagctggcctagaacgaaaacactgatctgcgcaaaaagaagctcatggccgacaaggatcgaagtggaatgcagatgcgcatagaggaggggggagacatgtac

SEQ ID NO: 68584 - DNA, 391 bp, Glycine max
acggtcaaattaattgcggcgctgtcttcctggagctgagatctatggagggtaacttgcaaagatctggcctgcggcgtcgccggagaattttgtgcgtctaggtttctcccgtcaagcgttttaccagcggtacgggactctgtgtttagaagtcgagtctcggaccggttttttgttgctgtgcccggaaggaaagatggaccacgcgtgccacaaacgttcccatgaaaagaagaagctctttctggtgcacaaccgtgttttggctcggccgaagaacgactgcccacgggtctggggtgtatctgatcttcttgacctaaagaacgggaatcaagtcgccgctttcgttgaagcaaagatcgaagagcttgatccaaaggcgaaa

SEQ ID NO: 68585 - DNA, 364 bp, Glycine max
gatgtagtggtgcttaccgtggctccggcatcggtatgtgcctgtgactacctctttttgggctggatcaccatcaaatcccacaaaggtgctttgacgagtgacgagcgtgctcagcagaaccgtgatcggaatcgtaagcactcaaggtctactagacttcgcagaaaggcctacgtgcaaaagttgcgcgaactcgtctagggttctgattccgaacgtacggaagaagtactactaaggatatttgcaatacagcatcttgcggataagcaaaacgttctgaaaaaggttgtgcggaacttattacagtttggttccaactactaatcggactatcgcaagtttagtaccattttataag

SEQ ID NO: 68586 - DNA, 251 bp, Glycine max
cggacgcgtgggctagagaaaaagatatgggtcatgatcatgaatggtctgaaagaaagcatcgtgatgatagaaaaacgggcagagaacgatcccgtgaccgtgaacgatctcgagaccgggatcgtgatcctgaccgttaaaaggatctccgtgagcgttacaggcacagagaagatagggatgggtatgcagatcatcataagttcagagaccgggaagcagagcacgatgatgaatgggagaaggga

SEQ ID NO: 68587 - DNA, 328 bp, Glycine max
gttccaagataatacctatggataacatttgcagatcaggcatttgggagttatctgatgatattttaactaagattttagcttctatgggcccaatggacctcactagggtttctgcaacatgtcatcatttaagatccttggctgcttcggtaatgccttataccaagttaaatctgtttgctcatcagaggacagcagttgagtggatgttgcatcgtgagcgaaatgctgagcttttgccacatccgttatttgtagctctgtcaactgaagatggctttagtttccatgtatatactgtaactggtgatattgttactgggga

SEQ ID NO: 68588 - DNA, 450 bp, Glycine max
acgcaaggtctggtctttcaccaccatcagcagcaacatgcaaatagtaccgacacgtcgaaacgtcggggaattgatggcatgtcaggtagcgccctccagatacagccaacagggcgctacctggagggcccactgcatccggctttttgggcggcgatcagctggcagcagctgctgcacgagccatacaaaaccaagggcggggacggaagaagtctcacgctcagattgatcgaagacgggagcgaaatcgaattctggcacggcgaactcgccttcgcaaaaagttcttcttcgaatcgcttcagaaggaaataatggatttgcagcgtgaaaatctagttctcaaggagctggtcaaggtcaacattagcggggaagaaggaaagaaaatattggaagggtgcaatgccgtcgagaatcttccattgtctgttctggaagctt

SEQ ID NO: 68589 - DNA, 180 bp, Glycine max
aaaaaaaaagaaaaaaaaagagaaaaaaaaaaaaaaaaaaaaggaaaagagaaaaaagggcgggcgaacaaaaaggaccaagcttacgtaggcaagcaagcgaagacagggcggccgcaatagaggcaccaagctacaatgcactggccggcgacgtacaagggcggcactggggaaacc

SEQ ID NO: 68590 - DNA, 461 bp, Glycine max
caactacgcatacgaagtatgcaaggactgtaacgatgtcctttaaactattcggccgaccgttgagtgaaaataaaataggggaaagtagcatgtcgaaaaagcccgcttgctggaaagcggataattccaaaaaataatgggtgaagtaggttacttatgaatagaatgttaatttcaaatcggagtcaaaggctgggttacatgatcaaatgttttaaccgcaatcgaatatttgtaagagcttgtgagactaaaagaaatcgatatcaagagttacctcttacagccactattacactagatgtaatatgtatgactaaacgagttctaagggtaaatatactagttgtagtagtaactgtgggattgcctaagtcttcaaagagatatggtaacggaggattaataataacagctactaaaataggagtttttagtaatacgtctaaagtaatgtt

SEQ ID NO: 68591 - DNA, 85 bp, Glycine max
gaattcccatatcgacgcacgcgtacgcttgaatgtaacctatacccactactaattcaccgatcaccctctctacacacggcaa

SEQ ID NO: 68592 - DNA, 367 bp, Glycine max
  unsure (1)..(367): unsure at all n locations
cgcgtcgcttcgcaccagtttcaccgcacgaatatcttgttgtttggagcgatccgagaaaaactctgtaaacatgttggtttaccaggacctgcttacaggtgatgagcttctctctgactccttccgttacaaggaaattgagaatggaatgctgtgggaagttgaggggaagtgggttgttaaaggagcagttgatgtagacattggtgcaaacccttctgctgagggtggaggagaagatgaaggagttgatgatgcagctgttaaagttgttgacattgttgacacattcagactttangagcaacccgcattcgataagaagcagtttgttaccttcatgaagaggtttatcaagaatttg

SEQ ID NO: 68593 - DNA, 353 bp, Glycine max
aaaacacgtccgctacgtcagtgtaatactactactcttaacagcgtcatgactaggccgcggaacggatgcggtgcactggacgaatttatggaccaaaggatcgatacggccgctcaatcggctcggtagacatcgtcaggacacgagagtgattgctacagcgcactagtttacagttgacacaagcgcactaagatgagctaccacagcccaggccatctcggtcgaacaaaacggtgacagatcggatgatgcggagacccagttcgaactcgaacgctgcaagtgtgacctatcgatccaaatgcccttcaggatatcaagctagatgtaccggacaagttactaca

SEQ ID NO: 68594 - DNA, 268 bp, Glycine max
acgcaagctctgatagacagtacgatcttactctgcttggtcttacaacggatgccggatcttgctctagattttctctcgatccgtgggagaacgattcgtaaagcaaaaaaatggtaaaagaacatactagcacattctatcgatcgaaccagtcacagaggaaggcgagcgatacctctacatctagtgacgataccgaagaaattcatctcgtggactaatcgccaagtgtgatgagcacctatctagatcatgaagagattta

SEQ ID NO: 68595 - DNA, 171 bp, Glycine max
ttcgtatttagaggccatgtctcccttgtgacaatgtgtgctgctgctcatgtctgatcttgagtactatcttgaggataagtcaatgctttattaatacagtgcgatgcatcaggtgtttttgatgaacaatactatattaccttgtgcgtaatgtgtatgactcttacc

SEQ ID NO: 68596 - DNA, 356 bp, Glycine max
gaccaagccgtccggaaggataaggatggttgaattttcaggctccaatgggaattcaggaaagttgggtttggattgcagatgtgtttattttaatggcctatatatgccgtgggaatgaagaaaatctgaggtggatattcaggttttccaatccctcggattgctatgctttatatgttttccttacgtttatctgtataatttaaatagaactaggagtattgagcttcttttgtttcatctgtattggattgctatgcatacatttggtaagtgattgtgtctactttgtacttcttcagtttcttggttcttgtaatgatctgaaaaccatggcaattaaattgaagagc

SEQ ID NO: 68597 - DNA, 295 bp, Glycine max
gtagtacacaacagcgtcagatccggctcagtcattgctgcatacaacgatgagaggatggaagtagtgcgacgtggagtgtcagtcttgatgcgcactgagtgatctgtaggacgtcttttaaagagaggagtgcatacagagctggagtgcctatggtgccagatcaaagtgatgctagagcacaatattacgtcacgaatttagtcggctatgcaactgtatacgcactatgatgagaatgcttctgcaaagcctaggtacacccgtgaaaatagtgatggtgattactaca

SEQ ID NO: 68598 - DNA, 428 bp, Glycine max
aaaaaatagtataagtgaaagaaaaaagtaatctttttaatattctcttcccattaccagtgtgtgtttttttaatggggtgtgtcagagtctgtttcctatgattctgtctctaggtctgtagattagatcagaattgaatccaagtggtgcagaattcagagcagcatttggtgtccaaaagaagaggagtaataggagagaggtgataaaggtgtcaagaatggggatacctggtgttgatggagaattgaagaagattttgaacgctaacatggacgaagctggtgctagaaagccttcacgttaagctttcaaggatattcaacttggaattgatcatatattggttaagaccccatgtgatggaataaaaaatggaagagtcatatgagaagagctcaaaaggcctagaaatcttctgcaaa

SEQ ID NO: 68599 - DNA, 318 bp, Glycine max
cccacgcgtccgacttgctcacagatatatgtttatctgtctccatcattttctcgagagcggggattttctggggtgcatctttcttcttgttaatctctccccgcctctatgtaacatcccgcttatctgaatccctttctgctcatcatctgtctttcaagctaagatattctcagtagactatgaattcagcataaagcaaacttacaaggctttttcgaaagccatgtgttctcagaaacgagatccatgttttattgccgaatttcgctagtcatattaatataccatcattgattgttcctttgaaaccag

SEQ ID NO: 68600 - DNA, 337 bp, Glycine max
ctttggtcactcttcttctcttgcggctagggttttagcgcagcttcttctagatttaaggaagatgggtaaggaaaaggttcacatcagtattgtggtcattggccatgtcgactctgggaaatccactaccactggtcacctgatttacaagcttggaggcattgacaagcgtgttattgagaggtttgagaaggaagctgctgagatgaacaagaggtctttcaagtatgcctgggtgctggacaaacttaaggctgagcgtgaaagaggaatcaccattgatattgctttgtggaagtttgaaacaacaaagtattattgcacagttattgat

SEQ ID NO: 68601 - DNA, 233 bp, Glycine max
accacgcgtacgaacacgcgtacgaccacgcgttcgagtgcatccaaagccgttgaagaagggtcactgttttgagtttgtccgcgaaggaaagaaactctatatctagctatccttatggatcggtaccagaaggtatacaagccaacagctcaaactgcaatctatgaaaacgagatccggattactgacatgctacgatgcgtaactacattacttacgccatgagcttg

SEQ ID NO: 68602 - DNA, 275 bp, Glycine max
gcgacacatacggttagcatagtaacaatcgaaaaatctcacgcacacgcaatggccaacacaggtagctctagaatcatacatgattaaggttaatctccttctgtaacgccccgctcatatgaattgctacatgtggatcataagactatgacctaatgatatccgtgagcaagactcatagctggtaaaagtgcaaagtgaaaagcttgtcagatcctaaaccaagcctcgttgcatcctactgttcagaaatagatagatgctactatcct

SEQ ID NO: 68603 - DNA, 259 bp, Glycine max
gtgactgctctcattctatcttcctcaatggttctaatttaatttgacatgcatacattggagtggacggaaccacaaactcagggtgatctattatctcctagggcaggacacactggtatcactattgatgaaagctggctgatagttcgaggtcgagataatacatgtggttgccctgaaaccctggtattagacatgtctaagcttgattgatcagtattcactgttgtcaagcacaaagattcactttctaatg

SEQ ID NO: 68604 - DNA, 58 bp, Glycine max
gcaataccagttgttattataaggcacagcacattaattcacttaactattacaccta

SEQ ID NO: 68605 - DNA, 96 bp, Glycine max
tgcagatggttgtattcttagttttgttaatggctacctttgtcactactgctctttggtgatttaattctgatacacttcagactttttagataa

SEQ ID NO: 68606 - DNA, 269 bp, Glycine max
gcaattcaaacttcacggcgtgcatcatcatggctcgtctcgcgatcgctgtcgccgacgtgctcctggtggccatatacgcctgcaccgatacggcgcgtccctgcaggaccttcataatcttcatctactagatccgcatccctaaatccaacaccttctgcactagcaccgtgatacgatcctttacccctatgtacatcaacgactaacccaacggtaaaaccttgtactactacgaacatttatttcaccaaggcacttaactt

SEQ ID NO: 68607 - DNA, 217 bp, Glycine max
ccggacttaattgctggaccgacgcatgcgtaccatcgatctatctgaaagccttcaaatggtatcatcggatatcggatactggataccggaggttctgcttagcgtcagtggttgtattgtgccgctgaatgcggcgctgcatgctaacgcagtcgtgaatacggcctacatggccttctacgccgtttattcaatcgagtaactgtacacggac

SEQ ID NO: 68608 - DNA, 368 bp, Glycine max
cccacgcgtccgcccacgcgtccggtaaaggagtaaacactcattttttatcatccgaagatatgtgtggcatcatattaatcttccatttataaatatatcaaattggcctccaaagatatgtgcagtatcaaacgtcggtaaatgtcacatttttgccatcagattggtccttgaaagaccactgttggcattaatcatttgaagtacgaatttaatgtcacgaataaatggaaggctaatgtcatgttgcgtatatctttgaagggcaaaaaatgagcttttactctattaaggaagtgaactgagtattatcaatattaaatttcttttgtcctggctaaaataagctctcaaatgggttttga

SEQ ID NO: 68609 - DNA, 179 bp, Glycine max
atgagtgacagcattacactgtactaaaaagcactgggtgatttttttgggttgttaacgttggaaagtagttatacatgggctttttctctctcacagattgcttttatgtgttggatattgagatgaataactataggccttctcgctctccagatatattattttttagtacttta

SEQ ID NO: 68610 - DNA, 421 bp, Glycine max
  unsure (1)..(421): unsure at all n locations
aatggatgagtttttaagtggatttcattgggccaatgaacttgtgtgatgaatgaccatggagtctgtggagtgtgcttagtttttttgatgggttagttaatggatatgacctgaggtgggtgagttctctctgtttagataagttctgtgtaatattgtatgagtctttttggtggttgggataatattataactgaatttgtttaatgtggtggaatgaaaggaatgattgattgatgagacaatttgaggcgctgtgacagtgattctgttaagatcttttttaaattgtcataataagatatggcaaatatgttgtgcatcagttttttttttttagcaaagttngtgtatgctntttagttattctctaaatgaaaatattgataatacagaatggtcattatgtttcttttaa

SEQ ID NO: 68611 - DNA, 386 bp, Glycine max
cttttctttttgtgaggctttccaaatttgggcagtatttgtatttacccttccactgagtttttctttcttgggacatagaaattgacagaagagagtgagcacacagaggcacttggtatagtatatatactattgcttttgcgtgctcacttctctttctgtcaacttccagtgctggaaaattccttacaattctggctctgctttgttccaaattccaaatccaaacaaaccccaaccccaccccagacacactctcgatctttctccacactctgatgaactgaagaacatcaatggcttcttcagcagatataggatgaagagttggattcatcctaatcactaaacatacatggattgagaagatgtcattttatatt

SEQ ID NO: 68612 - DNA, 430 bp, Glycine max
  unsure (1)..(430): unsure at all n locations
acgctttggttcacgcctacggatcagtcaactcagataactttaacatccatccagaaagcagcgcgattcgtggattgtagttgagtgctttatccaggtcacagagctcataggacaatggggagctctctagctacgcctatacactctatatgatggctcaattcaacaagcggaactggcaacttcaacatgaccatgatagatgtgcatctgtcattacgtaggatcctaagacaattcatgttaatttcagttttcagatttccactacattctcataccaatcacccataccctccttcgaatgcgacacatggcatatttctccaagcctncacagtgctcatcaaatctacgcatccagaacaccgagcttgactaacatcacaatcccttacatagactcatgtcttacgacaactat

SEQ ID NO: 68613 - DNA, 203 bp, Glycine max
agcatatataggacgttatacaccatcaatgcatgtatctcgttactctgctcatggtaggggcttttatacctagacttatcgttatgatgccacaaggtgagatgaaccctatttaatgtggaacttttggatctgctgccaggggtgcatatcctgtgactgctttcagatgatattagacggttgatctggtggatatt

SEQ ID NO: 68614 - DNA, 251 bp, Glycine max
cagacgtgcgcacgctgtgcgtactcggtgaatagaataagtatggctaccgtcccaggagggtttatatgggcggtcgtaatgaagaacaactctttcttggtgaaagagctctgatggggcactcagatcgtgcagtacaactgagagccctacactctttacaacttcaacactttcaagtacttagttttggcatacaagaataactgacaatgttcaaccttgtggtaacgaccagtatgagttgc

SEQ ID NO: 68615 - DNA, 422 bp, Glycine max
aaagaactggttacaagcctcttaagtgaaacagtgctggccaagcaaaatgggtcttggcgtgatcgggttcgtcaaacttagaatttgcacccttaaagttgatgctgataatagaaaagttggctgaatgttgaatgaagttgagctttaaccatgtctaaagcattcaattttgcgttgctcagtctgtatatggtgtgagatgggctttaaccgtgtatacaacttgtatctggttcctatgcaactggcattattttcaagcctataatcactagtgaggtaagctatgtgttactgtttatcatttttagagggggaagcagagtgatgtgtgaaacgccatttgtcttttgtgtaattccagtttcatagttaagtatttagaaggaaaactttgcaataggatgatgctattc

SEQ ID NO: 68616 - DNA, 212 bp, Glycine max
ttaatttagagtgggttttttcatttgaaggtgctgcagctactactgtggcacaacattgggcttttagttgaatcaggtttgttttcagcatattatttttgttgtgtatcacggtttaatttttttttccaccacaaaagataagtgtgggttcgcgtgctgaaatgctatgggtacttcttaattcttatgggtatgtttgatagttc

SEQ ID NO: 68617 - DNA, 243 bp, Glycine max
gcctcaacaacccagttgagtaactaacatagttcatgtgaagaacaagcatgtgctactaagaggactagtgcaccgaccatgcgaacgaatccgacctgaatatcggcgaaagtaccataccattacaacttccacatggtcccaacgatgtcttgctcaaaaatcatgcacttgtctcgccatccgcatatgaagaatatcatcaacaagccccaaagccctctcaatagacatgcttac

SEQ ID NO: 68618 - DNA, 244 bp, Glycine max
ctcttcttctcttgcggctagggttttagcgcagcttcttctagatttaaggaagacgggtgaggaaaaggttcacatcagtcttgtggtcattggccatgtcgactctgggaaatccactaccactggtcacctgatttacaagcttggaggcattgacaagcgtgttatcgagacgtttgagaaggacgctgctgacatgaacacgaggtctttcaagcatgcctgggtgctggacatactt

SEQ ID NO: 68619 - DNA, 208 bp, Glycine max
atcaatcaataacataaataacacttcttcttgccttttaatatatttctctctcttcccgtcgtggttcacctttcaacacttaattagagaccacccaatttccttgccgatctttttccaggggaaagtttggatggtttgtggtaagaagtaaaattttggtgaataaccggaaaggtgaaggtggacctggattatatggata

SEQ ID NO: 68620 - DNA, 250 bp, Glycine max
gacggacgagcagaagaccataactgtgacacggcacaagagagtgactgtctttctgggtgtcatcatgctttctatcgcagaggagttcatcatctttaacgacgaagtcaaataacaatgctaactaattgtcctacatatgatggccatttcaaatcatcagctacgtatcatcatattctgtggaatctctacttggctctcgcaaggagtcatcgagggacacccaccaccacaggctctttat

SEQ ID NO: 68621 - DNA, 381 bp, Glycine max
gaagatgcagcttcgtcgatcttgcttcttctttcatcattttgcatcgcgttaggggtggcagattttcaatttcccttcttttcgctacctttctcgcatagaatctcgcaattcctacgttgttccgtttccgcaactcatcaattcgaaagttattgcttcacaaggtgaatttgcatttaggaggttgagcatgtcataaaggaaaaaaatggaggtcgaggtgccaatctcgcttgatttgaataatcaacttcagccagagaccgtagtttcagttcaaaatggggatcctggagtttcctcttctgttgccaatgctgttaacccgcaacaagccgcttcaaaaaaaccgggcaagcactgggctgcatggac

SEQ ID NO: 68622 - DNA, 268 bp, Glycine max
gttgcgtggtcgtcacgcacgggtaggatggttgcgaggcgttatgtgaaaacggtgcgttgaaagtggcaccgttcgaggctgatcaggttgatcccaccggcgccggtgactgttttctcatcgggtttgcagcgacgattgtgaggggcctgcccgtgcctgatgcggctctggaagggaacttcttcggatccattgctgtagctccagtaggacacgccaagcttgacttcaacttgattcagatggttaaggatgagatgca

SEQ ID NO: 68623 - DNA, 211 bp, Glycine max
gccaattattcttaagactctctctttctgtcccattgtgagcattcttactcctggtctcttccgcgagatatccaggaatgcttattccccaattgcttctttacaggccttactgtgcatagcttctgagtgtctttggggctgtggcttaattattaattttaacttcatgggttgaattcgtgggggttccaccattgttggagga

SEQ ID NO: 68624 - DNA, 205 bp, Glycine max
attgaacttgcctttttctgatgcagttggaaccttttcctttggtcttctttccgtctctggccctctggttaatggtaatgctggtgggacttaaggaccaggggttgcttcttcccttttggtttcaaaggaagagaattttcaattttcaatttttcattgggttctctgaaatggagagagatttcatgcgtctcaactt

SEQ ID NO: 68625 - DNA, 139 bp, Glycine max
aacagatctaatgcacacacaatgaccttaaatcacaacaatgtcctagtcttatctgcggtgctcacgctgctcttctatctactactgacactacgcgagctcggagaggaacatccgctagtcctgcagtaccaca

SEQ ID NO: 68626 - DNA, 213 bp, Glycine max
cggacgcgtggtcgtacacgagcatccgacattacaattcactggctatcaaaaccggaaccgacacacactcacttcttgaccatcttaacctcatctactatataccttatcgtctaagagtctctatctcgatctaacactataacacactgctaggaattcggcacttaagcttagtctttgacaagctgaccgcctttacgtccccaa

SEQ ID NO: 68627 - DNA, 272 bp, Glycine max
ctcaattgaaactatgaaatcaacacacgccatgtgtgacgctctgaaaggcgttacataggccatcttgcaaatgaattggcaggtgtacatgccataattgcaaaaaagcatgcaagtctttgagagacagaatgagaagatggaatggacatacgagatgatgggcgatgccgtagatgatgcttagctaggagatgtagatgaagaggaaactgtagacctttgttaccaagtccttgatgtgattctcattgacatttaccaagatc

SEQ ID NO: 68628 - DNA, 368 bp, Glycine max
ggaatgaccataatttatctctgcatgtcatcgggcccgctgcctctggtgcctctgattcacacacttctgattctagtaataattataataccacggttactactagtgccacggggactatctcagctactgcagaaacagacccaaaagggaaacgtccaattcgggagggttagttagcttagtctagcttcactatattgctgttattctttttgcaatgtaagtatgtgtggtgttgaactaagtagaatgtaaatagatcgaggctataggaatggcgatcgaggcttaagtgaattcttattctttaattaatgttacaagtgagaaattatgtaatctctcattttccatggtttaca

SEQ ID NO: 68629 - DNA, 446 bp, Glycine max
cccacgcgtgcgcaacactatgaccctctcactatcagtctcactaactcccttaacttagtgaaaactcaaaacactttgcagtttcactatgagctaccacaagcgccaacagcacgacccatgggttgcacggcgtccaagctcgcaaaccaggacaccgtgcagccggtgcaagggagcggaaccacctcatgaacgaggcggtctacgcgcgccatgacctctctgatgtccactgcgactactgccggaccgtctgcctcatcggctccgtcctctccagcttatccgtctgcgaatccgtctacagttgcgaccacactctcgacgtcttccataacaaactccaacaccaccaacaacaccgtcgacaacaccgttagttaacccttcaccttcgcctacgctagcgacaaaactcgccagcagcaacacacggcggc

SEQ ID NO: 68630 - DNA, 368 bp, Glycine max
ctcattccctcagatctactgcacgtgtatgggaccatagtagcgagggctgtgcctaaatatctctatactgatatctctcatctcatctatatctcgtattactgccttgctccctatctggcgaccaatatatgatgtgatgaaacacagctatagatacaacgtgcatgtatgtggctgctaatcccagagctactaccctcagagatgactggttcgaaaccccgctactgggacaatgtgtgataggatattataccacagaaatcaaagacgcaattatcagaccgaatcgcattacatgctacggagctgtggtacattcggccgttgtttaaagcagcatagccggacactagcttcaa

SEQ ID NO: 68631 - DNA, 436 bp, Glycine max
gagataacttggatgtggtgtcatgttctgtatgtcagatgggtgttttaattcgggatgctcacaagtgcaatgcatgccaaggttattgtcacgagggctgttcaacaagatcaacagtctcggcaaatgaagttgagtacttgactacatgcaagcaatgctaccatgccagattacttgctcagaaagagaatactaatgaatctccaaccagtccattactcctacaaggacgagagaataactctgggacatttttgaatggatcaaggcctaaatctcatgatcaagtactgaaatcttccaggacaaaggctaataatcccaacgtgaaacatgttactcctgtgacggctttgaaaggaacaaaggctaaatattatgaacaagaaccgacttctaccaagacaaaggataataatcattttggcac

SEQ ID NO: 68632 - DNA, 279 bp, Glycine max
aagaataatttttgtatcacgttgaattgatcatgtaaaaaattacaaatgaacatagaagaaacaaaatagaaggaggggaggaggagaatcatggaatattgtacgtgtgcagctgcccatgcttctctagcttggttgccgagtaatattagttgcacctccacattcattgttttatcatcagaaaacctcacattaaaattcttttatattcatttaatagtaagaagatgcttaaaggaggttgcataaaaaaaaacacaatgatatctaaaa

SEQ ID NO: 68633 - DNA, 410 bp, Glycine max
ctgttatgtacacattgttagccaagagttgcattaaaactgttcacatcatttgtttttgcatggactgaagttcataagaaatcaatcattagtaatatagtatgtgaagaccaagagggacactgtgaacgagccatgttaaaatcagtcagatgctcccatgtaatatatgattatgcagtccaaaatgatctgttagtgtatcattattaatttattatagaactataatatttatataaatattttaattttcgttaaataaaattattataccagcagaagttagtataattcaaactgttagtattacacgactttttttttagaataattaagacaaagctagtttgtaaaagaacatgattaagtgaaagcaatacaaaatgttgaaacaaagtcagttg

SEQ ID NO: 68634 - DNA, 250 bp, Glycine max
tgcatgcgtactctaatattgggctcaggacctgtgtttgcactgctggaatgtcaaggatgtgcatcatctcatttcaaggtctgaatttgtcaccacttaaatccgaacttgttctctgtacgatcgtctaattctatatgggtaatcgagagctatcccatctacatcgagatacgggacactagacaaacccgactatcttcagagtcacctgcattgaaagagtgtcctagttgtaactaacata

SEQ ID NO: 68635 - DNA, 414 bp, Glycine max
cttacaacttctgttacactcggcatatgctccacctctcactcaagtaattactcctaagggttatattagtcttcaaatccgtatactctctacactgacagaaacccttctgtttctggtcatatggtctctttcagaacctgctctcttttctctgttagtgtcttctgatttatacagatccgatccaaactatagagaatgtcagaaacaccccataggaagacagcgagccttaccccaaaacgaggtcagatcaaggctcaaatgattactagccttgtgaattcatcggtctccactatctcatatacaggggaatcgcttcgaaacgtgattggaaatgcagccggctcatgttctgcatctgttaccccacccacaagtaatggctacaactctgaagccaac

SEQ ID NO: 68636 - DNA, 278 bp, Glycine max
atcgcacatactctcataatggttgatctaatgtcatataatataatacaatctgggttaggggttattatactcaacctcaacgttaaatgcatcacatgatgtgttcatgatcaactgcttgattgactcttgatacacatagattcctatactcaacttagatacacgctcacgacgatatttgttgtacgtcgaggtatctacattacatacctatgctcgagcttattatccgaacctaatttgaaaggaccgttaatgacatctcatttgat

SEQ ID NO: 68637 - DNA, 303 bp, Glycine max
tgcagatcttcgtcaagaccctcaccggatagaccatcacccttgaggtggaaagctctgacaccatcgacaacgtcaaggccaagatccaggacaaggaaggaattcccccggatcagcaacgtctcatcttcgccggaaagcagctcgaggacgggcgtaccctcgccgactacaacatccaaaaggagtcaacccttcaccttgtccttcgtctccgtggtggcatgcagatcttcgtcaagactctcactggcaaaaccataaccctagaagtcgaaagctctgacaccattgacaacg

SEQ ID NO: 68638 - DNA, 228 bp, Glycine max
attttatccagttgaaatcattgaactgacttggataaacttaagaatgcaattatggatagggaatcagtgaacacttcaattggattggtctaatggtatgaaaaaaatggagtactcactccgatatattattgattattgcattaacctgtcaactcgctctgtaatggtgcacttctttccgatctcaaaacttatgcagaaaacagcagaatctatctggat

SEQ ID NO: 68639 - DNA, 307 bp, Glycine max
cccacgcgtccgcccacgcgtccgctggttccgtaagaaaagaaaggatgggagtgaagtaaaaattaacatgaaatgaactttttgatagagggccaaaatggcatttcgtttatttattttattaagttagtgttacatataagatgtctgtaaaaatataaattatgaagttgtatatataaatatatgtttgctgctgaagatttttcattcgtgaatgaaaccgagaaaaaatgaacaaaaaaaaaaagaaagaaaatcacaacaaaatgaccgttacacttgccagcaacctaaataaaaa

SEQ ID NO: 68640 - DNA, 332 bp, Glycine max
cccacgcgtccgctgacaagctgaggtcattggtgcgaaaattgactacttcaaaatgacgtggtgcctatcagatactcatactaggctgtgaacatgacgacctcaggttataccgtcattgcgctttaatgatgatatgcctatagcatcactgtgaaagtgcatgacgtgcttcgagctataattgacttcttcggcaagtacctccgatgcgtccaagcctacatcaacgacctggctaacatcactctaacatgttctgacaatataatccaagctatggcattctgcgtccatgactgaaaacgagctctcgtctatcacatcat

SEQ ID NO: 68641 - DNA, 285 bp, Glycine max
ttttgaattaaattgaccatgcggtaacatcttatgggcaacctacctagccatctgaaatgggtgattttcgtgaattccttgtaacatatatacatcatactgcagactatgccaaaggaagacggagaagatctatgaagctccttatctatctgatgatcgttctgacaaaaaatcactggtaaaactgttaaaatttatccatagacacaatgaacagacagaggagatactcaacatgtgatagtgatagctatttcttagattccgtgctagatttat

SEQ ID NO: 68642 - DNA, 246 bp, Glycine max
cccacgcgtgcgccgagtccaggttccgctgtagatcgtagcacaaatatgtacgtgctaatgtatcgctagaaagactaacgtatgtcctgcaaggatgcatggacagactgaagtataagggataacggatactatgtacggtacagactctcgagccgttgaagtcctagatcggctcatataccggtgcatcaaacgtaagtacattcggcgtgaacagctcattcgagagtgcaccattct

SEQ ID NO: 68643 - DNA, 354 bp, Glycine max
  unsure (1)..(354): unsure at all n locations
cccggtcattggtcctcatcacaaccacaatgtgaacctcgtttgacaaacagcttctttcacggagctactcactggcagtgatcccaacaaagggtgtgatgaggctaataacancatgatgttcaacaaagcagcatgtagactgcaatggggttcatcaacaacacctatggactactttctggggctttcctcttctagaacaacgacacacaatcacaatcaccttcatcatcatcaatattcttcatcttcttctagtgggttcttattggcacaaatgcaactaggacattctgttcctgaggcaatgaatcatgtttcaggattcaacaacaatgtgagtggtga

SEQ ID NO: 68644 - DNA, 195 bp, Glycine max
gcctatacgaacctaattcattatttcagggttattaattagaacccaagggaagaaggcgggtaggtggaaaccaaaaatggcaatggaaggtttttttggacaccaaatatttttactttcattttttggctggaaggataaaaaaatggtatggttcaaccttaaacttatttggatggaactggtaatagc

SEQ ID NO: 68645 - DNA, 172 bp, Glycine max
aataccggttgggccggtcctaccggatatcttgatctggtagaagggatgccaggttctgctcaatccctttggtccacttcatgttcgcaagaatttattaatcgccacatgacataatcaaatggacttttagcaattttttttttacatatattttttccttttttta

SEQ ID NO: 68646 - DNA, 331 bp, Glycine max
  unsure (1)..(331): unsure at all n locations
gcacgcccacgcgttcgcaaaaaagaggcaaacattttatgtgaaatanntgttcaacaaactgcacaagcgtagagtgtctcttgagcagtaataagaccagctgtcgaagggatggctccaaccgatgtaatatcgtacagcagaggcatataacatgcatggagaattcaagctacatttcgagggggtctggttatttattaaattatattgtggaccatttgcgaattatgatcggattatctcaatggtgtatgggagatcaatttttctcttccctattggcaaagagacgtggaacatcttgacgagaattannaatactttt

SEQ ID NO: 68647 - DNA, 419 bp, Glycine max
  unsure (1)..(419): unsure at all n locations
gagggtccgacccacgccgtacgacacttaaagatgctaaagtcacaccctcttcgtgttaaattggaagtgagaaagtgcgaatttgctgcagggcgtgtgatattttatagacaatacatggtggtcttgttatgcttcagctggtaagggcttgatgaaaaatataaaacaaaagaggttgaaggggaatagccttggggaagaagtcttaacgaagttaaatgagcatttgcaaatggggaaaggaagaattctctattcaatcttcaaggacgtggtgagaaaagcaaaaagaaagctaatacttccggacttttcaaaggcgaatatcaaattattccacttnnnctagtcgaaaagaagggcaaagagaggctcctcagagagagctctcttttggggaaagaagcttgtga

SEQ ID NO: 68648 - DNA, 471 bp, Glycine max
gtcgaagcatgccgttagggacaaaaatcagctgcttttcctggtacttaagtttgcagagggcattgctgtggttgacctaaaagattcttacccaaatgtgatggaagacttgcaggtaaattatttcttttagttaattgttttgcatgaaaatgaaaatttcttggcattcatttttcggtaacattggtggaattttgattatagatatatatgttcaactctcacattgccttgggctctttgagcaactattgatatcttacagatttgatttcttcatgtgcatagttaatttttggaagagtcatgtgtgctaaaatcacgaatcagtatgacagaagctcaactaatcaaatgttattggcaataccatggatgaatataaaaatcaaatatttcaggggacaaagaaaacagtataagtaaaaattagtttaaaaactagttatgcctacttgtggtctt

SEQ ID NO: 68649 - DNA, 484 bp, Glycine max
cccggggcgaccgcacgcgtacgatcccatacaattatttaaacagctttttcttcttaataaaggcactttaaaacagggtcgtttaatactaaagttgcgtaccccctatcctccggatctttattctcttgctctctcaaatgtaacacgaacatcaaaaacagtctgacatttagtccattctttaacatattcattctaacatgtattattttttccaaaaatttcttcatctatatttaacttaatcttaatgaaaataaagatactgctcttcaaatttatttgcctatttaaaaacaaatatccttccttatcatgtatatggattcaaactatcaatataccatcaatttaacctccgccccactctataaaatccaaactttcttactcttacatgccaacatatatttcttttatacaccaacctaaatttaactaacattccgactttttacaactttattacttacaaaac

SEQ ID NO: 68650 - DNA, 477 bp, Glycine max
  unsure (1)..(477): unsure at all n locations
attttcttctggaaatctcgatcaccataatgctgcttttcttcaagctgatctgctggaggtagtggactntataaatgatgcaattgtatcaatggactcttttgttagtgcatacgaaccagcagctgttttcttctcttgcccagttgaaatgagttatgggaatgaggaactgctgagcctccttgcccgattgcatgattcacttattccatcattgcaaaagggattccgtatgatttttgctgacaaacaagatggcacagtatctaatatcttagtaagtttgaagatgttaaaaattagattggtaaagtttggttggcaactattgcacttgtgctatctaagtgatgaagtgttcaaagatagcatccctcttctagctgccacaaagatgtttcctgccaatgtagaggacccagtcatcagagctgatattcttgttcaaacatttagagagatcaattcagt

SEQ ID NO: 68651 - DNA, 472 bp, Glycine max
ctttcaggtgtatttgtgttctaattatctattttagaagaacatggaactacaaggtatgggtccaagtaggtaaatttgaaatcttatttctttgtactgatacttgtggtttgcataataatgtttcattgttttgcaaatgatgtaattcaataatcaaaataatcatacttccaaagacatatagtatcatttttaggggaatttagtttatacaagatattcatcttggtaataagatgccgtgacactgatgctttggtaattaactatattttgttattctttacgagacccacacaattattctagaaacagaatattaaaactagtagagcgtgtgtgctataacagttaacagaatttaatgctttctaatttgtttttgctccttttctttagacaaccatgctggcctgcgactaaatataacgaataagactgaggatttcacccctgttaattaatt

SEQ ID NO: 68652 - DNA, 399 bp, Glycine max
catgtgaagtgggcgtggaaaccttagaaatctagcatctggcctggtaactcaacaatgggtggggggaaacttgccacccggggaaacaaacaagaatcaataactgatccacttttgtcaccatttatctgcaacgtgccttttccaaagtctaacaatttccatccagatgaaaactccaggtccaacaataaggatatagacattcctaatgcaaaaaggtatgggagtttttccttcaatatttgtaattgtgggaactggtaagttagcataacaagagaaaacttatagtggggagtgcatgagcagcatgacgtatagaagatttactttttctccctttggtggctttgctatcttctgttcttttttgcgggttaatgaggcttggaa

SEQ ID NO: 68653 - DNA, 377 bp, Glycine max
  unsure (1)..(377): unsure at all n locations
caaaacctaaaaaatttattttcataccatccaactcaacaattgctgctcgtttaattattaccaccaacctcaaacaaacaaaaatcaataacttatccactcttctcaccatttatcttcaacactccttttccaaaatctaacaatttccatcctnattaaaactccacatccaacaataacaatatacacattcctaattcaaaaaatcatattaaaatttccttcaatattaacaaattttataaactgcatacaatcataacaacataaaacttattatcatcaattcatcaacaatatgaccaataaatatttactttatctccctttaccanctatactatctactcctcttttttaccatataataa

SEQ ID NO: 68654 - DNA, 373 bp, Glycine max
ggccaatgctgacatagtaaaacaataacatgctcacatccaatcacatgtatcagggggggtgagagagattgcgaactatatcacatcacaaggacatctggcatcagaaagcactacacaattaagttttatgaatgaacacaagacagtacacgcgtcaacttagaatttacaaatcaaggatccaagcgaaatcacagcacaggaatcaacaaactgccaacaattgactgatcaagagatacaaaaatcagaaaccgaaagtgtgtatgaaaattacgcccttcaaacattacccaatacagcatctgtacgtattgaaacttataaaagcattcaagagatacatacagaaacaaaattcgctgtg

SEQ ID NO: 68655 - DNA, 226 bp, Glycine max
tttctctcaaacatttttcctttctaaccactaacaaactcaacggggccgtttcataacaaatgtgcgcccccaataatcccctaaactacttatacaggctcatcacatacactatcccatctctttaaatgcacaatcatcatcagcatacccaccactaattactttacgtcactcatcaatcaaaccaaccttcccaacatgcaaatttaccatccaagcc

SEQ ID NO: 68656 - DNA, 280 bp, Glycine max
ccgggccggccgacgcgtacgcccacgcttcctctttgctgaaactgtatttttatgggctgcatattatttgctggtgttggtgcttttcaaacatatagttgctccctattcgtactagttatctattgaacgcaatgactcatcctggcagaaggctttcagtgacattaggtgcaataaaaattacctatattgaaggaaccaccacatgcaatgttataatccttggaataaaacaaatttaatatattcagtccaggttgctcttcaaatacta

SEQ ID NO: 68657 - DNA, 187 bp, Glycine max
tctactcgttcgtccactctgtctgtatttcttggtcgaggtatcacactcagaagccacataataacagagtgcctcctctaacaacactctatcggcatgaattatgagctcgaaggcacgaccgactgttctgggcccgcggataaagaccacgacccaacatattgctccgccgatagaccct

SEQ ID NO: 68658 - DNA, 254 bp, Glycine max
  unsure (1)..(254): unsure at all n locations
gggggcgaccgcacgcgtacgaaaataatccatcatccaatgtattattttttctcctctacttctanaangatgtgagagaggttcatagtcagatagaagtacacgaggcaaaataatccatcatccaatgtattttttgtacatagaatcatcctctcttactgtaaaagcttaaattgaaatggaaaatttcgatctagaaaagatctatatggccaatcaatcaccactataataaaaaggattttact

SEQ ID NO: 68659 - DNA, 153 bp, Glycine max
acgacggcgacctacgcgtacgcccactcatactcttgtatgagatgttaatatctaatcctccttcctcgattgaagaggggggcattgaggatgagctcatctacatccctctttttgccgacaatgattttctatcacatacgcatacac

SEQ ID NO: 68660 - DNA, 213 bp, Glycine max
ctaaacttcacttcacactctcactttaggttcaatttttagtcatattcacccctttccggataagttactatcattttaacgaccatcctacaactctctcaatggtattcacccatagaatactaacaattacaatcaccaatatgttaacctggaattctacatacttcacagctcttgaatgagacacatgaactcatactatctatt

SEQ ID NO: 68661 - DNA, 105 bp, Glycine max
  unsure (1)..(105): unsure at all n locations
nccacgcgtccgnccacgcgtccggttacaccgctgggaataatcttcgcggagaacacaaagtggctttttttggcatatttgatgggcacggtggtgcaaaag

SEQ ID NO: 68662 - DNA, 187 bp, Glycine max
gtttaataaatggctgtacatttttttacttataatatgatcacaattaacaaccatgcacagcctgaccatgcacaaccttaaaaaaatgtacagccatttattaaggttgtgcatggtaaggttgtgcatggttggtaatggtgatcatattataagtaaaaaaatgtacagccatttattaatc

SEQ ID NO: 68663 - DNA, 296 bp, Glycine max
cttacgcctacggtcacacagaatatcacgtgtctgtatctacactctgcgtcatctatatgggagtcattcttatatatcagtcgtacatccttgtacatggggactgaagatcattgcaagttctatatcacgaggcaatttgctagctcatatgatgaccaatgcgatcttactcctcatggcttgaagaccttctcttgccgatctcttgctgcaaacgatcattctgagctgttaatgtagctgtgccacgactgcgacatggaatgcagcatcacttttgtaagacagcg

SEQ ID NO: 68664 - DNA, 212 bp, Glycine max
gaaagactgcaacgactcacgaaagtggctaccatcagtactacaatcgcaccgagagacgcagtgatttgatagacccaatcattgccattaactgaatgtacaccttaaatcccgtttaatatctactgcgttcgttactttctaacgggcagctatatcatcttatgaacatatctgagtatttcacccgagaaataagggatacgtat

SEQ ID NO: 68665 - DNA, 410 bp, Glycine max
  unsure (1)..(410): unsure at all n locations
cgggggttcaatcacaatggcttccgcagtgagggtggctttgagatccttcggtagtcgggctagaagcttcgtcaagagctcaaccacgccgtttgtgttcacttcgtcttccgcatcgtgcatctctcgtgcttcgagggttttgtcggttatgataagcgttgattcgttgatgcctcttcacagtgctgtcgctaatgctaggctcacctccaatatcgccttcgattccacctgctggagctcgctttctcgaggtactacttctctccttgttattttactcgttttgagttatctntttgcgcaataatcgcaattaacaatgatcttatggatgatggatatgttctagaacacacacacgcatgcttgcgtaattgcttctttttttttataaaaataat

SEQ ID NO: 68666 - DNA, 248 bp, Glycine max
gcggtaaagactaaagagagttgtggcgtggtggtggctgtcgctattgaaatggcagcgtcgtggtcagagaagcatgtgatggtgataggcatatacgactgtgagcagagcacgtacgcgttgaattgtgctgtggataactttattccgagcccaatttgtaagctcgttcttatgcactccaggcccacctccacctacactgtgagcttctcctgccctgagaggtttattctgttacgctc

SEQ ID NO: 68667 - DNA, 221 bp, Glycine max
acggtgaaagcgaactcaaggcttagcatatccttgcgaagcttatcacaacctatgtcggttagagacatagcaaggacttgagatgtttgtgctctcactgttatttcagagcatgcacagcagaacgaccgtgacagtttcacactctaactatgggactcgccagacttgctagaccacatgatgatcctcgccggatcatgcaaacacacatctta

SEQ ID NO: 68668 - DNA, 353 bp, Glycine max
gcgcccacgcgtccgctgattcattcacccaggttttgtgtttctgtcctctattcctctcagagcatccggtgaatctgatcaggtgttccttgtgaagagatccttacgtttttgaggtgtgacgggaaagagataacgtaaaagatgaatcagtgcggttatcaccataagaatgctttgacacgctgtgacgagatgaacatggaatcaatggtgtgccctagaccacgaagattggacctgttgaaccactcaacctttgatgaccacatcataccctggaggccaacctttatcaactaccaatcagacattgaagattcaagactctgtgctagactcttggacat

SEQ ID NO: 68669 - DNA, 259 bp, Glycine max
acgcgcaggactttacgttgcatcagcattattctaacgatgcgacataggcgggtttacgaccctgggatatggtcgcgataatggcactgactgaagacaccattcaacaatcttagaaatctggattcgcaatcatactcaacatgctcctgacagtagtcactagatacttgtggctcacacggctgatatcgcttaaatgtaaaggactacgcctacctgcaaaggtcgagcccttactgatgagtctcgtatc

SEQ ID NO: 68670 - DNA, 337 bp, Glycine max
  unsure (1)..(337): unsure at all n locations
tattgcatctgcaccaccaaaaaaattaataaaacaggtaccgagttttttaaaactaagttaattaattttagtaatatctccataaaattaaaataacttaagtaataattgtatttaataacaattcataattcatactccggtccacttctaactaaattagacaacccaacagaagtagatttttttaaataaaaaaatattaatagtgtacccaatttatccttgaatgatgtaaagacattaaaatctaaaaccattatccatcactgtcaaaaaaaaaaaaanaaaanaaaaaaaaaaaaaaaaaaaaaaaaaaaaaaaaaaagggcgg

SEQ ID NO: 68671 - DNA, 453 bp, Glycine max
aatttccggtcgaccgcacgcgtgacgccacgcgtcctgtaggtaaacatttgtggtattgtattttgtaactacctcatttttaaggttctgggccaccgtaacttgcagcctgactctgaagctcagcttctgactattcactttgaatggaatggtgtcctaaaatctgtatccagcactttggttggagtgagccctgaatttgaaattgctttgtataccctgtgtttctatgttggtagggaggataaccacattcagcttggtccatatggggttaatatcaagtgctatcgattgggtgatcgaattggatctgttttccccattgcagattcttgaattttcagtttccatcattggtaatagttgttccctatgaaatcgtttgttatgcatacttgagaacttgtaactcatgggtttaaaagcaacaataccaattagatc

SEQ ID NO: 68672 - DNA, 398 bp, Glycine max
gcgtttatattcaaacatggcaagatcgccaaactcagcattcaatgactgattctacttctccgaacttgataacatctttgcataccaactcccacaaaacaaagtttccttctttaccagggaagaaaactctgtacaccaaacttaatttctcattttctattccgttcaataaatcgatacgtgtgaaatccattgacacgaccatatatgatcaacttatagcctatcaagacttgtacaatattataacgctgcagaatagttcatatattataagagtaacattgtaaagtgaaaactgcagaacacttgaccttactcctactgcatttgatgcaatatcatagagttttggaaaagtaattatcaaatgtttcaagaaagaaaaatga

SEQ ID NO: 68673 - DNA, 91 bp, Glycine max
gcgcgcagagcacatgtccgtgttattgtaaggatttaggatcgtctatggtcctcaaaaaaagggaaaaggtttaattaaaaagggagcc

SEQ ID NO: 68674 - DNA, 67 bp, Glycine max
acgcccacgcgtccgcccacgcgtccgaaaaaaaaaaaaaaaaaaaaaaaaaaaaaaaagaggaagg

SEQ ID NO: 68675 - DNA, 367 bp, Glycine max
cggacgcgtggggttgcggcgccacctgttcaagtcttcattcctccttgtcctagaccttgcgattacaattaattcaaagacattttgataaacaactgttccaatatcgactcttgtggatgagtagattgcttgtaaataaaaggagctgcaagaaagtgtggcaggggagttcaatttggagaaatggaacgccacaactgcttgtacatggagctgcatatcttctgtatgataggttgcacacttgatatgattatcacattgctgatgtttgttcaatttgtggaagcatgcttacaacaacattcatcaaaccttaaaattggccagttcgtaagattggtgtgcttccccctggaag

SEQ ID NO: 68676 - DNA, 244 bp, Glycine max
  unsure (1)..(244): unsure at all n locations
attccagcgacgcccgacgcatacgactgcttgcttcgtttctgcaaacgatcatactattcccagcactagcanaactggtggggaggcgataaatagaaacgctacttcttccccaacatctacttttcaatcaaatacttgtggccgcaccacttcccaaatttagaatccttcctttaacacatgttacagtgccaccacaactgccactacggaatcaacaccatcattcagctctaaa

SEQ ID NO: 68677 - DNA, 275 bp, Glycine max
cccacgcgtacggttccattcgtgaaactaacaaccacgcaaggcctttatcatggcagcgggttgcccaaaggcgacgcgacactcaaggccacctacgctaagactatcgacgatcccaaagacctatatgactcttcaccactcgaccataccgccttctgaatatgccatgaacttcactgttgaagccatccaatcagagaatccaacctatcagtgtgaaccagacaatcaacggtgacccatacattgaaagacctgacaccccacat

SEQ ID NO: 68678 - DNA, 453 bp, Glycine max
acgctaactgctagctcaatggaggcggtatggttagcccgaacgtggcggcgccggtgaggtgcccttctcgctttgatctaagttatactaacgctctctcgtttacacccaaaagggccccgacaatggcttcaggggagcaaaaagcaccaccccaaacccaaaggttgcaaatttatcccaatacaaattctggggtctcacctttctggagagagaagtatgaaagagaagccaagaggtattgggatgttttctacaagctccacaaggacagagttagttttttcattagtatttattgtgtttttggtctctgtcaatacaaattttgttgctcacttgtgtattcaatcaatactatttgtgattgtggtgcctctcttttgaaaaaggcaaaaattgtgtattattaataataaaaaactgtcattaacactaggagtgtaa

SEQ ID NO: 68679 - DNA, 299 bp, Glycine max
aaactttcctcccaccttgagttttacctactatgaatcacataatggctcagctgcacatacaacaaacctccttctttccccttcctctatttgtgacactccttataacttatactctataagcttttataaatagcttccaacataactacaatatttcataatgaaagcatcataccttctttctacatcatcttcaataacatcaactctcaatttataatacttcaggaacttgtttcatatcaaaaatctaatattcctctgtattctttccaatcagaataaaaattccc

SEQ ID NO: 68680 - DNA, 276 bp, Glycine max
  unsure (1)..(276): unsure at all n locations
aattctttatctctatataatgacctaatcttatacctcatccaccaantaatggcaagagtcattcaaaccataaccccatactctacactctaactatccccacacatccctaccaccgttcatatcaacttactttaacaaataaaaacctacccactcactctacaccctatcacatatcaacaaatgtggaagagatcataaataactctcataactcatacaccgcacatcctaccatcggtcattacttttctctcttgaacaaaccat

SEQ ID NO: 68681 - DNA, 409 bp, Glycine max
gcccgcgccgccctccagacctccgccatcgaggccaaatgcctctccgtctctggtgagggctcccacctctccgccctcctctgcctcctcctcgccgcgctcccgcgcctcttccccgccgacgccgccctctccgccaccttctgcctccgcgggctctgggctctccagagcggcctctccctctacgccgacgccttcatccccgagggctgccaccgcctcctcgacgtcaccagcggcgtcgagggctccacacagtgcgatctggacgagtccaagctccgcgccgtcgccatccttgatctcgcattcttgatccacgccatcatcgtggtcctaatcgtgctcctcacttatgccctcttcgccagaagcttcggcgggaggaggctcggatcctatg

SEQ ID NO: 68682 - DNA, 299 bp, Glycine max
aaaaaaaaggcgaaaattggaaaggggaatgaacctttttccctgggggggggcatacaatacattttttaccccccttttttttgcccaaattgccctttttgggggaatgaataaaaaaaagtaaagaaggcttgttacccccttcctcatttggggtagttgggaaggccccaaaccttaagggggaagtgggcccaaataaccccccaaatgcccccaaaaaaaaaccccccggggaacttggcccccccataaaaaatttggaactgatcgggctcctttttggggccccttaa

SEQ ID NO: 68683 - DNA, 363 bp, Glycine max
  unsure (1)..(363): unsure at all n locations
ttcctctcnatctcgnttttatttttagatctcgaacatctacactggggaagttttcatcatcaaactttttaaacaaaactacccattttatctaaagaatcaaatctcaacttctcttcaattgtccataaataccctatactatctatccttctaggcgaaaacaccctttcctttaaaatataaaaaaaaaatccaacacagttgttgtcacccctcaatcttccttttattttatcattaccattctaacacataaatatgcttccctctaattttcaattcaatcatttatttttttttcacatttatcaatctttttatattaccattcccaataatatcactgcatacattttc

SEQ ID NO: 68684 - DNA, 304 bp, Glycine max
cccacgcgtccgttccttttgaaggttagaagtgctacaatacaaacaatggcagctactgaggaagatgtgaagcttttgggtattgtgggaagcccatttgtgtgcagggtccagattgcccttaagttgaagggagttgaatacaaatttttggaagaaaatttgggcaacaagagtgatttgcttctcaaatacaaccctgttcacaagaaggttccagtgtttgttcacaatgagaagcccatagcagagtctcttgtgattggtgaatacattgatgagacatggaagaacaacccca

SEQ ID NO: 68685 - DNA, 419 bp, Glycine max
ggaaggcgggggcgacgacgcgtccgtgatttgcagcaagctcttgagctgcaaagtttgaggctaatgggtctgcaacttgtggagatcaagaagcatcaccagcgtgcactctccactggaagcccaattccttcccccactcactctcctaacatgttcaaccaaaatattgttccttcttttcacatcaattcagaatccccaaaggagagtggttcaacttctgctccagctagtactgcatcagtttctgctggtcaacagccggtcaacatttctgttggcaaggaagtggttgtcaatggcgagaatggatataaagaaagcaatggcaagcagaactctagtcatgacgattgggatttgcaagaatgtttggagcataatcttcctgatagcccttttgcttccccaac

SEQ ID NO: 68686 - DNA, 186 bp, Glycine max
ccttccctaaatataccttcacattctcctcctctgtctgatactcctctaaaactctactttcatttaaataaaaactttcccctttattatattaaccaccattatatttcttttcaccaaaatcctatcacatcatcttcatatcatcttcctttcctattaccttcttctattttctccatc

SEQ ID NO: 68687 - DNA, 360 bp, Glycine max
  unsure (1)..(360): unsure at all n locations
gtggaaagagggaaccgtacaaagaagataacgctaacgcggtgaccctttttgtgtgttgacattaaagaatggagaaagagggatgaaagaagattttgggaaggaaatataaaacatttattcattgtcaccaaattttgttccctgcaagagagagaagaagaagttgttgggttgagttgggtttggattggatttctaatctaatctatacctttctttttcctatgcttttaaggcacanatccttctcccttctctcttctttcttcttcttctcctgacccttattattattccttgcccttaccctttangcaagggaaggaagaaagaataactnatatatnatcttta

SEQ ID NO: 68688 - DNA, 194 bp, Glycine max
caccatcttaaaaaccattttttctcattctctcaatctaacaaactttcttcttcttcttttatatccacatcactttaacattttaaagcaaatcaatccgaataatcttttataactttcatttacttaagcttctttcttcccaactatatattatcttccccacaacaaaaatattcttttctcttttc

SEQ ID NO: 68689 - DNA, 361 bp, Glycine max
ctcacgcgtccgttgaaaccaaaatctccaatactagacatgtcaactctaatccggagatggcaatcatatcatacacactatactacttctatgattctggttgaatcctacatactgttaacactcatgaataaccattctgtagagccacgaatccggtctagattctcaactatcagaagagcatgagaaccttctacagcagcgataatgggaattccaattccaattcccattttatctccggtcatgtcgccgtttattgctgctgcggatgagaacaccaacacaaataacatcaacaacaatgggaagacaaagtcaccgaatttgcgcggtagcaacgacgacggaatgc

SEQ ID NO: 68690 - DNA, 369 bp, Glycine max
  unsure (1)..(369): unsure at all n locations
aatcactctatcttctctttctctctgtccagtttatgtctctccccaccaaactttcagtcacggctttttcctacctgtcgccgccacctcctattaaaaaagccaaatccctcctcctacnctcctactccaacaaccacnacnccttttttgacccttcctccattcctctctacaactatctccccaattcccgctccgccaatctcgcccgcaagaaagccacccctccccaacccgccaaaaatctcctcatcaagctccacaaagcttaaccaacatttgccacaaatttccaagaagatacatgggcaaaactaaaatcttccatttgtgctatatttattaaacaacctaactcttttt

SEQ ID NO: 68691 - DNA, 309 bp, Glycine max
acgtagggatcaagtactaccttctttgggtgatggaagatgatgccttggcatcatgcgactccgttttatatcaaagttctgttacaaccttttgaatctttatgaaaaatccatttaattgttttcatgagtgtgtatttgtgtgtacgtatgtattctagtatgctatatatgcacttagtatgtatgtatgtattctactttgtgcgtatgtatgtatgtctggattgactaattgtttaagcttctaatcaacggtttttgctaattcatggcaaaaaaaaaaccaaaaaatttacaaaaacc

SEQ ID NO: 68692 - DNA, 286 bp, Glycine max
tcttacacccacgcttcctctaaccccttatcctacgcttttaccctaacttatctctcatttaagtctgcttcatatacactgaacttaatcctatacaaccaacatattcaccaatacctacaatctccctctacctacctaactcaatcaatattatcaattcaaatcttacaatctacaacacaacaatattacctcataaatattaaagaatctacctcaaaccactcactctatacactaatccaaatcatctactcaaagatcccacatatacttatca

SEQ ID NO: 68693 - DNA, 362 bp, Glycine max
acggcccaggcctccgagacaacagtgtacttgggatagttataataactctgccccatggtctcgggtaggaagctccaacagtaacagttctgccagagttcagcagaagtttactaaagaaaaccgaggttctacaagagaagagcatgttgacaattttcattatcaagatggccgaagaaatgaggtttattttgatgatagaacagcaaattctgagttgtccagtgcacctcctttgagctcctttaagagtaggacctcttctgaaagctcatgggatggatcatcagccaaatcctcaaaatcaactagggagagaagggggaggaaaaatacttcctcaatagcatctcctg

SEQ ID NO: 68694 - DNA, 237 bp, Glycine max
attccagcctcggccgactcttacgcaaaaaaaactcttattaaatttcaatttggtctaaactttctcttaatgctaatgggtataggctcaaattatctactgccacataatatccatctactaaccacttcatcacgactctaccacatacgccatcccaacaacaatcgtcatcactcactatcgttccatccctttcatcatcatcatcgccatcatctctgaccacaaacc

SEQ ID NO: 68695 - DNA, 351 bp, Glycine max
acgtgatcatagtcgtagacatgatcagaagcgtatagtgatattagatcagatggattgatactgtcagcaaaatgcagaaagattaaacatcacgttgttcccacagtactaatgatgtatcatacacctgtcaaatccatgacatcatattgcatctaggctcatcaccatctctcttcagccctgcctaatacaccaattgtttgaaagccatcactaaatgccattcaactgcccatgatcatagccaaccttaacccacatagcacttagatctttgacgacacttccggccacatacaagctggaaaacatatggcgctttacactgcgcttgcttgctcatac

SEQ ID NO: 68696 - DNA, 281 bp, Glycine max
ttcacttctctagtctgttcataacatcactaaaaacagcttccgaaagatttaccataatcgtctcttctcgatctcaaggcatccatctctgtatcacataactcatgctctgtatcacagtactattcccatcaacacttttctctcactatgactcatgttctcgacgccaccaccaccctcggtgccgttccaccaacagtacgacttcaccgaccgcaatattcggtttgatacctacttctacatggccataggtaattctaccagtccatcta

SEQ ID NO: 68697 - DNA, 232 bp, Glycine max
gcgaaatacactgaatgcagcattcatagtaatgtctgtaattataaggctagcatatcatactagatcagggtgtcatagtactaccatgcgtcgctgacacctcatttgtcgcataaagacgactgttgacagaagactcctctgacgtaacatcacctgattccgaatagtattcttctaacccctgcatgatacactactacaaccctgtttaattgttcgacctcat

SEQ ID NO: 68698 - DNA, 350 bp, Glycine max
aaattctaattaaaaaacatattgttattttctaaaaacaatgctaggatcttttaattaatttctcttatttatattcactcctactttattcaatcatatttctcaacaaaattcccaacctacgcttcttcaatccaattctaatattatccatatacccttacttaattctctagctcttgatcgcaacctacttaaatcctctattaatcttaattcactaactctcaaaaaacacttaaacttatcacaacactaaattaaacattttaacaatttaaactatcaaactaacattaaatctcaattatagattccaatattgaaatttttaatatatcctaaaa

SEQ ID NO: 68699 - DNA, 437 bp, Glycine max
  unsure (1)..(437): unsure at all n locations
cacacatacacccacacttccgcctatacttatacccatacctaaaaaacctaaagctaaggttaattcatcatgcccacattcctctcttcttactccttaaccttctaaactaaccttatatcctttaccaacaaatatctttcaaatcatctttcacaatcaatatctttcaaccttnacacctaattttcctcaaatcaaccaatcttatactacatataactcttctatattaccaccttccacttattatcaaaacattcatctttctacctcaataacctatatttcaaacatcataatctcaattnaaacacattaaccaacatatccatatctactttcantctttcaaccccactcacatcattcattccatccatcatttcttaatcaaaatnctcctntanctaacctcantataaaacattttc

SEQ ID NO: 68700 - DNA, 392 bp, Glycine max
aaagttttattcctcctaaactctatcgcctatatccacaattcttaaattctttgctaagctttattataaaaatgaacattctctctccacaacatattcctcaaaatcttcacactcatccttcatcctaagctcaactctatatacgtcccaatcttctcaaacattttctccctctaactcccaacttaatcctcattctcacattacacattcctctctacaattacaattttaacaccaactattcacctctctttacatatacttccccaatcattcccaatcttcctatttatcatatcactacaacttaaacaactctcaattcaaacctattccctatttattatcatctactaaatcacttcattacttaacctctatta

SEQ ID NO: 68701 - DNA, 301 bp, Glycine max
gggtaaggctacggtcgggtggtgatcatgaaacttcaagaatacttaagctcacagactcgttgtggacaaacatatcattgactacagttgaggacttgtcctttgctaatttaaaggatgttaaggatgtgtatcaattgaatgatggttttccactattaaaacatctgcatatccaagaaagtgatgaattgttgcacatcattaactcaacagagatgtcgactccctattctgcatttcctaatttggagactctggttcttttcaatctatctaatatgaaagaaatatgcta

SEQ ID NO: 68702 - DNA, 440 bp, Glycine max
  unsure (1)..(440): unsure at all n locations
gacgtgtgaatttcattaggcgtggagaatttcgcagaaagcgttacatnacagatatttagaaattcttatatatcgaattggagtgngngtccagattgatggcgagtaggcttgtttaaatgcacttggaggctcgtaagtggttaggtatagtatttgttgattaatcttaaggaattgggaatggacaaatgcatttcgnnngttggcgggtccccggttttcctttttgannaatatagttngcttcaaagtcgtnngttaagaacctttttgctgcnnaagttgtgaatacaaattattnngggttattaaatgtttgacttggtaaaacgtgcttactgcannngcttggaaattgtgttattgaaggaagaaatcccttgaaaagaattgattgggcttttagcanngaatcaaaatttaacgtttttgtt

SEQ ID NO: 68703 - DNA, 403 bp, Glycine max
aatccaaaatctcttcaaacagcttagctttcaatttaagttccacaatatatagttaggtcttttctataggttatggacaacttcatatcaattgctttgacctcgataagtgcaatgtgtgccacatatatgacgaatattaaaacaatctgattctgcatttttacaaatgcataattattatacatgctagatgctatggcaaacttgaacctattaatatggttctatgattatataacttatctcgttcatactctcctccttcacctttctgcttatttccactcatatgttgtacaatcaaacctactacatatagcctcttgactcattttccttattccatgtttataccataaacttgcttatctcatctaaatataattcatcctattta

SEQ ID NO: 68704 - DNA, 471 bp, Glycine max
  unsure (1)..(471): unsure at all n locations
acgaagttagagtatacaagtgatgtacaacggttacctcctgatcttgcttttgtncttgaattgcgtccatacctacattcataagatggtatcaaagcatatccaaaattaatccaaagggtcacctaccatagttatccactcacctcaccccttgcttctttgggatgggaattggatctttgaaactaaagatcacatttcaatattaaaattgagatagacaatgggaagagatggtaaaacaattctagatcaaatcttgcaactggtacaatagatgcagtgaacagctcaacctggaaagaaaagaaagcaaaaacaggccctgagatggggatagagggaaaaaattgaaaacgaagcataattcatattgtaaaaagacaatatcactaatggaatgaatgtttagaggtttattccgttatcaagcatactgcatccaaatgaatggtcagtcacaaa

SEQ ID NO: 68705 - DNA, 275 bp, Glycine max
  unsure (1)..(275): unsure at all n locations
attatcagtcctttttcattcggggtttttacctaaccctacaattcggcgatcgttccantttaaatttttcgctttcatcgaatagctgtttatatataaaccctattccccctattcaccatgggaattgaatatataaataagaaaaaagccaaaaaaaaagaagtttaaaaagttttattttaaataagtaattctgttatttttcctgtttcttgactcaggaacttatctttttccacggaaaatcatttacaatattaactctaaat

SEQ ID NO: 68706 - DNA, 134 bp, Glycine max
ccccaaaccctaatatcactctccttctatactccattttactaaatcatactaccttcaactcaaattccatttatacaccaccatctccgactactaccacctatacaaccacctaaaatcccttcatctcc

SEQ ID NO: 68707 - DNA, 217 bp, Glycine max
cacgcatccacataaactctcccttaagcttttacaatctaagaaagaactaacggacaagacactttttaaaagggcacatcccacaccaatcctcatactaactccatacctaaccccccacaaaaccacattaaccccatactaaaactaccacaactcctatcacttcaaaacctttcacataaccaacaataacaccatacataaccacaaa

SEQ ID NO: 68708 - DNA, 187 bp, Glycine max
accttatcatctcaaaatctcttcttcaataattcctttctcttttccttcttgatattttaaacacgctaaaacctaatagatccttcttaaatgttacccacaatcattcacctcttcctttccctaaacaccttcccatatgttcatttccacccaccattacgaactattgactactacctca

SEQ ID NO: 68709 - DNA, 224 bp, Glycine max
gaaaagttttgggcttgagattgagttagattactcttcagcgaggatggaatatcagctcggagtcttttgaggtagaggatttcactgctagacaagtttattagaaacttttgtaggctgtgcaaccttagctttagtatccatgctgtccttccataacaagtctggttgaatctcattttttcctgtaaaaatgacttttcggtggatatcatcatctg

SEQ ID NO: 68710 - DNA, 123 bp, Glycine max
tacatctatctcttcttcttcaatacaaacaatttcaaaattttcttctaatgcttttcctaacaaaatccttaaatatattttctataactcacattctaacctatatctttcaacctcata

SEQ ID NO: 68711 - DNA, 370 bp, Glycine max
aatctgaatctggatctgaatccgatgcatctccttcttctctgcaagatcttctcaatcctgcggactgtgacttggtgttatgaatcaaccatcagacaaatcaaaccatgaggaggcgagcgttaacagaataagaacaggattgctgagttggcttgcaggattgggcccttggatgatcctgttgggaatatgctttttctgttaggataattgtttgcaattctggtattgctagctttctctaaaacctgcaaaaaaaggaacgaataattagcaaatgaagcttataaattgtcaacccatgtcatgaatttgcaagcaaaaatacaaagttcttttccttatcttatccctttctttgaag

SEQ ID NO: 68712 - DNA, 328 bp, Glycine max
  unsure (1)..(328): unsure at all n locations
aatcaacttcgttacaatgtgtccaaaggcatctccatcgatatcaaaccttgacaaaaggggttcggatggctttgatcagatananaaccactatgatcgattcaaaagaaatcaagtccccctacttgaatggctattattgtgaatagcaacaatgaaaagccatttggtgggggctaataatattaccaacaatgaaaagccaaagccaccacgtcgtaattggggtggtagatcatcggtttcaattaagttgtgtcaactaggtgtaagtatacaactacttaggtttgntctgattttttcccttttagtgctacatact

SEQ ID NO: 68713 - DNA, 319 bp, Glycine max
  unsure (1)..(319): unsure at all n locations
ccggccggaancccggtcgacacgcgtccgtgaattgtcaatgttcagcagcagcagcatcaacaacaacattcttctacctaggccagaagaaattactgtgtaaattttatgtatggtagttgaaattataagagcatatgtagactaggcgaaatagatgaaaaagattgttcattttctgtgctcattctaactaatttcaaacatatatagtatgcttgcttgtagacagttttttctttcttgtgttaactgttaaataaatatatagcatgttttactaaatatatatatctctacatacttcgagttctaa

SEQ ID NO: 68714 - DNA, 382 bp, Glycine max
ctctgtcctggcttgcttgtggttgaaatcttaattgagttttctgaaattatgtgcgattaggaattttgatgttaaatttgcacacttataaagaattaaagatgatttctgtgatggttggtttgtgacatgcttctgtgccggaagatgttgatttgggtgcccctccttagagtagttccggtcattggcatacttcatgacaagaaagcattcaaacctgttctaaatccagctgaagtggaagcagtatttgatgcacctttggaaatgtttctcaaggataaaaatcggacgcacgatgagagggagtggatgggagagaagtactttgtgcatttctttgactatggcatcgggcataaaaaatatatcatat

SEQ ID NO: 68715 - DNA, 443 bp, Glycine max
gtgtatatggttgccgctgatactgcgtagtcttattctctctccatcaccactgtaaaccgtaattaaaaaaatcttaaaatatcttccttctttctttcttcttctttgctcacactgatacagttactccatcgaattctctctcccctctcttcaaaacgcgctgattctgggaactccccgatttttggtttcgagtttttcgcttcttgcggagaaaaatcgcgtctttctcatcgaactcgtcttccacactgaaattctacttcgcttttgctcttttactacagtttatacagatatacatcaaaactaagtttcatcagctttcaccctcatggctggattgttgcttggtgatgcctctcatcatggaacttctcaaggtgtttctcagagatactctgaagagaagctggaagatggttcgaggtggtact

SEQ ID NO: 68716 - DNA, 284 bp, Glycine max
  unsure (1)..(284): unsure at all n locations
gtttttgtacggagggaaagagtataataaagacttttttaattaattacatgattgtgtgtacacatttcanggataactgcaaatgttctttatgcttttcaaaggatgaatattgtgattatttatttggttatgtgattnttattcccaacattgattntgttttaaatattttagaangcttaatgtcactttcgatccattatgtttcgcagttgtttctcactggtacattaagttaaaaagtgtcattctggtccttcaaatttttacaatgctgc

SEQ ID NO: 68717 - DNA, 409 bp, Glycine max
  unsure (1)..(409): unsure at all n locations
ccacgcgtncgnatgcatctatggccgacaaagaatctccgagattccttcaagcattcatacctcanagggctcgaatggaactaccagagaatgaaagcggaaaaggaccaacaatcttcaacggaacagaaacttctggagaacgaaaaccaggatcagagcaacaacggtgacgcacccaacctccttaattgcgaagctggctcggtctcttccctgttccaggaactgggtgtggttctctcttgctgctactgctgcttttgctgtggtgcttgtgttgatgagaaataaggagctacatggcagtgcttctattctatcctcgatgctcttggtgaaaaattgtgcatagtacagtgatcaaagtttgtacatctgggtattgattttcttatcattattt

SEQ ID NO: 68718 - DNA, 181 bp, Glycine max
  unsure (1)..(181): unsure at all n locations
ctgcggcaatagagagtagagagtaaacataaaatctgatgcgcgagtggctggtgaaggcagctactgcganggaaaggaaacatttttaacctccaaatccattgccggttccttaagcccatccaaaaaacttggccaggttctttttccgccttgccaatttcgtcggtcttaggtt

SEQ ID NO: 68719 - DNA, 434 bp, Glycine max
ggaaggccggtcgaccacgcgtccgtataaataaaccttgtccaaacacgttgattctctccttaaacctcacaattcgtcctggcggtagcaaactcctttctttatttcctcaagatataaagataacctaaaatagcattatatttgctgaatgcaaaattaaaaattccttggaattgcaaccaatatgattgtaattacatctgacttgcattacatcaaattggatcaaacagtattagcatacattgacaatggagaaactcttaatctctagcatgtaaagcatttatggttgacttatgttcctcgatagcattttgtgaatgtcatcattgatgattatgcaagtgggcgttgggagttttaatatattttatgttacgtggtgagatgccatttggatcatggagagaaaatgaacttgatac

SEQ ID NO: 68720 - DNA, 221 bp, Glycine max
acgcggacgcgtgggcggacgcgtgttcggacgcgtgggttgtggcctactttattgcgaatgtgtactgaactgaggtatgtcgtgatgtaagctgcaataagttaattgtctgtagctttattgtatccccttcatggggttctgataattacatccttttagtagtgttgtggatttggcatagacttgttcaagtaaataatggcatggcttgcgaa

SEQ ID NO: 68721 - DNA, 268 bp, Glycine max
ccgggtcgaccgcgcgtacgcttgatcatattacaggaggcatgtcgaagatccttttggtctgtaaatggaccgtagatagttcatatcggttacgaagacgaggaaaatccaaaagtgatggaagcatatgaacaactgggatccttgttggttcacagtagcagtgccaaagaaccaattaatgattccaacaaagaattattttggattaacaatcaatgacccttccattttttttcattaaaacctttgtattcttaataag

SEQ ID NO: 68722 - DNA, 459 bp, Glycine max
  unsure (1)..(459): unsure at all n locations
atcaggttgttaaaatgatggagactgatgaatcggttccttcaatacctgaaaggccaatcgctcttgttgctggaaggcttgatattganagatctgtgagtagtagtggctctggtcagctctctagtccaacgggttatcgatcatatactatagaaagtgatcgccaatcttctaattctagggatgaaagaagctcaagctctaggattttgagtacagattgagattgagtgtcaggaaagtaatttgtttgtacatttagtttatagaatgctgtttttttcttgtagtgttttccgttactaaatccaaattggatgtacaaattttgattcttgctagagtttatatgatggcaagcaagagagtatgatcaagttttgctgaattaagtgtcacagtactgttgtatcagaagcaattcttcaattcattttaagaatcttcttttgc

SEQ ID NO: 68723 - DNA, 340 bp, Glycine max
agcgaccgaagtatcacatcaaccttatcctgattagggttccggttacttaccctacctgtgacgttgcgaaaccttaaatttggcattaggtctgagcaatctggttggcagaacctttggtcttacagagtcaagtattatgtctggattaaacgatcaaattcatactgccttcgatactttcgctgatgcatatgctgatgactctgctgctgactcaaaggattatgtacatattcacgttcatcagcgaaatgagtagaaaagcctgacgaccggtcagggattgaaacaagaattgagctatgacaagatacttaacgacgttctgaaagac

SEQ ID NO: 68724 - DNA, 454 bp, Glycine max
  unsure (1)..(454): unsure at all n locations
ggccgaccgggcgtacggtgggcatgnanaaacctgnattggacttctggcagcactacatcttcagcatattaatgcgcttagttcttcacagaagttaactgcgtgaagaagggccacaactgcgtgaagggtttatcttcaatggcatcaatccattgtcggcattctagtatatgtgaatatgagagctacaatttcgtagaaattgtgtcggtgtctaaatcgttgattgttttgcaaaattttgagaatgctagtttgttctgtagtacaaccgtccaagtatgaatgaatcaatacgtattgtatggtcctaaatccctataggtattgtctttttttgttcaatggccccaatatagtctcttttctagttagtttttcctggtctcagaatcatgttattagaaccatgtgattttgtaatagaataaaaagttaccaaaaattt

SEQ ID NO: 68725 - DNA, 350 bp, Glycine max
acgcgtcgcccgtcattgttcgaatggggaacaacaacaacaatccttcttcttcttctacttcttcttgacaaccagtttgagttcaactcacccttgtgcttttcttcttctctctctgtttagtgttttagtctttacctttcgcacacaaaaacacatatacacacttgtctctctctagaaatcacgcaattatcatataccccgatttttctttcactttctttccatttatcacccaccaaactaccaacttaatgtttctttttgctaagagagaagcacaaacaaactgtgctcttgagagttgagacataagaaaagaccatttgggaaattcaacaatc

SEQ ID NO: 68726 - DNA, 207 bp, Glycine max
  unsure (1)..(207): unsure at all n locations
cggtagaaatttacagaatttctcttccttcttcttctttttcttctacatcttccanaaatgccgatttgtctattctaaagaaacaacacacatatctaaaatttctttttctttctactanttcttaatgcctttcataatccttaatgatcattatcataatatcatactcctactattttactctcataaaaccaacatctt

SEQ ID NO: 68727 - DNA, 215 bp, Glycine max
aaccaaaaccatctgctggtgctggaaaatgatctgccaattctgttatttttatgtagaatttagttttgtcagtcactgttttgggtatgtgttgtttttccctgtagtgtagctagttcttctaagaggatcttgtcatgtggttgatattaaagcaccaagtataggctttcttttcagtcttagagaatatctttgaaaattttggatgt

SEQ ID NO: 68728 - DNA, 438 bp, Glycine max
  unsure (1)..(438): unsure at all n locations
caactgtagtagattntttttcctaattattaattttttattataagatagaagtcgagatgttattatagaaaattgagttgagtattattccgatccactacctgngttatatttgttttgcattttgaattttcatttacatttttttacataaacatatatacgcgcgggtaatgggtgaagctggaattgaaatccttgtgtagttgttgcagtggaagacaaagaagatcaaataaatgggtctagctttaaccgtcggattcctcggccttctcattctatttcacgccgcttattcaactattcagtgtatcctaaaactgattatcaaactagttttgctttttgagtgttggggatcttggatctcaaatttgggtctgattttttgtgcagacaggggcgtgttgaagatactgaagagagttttca

SEQ ID NO: 68729 - DNA, 265 bp, Glycine max
gtgttctacattacacaatatcccttcgatcaccgtatttacagatctattactgccactgggggtctgtggctttggtgaatttgataatcatctatatatccaacaggccatcgtgactctgaccggaatgctgctgacagatgaacatgcgtatgatggaccctcgcttctcctgcttgagagagtacagccgagtgacatagctaagttctacagaggtttatgcaagaaactgactgaatcaaccactgatgatgaatct

SEQ ID NO: 68730 - DNA, 411 bp, Glycine max
atacgcttgcgtcttcaggaaattagaggcgttccaccaaacttaaaacaattcatggcaagagaagatatattctaagcttggtcgagttcaaacatgttgtcaaatcatgaattgcatgatgcttgacaaactgaattcatgtttccaggatcaactattccacactggttcaatcaccaaagtagcggaccttcaagttctctctggtttcataataaattccctgacaaagatctttgtatacttctaacacgtctagaatccatagatctagatgatattcccatgcccaacgtgttcatcaatggcatactttgtaagatttcttctaggaactatcacataagaaagctttacatgatcttgcataaaatgaatgagaccactgtgaaattacatacagaggta

SEQ ID NO: 68731 - DNA, 483 bp, Glycine max
gattggactatttgcttttcctttccaatacttatcaaatggagcacacaatgactacaatgaattatttaaagaaacagatttcaagatgaagacatcctgaatgtaaaacattttgcattcttagtggataagaattaatccttctataaatggcgttcacatttttttttcttttgtgcaatttcgctccccaatctgttatattcctccaaatccaaaagaatggcacaaacggtttcttctaataaccaaacaaattgcattgctttttacaccatagccatcctttcttgtttggttttgatgatctcttcctctctctcattcaagaaattgcaacaataatttgagaccctctttcaatgtaccttgctgcctcttctgcatcatattaagatccttaaaatacgtatgctgaaaataaaccttgacaaaaattttgatacattttgcatcttctctgatacaaattttaatttt

SEQ ID NO: 68732 - DNA, 366 bp, Glycine max
  unsure (1)..(366): unsure at all n locations
aactcccggctcggccgactcctcctaaatagttcactacgattatggcagctcgcattctatgcaggctactaagacactctctcaagaataacaatactatcaaagctgctccaaaacttaactcactattacgacaccctccagcaccaataaacactaacataatacctacactgcgcatatttacagaactaatcactgcacattttctaatacatctcacacacaacctcacatataagcaataatactaagctgcaataggtaacacatttacaacatattaaccctgctcataataatggattactaatgaaacttaaaaataaaacgatacattcacacatgcatnttaatacattc

SEQ ID NO: 68733 - DNA, 386 bp, Glycine max
cacaaacttctatcccatctccgtttcagctctttcctgaagaacatgggcgaatcttttggggttgatattgctgaatcactgctggggaaacttgcttcttatgcttatgaagaggcttctcgagcctacggtgtgtatgaggatctgaaggggatcaaagacacattgtcaattgtgaaaggggtgctgttggatgctgaggagaagaaggagcacaagcatgggttgcgcgaatggctcaggcagattcaaaatgtttgcttcgatgctgaagatgtgttggatgaatttgagtgccaaggctcgcaaaagcaagttgttaaagcttcaagcagcgtcagggttaaggtaggccacttcttttcttcatctaattcgcttgg

SEQ ID NO: 68734 - DNA, 244 bp, Glycine max
acgcccacgcttccatgctatttactagacacgtttttcataaccaacatttcgagattgttctgacgaacatacatgtgcatcactgttactgaacttaccctgatatacttatatagagtgcacatggacactccaaactaattatgagataattcattatccagcaacatttgcatccataataacattcccatcatactgctaagaatcatcagaacactcctattcctacgcctacttt

SEQ ID NO: 68735 - DNA, 145 bp, Glycine max
acacgagtctccccaccatcaacaatctccatactcaccctccctaacaatctcaccattctccattcaaatctccaatcaatcactattcatactccatacatacattcaaccaccatccaccaaaaaaaaactcgacacaaac

SEQ ID NO: 68736 - DNA, 419 bp, Glycine max
cttaagctgataaaacccccttgttgagagctcttcagcatccagaggccttagctacaactgacgctaggagaggaattccattgctgatgctgttattagttcattgtcacaaagtggaagagagcaccatgaggaaacacactactctgatccatgaactagtccaaggaaaggaactaacaatgcaccttactaaccatctgcatacatcttatgcaatgtcccatcagaccaatgaattgtgtgttgataaaatacttttgtctcatgagaaagcactgaccatgctgaactggtgctctattatgggagaggccaataccaccagtggcaacatcatggattaccattggacttttacaaatggtggaagccccagacgtgaggtcgttgaccgtgaatttgaacacaaagct

SEQ ID NO: 68737 - DNA, 248 bp, Glycine max
attgacatttacgaagtcaacaaaaaaacaattttaaataaaaaaaaaaaaagaaattcaataaagaccatttttaacaattcgaaccgcgattaaaaaaaacaaaaatcgccacttctttaaaaaactccaattttagtcctccttacttcaacagcataacccttttttcattctaccaaaatttaattaactagcccttattttaaaacttcataactggtaaaaacctggtttttaccaaatta

SEQ ID NO: 68738 - DNA, 412 bp, Glycine max
  unsure (1)..(412): unsure at all n locations
cactcttccttaaacttttancacctgctaaatcatcttatctactattgcctttatagcctcatttaaaaaatggtgtccctctcacatactaactcctactcctttatcttttccattacattatcttattcttactctttcaactccaactcaactaaatttaactatattcatacatcatcctctaataaacttcctaattaattcattcaacactcataatttaatcctttgaattaatatcatcctatatattctccacctaccttattcttcttaaatctttcaatcatattaatcttttaatattctacatctttttaaatacttttatttttaattcctaaatgtcatctatttttcttaacacatcaatataccttctctttatcatcaattcatacaacac

SEQ ID NO: 68739 - DNA, 299 bp, Glycine max
acacccacgcgtccaaatctctttaccattccaattctcaaaatctctctaaagttaacattctaagactccttctctacacgggctaaatactccaatgattccacaatccccacattacatccatgctccctattcactgtactagtcacctaaacaatatatctcacccgcacctaaataaacatataccctaccatcatcatcactcttatgacaccaatcctagcaccagcatcaaaaacctcactactcttacatctatataaccacacttgacttaacatcttttcactcac

SEQ ID NO: 68740 - DNA, 362 bp, Glycine max
gggttatcggagaggcgtgaggagtacattgatgaggatgagttgttgaacatgccgaatttggtcgatgaaatggccagaggaatgcaggttagtccccttaggatcacttcctattcttcagatgattcgcctgggaattctgatggagataacctttggagttataccctttgatcactgatttgttgtttgttcagtgagtgagtatggtaatttgttttgtgtttgtttgaaagttcgagtcttgattatgtatgttcaaccttgttaaatatttgaaaggagggctttataacgggattgtgggaatacttgtggtctcgtacaaaagaaaaatgctttgaagtgtgttggggttg

SEQ ID NO: 68741 - DNA, 383 bp, Glycine max
ccactcgtcctcggtcgccgctttctatctcactcatatcctatatacacattactctttatccatatcatcaaagggatttccataaggtccatattttaccatcaatctacctgtctgattcacatcctgactccactctctcaacttacgctaaactctcacaaacactatcctcaatccaatctctcaaacttcctaagcttgctattcacctacttgcactctcaaatccctttatacctaatacatccccaaattgccaattcacatatacttgctacatcaaattcacacccttatctaacactgcttactgatacatactgaattccattctataatcgtacaatcaacgaatacacatcgacatattacatcta

SEQ ID NO: 68742 - DNA, 251 bp, Glycine max
cccacgcgtccgctctttctctctctctgtgatcttatctccttttaattgttcactcacccggttacactggttgatgcaaaaaaccatggtaccctctatggttggtggttgctgacactcttaatagtcgcaaagtaggtgactagcagtaccttgtaattgaaggaccctgcagttttttttaatggaccggacctaggttggtaaggaatgggattatgggaagcttacccaagtgaccgatttgg

SEQ ID NO: 68743 - DNA, 276 bp, Glycine max
gctcgaccgcactcgtccgctcacgcgtcctatcttcctttacaactacatccttaaataataataaggacctactataaggcttctttccatcattgtggtggtacatctatcctattactgctacttaatacaaaaacacatcatatctcaaaaccacatgacaatctcttacattcaaaaaatgcctgttacaatcaaactacaacagcatatataaagactactatgaactatcatacaaacactgtatgatatactgaaacgtttaatact

SEQ ID NO: 68744 - DNA, 137 bp, Glycine max
  unsure (1)..(137): unsure at all n locations
ttttgttgttattcattctctatgaatggacaatgggtggaaatggatccttatttgtgcggtanagatggatgtgaatgatgtattgtatgactctcaaaaaaaaaaaaaaaaaaaaaaataattttgaatgataa

SEQ ID NO: 68745 - DNA, 281 bp, Glycine max
acttactggactgttgcaagccatctgcgtctaagatcttgctgggttacaaatttaggtgggcaacgtcatcggggagtgaagtgatattcacagatgcattgaggagacagctctgaatattcctctaacatgatcctaatagctatatatattgtctcacttggagcactgagaagcccacagctcttaatgctaagatggactgtgaacagaacactgagcttactatacacaactttgatgtcctgttgaatctacccttgtttgtacatgtaatt

SEQ ID NO: 68746 - DNA, 361 bp, Glycine max
ggcccttcatcggtgctccgtcgtctcggggaacttctggagcgtcgcggccccttcactacggcctccggctgcccgcaagtccaacgtcttctttggcgcccgttatgggttgggattgagattaggttatggatgggttcttggggaatttatttataggtcattggctttaaatactattcatgtgcttttgccacatttttagtttttcatatctattaacccttttgtagataaaggaaaactttttttttttttgtcaggttaaattgtagtgattgaattgaagttaagcttaattattctttattgtatggttaaagtctttagagagaaaagactcaaaaggaagggagcg

SEQ ID NO: 68747 - DNA, 99 bp, Glycine max
ttttgttgttattcattctctatgaatggacaatgggtggaaatggatccttatttgtgcaatagagatggatgtaaatgatgtattgtatgactctca

SEQ ID NO: 68748 - DNA, 201 bp, Glycine max
atggtaactaatggcagatccaagtgtggattggtaccataccattgctatcaaacaatgcttgagctaaatagttcattcaacttagaacagaatgatggaatcaacgattcccttaaataaaaaaaaaaaatttatgcgattcaaactctgataaatttgctgatgatactcaatctggaactccaaaaacaccttatt

SEQ ID NO: 68749 - DNA, 269 bp, Glycine max
tttagcggggaaaaaaaagggacacaaaaaaaaaaaaaaaaaaaaaaaaaaataaaaaaaaaaaacggggcgggcgacttaaaaagaaaaactgtaagtaccctggcatggaagaaagaaaagatgaagtcgtgaacgcaaatgcaagagaatgagcggaagaatacaaaagaggaactggaaaaacagctgagagacagaactgaaagggaggaaaacataaagcgcgaactacagatggcgtaatagagaaaaggcccggaccaaga

SEQ ID NO: 68750 - DNA, 263 bp, Glycine max
agtacttcttagaagtattcttcaaacatcgttgtattagaaagtacatggtgtctctcctgaaaatgtcttgctctcagtcatatctgatgactccgaaacacatagctttgcaaaatcatatgtgagggtcttcacatatttacagattttagctacatcgtttcaaccaccacggacacctaattaattgcaatgatactaattaaaaatgaactcgaacagctcttataagagacttttcgacgataatgatgatgttt

SEQ ID NO: 68751 - DNA, 296 bp, Glycine max
ttcatagggggcctttcttcacaaactgtctatcgtctttggcaaaaatctgcaaccattctaccatctaacaactttttcacttattctaacaaacttgtcactaatttgtataaaggttctattttctgatctaatccgcaccatgctgtcacatttgggatcataattgaatattatcattaactatatctcgttttgatattttggcttaaaaaaaagctatatattattttattgtataatggcgataattattcccgtgcatttctggctgattttgaatgttttatttt

SEQ ID NO: 68752 - DNA, 468 bp, Glycine max
  unsure (1)..(468): unsure at all n locations
ccacgcgtncgcacttcaccaccaccttatcctatctccctgttcttcattctatgtgcatgtaaactctctgcgtgcctatggaccttttctttttagcacggaacatgtgagtgccacaaaacgttagagactatacgacgctatctctcactctaataagtcctaacctcattcacctcttgggtggtgtggtctataatgtaatttatcatttgtgcaaattttttctcagatctatccaacttctcttttttgtccttttattctgtttggaaatcgtcatcatcaccatttgatttgcagggccataatttttctgctttggttttcaactcttccacaccattttccattttttcttcttcttcttctctggtttttttttttcctgtgaaaaaaaaattgaagtctttttggctaaacctccaaacagatccaactatggaaatgtaaaattttcaattt

SEQ ID NO: 68753 - DNA, 324 bp, Glycine max
cccacgcgtgcgaccacgcgtacggatggggattggacttgcgtattatgggagtcaccttgagctcgtcataacggttgttatttttcactttttcgccagagcccaatcggccactctcatggccaccgatcaaatcaccgcgtcggcgccctcggagagaggcgccggatggcaaactccgaaaaccgccgacaagaaacacctttcatagcccttactcacgtccgccagaggccacccatcagcgttggatttcgaagcttgaagatcctgcctatcgcctcaatgtcggcggagccactcgtattttcccctctttct

SEQ ID NO: 68754 - DNA, 234 bp, Glycine max
  unsure (1)..(234): unsure at all n locations
ggaacataaggcgggcaagagagannggancttctctcttaaatggacgggggcgaacaggggctcccttcggccaccaccgtcgccgccgccggctataccaacgtatctcctcctccgctcgatgatactgtcggggcttcacactgacctgatgtttcctaacaacacgctgatcggaaacgtggaaggtaacccctgagtccataggaaaaaccccatcacgagcacaat

SEQ ID NO: 68755 - DNA, 60 bp, Glycine max
tttaaataagaaaataccaattagacggatcaataaaagctttgatttttaaaggggggg

SEQ ID NO: 68756 - DNA, 325 bp, Glycine max
ctcatacttcctattactcgttcttctgatgaacccacaaataaaaacggggcttttacaggcgaagttttctccataaaccctagaataaacgaaccgaccgaccaagcttgaacctcacgtggaaaaaaaacactgatttttccatctccgagggtgtcgagttagagcatacccatgttggtctctcacggaaatagatgattttacataacataggggtaacgcttcgctcgtggggacacatcgtaggagggaaaagtgactagcacaggggatgaatcgtgggatgcaagttgagtatgcatgaaaatgggacgacgat

SEQ ID NO: 68757 - DNA, 187 bp, Glycine max
gcgaaatcgaataagaaatttggctcaaagcctgaaagacaaagcctcggggttcgatgaggggctattcacgaatcgacacgtgtcctccgttcgcgtgcacgtgctacgcgccatcacgcacgccctcgacgagccgccctaagaggaaacaattttcgacgtcctagaggtgaggtcccaccag

SEQ ID NO: 68758 - DNA, 334 bp, Glycine max
gacataaccaaaccaaccaataagacatgatgatcataatcgtagctcccatcgccgtctgatggcacgccaccgacggcattcgcatcgcaggcgtaccttaccagaactatctctgtcactactctttattattctacttacatttactttcgctgactcggcttatgtttgattctgactcacagaatgtgatgttgagagaaggttccgagattgatgcgaaacaaaaaacggctgagttttgcagtgttcaaatggactaacactagtggacgatgtgcattcgatcattgactagtctgcactttttggcagataataaccgttcaat

SEQ ID NO: 68759 - DNA, 182 bp, Glycine max
ccggaatcccgggcgacccaccgtccgggaaaccctcctacaaagctcctttcgcgttgccccccacacgcacaattggtcggtgtccactctcgggcgccgcgcatgaccgccggcgtcatgcaccacgacgtctccgcctgcatggttctgccgcgcatgcgtataacctctggacacaa

SEQ ID NO: 68760 - DNA, 179 bp, Glycine max
  unsure (1)..(179): unsure at all n locations
atccaatcctcncctccataattttccaacaaaatctcaaacataataaataaaaattacatttttattcacaaaaatatctggattcatcttgttctcattttgcccccttttttcttctgctctcccgaatcataaaccctaatcattgtttgggatttcacaggaaagaaatttaa

SEQ ID NO: 68761 - DNA, 326 bp, Glycine max
cccacgcgtccgcccacgtttccggtttgggattggacttgcgtcttatggtattcgccttcacctcgtggtttcggtttttttttttcacttttccgccgttgcccagtcggccactctcatggccaccgatcaaatcaccgcgtcggcgccctcggagagaggcgccggaggcaaactccgaaaaccgccgccgagaaagccgcttcctagcccttactcgcgtccgccggaggccacccgccgccgttggatttcgaagctcgtggatcctgcctatcgcctcatcgccggcggagccactcgtattctcccctctttcttct

SEQ ID NO: 68762 - DNA, 153 bp, Glycine max
ctctaacgtccgttctctccactgtgtaacctcttattctataaggtcaacctttggggcaatgcctaatggctgcgggccacgccgaatataattggacaattgaggaaacaatgaagaagaagatgatgcagatctcacactataagatta

SEQ ID NO: 68763 - DNA, 394 bp, Glycine max
aaaataaccaaaccaatcaataatacatcatgatcataatcgaagctcccatcgccgtcagattccacgccaccgccgccattcgctccgccgccgcaccttcacctcgtactctctctctcacttctctttttttttcttcttccatttactttcgctgactcggcttagctttgattctgacttacggaatgtgatgttgtgagaagtttcggagattgtttcgaaacaaaaaacggcggcgttttgcagtgttcgaatggactaacagtagttgttgttgtgcattcgttcattgactagtctgcactttttggcagataataaccgttcaatgtggagcgccgatgacgtgaacggtgtgcgttatgccgcttcgtgcaggctcgcatgc

SEQ ID NO: 68764 - DNA, 286 bp, Glycine max
ccggtcgacccacgctccgccaacctcaaaacttcacatggaaggtgatacgtatttaacaacctaaataatagggaaaatcgggggaatctaaggcttagagggccccctccctcgaagacattctttctcttccctatacaaatttgatgtcatcctgaggctttccaggaaaatcacttcttgccatttattaacaattcatggccaacaattcttttgcgccttctaaaaacgtcgtgaagcacctccttgcatctcaataatatacaacagggctccactg

SEQ ID NO: 68765 - DNA, 238 bp, Glycine max
gctactcaacaggttgtgaatccggtgagaatgacacaaatcatgatacacatgatcatggacgtggctatggagcatgcttgagggcctgatgcatatacatattcatagaaagtcgatatgaaagagctgatatagaaactaccgtatatgtaactagctcatgtgagacaaactgcgatgcaaacatgatgacatgtgtgaagccacatacgaactcacttaccaaatttcttga

SEQ ID NO: 68766 - DNA, 205 bp, Glycine max
  unsure (1)..(205): unsure at all n locations
gcgtacggcaaacatcaaccnacgcgtccggaatctcatgctgatacattcattaacacatatcttgctgcggactctgataatacctgtgaagcatcccataacacattcttgtacataaattcaggatattatgagctcatgtaccggttaacttattatatctattcgacactctctaaatagatactgaatacttccatgt

SEQ ID NO: 68767 - DNA, 254 bp, Glycine max
atacactgtacaaattatccttattaatggtattgaggtagaaaagattccacgagattttgggaaggataaactagtcattgaagatcattgtaaattcaatcaagaataagctaaaggtatcgaataagcaacaaaaacactcaccacaatcacttctgcatagatcctaacatatgaataagtctcccatatattgcccactcccgcacttgtccaacgtgtcataaatcccatcatgctacaccaaacac

SEQ ID NO: 68768 - DNA, 364 bp, Glycine max
taaagaaagaaagttccgagttcataaaaaattaaaaaaaataaaaagaaaaaaaaataaaaagagaaaaaaagaaaaaataataaaaaaagtaaaaaaaataaaaaaaaaaaaggacataaaaaagcgccaagtggtcgtcataaggagaaagttcggtgaacttgctgagggctaggcctgaggtgtcttattgagggctacgctagaattatctaatgaccaggaccttggatatgaaaattatttaagagccaatgatggtccttgttgaggactttttgtctgcagggacaaattccacagcggaggccttctctaatatggctgaatcttattaattatgtgcacttcgatttgaatg

SEQ ID NO: 68769 - DNA, 135 bp, Glycine max
cccacgcgtccggaaaaaagtggctataaatccattggaacaaaagcaaacttggttattgctgctgctgctggggcttgcacagccattgcgactcagcctctggatacagcctcttcaaagatgcagacaagt

SEQ ID NO: 68770 - DNA, 254 bp, Glycine max
gccacgcgtgcggatcactattcacttattcgcataatcggccaaaatgtagactcgcctaggggctcatgggccactaactgaagattccgatcagtgggctcctaagactggtcagagtcaggctctttgtacaacacaacatggtgggcctaaggctacagatggcgcacataataacactgtatgaggaaactggcactatgccctgaacagacctggttctactcctgacaaagaacatctaatgaaaa

SEQ ID NO: 68771 - DNA, 122 bp, Glycine max
  unsure (1)..(122): unsure at all n locations
ccagagcaaccnccgngccggagagcagcgccggcaacacncggcncaanacncnggaaccgggagcccngnnagggcgcngganccncnncaacaacnacnncaacancnacaacaaacag

SEQ ID NO: 68772 - DNA, 244 bp, Glycine max
aaaaaaaaaaaaaataaaaaaaaaatatattttataaaaaaaaaaaaaaaaaaaaaaaaggggggattttatggaggagggggagggtaaatccacctttgtgcggccgctcttctttttccaaccttccttccccgtccatcgcaattccatatcttttctttatttttgcccaactaaaattctttggccgcccctttttttcccaattccttgcagtccccttccttaccctcccttaata

SEQ ID NO: 68773 - DNA, 291 bp, Glycine max
gctactcaatcaggttgtgaatgtcggtgagaatgacacagatcatgatacacatgatgatggacgtggttatggaggatgcttttgggcctgatgcatatacatattcatagaacttgtatataaaagtgctgatatagatactgccatatatttaactagctcatttgagacataatttgatgcaaacatgattacatgtgtgaagccatatacgaactcacttaccaaatttcttgaaagacaattggaaagcttaaatgtgaactatgttggacatgatgtgtatga

SEQ ID NO: 68774 - DNA, 337 bp, Glycine max
taaagaaagaaagttccgagttcaaatatataataaaaaaaaaaaaaaaaaaaaaaaaaaaaaaaaaaaaaaaaaaaaagagggggaaaaaaaaaaaaaaaaaaaaaaaaaaaaaaaaaaaaaaaacaacaaattggagtgtcattaaaagggagaaaaatagaatttcctatgatatcaaataaaaaaaaaataaaaagaggggaacaaaaatttaattaaattgggggggccttataaaaaagaaaactttgaaaacccggcggataacaaaaaaaaacctccctaaccgatactcccattataaaaaacagccaaatggcaaaaaacccccccc

SEQ ID NO: 68775 - DNA, 331 bp, Glycine max
  unsure (1)..(331): unsure at all n locations
gaaaaaaggcgggggcgacccacgcgtccaatttggttttccccggcgggagatagtttccgtaatccctncaacatcccggggggcgaattaaatgggagggggggcgaaacgggccttgagctctgacccctacgttctggaactcgccgaaaccctagaagactccttcccctcctctccctccaccccactccctctccagaacctccgcctctcctcctgccaatccctcctctccactccatggccctcccgccgagacgagcccttccgcttcaccgacctcttcttcatccgccaaacccgcatactccccggcttccccacc

SEQ ID NO: 68776 - DNA, 351 bp, Glycine max
  unsure (1)..(351): unsure at all n locations
cggcgcgacgccacgcgtccggcctacttattttgagaaatgcgccatgggtgttttcagcacgcaaanancaacggaggggacaatctgacggctaggggggcactcctcganataggaaagggtgtccgtagaactagtccaaccgggaagataattttcgtgagaaacccgatcaaaaattttattcagggaatcaagcttggtactaatgcgctccgtctgagctgagacaggaatatgggactcaagaagaaagatacatccctattcagggcccacaaatgtgaacctaaggcagagactcctaagacaagtactttcaaaagaaagacttcctttcaaaaacag

SEQ ID NO: 68777 - DNA, 288 bp, Glycine max
cccacgcgtacgtcaactttcaaacgcccaatcgatgttagctgcaaacgccaccttaaaaatccaagctttatcatcaccaccctagtgtactgttgatcatgaatcctactaacagcttgtgtacttctatgttcatgttcatcaccttcttattgcttcatgtgtactctgcttcgctgaaactttaacactacttaagacgtataccgctcatcgacgacactctcttcgaccctcacgctgctcattccacgtgaactttcaacaacacaacctctcttttca

SEQ ID NO: 68778 - DNA, 239 bp, Glycine max
acgcgagggtgcacgttggcatcatcaagctataaaagaaaagaaaagaaaaaaagaaggttggagttagatacacacacatcacaaaatgattaaaaatctaatgaatctacattgattctcgttggagacatcaaacatggcatctggtgccaccccagatggataattctggtaaaggtatgaaaggtgcatatcctgctacgataactgtgtctagctacgaccttaccaccgta

SEQ ID NO: 68779 - DNA, 317 bp, Glycine max
tatacaattttccccttctttatacaatcccttaatcccttcttaatactgtcttttttaaaaatcttgagtcccttcacaactttccttaaactcttacccctactctctctaacttacctaaaccctataatactccttcccctcctcttcctacaccctactccctcttcataacctctcacttttctactaccaatccctcatatccactccatttccctctttactctactatcctctttctcttcacctacctattcttcatctctcaatccctcattcttcccattttccccaccatctttctccttact

SEQ ID NO: 68780 - DNA, 156 bp, Glycine max
attttgctttcgcttgttatttggttatttgttttcatatacaaccaaaatttaagctagcgaaatgaagacgagctacgtttattctgtgtctgatactattatgtgcagggcttatcgtgccgccgttgacccactgactctgtccctggggct

SEQ ID NO: 68781 - DNA, 153 bp, Glycine max
cgggtcggcccagacctacgcgcacgcgtacgcgcacgccgacaggttggagcttcaaaaactgccgcctagaggtcggacatctggtttaaagggagctctgctttgccggaaatcgtgaatggagtaactaatgcaccttgctatctaaga

SEQ ID NO: 68782 - DNA, 384 bp, Glycine max
tcttacgtccacgcgtacgcttctttaaaaattgtacaatccttgattctgcttcgggactactttaagagtttacgagaagtatcaaacccataaaagacttttcttcaacatcattgaccttcttttaatataattccttcaaaacgtcattgtctttcctacaataccactacatactgcccatagtccccctttataaagtaaaaaagctcattgactaataagcgctttttatcatatcaaagtttaaaaagtttatcgatgacgacgataaccttcacaagttcatcactacttacgttctcagactcttgaatatcgacattatcgctgatctcactgaacttgaactccaataacaattttctctctctctcatta

SEQ ID NO: 68783 - DNA, 155 bp, Glycine max
acgcgatctttggaggagcaggttcatggtgattaccttcaccatgcgcttaagcatgggtcttcatgctcccctggtgttctaggaaccaatcatgccgatcataatagtgggaggtcaaccactaaaatctgtagagcctgatagtcattaaa

SEQ ID NO: 68784 - DNA, 350 bp, Glycine max
cccacgcgtccgtggagaggatatagacaagtacttgggtctcaaggaaggaaaatcatccaaaaagtttagaagaagatgagatcatatcactgccaatgagtgaattaatgcgacggctaaatgaatcatatgaagccatgaaaaattgaggatagacttagatgtcaagtatattagtgcgttggagcacaattttgagcaaatctttgcattgatttaacaaaaattgtatacgtatggactgactatgcaatgcagttattaggatatttgaatgaatcaaattgagcaactgggtcgtgcttacttggtttttgttgatggctgagaacgtttgacttgtgttt

SEQ ID NO: 68785 - DNA, 205 bp, Glycine max
gcttcagcggctatgcctagctaactcttccgaccttatttcacattatattccccgccttctctcgcatgtacttcaagtaaggcttctctgatcttatctgtggccactgattctcactatactcacacggtccgatttctacatactgcgaacctctgtgcacctgtgtggtacacgaggtgagccatacttgactctttga

SEQ ID NO: 68786 - DNA, 356 bp, Glycine max
aataccctaccgacccacctactccaccctcctttttaaaatccaatatccttatatccttcgtactacttaggtaattttctaaaaatatttaacccataaaataccattcttcaacatcattgaccttccataaatttaattcgatcaaaacatagtcatgtatcctgcaataccactactgaatgcccaaaacccccacttacaaattaaaaaacctcattttccaaaaaaccctttttgccatatagacgtttaaaaagtttaacgatgactacgataatcttaccaacttcatcaaaacttactttatcatactctttaatatagacaattatccctattcttactgaact

SEQ ID NO: 68787 - DNA, 419 bp, Glycine max
catcaactttacctagctttaaaaaacaacttcaactacacacctattggaatctttatacacctatgtatacatatatatatatatattacttcatctccacacatattcaattccattaatatctaataaacataactacaataagaaactacttatatttagaaatattacctactataataaatactaatttaccagatccctcctcctactattcgaccataacaactaacatctattaacgaactcaataactccaacccctctacaatccattcacaggactaactataatcaaatcacacacttaatctacttatattacaaaaccccataatcttctatcaatatccaaattcttatctcatcacactaccatctcacacacatataccaacttcaatatccaccatcta

SEQ ID NO: 68788 - DNA, 417 bp, Glycine max
cccacgcgtccgcccactcttacgcgtactcatgatctaaccttcagagcaatgtttctactgaacagggctattatgttttttgcaacaagtcacacactattgccaacatatcaccacaaaatattcaatcacttcaacttcataaacgtgaattgagcaaataccgatcaatcatctcctggaactatttacatgacggaacaatttgtctatccaagcaagtgctttaaagcatatacaaggaaaataaccaaatgacaatgaacgtcatacattatgacttgcttacactctacaagaacttcaaatctaattacaagttaactccaacggaaatggcaacctaatacttatggcaatttaaatccagaaacaacatgaccacatttcttacgcttatacctttttacaact

SEQ ID NO: 68789 - DNA, 162 bp, Glycine max
acgctcacgattcatcatacgcgtgaatgacctcgtggctcgacgcacccgttatgtacctagtctggggtgaacctcgctgccatgctgcatgtccgaagctcgctatgaggattattgttaaagctatgtgcctatatatggaactcgatacagacgcat

SEQ ID NO: 68790 - DNA, 154 bp, Glycine max
acgcgcacgcgtccgatcgtgcgccgcctaagtgtgcaacccaacgcctgagaaggggctgagcagtacacctgttatgtgtgacccaatggcatagaagttgagacagaagtcagaagcatggccagaaaggtcacaaggagctgctatagtg

SEQ ID NO: 68791 - DNA, 201 bp, Glycine max
cccacgcatccgcttattataccctatcactcacttcacctatcttcagtcacctttattgaaagaatgatccacctcaacatccctcttacattgactcgaattacccactccccacatcttacacattaacgttccacgattcagcactgaagacataaatctgcacattgagcatgataatattcttcacatcaaact

SEQ ID NO: 68792 - DNA, 138 bp, Glycine max
  unsure (1)..(138): unsure at all n locations
gcacaaggggccctcactctctccatcggatcgaacacaacgtacaccacagcgcagaaagagcacaaggagagaggatgccgagcccactgaatcggaagagagagaaaagcantactggatccacgaggagaacac

SEQ ID NO: 68793 - DNA, 97 bp, Glycine max
  unsure (1)..(97): unsure at all n locations
nccacgcgtccggtttccaatattgtgggtggtgatcccgaaccctgtgattctaaaacagatgtgggacattgtacttttggcactggtggatctg

SEQ ID NO: 68794 - DNA, 344 bp, Glycine max
tatcttctttacctatctttctctctcatctatgtcccaaaaactaactgataatttctacaaattaatgctccaataaacaccactcaatcatttccccacctatgaaaccactaattattaaacttactagaaaatagtctcaaatcgcataccaatatatctataaactgcagcaaacaacgattctacctattacccaattttcacactatataatacaccataacctatacacctgcactaatcctctaacttaaactcccaccgcattcacattcaaaaatcactcaaggttgttaaaatgtatgaaactgatgacacaagctctaatatatcatact

SEQ ID NO: 68795 - DNA, 148 bp, Glycine max
ctcactcgtacctgaaggcgctcgcttgatagatcctgagagggcaagcacatagacatccgttgaagaacaggcactgcattattcggacatacatgcggcgacgtagacgctcacaccatatgacggatcaatggatcttatacag

SEQ ID NO: 68796 - DNA, 353 bp, Glycine max
cccacgcgtccggtttcgaatagattatcctaagtctttgggaatagtgctgcaatggcttcaagtcaggaggaggtgacccttttgggagctactggaagcccatttgtgtgcagggttcatattgccctcaagttgaagggagttcaatacaaatatgtcgaagaaaatttgaggaacaagagtgaactgcttctcaaatccaacccagttcacaagaaggttccagtgtttattcacaatgagaagcccatagcagagtctcttgtgattgttgaatacattgatgagacatggaagaacaaccccatcttgccttctgatccttaccaaagagccttggctcgtttctg

SEQ ID NO: 68797 - DNA, 390 bp, Glycine max
  unsure (1)..(390): unsure at all n locations
ggtgatcttatggatagtttttgtgtgtattgatgaacatttcaatgaagagctaaagtatgtttcatgattatgcatgtcactattgtattgtatatatgcacatgtgtctatgagcgtctcaatttagcttctctcccattgatgtctttcttagacaggtagaaaaataagcaggagagagttgaatgtgtaataatcaagcagaggtaatgactctcagttaattacctgtgtgtccttatgctttttctgtttatgcatgcttcgatatgtatggatattaagatattttcaggtggtatagattctaccatttttattttttttaaaaaaaaatatntccttaattttattacttattatattttatatatttatcattatata

SEQ ID NO: 68798 - DNA, 359 bp, Glycine max
gcttcagcggctatgcctcgttaattcttccgatcttatttcacatttcatttccccatttttctcgcatttccttcaattagggtttcttttttcttagctgttgcaattgattttcattttactcacctggttcggttttcacatttgtttaaacttgttacacctctgtcacgattgatgtggtccagacttgatgctttgatcccatcattaatgaccacagtgaagttcaaatgatgcttgtttcctggccatttctatagttttgtgacgtgattgagaatgtggaactttgcatctagtttaattgctggaagtgtgggtctgaaaaatgattctccaaaaccaactcactc

SEQ ID NO: 68799 - DNA, 264 bp, Glycine max
ctcacgcgggagcatacgcgttaatgtcatctttgctcaacacacacgttatacacctatttggggtgggatcacgcgttgaaaaacattcaaaaagccggatgcgagagtatggtaaaagctaggagacaactaatggaacgcaaccctgacacaaaatgagacaacgagccgtctgattcggctgaggcaaccaactcaaatgttcaaacttcaacgctatctgcatcatatgcaccctgatactatgcatccatccttaaa

SEQ ID NO: 68800 - DNA, 202 bp, Glycine max
cctaagggacccgggaagccagactgataccgctctttgcgcacaatctgaacgtgaatccggctagaatgcctgcaccggcacgagctccgtgacctcaccgttagaggattgcgacacctagggcggcgaccaggaagaacctatgtttcatatggcacagcgtcgcatctctcaaaacgaggaaggcgtatgcaacttg

SEQ ID NO: 68801 - DNA, 368 bp, Glycine max
atgaaacaacatatgtttccagtgacttgaatcgatttggttggcccaaacagctagaaagggaaccctctcctccgaataatgtggaccgtgttccaagtggtagaatggggggaaatttgataccatctgtgtattctgatccacaaaatggtcaaagaggcagtcaaaaggccagaactgcaaatgaatatgattacctaggaccaacatatgaacaggatagaacgagaaaaacaagtaagagggtggataacaaccaattatctgccgtgggggacaagaggaagatagaatctcgtgttaaacttgtggatgaattgcattttgaggctaatcattctgatcctgacgataatttaaatgcc

SEQ ID NO: 68802 - DNA, 298 bp, Glycine max
attattacatcttcttgcaccccttattattttattacgccgagcaaacacaggatcgttttcatcgaccaacgggaagaacaaaattagcgttatggttctcttcctttctcggaactaggcttgcaaattcatatacccttttcttttttccaataaggttgcaaaggatttgttccccaagcagttggagaacatgatgtctctggtctctcctcggactggcaggcattcgcagtgctataacacaggacttggacaaacccctgcaagcatttcttccaaatactaaaacatt

SEQ ID NO: 68803 - DNA, 281 bp, Glycine max
acgatggcctaagccgcatccttcaccattttgtctctcctactcctccaccgccacctgcgcctccccctcgccctggcgcgtgcagctcacctcctccctccgcgcccgcccgctgcgccggctgggcttcgccgcggcggacccgctgctcgcggcgagtgtatcggtgcgcgtggcggcggtgagaggaggaagaaagggcgccaggggggcggtgtctatggcgaataagagcgtgggggacctgaacgcggcggacctgaatgggaagaaagtct

SEQ ID NO: 68804 - DNA, 81 bp, Glycine max
agagacattgtggttacccatagtctcatatagtgtcatacagcaaaaaattcagcaacacaaaacaatggggtctcttat

SEQ ID NO: 68805 - DNA, 333 bp, Glycine max
gatagtctttcgttacgcggagcgatacgacgagctctgttttcacatatgcctgtacaatgacaccactagcgggggtgagctgatccttaaatactccaacctcaaggcaattgaaaagtggatgcgcatcataagtcgcaggaaagtgtatggtgaaagcatccagtggctaatacattgcatcaaacccagtccctattgattcttaattccactttgtattgtatactacccctgtctacggtgacatcataagatacacgtccttactttatgctcaacacgatttctgattgaatcatttgatacacctgctgagatggtacatga

SEQ ID NO: 68806 - DNA, 181 bp, Glycine max
gctgacacacatccgctcctgtgttctgctgataaataacgaggtctcaatgcagcatatttaaagggcggtatgaccattatgcctataactcacgcaacaccacttccatcaacatgggaatgccaacatcaacagcctgggagagtacacacccttacacgttaaggattaccagata

SEQ ID NO: 68807 - DNA, 88 bp, Glycine max
cgaggacatgataaggccctcgtttcctaatagggggcatgagtattgctgctggtaggaacggatcatagagcctctaattccaccc

SEQ ID NO: 68808 - DNA, 438 bp, Glycine max
gtgaagagaagaaggaaaagaaagataaagagaaggagaagaaaaaggaaaagaaggataaagatgaagaaacagacacattaaaggaaaagggaaaaaatgatgaaggtgaggatgatgaaggaaataagaaaaagaaaaaggataagaaggagaaagagaaggatcacaaaaaggaaaagaaggataaagaggagggtgagaaagaggatagcaaggttgaagtttctgttagggatattgatatagaagaaataaaaaaagaaggtgaaaaagaagataaaggaaaggatggtgggaaggaagtgaaagagaagaagaaaaaagaagacaaagacaagaaggagaagaagaaaaaagttactggaaaggacaagaccaaggatcttagcactctgaagcagaagcttgaaaaaattaaacggaaaatacaaccac

SEQ ID NO: 68809 - DNA, 288 bp, Glycine max
atttactagtcccatacgcatctcagatgcacttaactcatacgtcaccgtgatttcttccggggaagcctcgctcatcacatctaataattcatgcaccaaaatacctgctcggtgttagatcgaaaataccgacacaatttcatatcagccttggactatgtgtcaatataatcactccgaaagacataaccatatcatggatatatgttaaataaccagggacaaccatgcgagctccactggcaaggaaagcaatgcatcatcatatgattgtgagcatgctta

SEQ ID NO: 68810 - DNA, 381 bp, Glycine max
gccacacattcgaaaacacaatgttcatgtgtggatctgggtttgggacagcgatctctcacgctgacttacactatgacgaacgtatcgaaggctacatcaaaggctatcgacaagtcttttacgaccgctctactgaccacagatgaaccgctgaatcacctgaaataacacctaccctggagcctgcttaatgagaaacatgttacagaactgcttacaagaacgctacgaaagcagattcagaaaccgcattagtgtacttggaagtataggacaagcaatactacctgaatgaataccctgacctttatactgaccttaccgccacatctgcagccattgcttatataatggcatatatagcaacttccgacatga

SEQ ID NO: 68811 - DNA, 432 bp, Glycine max
cccacgcgtccgcatgggtggtggagaagttaagggaggcaaaggaggttgcagaagcgatggctggtacaaagaggaagactatcattagaaagataaggggggatgggaagaaggtgaaccaacataagaacaggtttcagtatgatgaacacaactatgctctcaactccaactccggagctcaaagcgtacatgaaggcatgcctcacaggttctcatctacgtttgctgctcctggtcgacgccagaacgaatcatgatacatattcttcactagagacaatgccagttggatagaacctataaacatgtatattggtgcccaaaattgtttacatgattgtaatacttatattgaaagtatcatacattgagagaagagtgaataccattgttctttaataaattaaattccacgttttatcaaaa

SEQ ID NO: 68812 - DNA, 379 bp, Glycine max
ggatggatcaaaagtgggttatttcaaggttaagaaagaggaacgaagaacgaaacgggtttggatacgggttggggttgtggttacggttttggttggggttggggttattattattggggtcgggttttgcgtgacgagatggaaaaagaagagaggggtgaaggaagaggattggggttcgcccggcccgtataagaatctcgaatccgcaagttttagatccattgaaatgagcaatagtaacagtgccaacgaatgacgcatggggtgacgcatgtgctcttagttgacaattggtggggtccatctaatctaatgtttgttttcttgtggtgttgaggtccggagaaaaggtaccggattgtgttggttttct

SEQ ID NO: 68813 - DNA, 230 bp, Glycine max
agaaaaagcgtgcgctcatctatcgtggaaatatttaatgtcaatgaatatcaggaagtctccaggcgggttgttaacgtacgcatttcatatgttcaaaattgaacccctgcaagtgaaaacaataaattctgtttccaacttctataaaaacgccaacttctttaacttaaagttcttattcaacatattctattttatgtacttattgagctccaaactctacctta

SEQ ID NO: 68814 - DNA, 288 bp, Glycine max
  unsure (1)..(288): unsure at all n locations
ccttgtacccttggnnctttaaatagtnnttctggaagaggccttaatgatatgaaatttgcttggtccactattgatcccattattggtcnnccatttatcttctganntcgtgaaccganncttcaaatattattatatcanngatgcccaggagtaccttgcatgtattgcctatgtgccnnnttttccgtcttgggccatggcataaaaggacctttgcctgnnggtggtgtgtgggtttaatgggaagttccaaattgctaagtanggtcaatggaaattttt

SEQ ID NO: 68815 - DNA, 119 bp, Glycine max
ccctcgcatgcggacgtatataggctggaagcatgcgaattgttcagaggcgtgtgggtccagcacaagcagagggggcgtattctgctctgagctatattgaccatgaacagaatgag

SEQ ID NO: 68816 - DNA, 283 bp, Glycine max
cgtcatatttcagagagtgttacactcacctcactttggcctatcataccgactggccacaacgactccgcacactgtcatctcatggaagcgcgcaccgagggcaggcacaaaaaggaacagatgctcaggtgttgccgatgctgcattgccctcgggacggtacataacaatggatcgggcgacgtagacgggtgtaccgagcatggacatgcacctgatggacaaaggtgtcggttcacaactgatacaacacacatggttcggaaatgtcaactgatca

SEQ ID NO: 68817 - DNA, 342 bp, Glycine max
cttatgacagcgctgactgcataatatacaatgaataactggaggcgaggtacgagagaacataggaaacaactgctacttgacggcttcaggaccgaggcacctaaaaacggaccgactgggaaagtcgacggatagtgcattcacaatcgagaagtggtaacagacacatgataaaacgcatctgctcaggagaaaaggaaaccaagaagatgatcattttggacgtttcctgactgaaggggggtgtacccggacggacaagaagcccaaatctccaagccattgactgcggctcgaaaggctagaatgggatagatcaacttagctaacattcaatga

SEQ ID NO: 68818 - DNA, 375 bp, Glycine max
tcgtccacgcgtccttccacgcgtccttgtagattttgatgcccctttttttacatctggttacgtgataatagttgaggtgaaagagtttttaaacagacttctttcccgttttaactactcattaacagctttgttctgtggttccacataatcactctctgaggctggaaatattcagttgtttaaatcctatctgactgatttgtcatgggcttgtcagatattgagtaatttcttatttttgatggatttttgttgtttattttttttattcattttttaatatttacaatgatctttttaaattttatttttcatctttttttttttgatatttaaataatttctttttatgtgacatctattttttta

SEQ ID NO: 68819 - DNA, 357 bp, Glycine max
atgagttccatacagagttgacactttacagatatcatcaagtgtatacaatctgagaaagtgaggtttcgaggggtgaatctttccggccttcacctctctaaactggatttatcttatgttgatttcagctatgcttgtcttaaaaacctgttcttctgacttgcaaagcgcctatgtgcaaagtttctagatgttgatgccgctggctacttcttttacaatgcaactcttcatgattgtgaatttactgcaccaaatgtttggaaggcgtttttgtcttttgcttgccttcaaagtgcatatcttcaagatgctttgttattagactcttgcttttttgaataagttctttat

SEQ ID NO: 68820 - DNA, 285 bp, Glycine max
cccacgcgtccgcttttgtgtgctgttgatttatcccaagggctcaaagcaacagcatccacgaggaggtggtaccaaaattcctcatcctcccccaacaccactaccaacaacaagggaattccaacaacaacaacatgggagagaacaaaccatcagaggttaaggatttccagatagtggtagctgcttataaggactagagcaagaatcaccaacagtttgcaccaaagaagagttccaacaaggacaggcacaccaatgttgatgtcagggggaggagga

SEQ ID NO: 68821 - DNA, 306 bp, Glycine max
ggtcgaccacgcgtccgggctttctttattttcttctccctcttccttcttcttgtttcatctagcacttacatatcatcgctgcttgcgaccaaggcaaggcttcctatctctccaaagctctctaaactggatttatggcatgttggtatgagctattctcgccttaaaaacgtggtttgttcactagcaaacctttaagcgttctaatttaaaagatgtagcatgccggggcgccatcttcacaaagcaaccttgcacgaatgtgtatttactgcggcaaatcctcgtggtgctttattggct

SEQ ID NO: 68822 - DNA, 282 bp, Glycine max
  unsure (1)..(282): unsure at all n locations
atttacttgtttcgaactccgcttttttgttttttactcagacgncacctntatggttttggtgcaagtttcaatagtcatagggaattattttatcatcaaattatattctcgttttggattaaaaataccgatctaattttattattatctttggaattgtttttatttttgtcattcctaaagacataactatttcctgtatatatgttataatattaaggaaattttttatatttcttctatttattaaagcaattcatcattatatttttttatact

SEQ ID NO: 68823 - DNA, 439 bp, Glycine max
gtgaagagaagaaggaaaagaaagataaagagaaggagattaaaaaggaaaagaaggataaagatgaagaaacagacacattaaaggaaaagggaaaaaatgatgaaggtgaggatgatgaaggaaataagaaaaagaaaaaggataagaaggagaaagagaaggatcacaaaaaggaaaagaaggataaagaggagggtgagaaagaggatagcaaggttgaagtttctgttagggatattgatatagaagaaataaaaaaagaaggtgaaaaagaagataaaggaaaggatggtgggaaggaagtgaaagagaagaagaaaaaagaagacaaagacaagaaggagaagaagaaaaaagttactggaaaggacaagaccaaggatcttagcactctgaagcaaaaacttgaaaaaaataacggaaaaatacaaccact

SEQ ID NO: 68824 - DNA, 256 bp, Glycine max
tttctttttttatcaactctaccttactttctaatccaaaccccaatactttcgtcagatttttcccccttaagcacgtctaaaacgggttatccaaacacataattccatccaccacttttcttttcaatccccaactcaaatctgtgaaaaaatctcatttttaaatattatttttacactactgctagtaataataaaaaaaaacaattataaagcatcagaatgtttttttttccttttttcctttctttta

SEQ ID NO: 68825 - DNA, 394 bp, Glycine max
gaacaaagcacttagtgcgtattcaataattacgaaaaaccaacagcgagtgttgtttttgtttggtccaggctggaccagggaatgaatagagatgagaggctttcggttgaagagaactgagttaagcggcgaagccaaacgcaaaatccgctgcagaaattgccaccggaagcacctttatgtcatgtgcaccattcacagtattacatacacgcacttctatttttaataccgaactcaaatctgtgaagaaaatctcaatttctaaattgtaattcttagcactactgctagtggtttttgaaaaaaacacttagaaagttgtggagtgcgaattcttctgtttttcgttagttttacttttaaagatgggtgtgaagagcaacgtttg

SEQ ID NO: 68826 - DNA, 206 bp, Glycine max
tctcccacgcttcctttcaaactcctattgtagattgtatacctgcctaaccatttttctggctttggttgcactggcatggcgaatcggaataatttgagtttttcttcttcttaaaatatcaagcagcattggagaccaacttcttttcttttcaactgaaatggttctctttttatccttagttagcagaacctatttccaat

SEQ ID NO: 68827 - DNA, 409 bp, Glycine max
gaaaaaaaaaactcatacaccttcatgtacttttatctttctttgttagtatttggtgctacgattttacattcttgggatctctacatatttcattagtcatggcacctcaagcagtttccttcaagtccttcgccgttgctcttattgtggcgcttttcttctccgccttcgctctggacttaatttcggggcaatcgccggtgccctctcctttctcctttacctttttctttttttctatttttctggtccccttttttgtggtattttgttcattcttttttattttctttggtttcattgttcttttcttctatttaatttttataaatatttgttcttatttctttttttttattattttttttttttccttatcgttcatttatttcgctttttttttttt

SEQ ID NO: 68828 - DNA, 270 bp, Glycine max
ggtcgacggatgcgtccaggcatgcgttcaggttacgaagtctgaaccatttttctttttatgacatgaaaagatgagggaacaaagttttggagataagatgcatggaataacaaactgtaggtctcactgcaactagcagacacaaacacattcatttcatgtgagtctacaatcaaccatagctctagggtatgcagagaagctttcctacataaaagatgagggaaacgttggaatggtcgaatatattgacccatcccatgtttt

SEQ ID NO: 68829 - DNA, 192 bp, Glycine max
tcgcccactcttcttcccacgcgtccgtagtctcttagagaggtattcaatattaaaggaatggtttgtctaatgtgtgagcgattagcttaaatatttaaaattatttgtcaaagatacacttatgttacacccaccaactccacttttactttcaagagaatttttacaggcattttatattaatgggta

SEQ ID NO: 68830 - DNA, 371 bp, Glycine max
tcgtaaaaacaacctaattacatagatttttttaggctgtaaccaaagtatcgtaccaataccatggcatgtgacaatgtcgaattggagaaaccggtgcttgcatctctatgaggcttgaggaagcatgcccaaaaatccaaaggtaaaagtgaacacattacaccataccatggcgatgtggtttcaagaacatcatctggcactatataccaacaagtggtgcatatttctggtgatggtaacaactcatcacgccaccaacaactacggtggtggtcctgctataaataatattggcaatttccagggacatggcaatggaggctttattggtggtaattttcgatgccctcaacgagggactactg

SEQ ID NO: 68831 - DNA, 359 bp, Glycine max
cccacgcgtcctaataggttttgtttaagtttttgaaggcaaaggaggtttcagaagcaatgggtgattcgaagaggaggactgtcattataaatataaattggttttggaagaaagtgaaccaacaaaagaacaggtatcacttttatgaacacaactatactttcaactttaactccggggctcaaagcgaacatgaaagcatgccttacaggttttcatctacgtttgctgctcctggtctacgccagaatgaatcatgttacatattcatcactagtatacatttccactttgataataccttttaacatgtatattgtttcccataaattgttacattgattgtaattttttta

SEQ ID NO: 68832 - DNA, 346 bp, Glycine max
accactcatccgaaaacacaatggtaatgtgtgtatctttgaacgggacagcgatctctaaagctggcgttcactatgacgggggtattgaaggcttcatccaaggctatcaacaagtcttttaccaccgctctactgaccacatattaacccctgaatcccctgcaataacacctaccctagaacctgcttaatgagaaacatcttacagagccgcttacaagatcgcttcgaaagcagattcagaaacctcgttagtgtacttggaactatgggacaagcaatactacacgaaggattaccctgacctttatactgaccctaccgctacatcttcagccatgtt

SEQ ID NO: 68833 - DNA, 224 bp, Glycine max
cccacgcgttcgaagttttcactcacggttttctctgtttgttgttcaaccacggtacttctctctgggtttggttcatctgccaacgtgaccgggtatacttccttctataattaactttatcaaaatcaaacttttatgtttctgcttgtcttaattacttctctttcttttgactaatattattacactattgtctttgaattttgttcctttcctctttt

SEQ ID NO: 68834 - DNA, 176 bp, Glycine max
ggatggatcatttgtggtttatttcaaggttaagaaagaggagcgaagaacgaaacgggtttgggtacgggttggggttgtggttacggttttggttggggttggggttattattattggggtcgggttttgcgtgacgagatggaaaaagaatagaggtgtgaaggaagaggatt

SEQ ID NO: 68835 - DNA, 361 bp, Glycine max
  unsure (1)..(361): unsure at all n locations
tgaataccgggtcgacggcgcgtccgttaaaactatttataccatcccttctggctgtagtggcagtgttggaagaagaaattgtaaggcttgaagagcagggggtgcatgtcanacaggatttgtaccatgaagctgtctacatgtcatcttctatgaggaaattggaaaattcagtttccgctccttctaacatgtcaaatccaacaatggatagtcccaatttggataaattgatatctcttacccaaacaactggttattcatcagcaacatttgcatctaatcctaccacaacacttcctgatgattatatacaagggtaagagaaccaattcctgtactaattttttcaagaaca

SEQ ID NO: 68836 - DNA, 128 bp, Glycine max
acggacgcgtgcgcacttactctcaagcaaatagatagtatcccatgcgaggattacgattgaggtcatggtcctgtgcttgtctatttgaacctgccagttcccacttaaacattccattgtgacgg

SEQ ID NO: 68837 - DNA, 174 bp, Glycine max
gcgcgaaaatatattctaatgtcaaacgcaactcttctatttctatctgcatgagttttcactgagaatgtgcacactgccaacagtgttatgctatctctaatgtttttatcattattgatcataagctttgatgtttttgatgcagcaattttcctttggagggtacaattt

SEQ ID NO: 68838 - DNA, 301 bp, Glycine max
gaaataatgtccgggatcatccacaagattgaggagaccctccatgtgggagggcacaagaaagaggagcacaaaggagaacaccatggtgagcacataggtgaacacaaaggagaacaccatggtgagcacaaaggtgaacacaaaggagaacaacaccatggggagcacaaggagggacttgtggataagatcaaggacaagatccatggtgatggccatgacaagaatgaaatgaaaaaattataataatataaataaaataataaataaaaaaatatttatattttttaaaaaatta

SEQ ID NO: 68839 - DNA, 252 bp, Glycine max
  unsure (1)..(252): unsure at all n locations
gtagttagggcgatataatgggagtaaaaggtaactgtgggaaaatgggaaaaacgtttttttgctgatgnctgctgttatttgctgtccccacttgttggtgcttataggcgaagaaaaatattgtttgagccaatagcttccagactgtgaaggaaagctgccattgcttgatcttgggatttggactttgagaataaaatcatttttacacttttgaaaatgtgtntttggcctatatgttggagttct

SEQ ID NO: 68840 - DNA, 215 bp, Glycine max
gttgtcaactgattaaactatgaattgaacagatacatttggcatgctccgaaatggaatcggtggatctaatagcggagttttggtttgtgtaccttatagcatgaatgaatcagtgtcgtttgcatgccatcaagaatcctagtgttttaaagtcagtggatagagaacataatctttctctactattcactttatatacttcactctttttc

SEQ ID NO: 68841 - DNA, 61 bp, Glycine max
cccacgcgtccgtacaatcttcctataaaactaaaacacccgcacctaaacagctgagaac

SEQ ID NO: 68842 - DNA, 174 bp, Glycine max
  unsure (1)..(174): unsure at all n locations
gccgattccggtcgaccacgcgtcgcggccccttttttttttttttattnnnntttnnnggcaacgaggtattagaaaaattgatcaaaacttcttaaactacagtcattgcatttttgcaaagtattccccacattaaaaaggactgtatcataatttggcggaaaaataaaa

SEQ ID NO: 68843 - DNA, 234 bp, Glycine max
cccacgcgttcgccacgcgtccggctaatcttaatgtcttaatctacagatgctacaggagatttcagttgtttacaagctttgaagatttccctaatgaattgggctttaattgcccatcataaatggcaagttaagccaaatttaatttactttacctcacggcttcatgcaatttgcttgcaattccctttcttctgttagagggagctacccaaatttccttaatgccac

SEQ ID NO: 68844 - DNA, 283 bp, Glycine max
ttccggtcgaccacggcgtcggcaagtcttaaaaagcgatctaagatatacctacacgaggtcttcgggaagaagatacattgcacttgcaatgccaagcgacaggtgatgtacttatgagtaatactctacgtcatctactctaatttttaacacgagtctttataattgcttttagtttacccctttgaaattcaatctcattcaactttgcaaaacatttttcctagcggtggaaaattggatttttttttttttttttggatatataaaaatattgggg

SEQ ID NO: 68845 - DNA, 374 bp, Glycine max
aagattttgacacctaacatcccattgtggtcggaggacacggaaatgttcacaaagcaaaggcgcacactggtcatattctagccgtgtagaaacttcatttagtccaaaatggggaatcgcccaatattaaagctttcacaagctaaatatcaagctttgataaacattcgacatcgtaacattgcgaaatcatattggttttgttctcattcacaatcctcatttgtggtgtatgagttcttggaaaaggcaagcattgattggattgtaaaagatgatgatcatgcaatatcctttgatcgggatcccaacactaatgccattaagggtggagcaaatgccgtatcttatatgcatcatgactgttcacc

SEQ ID NO: 68846 - DNA, 375 bp, Glycine max
ttctctcccaccactttttcctctctcttcctcgactagctagccacacaaaatgaggatgggcttcagatccagtgcctccctgtcccaaatcacgagaccattcattttaatcacgtgtttgatacacataaattgggctctcgctaaactcttccaattttttctataaactatatgaccttacgaccaatccttatgcttcactccttcttcgtcccttctctcttctgtgtctactttgtcgcataaactctctcccaaatttcgaattcattatatctttcttccttatttcctacttgttctttccatttagataattatatatgcatcttccaattttacattatttatctttttttttcctatctt

SEQ ID NO: 68847 - DNA, 247 bp, Glycine max
aacctactttgcccctctcacgctttacttgtcgcgtatcaaacgatgttcaatggggctgttgcagatggacccacaacctgctgagaagcatgatatctggcctgtgctctctactccactgctactacttatctagttttcatgaaaaatcacacgtaagatggtggatcaattgccacacatgcacattatcagtcgcagaatcttcagacgtgttgtagcaacagtttattttaaacaccct

SEQ ID NO: 68848 - DNA, 165 bp, Glycine max
tataatcacctaattacatataatttttaggcgtaaccaatgtacgtaccaaaccgtggcgttgacatttcaattgtgaaaccttcttgcagctctataggctgatgatgcatcccatatttccaaaggtatatgtaacacttactcctaccatttctatggttt

SEQ ID NO: 68849 - DNA, 122 bp, Glycine max
ggggggggggcataaatcaccgccttgttagtccgtgttgaaatggcaacttttttttttaatctgcccggggtggatttttttatttatatactatcaataccgtttggtggccgcccaac

SEQ ID NO: 68850 - DNA, 285 bp, Glycine max
gatgagctagtgcaaacggaccacacgaggattattcatatatcattctctaaccgtgcactatatccctctcattcactctctagctagactcctcatcatcgtacaagaaccaatgcttgtactctctgttactttttaaccatcgttgaatgaatcacctaaggaaaaacgagtagcttacagcagagcgggttatctttgacctgtgttgtgaacgagataaatcgtgcttgtgtataggtgagtgcatgaagaattaagagatgggtgaagcgggtgaac

SEQ ID NO: 68851 - DNA, 400 bp, Glycine max
gccacgcgtgcggggaaatggatcatattcagccgaacataaaccaattctaaggcattacaaagctgcccatatctgctattccagaaagatctcaacctcattctatacctgatctctctgcacgtactttttgtggcaccatgcagattaatcttacgatcaatgaaatcaccagctatcttgtcttaaactccgatgaactagtcatacaaaacactcacttgactaactctcaaagacaggtgagtagtttttagtgatcaaaatattctgtttaagcacatatcgaaatctgagtactgggctttggtggctctgttccgggcttaatttatccagcagtaaactccattggatgttggtagggatactgatgatgacatactacttttgctgg

SEQ ID NO: 68852 - DNA, 150 bp, Glycine max
  unsure (1)..(150): unsure at all n locations
cttctattgttgtttgtgtgtntgtttatttctctcacctgataatgtcttgctgcggtggtaactgtggttgcggaagctcctgctagtgctgcatcggctgcggaggctgcaagatgtacccaaacttgagctacacccagtcaacca

SEQ ID NO: 68853 - DNA, 135 bp, Glycine max
gtggattgtattagaggtggactggacccataactgcatcctacttctcccacgcgcaccagtttcgatggtgtgtaagctcctacccttaaatctatcaagagcagtttccctcacactattattgccacagat

SEQ ID NO: 68854 - DNA, 390 bp, Glycine max
cgcgtccgtttttgtttatcccttcttctctcctataaaaacaccaacacacaaatcttcacaacatttgcatgatctgactcacaaatcatcctcctattcctcggtcgtagcctgttgttccctctttcatctctcttcgccgtcacaacagccaccaccatggtcgaaaccagacgcggcgccttttcttccaagcgttctctctcttcgccttcttctgcgtccaacaccaaacgatccaaggtgtctgaggattcctctgtggcggctccggtcaacgaatcttgaaccggaaatgaatctggggaaccggagctacgaccctctgatctgccagataccgcgtcgttgaaggtcgcgggtggtttgtgattaggcctccttctg

SEQ ID NO: 68855 - DNA, 162 bp, Glycine max
  unsure (1)..(162): unsure at all n locations
tcggcttgctgaacacagatgaagctcttgcaatttacatctggcctcaactcaacagacatttttctttcatctactgtgttgaggatctnntgtntcaaaataagcttgaggaatgtgaatcttgttttgagaaactggatctagattttgaacccatta

SEQ ID NO: 68856 - DNA, 347 bp, Glycine max
  unsure (1)..(347): unsure at all n locations
cccacgcgtccgcccacacgncctttttattttaatgncngaaacaacacaaactacacgtgatttcaggtgattgcgggctgggaaaataaccctaataaatagggctttaattgcccatcataaatggcaagttaagccaaatttaatttactttacctcacgtcatcaatcaatttgcttgcaattccttctcttctgttatagtgagcaacccaaattgctttaatgccacaagcattgatggttgtttttctattacaataaaatgcaccttcctaatcttcataattactcaagttaacatactgttttttttaatcctacctttttgaaaaataacaatt

SEQ ID NO: 68857 - DNA, 198 bp, Glycine max
  unsure (1)..(198): unsure at all n locations
cccacgcgnccgcnanccncaactagngaaatnccnncnncncnnnccacgagccaacaacaacancagggangcgagnncggggcccaaaaaaaaggcccgggagaaggagaaggaagnngaaancgnngaggganacaannaccgacagcagacgggcancagnggagggggaaaangaanannnagagcngcaaa

SEQ ID NO: 68858 - DNA, 347 bp, Glycine max
  unsure (1)..(347): unsure at all n locations
cgcgnnncnaaacannannagactcgagcgtaacgangaaggcaacacngcnngggccnggggcnncngcgccggggagncgggacacgcanagcaaccgaaccncggcaacgagacacgcnnccaccgnngnnngnggnncgncgaggaancaacccnacancccgaagcncgagccnnnaagccgaaccaaannngaaagggcgcggaaggacccnccnnngancgaaaaanccgagagagagancnnagannannnggcaacgcnngaaggagaccaanccganagcngcnggcaggcnaaaanngagccgaaagaacnngaaaaagagnccccaaaagcagac

SEQ ID NO: 68859 - DNA, 204 bp, Glycine max
  unsure (1)..(204): unsure at all n locations
cccagcgnccgannnaacanaagagnaacatagcgggnncacaggccaccgacgaggagggncnccaccnncagggcaccgncgcnggcgncaagaaaaccgcacnagcgcgccggcggcaccancgacgncacnggccggangcagggcaagacngangccaacgccancaaacgccnncgcccnncccgncgaaggcaccaa

SEQ ID NO: 68860 - DNA, 268 bp, Glycine max
  unsure (1)..(268): unsure at all n locations
aaaccacgnngccccccgcacgtttttcttttcgcgaaacaaacgaagnncaaggggnctggtacaaatggacccggaaccgcgccanaaacaanatatcatgcctaagcacgcgaagccccagctacaactaaactagttaacaggaaaaagcacacgaaatatgggagatcaattaccacacatccacattatacagtcccaaacaacatcagcggtaggagccccatctgagtgtacacaccctacacccgagagagatggacga

SEQ ID NO: 68861 - DNA, 157 bp, Glycine max
  unsure (1)..(157): unsure at all n locations
ataanttaatttaaaaaaaaaaaaaaaggtatatgtttaggggggcatggaacacggccttttaaaactgtgttgaaaaggcaacttttttttttaaactgccaggggttgaattttttatttatatactatcaatacagttgggtagcagcccaac

SEQ ID NO: 68862 - DNA, 222 bp, Glycine max
cttatgcaaagctcaatttcaccttctgcggtaatacccagaagaagatagtgatgcttgggctattttctactggcgaaacgactatacaatacaaatatcacatttgataatttttatccaccgttcctacaattgatcttaatgtggagaaagtccattatatctttgttattttcacatttatattattgttagtatacttatttaattcttatttct

SEQ ID NO: 68863 - DNA, 382 bp, Glycine max
  unsure (1)..(382): unsure at all n locations
aggaaaaaaggggcgacgacgccgacgaccagcgnccgggcanggcaattttatatttcttccncagggcanctgngaacgccacatgttcaatggcccaggggcatggccatatccatgcacaaccactttcactttcttcttctcacttcccaattaatattagaccctccacccatcatcacgttcatgtctctcacaatcacaaatggagagcaaaagtgtcaattttcacttccttcttgaagaaaggcaaagatgctaagatcatcaaggaagaaatgcctgaggccattgcaccgcctgaacgaggggccgatgccactccccaagaccagcaaacaaatgaacagattgcgcgggaaacctgagcaataactcc

SEQ ID NO: 68864 - DNA, 320 bp, Glycine max
ctcatgcaactgtagcaagggaagaaccatttcaatgttcatctacccgaaagcaaaagggggagaagctttaattgacttgcctgccctgccccacaacaatagacactttgtctatctagacagcacctttatacctttcttgaaaaattacttaagtttatagctccctatattcacttattaatgcagcaaaatgtgatactgatagtgatacaatcatacaattgaatatgaacacggcatcgttacgtacttttatgttagcacttttgaaattcaacctctttcagaaagctgcttgcaaactctttacctta

SEQ ID NO: 68865 - DNA, 319 bp, Glycine max
  unsure (1)..(319): unsure at all n locations
gaaaagagggtcgaccgcacgcgttcgcccacgcgtccttcacaacagtggtttgtgtttccaaaaagagagagtggaaaagatggcgcggttgatcacagtggggtggtgcacanatactgaactattattctccgcggccggtgcgtcttgggtggaggaggcggctaatcctatacgaatggtgttttgtctttatgccgatgttgttctgttgatcggggagtgccggcgtgcgttgaaattatctaggtttgtgagcaggtactgtaagagttatcaaatctttgaatatatgaacgataggtactatatattt

SEQ ID NO: 68866 - DNA, 277 bp, Glycine max
  unsure (1)..(277): unsure at all n locations
aaaaaaaaaaaaaaaaaanaaaaaaaagaaaaaaaaaaaaaaaaaaaaagaaaaaaaaaaaaaaagaaaaaaaaaaaaaaaaaaaagaaaaaaaaaaaaaaaaaaaaaaaaaaaaaaaaaaaaaaaaaagaaaaaaaaaaaaaaaaaaaaaaaaaaaaaaaaaagaaaaaaaaaagaaaaaaaaaaaaaaaaaaaaaaaaaaaaaaaaaaaaaaaaaaaaaaaaaaaaaaaaaaaaaaaaaaaaaaaaaaaaaaaaagaaaagggagaaaaaaaaaa

SEQ ID NO: 68867 - DNA, 409 bp, Glycine max
gggcgaccacgcgtccgcacgcgtgcgccaaaaggagcataagcagccgatttatacaagtaaaggcaaacgaagctgcccaaattggctgggggagaaggatatcaaccacatttaatacctgatctctctgcacgtacttaatgtggcaccaagcaaattaatcgtacgagcaatgaaagcaccagctatcttgtctgaaactccgaggaactagccatccaaaacactcacttcactaactctcaaagacaggagagtagtacttagtgatcaaaaacttctgtttaagcacatagtgaaatttgagtactgagctttggtggctctgttctgcgcttaatatattcagcagaaaactccatgtgatgttggagtggatactgataatgagatactacttttgctg

SEQ ID NO: 68868 - DNA, 81 bp, Glycine max
gttcgcccacacgtccgaagctaataagcctacagtctgttgacatgttcccacacacccctcatagtgaatgtgtttgcg

SEQ ID NO: 68869 - DNA, 313 bp, Glycine max
gcgcccacacgtccgtccacgcgttcgtttatgtttatccttttttctctcctataaaaacaccgacacacggatttttacaacgggtgcgtgatctgactcacaaatcatcctcctattcctcggtcgtagcctgttgttccctctttcatcttttttcgccgtcacaacatccactaccatggtcgaaaccagactcggcgcctcttctttcaagcgttctctctctttgccttcttctgcgtccaacaccaaactatccaatgtgtcttaggatttctctgttgcggctctcgtcaacgaatcttgaacc

SEQ ID NO: 68870 - DNA, 284 bp, Glycine max
  unsure (1)..(284): unsure at all n locations
cccactcgtccgcgtttctggcttttcgggtttagcaatggccggaaaacatgtcggcttgggtttactggcttggctcgctggaatttcaaanaatcatctctactatattatgttttatattaatgtacttactttacttttttttttttactcttcatcattaacttttctcttaccattttctttgttgttcttcataattttctcttacatattctgttttttgtcctgtctaattctctttttttatttttttttttaccatattctcttttttcttt

SEQ ID NO: 68871 - DNA, 163 bp, Glycine max
  unsure (1)..(163): unsure at all n locations
cccacgcgtccgcccacgcgtccgctttcaatcttcacttctctctntctctcaaaacacaccaaaccaaccattcattcattcattcatagtttcattcaacaaatcaaataatatcaaacaaataaatgtcacctaacaatcctttcacgattgttcccga

SEQ ID NO: 68872 - DNA, 371 bp, Glycine max
gtccgggtgattcttattggggatcccgccagcccactttccggaagctctgagtcgcctcaaggcaaagatcttcacacccccccctcttcgcttctcttgtccgcagaaagctctccgccgcttctttccatctttcataccatggtggggttcaccatcaccccccgggtttataaattcaaattcaaattcaaattgtctctcttgagtctcaactcacttacccacaatcttttccacactgtaatgtgatcccttcgcaccaccttcgaatggatccctgggacaacaattccatcgcctttttgcacttcaaccaagcgctccaaaccaacccaatgatcctgcattttacattccctgaattc

SEQ ID NO: 68873 - DNA, 315 bp, Glycine max
aggaataattacagggtccactgatggcctgctacgtttttgggaaaatgatgatggaggtatacgctgtgcaaaaaatgtaacaattcacaatgctgccatattatctatcaatgctggggagcactggttaggcattggagcagctgataattctttgtcgctcttccaccggccccaaaaaagacttggtggttttcctggcactggtgttcaaaatggctggttgaccaatggccatgtctttgttactgtgggttgttttggtcaggtgtgttgctttagacttggaaaggaaaaggatatgcagcggtg

SEQ ID NO: 68874 - DNA, 187 bp, Glycine max
cccacgcgtccgtgaacgtctgggttgccctcatgggcgccttcctcatcttgctggcttggcgcctctgtcatgcctacttctttcttcccttacacctggtttccttcgccactctgcttatggttctgctcatgattcttacctgttttccccaacaagccttttttcaccctcatccttcaac

SEQ ID NO: 68875 - DNA, 137 bp, Glycine max
actctaagtccttagtgcaaattttattcttccagttagttatacttacaaaattttgtgtttggcttaaaatacacatactctactattttatattattttattccacttactactctcccaaataaagtattttt

SEQ ID NO: 68876 - DNA, 131 bp, Glycine max
tactgcactttatgggttgtgaagcatgcataaaacagccatggtacacatttctttctacggaaacgattgtaaaacgttcaataaccctcgtaatccttacaagaaggagcggatggactccaagttga

SEQ ID NO: 68877 - DNA, 102 bp, Glycine max
ccaacccttcttaaaacaacaaaagttttgtttttttgccaccaaaaacaactccctccagggtctggaattttaaaagaaaaaaattttttatttaattta

SEQ ID NO: 68878 - DNA, 373 bp, Glycine max
cacaatccttcgatttgctttcttcaacgcacccacttatatttcttaaactagttttccagagagccgggagcactgtacggtgccgatccaatatacaggtctgtaaagccttgtttgggacttcccaaagacccccacctttcccttgattgatatgttttgcaaagcgtatactcttttgcatgcaaaatcgccctcgtcgattcccactctttccaaacacttaccttggcgcacctgaaattacaagtcgccacaactgcccacggtgttcttaaaactggctttaacaaaaacgacgttttcctactgctcgctcccaacagcatccactaccctatattctatcttgctggcaccgccattggcg

SEQ ID NO: 68879 - DNA, 261 bp, Glycine max
cccacgcgtccgcagtttttacatttttttttttttataatttggatgatggttaggcacatatctgagaatttttacgaatatcacacccattgtcccttatagggttcgagtatccttttttgaaaaacaagttcgggttaacattctcgtctattggagatattgatctgttatatatggtgtccatactttctcttattttttatcattgaaagaaataggaaattgaatcagattatgttcaactttttgcactga

SEQ ID NO: 68880 - DNA, 224 bp, Glycine max
  unsure (1)..(224): unsure at all n locations
aaaggctgcactctcttttatccctcaaaaaccaaaaccctaatggcagagcgcggaggtggcgaccgttgcagcgaccgttgcggtttcngacgcggctttggtgggcgagggcgcggaggttacaggggccgaggccggctccgtggtccctgtcgcgaggaataggagaaatgggttccagtgaccaaactgtgtctcctttttaaggatggaagaattct

SEQ ID NO: 68881 - DNA, 260 bp, Glycine max
gcaaaaacagaatcactctgttctctctgttcaaacagagtttgcataatactcagtgacagcacttttcttcctttcttcaacttcattacaaaactcttactcttatttcatgcttccaaatataaaaacctttttactattattttctataccaacactttctttctttatttacaaagttaatttctccttttagttagtcacacaaaacaaaacactttatttgtttcttcatctaccctttcacaaattgactt

SEQ ID NO: 68882 - DNA, 294 bp, Glycine max
cacaccaacattcactacacacactctaataccttacgattttcaaggttgatagagcacgattgtttattacagtctttataagattaccttctaaccaaatcggaatgaccttatctacatgatcctctctatcacccattgtcaaacaccaacctttttgcataaaaactattctttacgcgtgatgggatcattaccttagagtgctgatgactgaaaataaaccccttgatcacattaacaccggttctccagtctcttcactgattcaacatgcagaagaaccattat

SEQ ID NO: 68883 - DNA, 212 bp, Glycine max
agaaattgccacctgaagcacgtctaatactggtgaaccaaacacaaaattccatccaccacttttcttttcaatccccaactcaaatctgtgaagaaaaatctaatttctaaattgtaattcttagcactactgctagtaataataaaaaaaaacaattataaagttgtagaggggttttttttctttttttcggttgttttacttttaaa

SEQ ID NO: 68884 - DNA, 161 bp, Glycine max
gtgttaacttctacaggttatcagggtgttctttacacatatgtgcttccgtctgttgcacggccggcatacaatgcagtgaattacacaccaaatggtgctgcttgaggaaagctccataacagcaaggaggagcggagtaactcatttaccatgggtgt

SEQ ID NO: 68885 - DNA, 472 bp, Glycine max
tcgcccacgcgtccgcttttattacaggtttggtctcagggttcactttaatagcaggggcagtgtctatttaataattttgatatttaaatgtttcatatagtgtactttctataatttatattaatatatttatagaatttttattttttttcttttattgtatttttttttttttttttatattttttatttaattttatttttttttttatttttttttattattttattatattatttatttattttttatttttttttttatttttttttttttttattttgttctatttttttatttttttattttttttttttttattttattttattttattttattttaatttttttttttttttttttattttttttttatcatattatttttttatatttttttattttttttatatttttttttttaattttttatttttttattatttttttttatttattttttttt

SEQ ID NO: 68886 - DNA, 265 bp, Glycine max
gagagagagagagagagagaagcgttaatcttaatgggttacatccaccatggaagaaccggtctcaggcacatactcagattcataaccgccaccggcgtggtctcaaacttcggcagatcgcaatcgcgcgctgcattcccctcccatttccctatccttggcaacgtgctttttttttttaacaggcgattaataccttaacgaaattactcgataagttgaactctacttgcgcagggagcgaaactagcgtttgtgcctt

SEQ ID NO: 68887 - DNA, 314 bp, Glycine max
  unsure (1)..(314): unsure at all n locations
atttaacaatccctttctatttataagcagggagaattcctgtatatgttaaattgaattggatttgtgttttacatgttgcttgtaggctttatgttttgtctgttgattacactttcaagcaaatttgcttttaccgtgtttgatgctctgttggacttttgttctcttgtaagataccaatattttttttttccttttgcaaatttagcttgtctctatgagcagcaatagtttaactgtctcattgatttttcttacccanaaaaaaaaattatatttttatataaatattttatattttatattttttt

SEQ ID NO: 68888 - DNA, 114 bp, Glycine max
acaatgaactcgttttgtgaccactctaatataataaggcatattgtattgctttcatacactaagaagggatttttataccacttctatatttcaccttaatacaaaacacac

SEQ ID NO: 68889 - DNA, 475 bp, Glycine max
  unsure (1)..(475): unsure at all n locations
gaccaagaaaggccagcttaaggtcaaggtgaatacagtgcttggttcaactgcgcgaccggtaacatttaaacttgtcctttcttttagcacangttcaaaatattcaactattattgacatgcaattatcttctttattaccaataaattggatttcatgttttttattttttttctaataattttttttttgtcttcttttttttttatcttttttatattttttttttaattttttttttttatttatatattttcttttcatcctttaatttatttatctttcatttttttttatttattatttttctatttttttatttatattttcattttcttttttatatattttttttattacttatttttttattattatttattatttttcttctctttatcattctttttcttcttctcttctttaattttttcattcttattattctttttattatttttttttataattt

SEQ ID NO: 68890 - DNA, 381 bp, Glycine max
aacgcctccattatcagtcctttttcaggcttggtttttacctaaccctacaatgggccgagtcttccagttagggtttttctcttttatcaaattcttttaaatatataaacacttattatttttttcttatttctcatttataatttatttttattttttctacttattttttttttacttattattttcttttttattttctctttttatattactcttatttatatattttttcctttttttttttttattttttattttttatattattattttttattattttatctattatttatttatttttattttttattatatttattttatttatttttaatatatttttttatattattatattttttttttattttt

SEQ ID NO: 68891 - DNA, 354 bp, Glycine max
cccacgcgtccgtgtgtgtgttttgaagagcgaaacagaagcagaagctctttgtgggtgtgctatttttggaattttctgctctttatctcatttgaaaaccccagctttctgaggctcgtgatcttaattgtgaagatggattcaaattcaacaaatgagaatctgcataacattttttttgtttcagattgagcttaactttaagtcttgttattttcaaaaatttcatgctctatttaacctttttctaaaattttacatgatttgtaagagtctaatacctaacatttttttagggttttataatattgactatatttttatcccttcttaaattggattatcttttaa

SEQ ID NO: 68892 - DNA, 154 bp, Glycine max
attggtgctaaaggtaacatctataaccggatggagaaagaaactgatgctaaaattgtgggttgtagtataggatcagtgaaagactttaaacttcaactaaataggtatttgaaaccttatcctttaaagaatgtacatttgcatgcgttaa

SEQ ID NO: 68893 - DNA, 204 bp, Glycine max
gcggctctcaatctcttctttctaccctttacctttctttcataccaaccccctcctcaaaccctaagccagccatttccttctccttgttcttcatccccaaaccccattcacgcttttccaaatccccaccaaggtgctgtcttacgcctgcctcgccaatcccttccaaaaacacaaacttatgtttcccagttttttaac

SEQ ID NO: 68894 - DNA, 60 bp, Glycine max
ctcacaccaggcgcacgttagcacaaactatcatggccacggcaacagcagctgccatct

SEQ ID NO: 68895 - DNA, 432 bp, Glycine max
  unsure (1)..(432): unsure at all n locations
attcccttaaagtggaaggtctccgaggcattgtaactgtgcctgccaagctggagtctagcgtccctcgtctttgcctatggagtanatctattttttactcagattgctccttctaggacttacgattcactaactgaagatttcagctatgctctacttctttctacaattggtgcacttgtcgctgcaatatttgtcacttggggtttatcccagaggaaagatctacaagagaaatggagattgtccggccttcatttttgccttgcaatctcttagttttaaggtttaagttaggttattttgattctttgttttgtttttaattctaattttttaaatttttgtagctttgattggcaaagtcactttataatttcattattttattatttgcatttattctttattgtatttttttatttatta

SEQ ID NO: 68896 - DNA, 147 bp, Glycine max
cccacgcgttcgaacagagtaacatacactccaaaaagctggattaaaaatgatctacaaaggaagaaaagaagggcatttcatctaatatataattagaccagtcatggctaatgagaaaaaacaatttgataattgatacccttt

SEQ ID NO: 68897 - DNA, 90 bp, Glycine max
cccacgcgttctgagcatagaaaagcttttatgtttgggtgatgaaagattattgggacggggggtccttaatgaagcaaaataatttta

SEQ ID NO: 68898 - DNA, 254 bp, Glycine max
ccaagatccaggacaaggaaggaatccccccggaccagcaacgtctcattttcgccggaaagcaacttgaggacggccgtacccttgctgactacaacattcagaaggagagtactctttacctcgtcctccgtcttcggggtggcatgcagatcttcgttaagacactcaccggctagaccataaccctataggttgaaagctccgacaccatctataacgttaaggccttatatccaggacaaggagggttt

SEQ ID NO: 68899 - DNA, 316 bp, Glycine max
  unsure (1)..(316): unsure at all n locations
cggttgattctcttatggttgaaccccgccgttggccntttttttcccgaaaagccnncngagccgcctttcaaagggcaaaagtctttccatatccaccccccttttttcgtttcctccttgctccgccagaaaagctctcccgccgccttcctttcccatctctccaatcaccatggtgtgggtttcaccatcacccccggtggtttatcaaattcaaattcaaattcaaattgttctctcttgaagtctcaactcaacttcacccacgaatctctttccaacactgttaatgttgatccctccagcaccacct

SEQ ID NO: 68900 - DNA, 64 bp, Glycine max
  unsure (1)..(64): unsure at all n locations
tcctaancgtgctaaaaggattttggctaatcgtctatcagctgctcgctcaaaagagaggaag

SEQ ID NO: 68901 - DNA, 190 bp, Glycine max
cccagagtcaaccaagcaaacatttaaccaatggctccgaggttccaaaattcggatccgggtgcattggccgtagggtagcgaacaaaaaccccttacaagaacagcatgacatatatgttatcaaacacgcatacaggaagggaatcacatgctttgatactgcggatgtttatggagccaatgctaa

SEQ ID NO: 68902 - DNA, 199 bp, Glycine max
tttcttattttcttattttttttatttttgtttttttttttttttttttttttattttaaattattttatttctttttttatattttttttctttctttttttttttttttctttttatttattttttttttttttattttttttttttatttttaattttttttttttatttattttttttttttctatttttttttt

SEQ ID NO: 68903 - DNA, 298 bp, Glycine max
  unsure (1)..(298): unsure at all n locations
ttttctttcttctattttttttatatcctttttttatttcttcttttcttcctttatttttttttttttcttcttactncaattaatattttttttctttttttttttttttttttttttttttttttttttttttattttcttctttttttttttttttttttttactttcttctttttttttcttttttttattttttttttttttttcttttttttttctttttatttttttttttttttattttttttttttttctttttttttttttttatttttttttactttttttttttt

SEQ ID NO: 68904 - DNA, 107 bp, Glycine max
aattccgaagggaaagagatgttttttatgggtaatgtcgcccgcaaaagccaggtcctctatcggaatcgatttggaacgactactcttgctcgcctgtggcaaca

SEQ ID NO: 68905 - DNA, 289 bp, Glycine max
aaaaaaaagaaagaaaagataaaaaaaaaaaaaaaaaatgagaagaaaaaaaaaaaaaaaaaaaaaagaaaaaaaaaaagaaaaaaaaaaaaaaaaaaaaaaaaaaaaaaaaaaaaaaaaaagaaaaaaaaaaaaaaaaaaagaagaaagaaaaaaagaaaaaaaaaaaaaaaaaaaaaaaagaaaaggaaaaaaaaaaaaaaaaagagaagaagaaaaaaaaaaaaaaaagaaaaaaaaagaagaaaaaaaaaaaaaaaaaaaaaaataagaagaaaaaaaaagaaaa

SEQ ID NO: 68906 - DNA, 264 bp, Glycine max
acttctcattttacttttttttttttttctcttctcttttatccttttctttctttcttatttttctttcttttttatctttttcttttttctttttatttctttctttttcttttcttctatttttttattatttttttcattttttcttttttactcttatctttcttcctctttttttttaatttttctttttttcttactatttttttcttttttttcttctttctttttttctcttttcttttttctctttattttttt

SEQ ID NO: 68907 - DNA, 264 bp, Glycine max
  unsure (1)..(264): unsure at all n locations
tcgcactcatggaccccaaaaacgtgatancttttctggttcncagncncgattacggggccttgttcactgacctcaggactcggcttatccncancctctcngtgttctccctatgcatcttcggcacctcctctctttcaaccatcaccgacctcaaccccttcgtcgttattctctccgggggcccccaatctctccacaccccggacttcctctccccccccatgaatcaattttattaatattatatttttttaagtc

SEQ ID NO: 68908 - DNA, 326 bp, Glycine max
  unsure (1)..(326): unsure at all n locations
tacggaaaatggaatgggatttgtttttactttttgctgctaggggttatnttttgtctgttgattacactttcaagcaaatttgcttttaccgcgtttgattctctgttggacttttcgttcttttttttttttcctatattttatttctatctctttatttttttctttgtttctttttatcttgtttcttttttctcttttttctcattctttctctctttttttcttttttctttttcttttcttttttttcttccttcttattttctctcctttttcttcatttcattctcttttctttctgatctcttactttctatttt

SEQ ID NO: 68909 - DNA, 274 bp, Glycine max
aagcttgccagagggaacttcctttaccccatgaatacagaaaccagaagctaaaattgtgagtccaagtataggagcggtggaggcctttaaacaccaactaagtaggtacagatagcactacccttcaaagacactacatcaacatgcaaagaacaacatcatatctcatagtcaagctaggaaattgtcctctgcatcctctgctgcggtttccaacaaggtcaagagaaccaaagaagagcatatggcgaaagtcatccaattcaattgc

SEQ ID NO: 68910 - DNA, 147 bp, Glycine max
  unsure (1)..(147): unsure at all n locations
gcaacgccttccgctacttcttcaaggctcgcttcaaagttcttaccctcaccanngaanagtgctncaggggcatatctcgcagccatgtgtattactcttcataagtttacttgtctaccaaaatcacctctgaaaattagagac

SEQ ID NO: 68911 - DNA, 261 bp, Glycine max
  unsure (1)..(261): unsure at all n locations
ggccgaccgacgcgtccggctcttaatctctccctcttaccctttaccttcttccattctaacccngtcctcaaaccctgagccacccattttctgctccggcttcttgatccccaaaccccattcacgcttcttcaaaaccccaccaaggtgcgttttcactcctgcctttccaatcccctccaaaaacactaactttgggtcccagtttctgaaccctactagcctcaccttttagctcttcttcctccatactttttc

SEQ ID NO: 68912 - DNA, 338 bp, Glycine max
tcgcccacgcgtccttagcagataatatttttgatgtgtggctgatgaacgattattgggacgtgtttttttgggtgaggcattagattttttttttttttcattttaattacattttctttttgttttattttactttttttttttttattttatgtctttattttttttttttttttattatttctaattacaattttcttttttatttttttccatatttctcttttttttttctatttattttttctttattttttatttttatactctttttttttttttttttctttttttttttttttttctattattattttttctatttttatattttt

SEQ ID NO: 68913 - DNA, 276 bp, Glycine max
tcggccacgccttcgggcaggaacaccccggcctggtttggatggggtctctgtacctgcagtcccactgatcaacgtgctggggtatttttcacattttgtgatcacggaggtattgcttgtttaccttcaaagaaagttattcacaggggttctgtttaagcacaccactttcacagtgttctttaacatttctttgttcaccactggattaactgcaactatgctgttatggccaacaatcaccgaacacattcacctgacacgcaatgtgca

SEQ ID NO: 68914 - DNA, 287 bp, Glycine max
cttgaatggatcaaactgtacgtgctaccattctgattctacatctgttgtaggaggcgggggcaattcttcttgacggaatggcaaaccatgcactatgtaattacaaagagtatcacacacatttagaccattgtcgtattcatcaacaacatggaatcaaacatctactttagggccgcatatgctctgacctactgaaggaatttctaactcaacgattgaataccatggatatcttgcatgctcttacatacctgaaaagatgattcatacaccatctacat

SEQ ID NO: 68915 - DNA, 469 bp, Glycine max
  unsure (1)..(469): unsure at all n locations
cgaatcccgggcgccacgctccgccacctccggcactgggatcgaacagatctctgttccganaccaccgcctttgccaggggtcatgaagtccttttatctactgtttgtgattaacagtaataaaattaattcagttcttttcattcaagttaagttgttccattctttgccaccttttgccgccgagtgatcgaaccgaaccaacgaaccaggctcgcgagctgcactgcaacaagcttttttgcgcatacaagtttggtgacgactcacttctgcaccgagccacctccaactacactttttttattattattctctgccggcgtggctttctttcttcttttataaaagtcatatcataatcataataatattacatcgagtttttggagagaaaaaaaggggtcgaacgagtgtatcagaacatacgtgaagactgcgaatataggaacccaatcctaattct

SEQ ID NO: 68916 - DNA, 452 bp, Glycine max
  unsure (1)..(452): unsure at all n locations
taaactttaggtatattcgtcaaaattcaaccaatttttacaatcatcttggtcactaagtgacatctgatgcccataattgtacaatgcacacggggtttgttagggaatggtatgtagtggatctcggttgagttgaacctgcttttggttctttcttgacaaatcacactttatcttttttccctattgttcttgtaatttgtgccttcagaggtcagagaatgttcttatgaattattataactcatcagtcactcatgatgagtgccaagtagcagatgataatgaggggatgatgattattatgtgctactgatgattttcatgttttactgcagcactatgtcggttcaatctggtacgggggaacccactagataaatttatattcactatatctntttgcatggacccattgaatgggtttttattcataatagctcttcatg

SEQ ID NO: 68917 - DNA, 494 bp, Glycine max
  unsure (1)..(494): unsure at all n locations
gaccgcccgaatcccggtcgaccacgcgtncgccacgcgtnctgccacgcgtncgagaccaatcatatagctgctggcaggcttattttgagcgtgaagatcttgaaaaagagtccccaagagcagacatagagaggctgattctggagactggtggtgtaaaatccctaataggatgcttgcatgggatttcaatcatgcacaaagtaaagaagggtgacatgaatctgagcaaggatgtgaaatcagaagaaggtgagagaatgtgtcccatacctgatggattgccaaaatctgctgatgaacttanggaagaggagcaagcaagaatgcctgattcaccatacactaagcttcttaggaccatgggcaggcaccctgcatggtactctcctgcccctgaccatgaaacagattgatgaatgatgattcccatacatactaagctcaaagggaatgaatatattctctttgagggaacaagtaataacata

SEQ ID NO: 68918 - DNA, 120 bp, Glycine max
  unsure (1)..(120): unsure at all n locations
aaaaaaaaaaaaaaaaaaaaaaaaaaaaaaaaaaaaaaaaaaaaaaaaaaaaaaaaaaaagggggggggaaantggggggggtccgtttaaaggatcaaagtttatgtaacggggggggg

SEQ ID NO: 68919 - DNA, 73 bp, Glycine max
ttaaaggggccaagcttaacggcgcctgccttcgacgtcataacttttttataggggcacctaaattaaatta

SEQ ID NO: 68920 - DNA, 325 bp, Glycine max
aaaaacgggggcggcccacgcgtacaaaaattcatacacttccacaaaacatttaattttcaactcacaataaacaatcagcggctgcggcatacttaacctttccacaaaacaccaaacaaaaattacatctttttttgtactttcacctatattcacgaactgtaccatcctcttatttaatattatcgtatttcattttaatctacaccacacccccaatactttgacttttaaccaaaaaccaactcttttattaattgccatttaaccagttactattatttcaaaattcattccccacaatctgttaagttacccttca

SEQ ID NO: 68921 - DNA, 442 bp, Glycine max
tgagaaccaaacacgacgctgcgccttgtgtagttgcccaacgccgcgccaccaggtttttccatcaaaagcttcttcttcttcttagaatgtttacttttatgctttttctgtggtatgctatctatcaatctcgttgtatgccttttctttctgtttctgctttctctttccataggatatggtgtttcttcaattgattctgctctaagattctctgtcaacaagtttctttcatttaggaaccgattcatgcctctttaggcacatgaacactttttttttttttttatttaggattttttcaatgaaataaacctaagcatattttgagcagtagggttttttttttttttttatccacaggagtctaagatagtttaaggggacttaacttacgcaccatgtgtttgctcaatcaattgagttagacctccttaac

SEQ ID NO: 68922 - DNA, 440 bp, Glycine max
agaaaaaagtcacagcaaagcagaaaacagattcctcaaattttagtctcaaactaaaacttggtatcaacagaaaaaaaaagaaccaaattttctatgggaacatccatatggaattgaaatgaagggaaggcataaggaggagaagaacttactttgcaggtggttttgcagggtcgttggctcgagaaggaggaggaggtgcagcagtggtagtcttctctgtagacgcagatgaaggtgaatctgaggcagagtcatcactggaagaaagattaagcttcaaatcaacagaagcagtttcagagaagcctctctttccaccactgcccttgaccgttgttgactcgttgtgatcactcgcagacccgccagggaggccgagtcgcaactcggtttcttcgaagttaatcatctcctcgtgcttggttttcttttct

SEQ ID NO: 68923 - DNA, 334 bp, Glycine max
tgctctctgagcttgaaaaacacgctacgaccggattctttcttttcaacacccgaattcgggttgactctcttgcaatctcattcctcaagatcgctttcgctgcttactcaggaattatgtcttttccgcggcattatcaagctgaagatcggggtctacatattggttactggtccaccgttgatggaaacacctatcgtgaccacaatccgaaaagaagcatcgaacaattattataacaagaattgttacattgacaatgataaccgcacaactatggctgaccattttaagttctacaatgctgatcatgctaactatgctagatatg

SEQ ID NO: 68924 - DNA, 395 bp, Glycine max
  unsure (1)..(395): unsure at all n locations
accaatcgtccaatttattgccaagcagcgggcatagtgcaggtgatactccaccacataagcaatctgcatacgatgaggcagctgaatatcaagctatatctgtcataatgcctgacctgccttttgagcaactggttactgaaattcacacgaggatccatgctacgtctgctaccatggataccaacattgacagcaacatgtcaggtgacattgctccaaccaaggatccaagcggcaagcttgatgacatagatcatgcgatcgatcaaccgaacattttgattaatcctctgcatgctgcacaggctcattctcaggatagctcgacatctgctcactaaactgcanactgtactgaaactgacatagtgcatgagctgctgcatgtc

SEQ ID NO: 68925 - DNA, 299 bp, Glycine max
  unsure (1)..(299): unsure at all n locations
cttattccangatctatttacattacctgcataactaactcgagcagtattactaaagagggcggatgagaaggaagattttgggttgcgtctacacttgtgctatcctgaaaaccctggaacttatattgatatcattctagtttgatcttatgattctaatcacttgcttcagaaaccctatcggcacgaccctgttagttcttaagcttgaatatcactcttttatggaatccaagtgaaccgtgtaccttttgcggtcgatagctaacaggaatcttgtgtgtcatctgcaaaca

SEQ ID NO: 68926 - DNA, 437 bp, Glycine max
  unsure (1)..(437): unsure at all n locations
acggtatttccctacctctcccttcaagatgcagatcttcgtcaagaccctcaccggcganaccatcacccttgaggtggaaagctctgacaccatcgacaacgtcaaggccaagatccaggacaaggaaggaatccccccggaccagcaacgtctcattttcgccggaaagcaacttgaggacggccgtacccttgctgactacaacattcagaaggagagtactcttcacctcgtcctccgtctccgtggtggcatgcagatcttcgttaagacactcaccggcaagaccataaccctagaggttgaaagctccgacaccatcgataacgtcaaggccaagatccaggacaaggagggtatccccccggaccagcaacgtctcatcttcgccggaaagcagctcgaggacggccgcaccctcgccgactacaaca

SEQ ID NO: 68927 - DNA, 440 bp, Glycine max
cccacgcgtccgatatatatatatatatatatatatatatatatattatttaatttcacacggaaaagcgattatttaattttgttggaattttgaatttataagtatgcagtagtatttaatatattaagtttttttcttcttctcagaaacgccccttcatattattacagaatcccctaaatgtgggttcgacgccaggcaagggtttcaaaaacttctatttatattacgggggattattattttcttataggttatgcttttctcttgtcataagccaagtaaaagtgctttttcttctttttttgaaagattgattctgaagttcccacaacaaaaacacaaactttactcgttccagaaaaggcattggtgcagatcgggggattattatcaatatatgattagagacaaatctacaatataataatgacatt

SEQ ID NO: 68928 - DNA, 351 bp, Glycine max
gtcaaaacctgtgttaaaggtgggtcagccatactttactgacactctctatggcaatctggatcaaatttaactatggctactgaagagggtttggttgacgaaatgacttaccataccgcgatcactactacttatcccctatgtctgcttggccatggaatcaccggcctggagattcacttcatccatgtgaaattctattcactcagggttgatttgtagccaaaactaataagtgacttggaccagtataaaggataatctgcaaaggagctgtgcgataatgaatagtgtttcaatgctctaatttttgactacgtggagaaacctattagactggtagtgatc

SEQ ID NO: 68929 - DNA, 374 bp, Glycine max
tataaatgtagttgtgaaagctaaaatgaggaagagatggcagatgttggagaggaacatcgtgatagctattaaaaaacctctattacaatttgagtatttagatgctcaaagtcttcgaggcttaaactggtttgattcctttattttgttggttggcatgtgtatttagttctcaaactctaaattttggtcattaactatgaatgtctttacttgtaggtatttctttttcggcatgcatctgcgtactataatctatgttaggcgcatgttaaaacttcaaaacgcaatcttgctacctgttatatgcgtgctgggaccaaactgcttcatgccactttctgggatatatatttcgttgctattcttat

SEQ ID NO: 68930 - DNA, 442 bp, Glycine max
tttccttctccttctccttgcctaatcgtttcatttctcccacgagactcacggatatcatgctcatgcttcgtctcagtctcacaggacccaatataaataagaagcttctaaatctcttcactatctgggttagtggaagaattctgtggtgaagtaaagtgactaattgccttaaatcagaaacgacatcaagttccatggaagaagagcatcaatgttctagaagtggtgaagaaccacagacacaggaactggatggagaagatcaacagctgcagcatcaatgccaacaacctggagctgaagagaaacttgtattgcaatttatggattcaatggataactacctatccctctttgatgtagtgtcctccacccttcgacagggatggtttgacttagctagtgctcgacattccatgggtgcttctcgcattaa

SEQ ID NO: 68931 - DNA, 446 bp, Glycine max
gactcgttcttcttcgtcgttatcttcttcttttgttgtttgtgtgtttgttttttctctcacctgaaaatgtcttgctgcggtggtaactgtggttgcggaagcgcctgcaagtgcggcaacggctgcggaggctgcaagatgtacccagacttgagctacaccgagtcaaccaccaccgagaccttggtcatgggagtggcaccagttaaggctcaattcgagagtgctgaaatgggtgttcccgctgagaacgatggctgcaaatgtggagctaactgcacctgcaacccctgcacttgcaagtgaggtgttggagagctaaagcttcaagcagaaatggcccttagaaataatgataaaaactatatgtagtttcaaaacttcaaaattatgtagtatgtattatgttgcactctggtgttttgtgtctaaacaaacaccct

SEQ ID NO: 68932 - DNA, 447 bp, Glycine max
cccacgcgtccggtttgtccatatccatatcaagactttaaaattgtgaagtaacaagaaatgtgtttattatccaaccaagagaaaaatgataatatttttccctaatgctgttatggataatttatcttgttggttttttgtgtagtaagtatatttgtaaatgaacgagatgtataatgtttagaagcttcattaatattttattcttgggctctatatatagagcataagtgcaatacaaaaattcaaatactaacattatgctaatcttataatcagactgataatttcctaaatctaaatgataagatcatatccttgtctttatctaaacagtatcttaaaacaacctaaattcctaaaaataaattcaaattcaaattacagtcatttaggcatatgttttcattatataatttacaattacttgaatgccattgggct

SEQ ID NO: 68933 - DNA, 437 bp, Glycine max
atttcttttgttttatttttggtgtgggagtgggatggatgttctaccatatgtattacaggaattctttgatattaatgacgaatcattaattttttcttacagtaatatagttaaatcaaagttatttaacttgactacgtactgagaaattaattttaaaaatgttaagttaattgtctgtttcagttgatgatataggcatattgtatgtcctatagttaacttacacattagttatatatctcatcaaaatgtttgctgtcaccacacatttaacaaaaaaaacaaatgtaaagaaaaggctgaaaattgaaagttcttcatttaacaataaaaggccgaaaaaggttaaaataatatttggataaatacatagtgctgcaatagtaatgcttctctaacatctaaatcagtggcaaatacagagaggtaac

SEQ ID NO: 68934 - DNA, 93 bp, Glycine max
cccacgcgtccgcccacgcgtccggtttgaatgaatacttttgtagggaaattcttgtagtggcatgtaatctcaatcttgatgaattttgtc

SEQ ID NO: 68935 - DNA, 439 bp, Glycine max
acgcccacgcgtccgcccacgcgttcgagtccttgcattgtacattatccaaaagggacgagtggaaatcactttggattctgatttattgtcttgtccaaatgcctacagcctcaagcctgacatccaaagtgaggatgatgtacagagcggaaaagaactgtcaatagagaagcctgagggaagctattttggtgaatgggcccttcttggtgaaaatattggttccttgagtgctgttgctgtgggtgatgttgtatgtgctttactaacaaaggaaaaatttgaatctgttattggctccttacaaaagatttctcaggaagatcacaagtcaagggattattctagaaattatgaattttcatccctcgataaggtccagctctcagatttggagtggagaaagacactatattccactgactgctctgaaata

SEQ ID NO: 68936 - DNA, 420 bp, Glycine max
ctgacactttcggccccacggactgtcactcacatcaccaaagaaattaaaaggccttctgggggttccagattaatctatgcctctaaatacaatacaaagctgaaaaaacgcaataattaccatacaaaatcagtataattgtaaacagcctgatggatcactatggttctcctgaacgaagcttgtcaatgatcccaacccacaaataccaatcccaatcgaaccaggaccctaacctctttctgcaacaacaccaacagtttatccagtcacaaccttttcaacaagcactagcgcctcaatctccatttcaacagcagcagcagcagcgtcttctacagcaacagcaacaacaacaacatccgcagaaccttcaccagtcactggcctctcactaccatctcttacacttggtgg

SEQ ID NO: 68937 - DNA, 447 bp, Glycine max
  unsure (1)..(447): unsure at all n locations
cccacgcgtccggacgaggacgaagaggtaatgagtctaaagttggaaactgagagtttgagtgtacccacaaaacggcaatcaagaaggaacacaccattgcctagcagaattagtggtgcatcatctccttctctgcctgatcatggcattcgaaatcatccagagccataaatcatggacaccaaggaatcatatcattattttggaccgaccacaaccacgaccacataggctagtaggatggatagatgaaccatggatgtgtgcatatgtaacataaactgagaaagcaagctagtgtgatcagcacaaactgtgaggtagagattattattatttcgaattttgttaatagtgaatttgttcccttacaccacggaatgctgtaaattatccaagagctgaatcatggtttagatcgnggtatattttttttttttcttt

SEQ ID NO: 68938 - DNA, 316 bp, Glycine max
atcctatgaacactcattatcctcttctctaacaaagccatagtacgacacttttagttcattagttctgcttatcctatggataccattcgtaccaccaccatcacccgcgtgcaacaaacaaccccaacaaagaaaaccaagcccaaaaaataaagcctcaccccttccatacgcaacacaaacaccaaaagtgggctacatactaaaatagtgtatttgctgaaataaaatgtactatagatacagattactcgccatacagtcaacaaatgttacattattctattaaaattatgactgttaattatttttc

SEQ ID NO: 68939 - DNA, 438 bp, Glycine max
cccacgcgtccgcccacgcgtccgcccacgcgtccgtgttgttgtaactcgttcttcttcttttgttgttctgtgtttgtgtttgttttttctctcacctgaaaatgtcttgctgcggtggtaactgtggttgcggaagctcctgcaagtgcggcaacggctgcggaggctgcaagatgtacccagacttgagctacactgagtcaaccaccaccgagaccttggtcatgggagtggcacctgttaaggctcaatttgagggtgctgaaatgggtgtgcccgctgagaacgatggctgcaaatgtggaccaaactgctcctgcaacccctgcacttgcaagtgaggtgttgggagagcaagcttcaagcagagatagcccttaattaggaataatgataaactattaatgtgtagctaaaaacttatgtattatgtct

SEQ ID NO: 68940 - DNA, 413 bp, Glycine max
cccacgcatgcgcccacgcgttcgaccacgcgtgcgtgttattgtaactctgggttcttccggtgtggggcagtgttagtatctcactttactctctcctgaaaatgatttgctgtgttggtcactgacgcctcggtaactaactgcaagtgcggcaacagctaccatacgctgcaagatgtacccaaacttgagcatctctgagataaccaccaccaataccttggtcatggtagtggtacctgttaaagcacaattactggatgctgaaatggatattccccattagaactatggttgcaaaagtagaccaaactgatgctgcaacccctgcacttgcatgtgaggtgttgggagaccaagctttacccatatatagcccttaattaggaattatgataaactattaatgt

SEQ ID NO: 68941 - DNA, 431 bp, Glycine max
  unsure (1)..(431): unsure at all n locations
ccggnncggaanaaccgggcttcaggtcgttgccgccctctctctctctctctctctctctctcttaccctcctttcaaccaaacccttaacactgtcgaatctcacttctctgtttcgaatctcgttgaagtgcagagctcactgctcttcaccaatctcagatctgttactcgaaaactctattcatggcgcatggagcgtacctttcgattttcttttaattctagggattggatgctaatcggatttgagttttttattggatttttaattggtgttgtggttttgaggcattgatttgacacgaatattgagtggaagctgaagtcaggttcgagttacttcgtgaatgctgtgtggtaatgttggttatctggtggttaccacgtttggattcccaagggctctggtctttgattttgatgggaa

SEQ ID NO: 68942 - DNA, 280 bp, Glycine max
cgcaaacacaataattgtatagtttttagtctgtcgagaactcattcatgatctgtgatatttgttaaagagagagcgacagacagagagagagaggatgggttgttgccaatcatctatcttgctgatagtgggagagaggtagactcaccctgaaatggtgaaggaaagggtaaaggaaaaagagcaagcgttctgtaaccactaaaggcatgctgctgtatgagagctcgacggcgagaaagacgtggttgatttctcgttctcggtgttctcactt

SEQ ID NO: 68943 - DNA, 391 bp, Glycine max
cccacgcgtccgcccacgcgtcctttctatccagaaccagacctcgttagttgcgtgtcttggattcttttggtggatcaataaatgttaatccttaattgttaatattttgttagtgtggaattgtggtaactaaatgggtttttcaatttgggcttagatacaaccatggttggtcacactgtcgcagagattttggttttgtttctgattaagttcacgttggatcaagttgggttcaaattggactctctatgcctacttgctctgtgtctgatattttgcctgcctttaacgaattaagcttcaagagtcaacggcgttgcattataaaaacgtaaaaagagcatggaagggagagaagcaagcaaacaaaactgatcgatcaaat

SEQ ID NO: 68944 - DNA, 371 bp, Glycine max
cggacgcgtgggggggatgaaaaacttgatactgaagaggcaaggcgagggagaaaaacagagcgtggattctctgcttctggttctgcaacaaggaagccatgcctcaaaaatcgcatcggctagggttttgaaatcagtcgccgtagacgcggaatcgaagctgctgttagcggagaaggaaggtttagtatccgaattgctgaatctaatcacgccggagaaagatcctgatcttattgagaactgtttatcgtgtctggtttcaatttcgacgccgagacggagcaagatgaagctggtgcgtctcggaacggtgaaggtgttctcgaaccttctttcggctccgggcctgagcgtgtcggtgaaag

SEQ ID NO: 68945 - DNA, 168 bp, Glycine max
gagggtcgacgcacgcgtacccctacgcgtgcggacaaaatgcattctgcaaaacgatttagaatccaaaatctcgagttgggaacataaaatggtacctttggatccaaatactttatattaatcattattgatgaatctcaactaggcctaccgtccttgtgtaag

SEQ ID NO: 68946 - DNA, 171 bp, Glycine max
cgtctgaatatagcaacttgaccaagtgttaatgtgccggaaaatcttacagaaaaaaataataataatcgagaaactatagagaaacccttatcacagaagggaagtatcatgagaggcaaaacattaataaaaaactttgtatctacatgattccgctaattccgtgcg

SEQ ID NO: 68947 - DNA, 359 bp, Glycine max
atcgcattgaatccattttcgtcaaacataacataacatgtctaatcatcatcattcctccaatcccttcgcatcatgctcatgcactcactccgattccgattccgactcagtgagttgcttcgtcaccgatctcttcgaaactcgcctatgctcctgcgacgacgacactgacataaaccccttttccgacgtcgtttgcgacctccaccgtacggagcatgtgttagggttagggtttggcgttgaaattgatccccatagccaaacgaatggggataatcatcatcgtgatcgggttttcgatgctgatagagttttcaatttcacggtgggggatggttcgagcggggttaggg

SEQ ID NO: 68948 - DNA, 297 bp, Glycine max
tttacgcaaacataacataacatgtataattttcataatgactccaatcccttcacatcgtgctaatgcactcactcgggttccgattccaactcaatgagttgatacatcaccgatctgttagaaactcgcctatgctcctgctacaacgacactgacataaacccattttccgacgtcgtttgcgacctccaccgcacggaacatgtgttaggattagggtttggcgttgaaacagatccccatagccaaacgaatggggataatcatcatcgtgatcgggatttcgatgctgat

SEQ ID NO: 68949 - DNA, 252 bp, Glycine max
  unsure (1)..(252): unsure at all n locations
aaaaaaaaaaaaaaaaaaatttttaattttaaaaaaaaaaaaaaaaattcgtaatgttgaaattttgaaattggannaaaaataaaataaatattatttataaatttttaatatattatttataataaatttttaaatttattaattaattttattttttatataaatattatattattatttattaattattattttattattatttttaataattaaaaattatttttttttatttttttatttattttt

SEQ ID NO: 68950 - DNA, 420 bp, Glycine max
taatatttttatataataatatttataatattaaaaaaaaaaaaaaaaaattgtaaattgttaaattttagtagtttttatttaaaaaaaaattattttatttaatttattttttatatttttatttattttttaaatttattaatttataattttattatttatattttattttttttttttattttataatattaatttattattttatatttatttatattttttaataaatataaatattatttattttatttatttaatttttttttttttatatatatttatttttttaatttttaatatttattataatttattgttttatttttattttatttatatttctttcaatttttatatattttattttaattaatatttatttttttataaatttatattatttttttttttttt

SEQ ID NO: 68951 - DNA, 292 bp, Glycine max
cttctcttgaggacgaacaagctagcttgattgcctagacaacaatttgattcacattttgcaaattgaagtagcttgcttaatgtactactactatatatgtgcaattatttgcaaattggctttggtccagaaaatgatcaccaatgttgtgatcatgtgggaaatcttgtgtgatatgtattagtgtaatgcttcaaaaatagagtgaacaatatatgtgtagttaactagttatagatattggatagagttcttcatccatttgaataaaggacttttgccgaactac

SEQ ID NO: 68952 - DNA, 140 bp, Glycine max
taaaacaaacaaactaaattcttttacattacaacaaaaaaaaacacatctcgcttcctttaaatactagccccccctcccacaacaatataaattcaactattaacacaataacctttccccacaaaatcatcaccaat

SEQ ID NO: 68953 - DNA, 280 bp, Glycine max
cgcgtgcgcttttccttctcacagtgaaaagcatacatttgaatgtgttacatccaccatccaacagcgtgacgtgggcacttatgtagattcataacacacaccgccgtgataaaaaactccgcgagatcctaattacgcactgcatttctatcccattcttcccctatcctagacaacaacgtgcttatttttctccacaggcgacaaattcctgaacgaaattactgtggatgtggataaagacaggcgcagggaacgaaacgagcgtatgcgcctc

SEQ ID NO: 68954 - DNA, 57 bp, Glycine max
cccacacaatcgaccacacttccaccaaatcttacattataacactatttaaaatat

SEQ ID NO: 68955 - DNA, 448 bp, Glycine max
ggaagagagcaaatttgcacacctacaagtacaaggaagttactttcttcgtttgatggtgaattatctcattgttgttcccaacatgtttctcatcacaaggcatttaggtttggagttacttttaatgtgtgaatcaaattaaggtttctgacaattttgtactgaaaaagaaaatttggaaaattgtgcaaaccaggtattgaaatttgtagtcaacaatcactaatttcaactataatacactgctatttatgcagataattatgtggatgtaccatgattagataagattactaacctacaaaacttcggaaacctttgcaacagcccaattgtcttctattgtttgtcagcagaaagacatctgaaatcacgtgtgaaccaatatggccatacatgaaatccacacttacatacacattccttcatggctagaggaacacct

SEQ ID NO: 68956 - DNA, 360 bp, Glycine max
ggaactcatatacaataaatataaagctttcttgcctgaatgaagactacatacataggggggtacatgcaataagaccgggatatattggcaaccgataattcattgacacaaccaagacacctttgcataaaacggaacttaaggccgtcactaatatactgactacatggacaaacttcgtatatatttactgagggtcgctttattttaaaatataaatgattacatgctttgatgataaagagaggccgtgatacatgcacgaataaacacatatactattgtagaatgaatgctataataactgtcgcataccaccatcgttgtttgtttcattaattaacattctttatgcgt

SEQ ID NO: 68957 - DNA, 378 bp, Glycine max
cgcgtacgatttatttttttcaattccgacttttattttttagaagaggcaaaaacaatcttgtaacggtaaaattttacactggcactaaaataccttaattttgattacaaacatatatttatataaatgttatttaacttgactacttgctcagaaattaaatctaaaaatgttaatttaataatctttttcaaatgaatatatactcatattgcattccctatacttaatatacacatttcatatatatcttataaaaatgtttgctgtcactacacattttaaataataaactaatttaataaaaatgctgaaaatttctagaatttttattttaaaatataatgccaaataaggtaaaatatttttttttta

SEQ ID NO: 68958 - DNA, 339 bp, Glycine max
cccacgcgtccgcaccactaggaatggaagtccagggcggatacctgatgatctaaactggggtcacatagattatggctgctggctatagacatagctgagcgtagtgaacttgatagcacacctagcggcgtctatgataggtacatataacagacccgagggaactctgcgctgcaaagcgcgttaacgggtacattgcatgtagtcacactatacatcacataggaagttcacttcactcgtacaccagtttggcacctacactgaatgctcaagtggcagatccaagcatgaacgacgtagaaatgttatgataaccagagctattacgtgtca

SEQ ID NO: 68959 - DNA, 388 bp, Glycine max
gcgcctacgcatgcgaccatacggacgaaccatatcatcatcaattcctcccaatacggctcgggctggggcgccctatgccgcaaccacacttccaagatccttcaacacaaacgcgccatgtgcttttactgtacccgcaattgtgtcctacacaccctgctaacacgcctcatatcatattcatcaatccaacgattcaataaaagtgttagaccacttgcaatacttcatgaaaagtttgattgtgtctatgatcttatgtgaaagactcgatgatgggaaagaaagagacattgaacaagtgcaatgacaaatgctcctgctgattataaggttcaatgtactcaaattttggcccctacaaacgcacgttttatttttcaaa

SEQ ID NO: 68960 - DNA, 103 bp, Glycine max
  unsure (1)..(103): unsure at all n locations
actgtgtcctgcaaaatttatagttttaatataccaaatattganagctgatttggactcggttatatatgactgtttcccttatctaaaaagcaaattccgt

SEQ ID NO: 68961 - DNA, 322 bp, Glycine max
cccacgcgtccgctgtttacgctatttatcttttagcactacgatactcatagaatatgctggttgtctttcaacctggtgaagggatatgttgtaactataaaatgagtcactgtctgcgcttagttagaagatattagaattatgcatctatctgtcttgcaagatgtcctgggggcatgaaatatgcacatgcgatgtttatacaactgaatattctgtacgaatttctatcctttggaaataaatatatatggtctctattgggtgtaataacaacttgatggaagaatcattttatatccgctatttgtacgaacaa

SEQ ID NO: 68962 - DNA, 330 bp, Glycine max
  unsure (1)..(330): unsure at all n locations
cggggtacctaatatngaacacgaatcgtttctctcatctacctttgcacttgcatgacaatatcgcgaactgcgaactgcatctcaagatataacatatatactacatactatatatactatatatgatatcatgtattacattcatgcgtcacaccatacgataatgtttatgtaattacataggtagactggtgtttgaataagggtacgttggtaagttataagttgttcgtcccatatatgtgaagaagcacggtttaggcagattgttgttcctgcgaattctgacgattaccgaggaagagcgataaagcgataagcagcaac

SEQ ID NO: 68963 - DNA, 151 bp, Glycine max
cccactctttcttgttttgatgctgtgctttcactgaaaaaggatctctatctacgggggagcggaataaaacccttctctctccaattaaaagaatggcttcatatcggaaacttcacacttttgatgatgtttcaaaccacaaccatac

SEQ ID NO: 68964 - DNA, 228 bp, Glycine max
aaccataccaatgatttctttctcatcatttctatcaatagtttattatgtcaccccttttattgaatatcatcccttacgctattattttattttatctacaacatttaaagatacaaccaatgacttttaaaaacatctcaacatcattctcctttaaattatattgaaaaacaccacattctttaaatttattcaataaccctcccactaaaacggacctacatt

SEQ ID NO: 68965 - DNA, 136 bp, Glycine max
cccacgcgtccgcgccctttttttttttttttctcaaatagtccacctttccttgtgaagagggcataacatgtgcttctataggtttatctactactattgcaacaacttttgaaggattagtttcctcctttgc

SEQ ID NO: 68966 - DNA, 159 bp, Glycine max
acacccttccgaaataatttattcaattccaaccttttaaatgacagcgatcaacctaacaatccaaggagggaaatatacaaatcacaccctcccttcatacttctcaaataatatcaaaataaatcgccttctaacatcccacttctcatttattat

SEQ ID NO: 68967 - DNA, 232 bp, Glycine max
cccacacgtacccacattcatagcttaaatttacaagtgaacacactctttttcgggcatggtagctatcactcagcagaaaaatataaacctctacattacttctattacaaaacgcatctattgcacctatcttatatgtatttcaccaaatcaacacaaacatctcagtcctacacaatgacttcatcgttccccttcatacggataaacaagtacagtacataaggtt

SEQ ID NO: 68968 - DNA, 242 bp, Glycine max
aactcacatatcaaaattgaaattattaaataatttgtctgctattcattctctcgacagcggtggctactaccataacagatcatgaaccctcatcacttgccccgcacgtgctcgactacaccacctctacattctactactacacggaaaaagataacgatgatctttttcacgatcaaaacaaatcctccatctaatggctgcggttaccaacggttaaccattactgcacccaacct

SEQ ID NO: 68969 - DNA, 317 bp, Glycine max
tcccggaaagtcacgtgcctcgttcaagcgcgtgatggatctccgcttcatggagaaaaacaacgcttcgggtgcgtcggtttacgggataagcgtgttcgacccggagagcatgacatgggaccgggtcgacccggtttcggattacccgtccgggctggcgctgttctgccagcttgcgagctgcgactggaagcttgtgctgatgggagggtgggaccccgcaagttacgagcctctgacagcagtgtttgtgtacgattttctcacaatcgagtgggcggcggggaaggacatgccggagaagcggtcttttt

SEQ ID NO: 68970 - DNA, 379 bp, Glycine max
gcctcccgtacctaactgtacagctttacataccacaatatcacactctttcttgaggatggtgtccattatgcagctgtataataaaaactactccatttctacatatggaaaagagctccagtcccaggtttctgagaaagatacttacaggtgcacagtgtactgacaagtaactccgacagagcttgctgtacctcttgttatcgatgatcctgaaatcaacagtaatgcttccattctactcaatgggctctgttggacataaaaaagaagcaggtatgactcaaaatagctacatacagctcctggtaatttgaacaatttccactatataaccacagaccacctccctcacaatgtggctaaatgtgatata

SEQ ID NO: 68971 - DNA, 174 bp, Glycine max
attggtcaatgtgtctcttggaatcaaaggtgtgccagggaattctacttttccaaggttacgttttgtttctttcaaagggtgaaaagcctgaaaattgcatttttccaaaatctggggtcttgcttaatacctggtgcctgggttttctatctgctaagtatctccttgttc

SEQ ID NO: 68972 - DNA, 296 bp, Glycine max
cttttattaaaattaagattttattttagttttgaaaaaaacaaaaaacaaataaggagagggctacaaaaaaaatgggtctgccaaattgcaaagaccaattctactgacgcatccttacgaagttacaaaacccatatattcctaccttaaataaatccactgcccgactttttacaacaagctaacttgaaaaaccaccccgtatcctaacttaaaatctttttataaaatgccttttttgccagatagtgatatagcatataggtccaaacccatctgctttcctaacaatt

SEQ ID NO: 68973 - DNA, 352 bp, Glycine max
  unsure (1)..(352): unsure at all n locations
aggatgatgatttgtggggatctatagctgctcctgctccaaaaactgcaagacctttaaatttgaaatcagctcaaactgatgatgatgatccttgggctgccattgctgctccagcacccacgaccaaggccaaacccttatcgactggcagaggtaggggagccaaacctgctgctccaaaattaaggtgctcagcggataaaccggacatcataaggcatgtaatccaaatttccaaggaaccaaaggaacagtgaaagagctaatcttagtgctagttgcccttttcttatggtggcagtgatcatgttaaaatacaaaacccgnctctatgatatatgaattacat

SEQ ID NO: 68974 - DNA, 91 bp, Glycine max
cgatcccgttactagtttaacagcttaagctttcaagaggtcctccttctttctgcacatggtacacctaactcttcttatctaatacaat

SEQ ID NO: 68975 - DNA, 182 bp, Glycine max
  unsure (1)..(182): unsure at all n locations
gaatttnggttcgaccccgcgtccgccctacttacctaagatttaattttggcttatgctgttaacggacttctttaaagagaggattgggatacgtgcttaacgatgcccctttttgctcttcctgcatgaaatggcatggcaaaatctcttcttgattcacctgtggatccttgtgaagt

SEQ ID NO: 68976 - DNA, 273 bp, Glycine max
cccacgcgtccgctaatatttactttggcttttcacgtggtcatactttatttcgggccagggccttctaagatgactttctcaatagcacttgctgaactggaacttagctctcattcctaacaaaaggtccttcacaacacaatcctcttgctcctaataatgaacccctttcactataatcacccaattcttctccatattgtccaaaccatttgtatatactattcctctttatatgacattgatgacctctgtacaaacttagattac

SEQ ID NO: 68977 - DNA, 300 bp, Glycine max
tcgcaaaaccatccaacaagggaaacattatattattccattttttcacttccacacgggcttgcgttcattccccattttcaactatggcctcttcagctcaattttccaccactttggtcgtactatgtctcttccaattcctagcaggtaatcatttatactcattaatttttttttttgttttaaacatgttgacttttgtaatattcaattccagttcctggatatgcaactgggtgatcttttagaagaaaatgttagctacttgtattaatggtcatgtgttatgtttaacgt

SEQ ID NO: 68978 - DNA, 340 bp, Glycine max
ccccttccactctttacttggggcagttttattaacacaccattgattttatttcaactttatttggaatacggttgtatcgctgactcgaaatttttctgaacacaaatattcatgcttgttcaacctatatttcttttcatcatcaacctatttggaccaaatggttaaatttccctgcaaaaaggtcttggcataataacggattttttcctcacgtgaggttcttcaatattaaaccatccaaatcttcttcatttttaatcaagtttagtcactgtgaaaccctatattgtacctttctctacgccctatatctgaggccactaaatctttcttt

SEQ ID NO: 68979 - DNA, 152 bp, Glycine max
ctgcttatggatttcccctaaacctcccctctctcttcttcagtttcggtgcttttacattttcttcccaaaaaaaaaaatccccacaacaaaaaatggtctttcttcttttttatattaaccaatccttcaactctcccttatttcttttc

SEQ ID NO: 68980 - DNA, 231 bp, Glycine max
gcccgctttctccactttttttagggttttctttaaattggtctctcttttggggggggctttgagttttttgtgaaaaaaaaaattccccaatacgaaaattgggctttgtgccttttttatgaaaaacataaaacctcttccaaatttgactcggggcggtccttttgggtcttaccacgggaaacactgtggaagagaaattctaccaagactgaaaaaccttcttca

SEQ ID NO: 68981 - DNA, 267 bp, Glycine max
ccatcgcttactttcagatcaactcaaaagattccaccaagaaatatagacgctagggttaggttacattagcgttagcacgcaatactttacatatatcgagagcagcttacgagacatgtagaacaacgttgaggagctcattctactgcaagactctgtttaccttatcctgctcacttcatcaaacgtgttcaacaagtacatgaaaaaatctaacagcttcaggccggaacgctcggtgagcattcgactgatgctaagttt

SEQ ID NO: 68982 - DNA, 169 bp, Glycine max
aggggttctttgctttcaagacccatgaagttcttgttccactccttgtgaaggataccttgccactcattcccacccaaaaactttttttattaattcttcaacctcaaggcttccttaatgagaatgatccaaataatacgactatttttgttggcaaattgtatcc

SEQ ID NO: 68983 - DNA, 149 bp, Glycine max
ccgacgcgttcgattagactttagttcaaaaatttaagtccaatcgttgtgtattgctctggctctcataagcgagaatcttacacacttactcctactccgactttgctatctaaactttctgaaccaatggaaagacctattgtgct

SEQ ID NO: 68984 - DNA, 446 bp, Glycine max
attaggggggcgacccacgcttccgcccactcttacttaaaaaaccaatttcattttttcagtatagttgatccgttaatgtagtgtgaatgttgtattcccattcaaactatcttaacttatatatatacattctttacattcttctatcttgattcaaatttatggtttcgattggtgcaaacccaataatcttaatttacaatttaatatcaaaatgacttttccatctctatcaaaacaaatttaaatttaccctttaatcgtataaaaaactattttaattataatataatactatctcctttaatgaatgaattcttatcgattttctcactatcctaatttattaattatatcttctccatcaaattttttactaattataaacccattactgttttaactacatattcatttgtcaaaaaaattctatctttactaaa

SEQ ID NO: 68985 - DNA, 113 bp, Glycine max
cccgtccgaggaagtgaagtttatggctacagtcccgccttcccatgcaaaatttggggaacagaaaaggttaaattcatggtaaacccccattattaatacttcacctgccc

SEQ ID NO: 68986 - DNA, 202 bp, Glycine max
cgtccgcgagacgtagaataagaggattcgtgattgtgcaggcgagggatcgcgctgcggcgttgcctcgtttgtttcgtaccatcccacactcataatcttgctatgcatcaaccggagcctaccactgacacgtacacacatgtgaacgcgtatcgtcccttccatggctcggaagcgcatcctcatggagctcaaggac

SEQ ID NO: 68987 - DNA, 262 bp, Glycine max
ccctaacctactcctcttgctgtcttccattatgttgggaggaatgtccaactgcgactctatgaatgccttttccattcttgctgctaataataatgcctccttcacccaaagtttgatacccggcacaatggtgtaggtatctaaagatcctcacgcgcctatcatgactttaaatgctttttttcaattcaagtaggaaaaaaagaaggtgtttatctatgaacatactgacctcaaatcattgtgtgttgtgggcata

SEQ ID NO: 68988 - DNA, 146 bp, Glycine max
caaaatgggtggatcaattttggacatgaaatccaatatcaacaacaacgagttcttggcaaatcattacatttattcaacaattctaacccttatgatcataatcttacaaacatcattatcaactattcaataaccattccact

SEQ ID NO: 68989 - DNA, 377 bp, Glycine max
cgaactcgctcaggattgcaacagatccaggtgatgcacgatacactagtgcatctactgaggacgtggcgggatatggacagagaaatgctcttaatgttgctaataatatcacagtatcttctgctagaaatgagcattctgagataaattctcatatgggtacatcatggttagagcagtgtgtaacttttaaaacagcgaatatgttgcagatgtatgatactctgacatatgactccataaatagttatggaccatcctttaattataaagaaccaatctgtgtagtagcatcttgctaattcaatggatcaagtttacaagctcaatgatgctgcgcaaaattcaatgcttacttcagatgctaatgagca

SEQ ID NO: 68990 - DNA, 117 bp, Glycine max
tcctccttcatcactaactaccattattatttccaccctcactcactcgtacattgggcgtctatctgaaaattattttatctctgaaaaaactcccgcgtccatctttgctcattt

SEQ ID NO: 68991 - DNA, 273 bp, Glycine max
  unsure (1)..(273): unsure at all n locations
gaaggacggaccattgttggttgtcgcgtgtggaagagataccatttctactgcaagttcggtaaaacgtggagcatctganaatgcttttgatgttcagatacaaaatccaagactgcatctgaataggtttgacatggtgattacacctaagcatgattattatcctttaacttcagaacgacagaaacaggttccttggttccttcgaagttggataactgcacgtgatcctccagattgtcatgtggttctgaccatgggggcgctaca

SEQ ID NO: 68992 - DNA, 290 bp, Glycine max
ggatatatatctccagaatatgcgatgcattgtgaacactcagacaaagctgaattctatagctctagagttaaatccttataaatagtatctatcaagagcaataccatccaccgatccaagcaagaagcattagcatcttctatattagtcacattaattgaaagtgatggacaacctaatggaactagtagataaaaggctaagttcatatttcaattaatatcactttattattataatcaaagttgcactactatgcacctataccactttaaaccttaggctca

SEQ ID NO: 68993 - DNA, 301 bp, Glycine max
cccacgcgtccgcagacccatagagtttcacatagctccttcatcataggcattttcagggttcttccaggcacactgttaccatcaatcatatacgtctcgattctaaaatctctaaaaagatgcagctacaacatggctctgctggttaagccattaataacctatcacaagatctgatttactacgtcgccggaatgattatcgacaagtcaaaggtggtgggagaccagagcatcttttaccggcacaaaaaagatcactttggacccgttgtcaagcttgagaagttctcactcta

SEQ ID NO: 68994 - DNA, 381 bp, Glycine max
ggggaatcctctgtctacacatagaccctatataagaacacatactctattcacactgacatgctctcttctcatactataaaggctacgctgtcttatatccatcaaaaaccaaaaccctaatggcaaagcgcggaagacgcaaccgactcatctaccatcacggtctccgacgcagtttaagacaacgatggcccttatgcaacaggcgccattgccggtcacaaagtacatgacacgaggaaaatgagaaatgggtcccaatgaccatactgatccacctatttaaagatggaagaatccgaagccttgaacagatctacctacaatcgctctagatcaaagagcaccatatcatcaacacgctcgagggttccaacc

SEQ ID NO: 68995 - DNA, 323 bp, Glycine max
gcgaaacatgctctctctccacatagaccctataaaaaaacacaaacctagtcacgttgccatcctctcttctgatcctctaaaggctgcactctcttttatccctcaaaaaccaaaaccctaatggcagagcgcggaggtggcgaccgtggcagcgaccgtggcggtttcggacgcggctttggtgggcgagggcgccgaggtgacaagggccgaagccggcgccgaggtccccgccgcgaggaagaggagaaatgggtcccagtgaccaaactgggccgcctggtgaaagaaggaagaatccgaaaccttgaacagatcta

SEQ ID NO: 68996 - DNA, 62 bp, Glycine max
ccacccacccttttctttttgtaaattggttctttgaaaggaataatatatattgatttcca

SEQ ID NO: 68997 - DNA, 187 bp, Glycine max
atccactcaacccactattctcctttctagcacaacacaaactttatacacatacgtcatctttcaaaacaggtcaccttatcacatacagacacatcacccaccaactcttcactcctaatatctcacaacataaaaccacaacaacacagaccgtaccaatttcacataaaattcatccttccca

SEQ ID NO: 68998 - DNA, 496 bp, Glycine max
  unsure (1)..(496): unsure at all n locations
cgtctcgtgtcagcagcaaatttggggctnnntactccctgtnntgatccnntttattccagatnnatgtgccttggttanntgcgagtatgcncnnatgccacnncagcntanntgaatatnnntagtannncgtggcttcaaagctgggtttgaanngtagggaaatggggaagagtnggttcnaagttatntnnctcttggtggacccatatactnnngctgcagccattagcactttcactggcctggtcaacaaattcctcttggtggcttattaatcttaaagggcgtnnctttaagtttctgggatttcaaactggctaannnactcttctaataccagaacnncatanntataatnnngttgtgtgaactggacaatgtcataccaacnnaattttctttcaccaacttttggttctaattcaaggggacatatannatgaaagaaaagctagaaatnnngtatgtttaccgaattggagtgaaaatt

SEQ ID NO: 68999 - DNA, 471 bp, Glycine max
cccacgcgtccgggcttgttcattctctgtttctgcactgaggcaatttggatcaaattttgtcatctttagtttgggtgattcgccccctactttttttcccctctttgtattttttaaaatattttttctttttttttgaaggtacggttgtcggaaattttttatttttttcatcgtttttgaataaataggcgaatttatgagatgggtttgggtttttatgcttaatttttcgattttgtgcaaacttttaaaatgggttgtggtggagaggtcgaatccagaatttttcattgggttttgccttgagttgactttttggggatgcagaagataactgataaatctgatgataggaccactgggggttgtgaatcaatgcaagttgggaagtgggaatgctcaagttgcataaatatgtagtcatgaattgatatttgatatttagtgtagccttttttttattga

SEQ ID NO: 69000 - DNA, 385 bp, Glycine max
  unsure (1)..(385): unsure at all n locations
cccacgcgtccgctcttcttctcttgcggctagggttttagcgcagcttcttctagatttaaggaagatgggtaaggaaaaggttcacatcagtattgtggtcattggccatgtcgactctgggaaatccactaccactgatcacctgatttacaagcttggaggcattgacaagcgtgttattgagaggtttgagaaggaagctgctgagatgaacaagaggtctttcaagtatgcctgggtgctggacaaacttaaggctgagcgtgaaagaggaatcaccattgatattgctttgtggaagtttgaaacaacaaagtattattgcacagttattgatgcgcctggacatagggatttcattaagaatatgnatactgggaca

SEQ ID NO: 69001 - DNA, 348 bp, Glycine max
gatctacgtaacggtcacgcacgagctgatgccccgagccgatgactcctgaaagcgaatcagacactgatagagtattcgtgctttgacagagctcactagatcgaagacagacgctgctgtgacggaactgcagtccattggcttgggagcgtgcgttcatgccagcttgatgcgcatcatacggcccgaaaatgacgaaccttctggaagcttgcgcacgctggcgataatgtgcatcgcgagggcgctgttgaacaagattaaaccgacggtgatgttcgctgacaagggtcttgtgtggtgcatctattgaatagacctcaggggcatgatcgagaatgtctt

SEQ ID NO: 69002 - DNA, 232 bp, Glycine max
ttttggtactagaaaataataatattacggtaattacaatataatgtacaaatggtataaataattcccatttgtaacaatagaaataaaacagaagaataggagtttgaattgtatttgaaatcatttttgaaaacctgttgggttgatcaaaaccttttattaagaggcttggtaaaaagcgtaacagcaaaaagagtattgcaagcagaagttaaatatcattttatgg

SEQ ID NO: 69003 - DNA, 281 bp, Glycine max
ttggaacagaagagacgaagcatgcgaatgcggaaaatgaggttgaagtgcggcagacgcggaatctgtagaattccaggttggaaactattgggaacagggtaacacgagatccgttaccagtgagcaaacgatgaggctaacgcagtagctggacgatacgtggtgagagaaaatagacgtgccgaagcggaacaatcatggggatcctagacgagcttgatcggatacgagagacgctgataagagctgatgtagatacgatgagaggctcatatgta

SEQ ID NO: 69004 - DNA, 106 bp, Glycine max
cacacgcgtacgttcaggccgacagggatatcagcgctccacttgcatgatctggctgactgggacagaatcgcgagctatagaaaagacgcacccaactgggagt

SEQ ID NO: 69005 - DNA, 482 bp, Glycine max
  unsure (1)..(482): unsure at all n locations
gaatttcacgagtaataatttgattgattttggaaattttaagttttagatagctcatgagattcaattttctcacaattttcatcttattttatgacccatgttgatttgaacataattgacgcagttccatagttttcacgaaaattgaattagttaagttttagtgcttgaaaattcaaaattgtgtttcaaaattaaaaatgatcagattttttttaagaataaactagtaataaaataattacttaagaaattaatttatattttaataaaaaattaaattataacctaaaataaaataaagattatatgaataatttaacttaaattttgctagctgacacttcagctgtttttatataggcgttagtcttctctttggtttggccttttcaaacccaaccctcgcatggtatggttaacgtaacccanatcatatagaagacataagagattcagcaatacattgtcttcaccta

SEQ ID NO: 69006 - DNA, 396 bp, Glycine max
cccacgcgtccggtttttgagaacattcgaataaaagttggacctttgcaacctctagagatcagtctaggaaaaaaggaagacaaagaaccgagtaccaaggatcctttcttcatctggttttatgttgatgaggaaatagctgttgctcgaggcaggagtggaggaactgcattttggtgtcggtgtcgtcgtgccaataactgattgtttttaactttctttccttctctacttctgagttttgatggaaagatacatgtatatatgtaaacatttaagttcagttggtggtaaacatatttgtacttgtttattgtatagctacttgtttgcataaattccaggaactaaaatatgtaattaagttgtgtttcacgataatcctactgtcgt

SEQ ID NO: 69007 - DNA, 372 bp, Glycine max
cggaccgacccacgcgttcgcatgtgctatacttctacttaaactactagttgacttcaacaaccgggatcacgaatttcttggcgacttacgaggctaaactacatatgatcgtatcgatatcttccaattgcgcctgctgatcttcccgaacgaaatcatctttcctttcacgaaccttgaattcatttgagactcatcttcaacagtatatattccatcgcatagtacaacatgctattacgggtaatccattattgacaatccgatgcatcatggcaaacggtataactgattttcaactgtgaactgattgaactaccttgtaccgcagactacaagaaaagcctgtcccggttcaacgaactatgc

SEQ ID NO: 69008 - DNA, 282 bp, Glycine max
gcctcgcgtacgaccattgtatatgtatagtgctacagaaagggtatgggacatgtacatgcgctgtctaatataggacatgagtttagctgctccatgacatatcatctgaaaacaactccactatcgtatatggtaatcaagaattatgcaataatagaactattgatgaataggaggggataatgagacaaattccaacaatcaaacgagcgacaattatgaagatatgcaaggacagattatcatgtgtgcccacttcgataattcactgcaagcgat

SEQ ID NO: 69009 - DNA, 150 bp, Glycine max
ggagcctgtgtaatggcgtagttagttcctagacttgcataattggacattatcagacttgtacctttttccccctttgtttccctcagactaatgctccctttcgtaaatttgtggaacgacatcatgtgccaagatttgcctatggcc

SEQ ID NO: 69010 - DNA, 111 bp, Glycine max
actcggtctcaattcgacccacgcgtacgcgcactcctagtggcaagtacatcccaccctgctttcatcatcccggccatcgcgcttctgggcatgcccctattgaaaccc

SEQ ID NO: 69011 - DNA, 270 bp, Glycine max
acgcgcacgcttagggtcaagcatctatcgtctgatgctctcttcaactcgatcctattgctactaggcatgctcctgttgatacctaggacggattctcaacatgatgcgatgcaatttttgaatgaatggatgacttattgactcatgcgtacaaacatcaggcagctatatcaagtttactcaaggttgcaagaatatactggacatgatcaatgatgtactaatcttgataagtatgtgcgaatgctgcatacgaccagcgtgtca

SEQ ID NO: 69012 - DNA, 276 bp, Glycine max
gcaaactaattgccgttgagctctttgaagagccagcgtagcgaacgacattggtgaatccagaggtgctgatcggcgtatacgacagcaagcagagcacgtacgcgctgtatagggcttttcatgacttattcccgagcccaatctgaaacgctcgtactaatgcgctcgaggtgcatcgacaactatcgactggcgctaaccgctcatatataccaatgggatatttcccaaaggtgcctctgatttgtcagatagtgcacgctgactgctatg

SEQ ID NO: 69013 - DNA, 287 bp, Glycine max
cccacgcgtccgcttaatcttacgccatgaattaaaggaactgaagatcaatacgatgtcaggagcgagtgtccatgtatctatgtagatggactcttaatgagaactacctacacattatctgatcaccgtgctcaccagctcatgcatcgactatgaatgctcgcttctaacatgctccatgttgaagctatgaatatatgattatacatgaagcaagtattctactatacttttggatacctaatttgcacaatgtaactagattacatgaatcgaccaatttg

SEQ ID NO: 69014 - DNA, 75 bp, Glycine max
caatgttgaccaatacgtggacgctctgaacgtgcttgagaatgaactacagctcacatggttcaacataggata

SEQ ID NO: 69015 - DNA, 289 bp, Glycine max
gaacagagtctcctctctacaccttcgctgcgctgcagctcacaactgcaacttcgcacagatatacatatatattactctatggtcacacatagttaattgtatatattactactacgtagctggcttttaataggtcgtatgtaggagtaatcgatgaattcctgcatatatcgatgaagccgatttatgagattgatgttcctgtaatacgactattaccaggaaaagcgcgaagcgaaagcagcagcacctactgctcgagaagccatactgaggaataatgatg

SEQ ID NO: 69016 - DNA, 170 bp, Glycine max
cttacatggctctgcatttgacatttgagaaaggaatggtggaactttcattctgggattgtgtggggtcaagagaggagatagccagactgtcatagtttagataataggtgcgtgcctaacggtacatgaataggtcccatctgtggcaattagctctgcagatgcga

SEQ ID NO: 69017 - DNA, 386 bp, Glycine max
gggaatcttacgagttttggagctaaacacatttgtgcaggacacatatacactttttaaggctatcattttgtgagacactggtgctaatcgatgtctttgtactctttagccttgcctttttcacaatgtgtaccctttgatctaacattgaagatacaactctcactatactgactttattatatattatgcaatccctttgctacttatagctttgatttgtgagaaggacattatctaatcgtgatcaaggcagaacgatggatcatatcactactgaggccactgtttaccgatgctcaattggtccttctggcattattgatcggacaatagctttcaggggtctttattgccagtctatctcacattgtaggcaccac

SEQ ID NO: 69018 - DNA, 463 bp, Glycine max
caaaaccaaattgctttgcactactaaaaaactatcgtcttgctttccaagcaatcactaccatggggaactgcttggtgctgcaagagaacgttgtgaagatcgtgaaaaccgatgggaaagttcttgaatacaaaacacccatcaaagtggaagaggttctgatacaattttcaggccatgcagtatcagaatcactcacagtgctgcggtatcttgagccacatacaaaacttcttagagggcagttatattacctagtgcctctgccaccaccatcaccaaaaaccaacaagaaggtgaggtttgcggaaccagaagtccaagatgtacataaaagcaacgtggttaggattaagctggttattagtaagcaagagctgcagaatatgctgcagagtgaaaggttttcggtcagtaagaatgtgtctctagttcatgaggatttgtcttaaaagggtac

SEQ ID NO: 69019 - DNA, 317 bp, Glycine max
acgcacacgcttgcgctgggatgttaacgagctatttagagcctaggtgcacgtcattctctacggaagctaccggtaaacgtttaacaagccatctcgtagctactactacgaacgttattgctgccataatcaatctggtctgtcagtgcgaacgttgacgatggagctgatactggagggtgctgcacgtcctaagtcgaatacgtgactagagaacccacctactgaccgtagatgaacttaactggtaaagattctatcatgtttgaaaattcattcgaagaatagctcgctactgactatgcaattatgca

SEQ ID NO: 69020 - DNA, 321 bp, Glycine max
ctttgatctgggtgagagaaacgcgtatcgatggattgggttcagtactggtctcacacggtttgttctaacaatttgtactgactgtgtattgatcgatacgggtcgctctcacctaggccagagttgcccaaactttgataacaccattcattcatcaaaagctccactgaatttacatttagtgaagtcaaaaaggggggtgaattcagaatggaagcccgaattggaaaagagtggtggataacatgaagatttgactgagaatgctgggctgacaagttcaaatagggaattaggtatgcattacccaattctact

SEQ ID NO: 69021 - DNA, 238 bp, Glycine max
aaaaaaaaaagaaaaaaaaaaaaatattacctttaaaaacaaaaaaaaataaaaaaaaaaaaggcaaaaaaaaaaaaaaaaatatgaaaaaaaaattaaaaataaaattctaataaggggcgacccttttaacggttccaatcttacgtacccttccttccaacgtcttaatatcttattggtcgaccctatattaattttagtggccatcgatttaaaacgttgtccactggaaaaa

SEQ ID NO: 69022 - DNA, 338 bp, Glycine max
cccacgcgtccggccgtttccagaaaaagaaaataaaacataattttgagagatagaaagaaataaattaagaaaggaagagagtgttgtgttactgtggagtgagaggagagagagaaatgccaagtgtggctgtgaagctctacagcgtgttcttcaagttcctcttgaagcaccgtctgcacaaccgaatccaaaccactttcgaacccttcgacccgttcggcgtcacgacccgacccgaagaatccgtcgctccagcgaacccttacttctccgacggcgtcgccactaaagacatccacatcgaccccttaacctatctctacatccgaatc

SEQ ID NO: 69023 - DNA, 306 bp, Glycine max
agaagacccatcttcgggagagacaacatggtagtagtaacacctgtcgtgtcggcactcggagacgaaaccgtagaatactagcatcgccaatccgtaagtgcccctgcctcttagcctaataaaatctattggcaaagccactaactaagcgaaacgaagacactttctctccgagtcttagcatccaatcagaggttccatatctcttccttctgtcgcaccgaagttacaatcgatcaattgcgtctctctttcgtcaatcttgattccttctctctgaacaataactgggataacgctcat

SEQ ID NO: 69024 - DNA, 362 bp, Glycine max
cccacgcgtccgcgccgccgcagcagcacactccgaggttgcagggtgccaatggcggccttcgaccactttgggaacatgtacgacgttgcattcaaaccccgcttgcttcaaaccctcatcagagaccacctcccggacgagaaacgccctttttcgaacccttcagaactctccaaggtcgtttcgttgatcaaaacgcactctcttctctgcgagtctttcgcagattccacgcgccccaaactcatcgaagcatggaaatccgcactcgcttgctggctcaacctcatttactccctcctttctaccaccatgccagataaatgctgggcgggtatctccctgtcggggctacttgt

SEQ ID NO: 69025 - DNA, 343 bp, Glycine max
gccacgcgttcgaccactcgtccgctgagatttaggaaaaatctccatctctttctagttcaagctcgtcgatttgtgagaaccatgtgatcaactgtgtatggcttgtatcgaataatgcttcataagaagagttgagtattaagattactcattaaaccatcctgttgctacgaaaattcagggctaatcttttggcatacaagtatctgcggctactgcaaacaaagtcctatcttcactgggcttctgaagtcatatgactttggatgtatgccaaagtgtaagccttatggtttgtcagatgctattgcaaatgctgaaaagctgtcttgaatatctt

SEQ ID NO: 69026 - DNA, 165 bp, Glycine max
ggctatcgttcgatggcagctaatgttcgatttcgtgaagaaaaacaactcctttgagtcgggcatttgaaaatgtgtaccgatagcgatcaaattcagtacatatagcatcactctctacatcctaacttcattcaagaactctgatttgtcaaactataaaac

SEQ ID NO: 69027 - DNA, 133 bp, Glycine max
gctccgtactatgaattgaaacgaagttcagcttcgcagggaggaagaaggtagtagagtggtccggcgacagtccaattattttcggagacggcacggtggtcacgtttaattagccaattgcgtacacttt

SEQ ID NO: 69028 - DNA, 286 bp, Glycine max
ctctaacctacctctttttcttctctctcaacaacttcaccttcttcctcctcgatcatgtctcacttcaagggcaagtaccatgatgagcttatcgccaatgctgcgtacattggcactcctggaaagggtattcttgctgctgatgagtcaacagggacaattggcaagcgtttggccagcatcagtgtagagaacattgaatccaacaggcgagctcttagggagctgcttttcactgctcctggtgttcttcaatatctcagtggtgtcatcctctttgagg

SEQ ID NO: 69029 - DNA, 250 bp, Glycine max
actaaccacgatgaattgaaacgaagtaaagtgccacttggtgctacaaagtagtcgagtggtccggggacattccagtaattgtcagtgacggcactgtggtcacgtataaatagcgaattgggtacactctgtcaagtagcggacaaatagagagctcaagctaagtgtgaggatgcttgacaaacctaaatacatgtctcatctatgaaaccaacaacactgagtgaagaatgcatatcaaacccat

SEQ ID NO: 69030 - DNA, 153 bp, Glycine max
acgcatacgcttgcgatgtctacatgtaccgatctatcgttcttcatgctcgtacactctcaagagctaggtgccacaatactgtggaccaatcacatgcccatctaatacaactaccatgtatatttaaactatactgatgaagccctccaa

SEQ ID NO: 69031 - DNA, 402 bp, Glycine max
gtcgaaccattgcctacccctgaagagatagaggaaaaatcaaggccgtacacatgcttggatgctgtaacttgtcgatgttgttgatggtttttgtacaagtagaagtctttccgtctagtagtttaatcgtgaaaactcataagtatgtcgatgtacccttttgctttagatgggtaggtgttatctttaggcaatttgcttcatgacatcttctgttcttcattttttccctaaattttggaggtagagttccaagttagatgtacagttgcagtgctattgcgttgttatgtttttactgtttagtctgtaaacctggatatccagctattatcaaaccgactactgcctggaacgctagagacagagaatttattttagttaggtgcatgccatggt

SEQ ID NO: 69032 - DNA, 235 bp, Glycine max
cccacgcgtccggccacgcgttcgggggttcatagatttagggaatcgattactatactagtaataaattgtacaaaaaataaaaatataaataatataaatataaaaagaacaaacacaaattttatgggaatagtcgcggtatttaaaataaaaaatggaagtagaccaattaaaaaaggaaggagatgtttgaataaaaataatttcccttcaaggtcttaatttttgagaa

SEQ ID NO: 69033 - DNA, 268 bp, Glycine max
acgcgtacgcttccgcttgagtgctgatcgacgtttagtattatagattggtcagtctttatcgcgaacggtcaatttactcagacatgccgactatcaaatactgaacacattatatattcagaataatcatccacagagatccaccatcgaacgcttggctctttaactcggactaacttatcaccagattaccatatctttcggcattactcttccatgcttccctctttcatcataaatggaatccaattcttgtttctatgct

SEQ ID NO: 69034 - DNA, 181 bp, Glycine max
tcgctaatattggataaattgaggcacactagcctgtgaggctgaaaattactgatcctgggacggcatatcatcctatgatggatgatgactgttctacatccgttgatcgacgaagctttaatgcatgtattgatgatcaaaattacactagcgcatgctcaagcaatatggattgctc

SEQ ID NO: 69035 - DNA, 383 bp, Glycine max
ggacagggcaatttccgatcaagaataaaatgggggagaagtttttagctgtagcaactaatacgcctttttatgacgatgatggaagcttagttgggctaatttgtgtctctattgatttgcggccctttctcgaaatgaaagttccaatgcctagtgtaaggaacatcgagtcagattcagattcaggtggaacccgacctagaagtagcattacaaataaacttggccttgacactcaacagccgcttcaagcttctatagcttcgaaaatttcaaatttggcatcaaaggtgggtaacaaagttaagtcaaggatctggacgggagaaaacaatttggatcgtgaaagtgggagtggtgaaagtcatcattctgagcat

SEQ ID NO: 69036 - DNA, 392 bp, Glycine max
cccacgcgtccgatcttatattgcaagacctgcgtgagcgaatgattgatatgctgtgtctggttctgattcggcgaggcctcttacggctggagtcggaattggaggaaggacaacaccattaacaggctcagatggtgtatgatggcccatgaatcacgctctctggactcagacaaaaccgtcaatgctggattctggatcattgaaggccccaaaactgtacaggattcggccaagatggagcttgaataaattcatgacaacattcgaagtccgaagaacaaaatcgacttacacatggataacgttcagaggcttaagatacatcaaataattaaaaacgctaaacttggaatttaaactacgagcaagagaatgaacttgctaac

SEQ ID NO: 69037 - DNA, 268 bp, Glycine max
aataccgggccgaccacgcgtccgctcacgcgtccgatcctacatgtcaagatgttcttgagcgaaagattgatatcaggtctaggatgctacctgagcaatgactagcacagctatgtacacaattcgaacatggtcatcaataatcactggctcctatggaatcagatggccccagaaacacgacctattccatcaaactaaatactgaacgctagatgccagataatcgaataactcaatcctgtacaccgaatctgcacaacaa

SEQ ID NO: 69038 - DNA, 163 bp, Glycine max
gtaatacataagtgcttagagagagagagagatagaggtcaggcgatgacagaggtagcatgaggtgcggtgaaaacagatcgactgcggtcccacagacggtaagcgcaacatgacaatggatgctactgtacagtataagatacaccgaagttgtggaatc

SEQ ID NO: 69039 - DNA, 108 bp, Glycine max
acgcgcacgcttgtgacaaatgctatactgaatctttatatggtaggcatatacgcacgtagccgaggcatggggatgagtgactacccaagctaaagctgctgatgc

SEQ ID NO: 69040 - DNA, 393 bp, Glycine max
ccaaaccctcggcggctgccatacccgctgcgtgctctgttgtgtctcctcttctccgcttggcctctctccttcgccgttctttttagggctctctcaactcttctattagctgcttaaaccgtggcttacgactcagattccgatttagggcttgcgtttctggattctgccttccatgatgaaccagatctcgtgcctgatcatgcatcatggccactgtcgctagtcctgctgatcaagccactgatcagcctgctgagctatcgctggaaacatcagcccgaacctttggagattcctgagccaaccaataaggccactgggaatgactatggatcacttgattcaagaaatgcttctagtggtcatatcccattgcatgatccgtct

SEQ ID NO: 69041 - DNA, 52 bp, Glycine max
ctaaattctaaacactccttcgacctataatacccttctctatattcattgt

SEQ ID NO: 69042 - DNA, 181 bp, Glycine max
aaaaaaaataagaaaatgaaaaaaaaaaaaattaaatatattgtaaaaataataaaaaaaatgggaatgggtaaataactgataaataggacggcttttttaagggttccaagtttacttctaatgcttgctaaataataacattcctattgaggcacctaatttcattgaatcggccttc

SEQ ID NO: 69043 - DNA, 176 bp, Glycine max
gacacgtctagtccattgtaggttcaactcttgttctatcgcaacattgacagtgatggaagggatcggcaactgcaaacccaggcccgattgacagaagaataacaagagcaatgtaaattaaaggccgaggaactcgaaatggcattagagaacatctctgaggtctgacttgc

SEQ ID NO: 69044 - DNA, 257 bp, Glycine max
gtctaaggattacgtatatagaccagcctatgcctgattgcatgaagcagtacttgggacggattcagagtccgcatggggaagatatagtagcagcgtgcatgctcatgactactgttgatgagatgattgtacattctaaagccaaggtacatatcgatgcatattacgaagtgctgagatcattatctaagaacatgaatgaatcgcctacgttgatgttcatgttgaaggatgtcatcgatttgagaaagaat

SEQ ID NO: 69045 - DNA, 302 bp, Glycine max
ttggagttgtgacaagaataattgaagaacatggttaatttattctattcatcatacaagatgaactgatgataacaaggagggattctcaactgcatgccatgcatctttgtttgccatcctagtctagattaagttgtgctcccagactacaggcagctatacaagtctcgatgaggtttgtgggttaatatgtgaattatcaattatgtaagaatggtgaagatttttttgtatgtttttcaccatatatgtatcatacgaaagcgtgtcttttcaaaagatctagacttatgtaccaa

SEQ ID NO: 69046 - DNA, 227 bp, Glycine max
  unsure (1)..(227): unsure at all n locations
ggtgggggatatcgaagggcacttttgaggctgatgaaagtcttttcacggtcatggggactctcgatggagaaatggcttcatttgactttctaaagagttcaatgganncatgttcaacgtggagggagaccggtgaaaagagacgggagatcaagaaagtgcttttcaaaggtgtttgatttgaaatggcgacggaaaaaatcaatgcttgaggaaattatcac

SEQ ID NO: 69047 - DNA, 236 bp, Glycine max
gtgtatgatgaatttgttctccataatctaagagataatagaatagacagtattggaagtttcgacggcaaagtgccaatgtgctcctatgattatgttccaagcttggttttgccatattgtaattaagctaccttgcacttgcttgcttgtatgaatgtaaattatgttaatggtttcagaaccttggctatttaatgtatggacacggctgagattgtgaatacttctggtgg

SEQ ID NO: 69048 - DNA, 421 bp, Glycine max
ataaactgatcacgcggactgtctagcctcagggctactaaacaatgcacaacgacagctatgaaaggactatatctaggacggacatctaattgtatgccatgcatgtgagagagagatagaagcatatcttaagttacgtacgtagacaaccagaaattgaacctgatcgaacgaggactgtagcctaatcatgctattatgagttatgacctgatgatcaaaaactgttcgcatgaatcatagcagatatgtattacaatgaagcgcttctactatttcaaagtcaaattttggaccaatacgcctaggtctacacctggactgaaagatctacataaactgcaatttttaggatctgacaaggtgacctagtcttcatgctcatctacatgtactctctgtatagatacaactgtat

SEQ ID NO: 69049 - DNA, 268 bp, Glycine max
tccatggattgttgaagagaatagaagcaacgtagcagcaacgggtttaattattctgctcttctttaatatttttctctctagaacactagtaaaatgtgtttactttattgatctagtgccaacgtgtactttctattgataaattgatgattcaagtttattagacatgacgacgaggcagacacagtcaaagggccggcgatctagagggcccaagcttacgtacacttgcatgcgaactgatagctcttctatagggtaacct

SEQ ID NO: 69050 - DNA, 264 bp, Glycine max
gtaatcctagtgaacacttatcaggactcggaacccgatgcctagagagcggctgatacgttcaccatgataccaattgtgccgctgaatattccctctgctatactggaccgttaagatcccgcagatacttgcaatggcggagatctcttgtatgcttactatgatgacgatgaacgggtgtactcacactctgagttatctgccgatgatgggtcattcgctaccctatctgtgttagctgattgacagatgaatgagctt

SEQ ID NO: 69051 - DNA, 357 bp, Glycine max
cccacgcgtccgattgaatttcaatttccctaggggcttaatatctccccgcatttgtgccgagcctcattattatcatagtagatattcattccccttatctttctctcttctctctccccgcccaaaccctaactccctaccctattccgctttctctcatccatcatgaaaggaggaaagtccaagaccgaatctaagagagccgatgccaaacttgctgtgaataagaagggcgccgccaccaagactaggaaacccgccggaaaggggaaggcagcgaaagatcctaacaagccaaagaggcctccaagtgctttcttcgttttcatggaggaattcacgaaggtgttcaac

SEQ ID NO: 69052 - DNA, 142 bp, Glycine max
gccacgcgtacgaacaggctgggcattacgcagatgcaagagcaatctatccttcacatcgggtacaattcattgattacaagagctgctatcacgtacctaacttgggacgtcggcactgagagcggactagctgacaaat

SEQ ID NO: 69053 - DNA, 84 bp, Glycine max
ctcaaacggactgacgtcctattacgttatgacctagtctggcccaatctttgacggcacagggggcatccattcggttgtatg

SEQ ID NO: 69054 - DNA, 193 bp, Glycine max
ctacatccttgatcgccacagtcattttctatcatcatcactttcgatgagaactgtgcttgtgctatataacttaagagttctccagattattatagtgtatacgcagctatatcgtataaggaaatcgacttagattgtgaagtgtgacctctatgatatgcattgaattgatatcgctgtacatcgcttg

SEQ ID NO: 69055 - DNA, 262 bp, Glycine max
cggacgcgtgggggtgcaggctgtcgcaagtgattggatggcatctgctcgcgctccgtccaggatgaccgaacttatgtcaacgcagattctgatgctcagaataagcctggcagcaaccacgacaccattatttacaccgacgcgcctcataggatggagaggaatcttccagatccttctagaaccaacaggaatgcttctaccaatgcgattgaagagatctacgactgaatcccgagcttgcactaggactgcatgc

SEQ ID NO: 69056 - DNA, 213 bp, Glycine max
ctatacttcttcaatacatataatgtcaatgacaggtgtagttagagcttgctaatcagataccatggacggctacgacagctatgacttttggaaatctcaatgctcagctcgaggcttgaatctggtttggacaatctggctctgaatgattacttcattcggagcaacagatacagcttcaataagcctgatcagatgacgaactttgat

SEQ ID NO: 69057 - DNA, 131 bp, Glycine max
ggcacgcgaccgcgaggctgatgaaatgctttccagggggtgcaatgatcagagctgtgctgcatcccaggtgcttacatctaagattcatggggcagcgcaatgtgcgacagtgcgtgccagtgctctag

SEQ ID NO: 69058 - DNA, 279 bp, Glycine max
ctgcagcattgatcgccactgtcattctccgtcatcgtcgctttcgatgagtactgtgtctgtggtgtgaaagcgaagagttctcagatcattatgcgcatgctcaacactatcgtttatggccatctgctgagcttgttagctgtgacctctatcatgggcattgaatcgatatgggactacatctcttgcaagaaggccgatgttggcatacgctctagggcatccgagcttactgatgcatacatgcatcgtgtgatctctgctatagcgatacct

SEQ ID NO: 69059 - DNA, 180 bp, Glycine max
cacacgccaccgaaaagtaaacgctggtattacaagagcatccaaaccgcatatggaaatgggagagtttatgacacgttactcactgcttacctaggttcatggatcatgaacagacttcttgactattgatatgctggtcctacctctattcgctctcacccaagatgcaagcgtgat

SEQ ID NO: 69060 - DNA, 330 bp, Glycine max
atcacgcgtacagtatacacattgatttcaaatgtacttcgtgacattttatgctggttcagggtggctagtggtccagcatcggcttttgagattggacaaagggcttaagagcgttcgatcatggattacaactctgttcacaagtctagcctgtcaaattcaatacttcactggaatggggcttatagcaaccggattgaagaaggatcaaatgttcgatggtgacatatgtacactctacatgagtgggtatactacaatggatgttaaagttgattcatattctcatatatctacaatagtgactcgtgaatgatatatttgcat

SEQ ID NO: 69061 - DNA, 211 bp, Glycine max
cttcattgaaacaacggacggatagtgatggataacaatgctgaatctgagaatccgcaacggaaacggaaactgattgtaattcacgtagggtagtacctccgctacatcatcttaggcagctcatatcaagtctatctcaagtacactgttcctatacaacccattgctctcttctcatacttcatcattagctgtgcaacgaattctg

SEQ ID NO: 69062 - DNA, 220 bp, Glycine max
ctcacgcgtacgaactcacttccacacgtggttaccaagaatacttgttcgtccaggaagaggcagcttatacggatttcactactgaatcggatgaccctcgtctgacgaatttctatacatgtagcacacagtctcgatctcgtgaactgtggacactagatcacaatctactcttggccaataacggactagctcgttacttacgataagatagaca

SEQ ID NO: 69063 - DNA, 199 bp, Glycine max
atcaaatccgtggattccgacggcgacggcaacgtcaacttccccgagttcaagcggatgatgagcaacaatcgcgaaaatgctagcaatgctgaagaaaaaacagattaggccctttggatttgaattttatagataggctaggcactttcgctgcacaatctcttgactaataaatctaggtctgttatgatccgct

SEQ ID NO: 69064 - DNA, 413 bp, Glycine max
gacgagagagtcgcaggtactgcatttgttgattacaaatcactacttatgtctcagaggaggcttgggaaaaggattggactgaccgatggatttgcagcctctacaccaatagaggcagccattgtcaagcatattccaagtacactgactctgtttaacgaggctattgatgctcatacctgatcgtacgatgatcaaccaagttggagacgaaagaatgcatggctatatagaagatttcagatgcgatcttcctaccgatctacgatacatgacgctcattgaaagtaaacatactgcacacataaaccatcatagcataattgaaattcatgacataattttgccaatcgacagggcgaacttcaatgacgtgaatatcgtgtactagatgatcgacaccgatctga

SEQ ID NO: 69065 - DNA, 327 bp, Glycine max
atgcataggaatttaataaaagggatcttaattataaagtggtaggtattgataacataattcaaattaatacatgcatagaaaatatagaatatccaatccaatattgcttatttatattatttttttgatattggagtgcataacataaaggacaaaatagggattaataattcatattaatataataaatttcgatcgatttatcaaatagatatctatttgattatttcaaaaatattattattggaaattttagtaaagtaactaagaataataattaggaatttcatatttctaaattaatgtctaattctacatttaaaa

SEQ ID NO: 69066 - DNA, 254 bp, Glycine max
tccggttcaaccacgcgtccgccacccttccgaaaaaaaaaaaaaaaaaaaattaaataatataaaataaaaaataaaaaaaaagggccggcccttttaaaggacccagcttaacttcccctttcttccaacttcaatgcccttcaatagggtcccttaattcaaattaattggccggcatttacaaaattattacttggtaaaaccctggggttcccaacttaaactccctgtaattaaatccccttttttca

SEQ ID NO: 69067 - DNA, 340 bp, Glycine max
ggaatatgccagatggcatgtttgatgtgactcatcacttattccttggtgcatgaatgcacgcatggtttgctgcagttgctgatactcgctatgctgtggttgttcctctgattggtgttcagggattaagatgggccttatacaacgataaatggcaggctcgagttaatcagttaaagcctctttttgagggtactattcattcaagcatgctaacagtggacaactgaacatatattctgaacatacttgggtacatggatacagtggctcgtgatgatttgggtaaagatgttatggacaaataagtggtggataatgtgtgggacagaatatc

SEQ ID NO: 69068 - DNA, 334 bp, Glycine max
ctaatactggacaaatggaggcaaacaaacctgagaggtagaaaattactgagcctaagactccatatcatccgatgattgatgacgacagacaactatcccatgtacgaagaagttttgatgcatatattgatgatcaacatcacacgatgcatgctgaagccatatggagtgctgtgaatgatgtagacttcagtagcagaagaagcactggacaatctggtggttgaacatcatctgaagatgtatcagaaacattggagcatgatgacgatgataggaacttgagttataaagagcacagaaaggcccactatgatgaatttcttaaagt

SEQ ID NO: 69069 - DNA, 259 bp, Glycine max
ctgtctcttaactttgatactatgctcacggatttgatctgtttcgcgtacaggaactcatacgaatgaatactgcactgggcaagggagcagcgagtgccctataagaatcactgaaccctgttgatgaccgagtggttggatagcggaaggcttctcgttagcctgagaacagcatatcactcctatatggagatgcagagcctgatagaccccatcatgcctaaaagaccactgagcgctatcttcgtgttccttg

SEQ ID NO: 69070 - DNA, 202 bp, Glycine max
gaggagcctcagcttcaactgcagacgccatgtgtatcactacagaacgatgcacatgcatgacatccaacttttacccaaggaagggcctaccatataagcagagaccatgataatgctttgatggagtctaactacaacgcgcaacaaggctctcaacgaactgactgttcacatcaatgtgtacatgctctgtacagtg

SEQ ID NO: 69071 - DNA, 224 bp, Glycine max
cccacgcgtccaggcttctatttatgtctcgttccgaatcacccctcaccagtccatgctggggttgagggccaaccacatcgtgggctgacgcacgctcgatgactacaacatgccatccgactctacacagaacttatggctgcgtcatatctataccctgcagtttctcgtgcttacatttacaaatgatacttcaacggctcagacgtgcaacggtcaca

SEQ ID NO: 69072 - DNA, 266 bp, Glycine max
cccacgcgtccgcttaagcttccgacgaatttggtctttctaccatttgatattgaagcgctgcttccaacagttagcagtgggataatcttctatgtggtcaataacttgagtattctttaaccgactctgacttgaacctgtacatggatcatggctagtgtctctctacatcaatactgtgaagaattttttaaccgtagtgcatttctctgatgatacagcccttattacagggagtacttattgatttgcatccctgacag

SEQ ID NO: 69073 - DNA, 137 bp, Glycine max
ctagagtcatcttgctgtttgtattctggctcagatggatacatagtgtctgatgacggacgaggtaaagggcctcctaatgcttaagaccatggcactgattgactctggcatactcactctggctgatgacttga

SEQ ID NO: 69074 - DNA, 287 bp, Glycine max
  unsure (1)..(287): unsure at all n locations
gccacgcgtgcaggttctaagggctgctatacatactacggtacatactcaggaanatactcgggttgatgttattgtgggggggccatttttaagcccccttccaattcgccctccaatttaccctaatttaatacaaatttttatacaaaaatttgggcaacaagagggacttcctgagtaaatacatccttgaatacaacaaggttcccaagattgttcccaatgagcatcccattgcacagcccatagcgaatgctgtatacattgatgaaaacattgataac

SEQ ID NO: 69075 - DNA, 264 bp, Glycine max
acggaaattttaaaaatgactgggataaacttaagaattcaattattgaaattgaataagcgaacgatttaattggattggtcgaatggtatcaaaaaaatggagtactaactcccatttcttatttattattgaattaaccgatcaacttgctttgttatcgaacatttctttttgatttcaaaaattttccggaaaaaatttgaatctatttttatatgcgaatcaatcctactacttctggtcctgaggtttctgcgcttg

SEQ ID NO: 69076 - DNA, 397 bp, Glycine max
gctactcttgcaggttcttattactgctatacatactacggtacatacattggaagatactcaggttgatgttattgttggaagcctatttgtaagcacatttcagatcacccttcagataaacctaaatgtaaacaaattttattaaaaaaatttggacaaaaaaatggattccttagtaaattgcaccctcaatacaaaaaagtttccaaaaatggttccaaagatcatcccaatgaacaatcccttgcgaagagtatattcattggtgaaaacatcgataacaaaccgaaaaaacattctgattcttaccataaagccttcgcaagaacctcgactagattcatggataaatttattgatggtgctatattcgaaactgtattcacgattgatt

SEQ ID NO: 69077 - DNA, 390 bp, Glycine max
cggacggaacccagtgctattttcacttcatttcattagttgtgataatatcaaactaagcgcgaacgctgtatacctgcgcggagtatctcgcactaacaaccctcactctacgaactcgacaacctctctgttctcccgctatgcatgacgggtggcgagctatagccctaagatccaacacatttgcatgtccgacggtattctcacaacaacgctgtcgtcgacgtcgccgatgtcgctgacatctcgcttcgttccccatgtctctgtgttggagcaggaggaggacaccttctgcgacggagaccgacccagcttctcccgcgaccttaaactctttgacgggaatctccccttcaatgtcgacagtgcgcggctcgcggagct

SEQ ID NO: 69078 - DNA, 73 bp, Glycine max
cccggtcggcccagcgtccgttcaaactccgtctttccgaatcctctctttgtgataggttctggtctgctcc

SEQ ID NO: 69079 - DNA, 128 bp, Glycine max
gaaaatcaaaccttctcatcgaaaaagtcacgtaacaaatttttgcattctagtaaccggacgacatatttatagacgtggtgcaatctctaaaaaacataactattactaccattggcaatatatga

SEQ ID NO: 69080 - DNA, 167 bp, Glycine max
  unsure (1)..(167): unsure at all n locations
aacacacatcccattantgattccttcttataatcttttacactccacctctctcaataaactgtgcggctctttctcaaacccatttgcataatctatatcaaaacacacaatatctctcatactgatcaaaaaaaaaaaatacttcattctcctgattcaccata

SEQ ID NO: 69081 - DNA, 371 bp, Glycine max
gtaatcctaaccaacactcacacatggtttgtttttttttggatccatatccatagcaaggagggcgattatttgccaaatcgcgagttcccttttctttaaatcaaacaatcaatttagcttaagcaacatcgcaaatggaagcaatgacaagggtttcagcacaaccaacaacaacaacttctctattatacccaaccctccttttacttctgcttcttcttcttcttttgaccctaataatccccgccccactgcaaatcacactttccaattattctttcaaactttaaagttcttttacaactaccaatattgttcacaagattttaaccattctaccatcaaaaacttctaaaaatttttaaatt

SEQ ID NO: 69082 - DNA, 332 bp, Glycine max
taaaccctacttctacttccctttgttctcaaaccttatcccttatcctcccaaaaccggacgatgtctacctccggggcttctctcgcactcccaaccctcactcttcgaactcgacaacctctctgttctccccaatgcttctcctcgtccctctccctcacccctaactccaaacccatttccatttccgacattttactcaaaacaacgctgtcagacacaactcccatgtcactgtcaactcacattctttcccatgtctctgtgttggagcaacaggacgacaccttctgcgacggagacagaccacagcttctcccgccacctta

SEQ ID NO: 69083 - DNA, 250 bp, Glycine max
  unsure (1)..(250): unsure at all n locations
attcaaggaaacatacgaggacattcaagaactcattgactccctctaatacttcagagcataagagggaactaattatgttgccacatctaatgccatatttcatgatatctctcatgancctttttctttcctttttaccttcctttttacccctcatcatttcccttctgagccacactttcaatccaatgtcccattcattcaatctttcatatactttactaaaactctaactttaaatttgcgg

SEQ ID NO: 69084 - DNA, 420 bp, Glycine max
cccacgcgtccgattttctgtaaaaaaaaaaaaaaaatcatgttcggatattcgggtatcggggtgggaggaaggaaagacactcccgccacggaaatttctgtggctctgtgctttgagactgaatctcatctacagtgacaacatcgatcttcttccacagtttccactttccaccaccaaatctacgttagggttcgtcttcatttcaaattcaacaacttcgccaaccacgccatggcaactcttcaatcactgcgaccttctttccgtccatcaatcccatccccaaattctcacactttcccagccactccctttaattattcccccaaatcgattggctcaaagggtggcagtgttaccgtaagacactctatcgtttctcccagggtttcggtttccaattcggagtatagt

SEQ ID NO: 69085 - DNA, 211 bp, Glycine max
cccctcccatcatgatatacactcctaaacaacatccaactttcttgagcgatcccaagacagctcactccgcttaaatatataaaaagcgcgggcccattctctttccctactttcttttacttttcatgtccccttaagaaaaacccaattccatttcaatcccttttttctttttttgttcttgctgctgattttatcaactaatttt

SEQ ID NO: 69086 - DNA, 294 bp, Glycine max
ggaacacttcagaatattatcgatcattacctaagactaagaaccgctgatagtcatggcaggacaccaagacgcgttggtcctacaaacaccaacagtgttagcgaatcttgagggaaagtggtgtaaacaactatttacgaacggatggtaattgaataaaaatatgggaattaccaacgatgatagacttaacttaacttctcagagcttaatcaattgtatgagaaatgggcgggcggtgtacaggatacaagcttatgtacgcgcgcatacgacggggttcatgttcta

SEQ ID NO: 69087 - DNA, 423 bp, Glycine max
  unsure (1)..(423): unsure at all n locations
atcatgatttagacgcctaaacaacaacaaactggccagggccgtccccaaaaaggctaactggtctgaaaaatttcaaaatcctgttagattctctttcctactttcttttacttttcatgtcgtctgaggaaaagccaagttccatntcattcctttttttctttttttgttggtgttgctgatttatcagctaatttgaaacctccactgtgcagtgatgtttctaataatgacctctgtggaacaataccagtagatggcaactttgaatccttcccgatggaaaggtatatatagtaactattgcaattcttgcctcattagtcttgctgataataacatactcttaataagtccaatgacctttggatcaaacacgtgctggtgaatatgccagtttaaccatttagaacttacaac

SEQ ID NO: 69088 - DNA, 451 bp, Glycine max
  unsure (1)..(451): unsure at all n locations
tcctattttttgtaaaaaaaaaaatttaatcatttcggatttcntttatccccgggatttttaaaaacagtccccccactcaaatttctgtcgctctttcctttgaaactgaatctcatctacagtgacaacatccatcttcttccacagtttccactttccaccaccaaatctacgttagggttcgtcttcatttcaaattcaacaacttctccaaccaccccatgccaactcttcaatcactgccaccttctttccgtccatcaatcccatccccaaattctcacactttcccaaccactccctttaattattcccccaaatctattgcctcaaaaggtgtcatttgttaccttaaaacactctatcctttctcccaacgtttccctttccaattcccagtttctacccaaattcctaaaaatctctttacgtttctattttcacttcc

SEQ ID NO: 69089 - DNA, 131 bp, Glycine max
tctttcaaaatgcaaacatccttaactttctctacccccaacattataccatccccgcccacattttataacacccatattaccatcttttctaccaaattaaaaaccccccactcctcacctcattactc

SEQ ID NO: 69090 - DNA, 357 bp, Glycine max
  unsure (1)..(357): unsure at all n locations
gagaagcgtacanactcgcgaacgttaacggctgtggccactcacacctttgcaacatccctgattgtgttacgattcacgacgggtgctgaacctcctgcttatcacctatctcgctatttcacttgcgaacatcataccctacacatcagaccgcgctaaggctaacatcgttgaaccacaaccctctgcatgcacagccgacagatcccccgactgcgccactacgtgcaagcttataccctttcggacaggacacagctttgacctccacccattcgaacccagatatacactaatgatcagaagaatcaacattccccacaatagaatgtgcaaggctcattccgatggtga

SEQ ID NO: 69091 - DNA, 86 bp, Glycine max
ccccccacccacactaccccacacttccaccaaaatcaacattttttataaaaaaaaaattataaacacccgcctttttttaaaaa

SEQ ID NO: 69092 - DNA, 165 bp, Glycine max
ctcacctcttcttcctcctatacttcatcatcaaacctttctcttactttctatatgggggcgctctcttcctacggcacttggacacctgtataagcgcaccaaaaccttcaccgaagaagccaataaaaaatcccaatccctgaccccttcctacttccggat

SEQ ID NO: 69093 - DNA, 299 bp, Glycine max
  unsure (1)..(299): unsure at all n locations
cccactcgttcttacataattccatattttatttacaaatatgcctataaaaacatcccgccgtctttattactaggagtgttaactacactaacttcttntctttaaattcttaatcatatttcaaatgctactacttatacaccatctaagttccctccaaaaccttttaaattatactcatatttaaattcttctttctaaaaacctttattttaactactattttaattatgaccttccatactttttttttaaattttcaaatacttatcccaaataaaacatatacttttatc

SEQ ID NO: 69094 - DNA, 270 bp, Glycine max
gacccacctacgatattttatctccactcactcatttttttaacatttgctctctatcctactccgcccggttattattaacgcatggctctaaactcttgtccttaatgatgcacatcttctataatcatatgagtattaaaatgctattaaaactttaacacctaaattaccccaaaatctcctgaggaaaattatatcttcaacatcttcttcaaatttgaacaaacaaaaaaacttgattctacacaaccaacaaattattactta

SEQ ID NO: 69095 - DNA, 150 bp, Glycine max
agataagactgcagcagcagaggggtctaagcccagagcttttgaaatataaaggtcctgtgcgctgtgctcgcatgattattagggaagaaggcttctgtggtctttgggctggagttgctcctactgtgatgcgtaatgggacaaatc

SEQ ID NO: 69096 - DNA, 172 bp, Glycine max
aacattatatcttctacaaacagcttcttctcaattaacccctttacaaaacttccctttttgttattcccacaaacccattcttattcattctcattcttaatacttattaaacattaaatcctttccacttttcctccaaacccttattaaaaacaccttctcatttttt

SEQ ID NO: 69097 - DNA, 362 bp, Glycine max
  unsure (1)..(362): unsure at all n locations
cgtaccgcctcacgccgnntccgcccacgcccgtccgaaactcctatcttctacccttccctnnttgttctcaaaaccggtatgggccttatctctccacaaaacgcgaagaccatcgtctactnnntccgcagcttctcttcgcacctctccaaccctcaaactctccgaaccctcgacaacctcntgctgttctccccaatgcccttctcctcgtcccctctccnctcaacccctaaactccannaacccatttccaatttccgccccgttttcctcaaatacaaccccgctgtcgtcgtccgtcgcccgttagtcgcttgtcgatctcgctttcgttcccccatgtcctctgtgtttgg

SEQ ID NO: 69098 - DNA, 283 bp, Glycine max
cccacgcgtccggtaaaaaggaaaggttaaggatgcaaggcacggaaggagagtggctgtatgccttatcatcaccagacatttataaaacctctttcccttccctcaaatcgctcatactcttccaatcttttaattttactttttttttacctttctccctccctcaataattccaaacaaaaaacaagaacaacaaagttttcgcgattgcatccaaacggatcttgaaagaactcaaggatcttcagaaggatcctcctacctcttgcatcgcccctcc

SEQ ID NO: 69099 - DNA, 182 bp, Glycine max
cacactacctaaaacaccactttattattttccaacctacaacttatcaacatttaccgcacgcattttataacacctttaactaatactactatcatttaacataatcaatttaatcatacactatatcatcattaatacaatttttcatataaatttattaaatttatttatattatttt

SEQ ID NO: 69100 - DNA, 436 bp, Glycine max
  unsure (1)..(436): unsure at all n locations
cgtccgaaactttcaactcttttctccttcgcatggaagccaaatccaatgacagccgcactttctctatcaattgaatgggaaatggcgaaatgctttgccctccatcaacttctccctgcatgagttcttggcaacattctaaatctttaagagatagcgaagaaggtgcaaatggttctccaagatgaagcagttattatgcaaagtagagtttgatggttagtggttactctgagggtgagttaataaaaaagtttggtaattgctttctctctctccctgtatctcatactctcggngttatacagagacttttttgtgcttttatgagcagatttggatggtggaacttaattcaccctttaatntttccttataaaagtgcaagacaagttttatgtgcatcatcatcttatatatatatgctctacac

SEQ ID NO: 69101 - DNA, 153 bp, Glycine max
  unsure (1)..(153): unsure at all n locations
acatacacttattcattttctcccttacttntaattttaccactttatcatgctcatcnnaaacccgccgctttttaacaccaaaaatccacaccctttttccccaaaatattctatcacaaacttcataccacacacccatcttattaatta

SEQ ID NO: 69102 - DNA, 343 bp, Glycine max
caaagttcccattgatcattatatttcttttgattgtcttatatgccataccagtcattgcggccattttggctctgtatatacttgttaccattctgtttgctctcccatcatttctcatcttgtactttgcatatcctagtttggattggcttgtcagggaaattatcacttgagatcaaagctgtatttcttctgctttgcaagcattatgaatgtaactttgcctcaccttgtggccccttcatccagtgtcttctacttcgtaattggtcaacatctccatttgcagctgtatcttttatcttatattatgccagcattagacctctgattgacttgt

SEQ ID NO: 69103 - DNA, 340 bp, Glycine max
tctatatcactctacaccttcctcttcgcaatttgtgcgcactccgacaccccctcggccgggtcatattctgggatccccgacacaaaaacactatattgctccctcctctccgtcagcttcagcgaccgtattctggtccctcctctgcgagaagtgtactatgacgggctaatcttcaacatcacccacaggtatgtcccctagatgccggtgtcctactctactgaagagctctgtcaacacttcctgtggctcgaaaagagcatgaattaatggcttgtgcgctaacaaatatcaacatgaaacttttacaccacccatttacctccatacttta

SEQ ID NO: 69104 - DNA, 395 bp, Glycine max
  unsure (1)..(395): unsure at all n locations
gccacgcgtacgattttcttggacggaaaggtcatgttaattntcttattgcgtantttcaggttttggcgtctaatttgcaatgtgcaacggaaaagcagtatctctataattttggcgatcgttgtcccaattacagttgcaattctacttttcattgttggcgtctacttcctacgtaagagggcaagcaagaagtataatactttcgtccaggattcaattgcagatgatcttacagatgtcggtgatgtggagtccttgcaattcgacttgcctacagttgaagctgccacaaacctaattctcggagaacaaatggcaagggttgggggtataggtgctctacgcagaatctggaaagtgcatacctctgagggtgaagtagataactg

SEQ ID NO: 69105 - DNA, 71 bp, Glycine max
taaaggatccaaccttacctacccgtgcatccaacgtaatatctcttttatagggcaacctaaattcaatt

SEQ ID NO: 69106 - DNA, 305 bp, Glycine max
attccattctctctgtgtatttccctacctctcccttcaagatgcagatcttcgtgaggacgctcaccggcgggaccatcacccttgaggtggaaagctctgacaccatcgacaacgtcaaggccaagatccaggacaaggaaggaatccccccggaccagcaacgtctcattttcgccggaaagcaacttgaggacggccgtacccttgctgactacaacattcagaaggagagtactcttcacctcgtcctccgtctccgtggtggcatgcagatcttcgttaagacactcacctgcaagacc

SEQ ID NO: 69107 - DNA, 142 bp, Glycine max
cccacacacccacccacacgtacactgactcatcttctaccaccacctcaaacccgtggtggtgaaaataacgggggatgacgacaacgctcgaatcacttatcttttccaaactacacgtgaatggcgtcattcttgtttt

SEQ ID NO: 69108 - DNA, 63 bp, Glycine max
  unsure (1)..(63): unsure at all n locations
cacgcccgtaccggaggggaattaattnctcaccttcgnnccgtcatcccccacgggcggcga

SEQ ID NO: 69109 - DNA, 323 bp, Glycine max
tcagattcgaaaagcttcagctgaacaactgtaccttgtcctcttggaaaatggggatcttgtggctgaagacaagattgataaagcacttgaaattatttctgagacttgctgggatggagatatggattcagctaaacaccaaagattaaaattctctgagattgtaggtctggaggttgggtcacttggcaacaatagtgatggaacatcaaggaaaaccagcagtaagaagcctacagacttggatgaaaatgcatcatattcctcattagttgaagcatccgggttctaatttttgttgatccaatcaggttgtgtga

SEQ ID NO: 69110 - DNA, 385 bp, Glycine max
tgttgttgtaactcgttcttcttcttttgttgttctgtgtttgtgtttgttttttctctcacgctgaaaatgtcttgctgcggtggtaactgtggttgcggaagctcctgcaagtgcggcaacggctgcggaggctgcaagatgtacccagacttgagctacactgagtcaaccaccaccgagaccttggtcatgggagtggcacctgttaaggctcaatttgagggtgctgaaatgggtgtgcccgctgagaacgatggctgcaaatgtggaccaaactgctcctgcaacccctgcaattgcaagtgaggtggaacaacttaacaaatgcctatagatatgaacataaggactaaactagtatgtgatgttcgccttggttggt

SEQ ID NO: 69111 - DNA, 385 bp, Glycine max
gagattttgttttgctaaattttggtcctttttatttatagaagcttcatattatgggggcgaggcatttattggcctattcaaaacttcatactatgttgaaggttgcaccagaagcattcgatagttacagttactagttaggactgacaacagtcagttagttggaagttagttcttggaagccttaccccctgtacgccaacacacatgtatatttctgtattttctgacaactgtaacaattcaatactcataataagaatttcagtttcagaaacaggatccctctcaaatctctcatttcttctttgtatctttctttctaatataacataataaaacaaagctgtacgtattaattcttatcaatatagactaacat

SEQ ID NO: 69112 - DNA, 202 bp, Glycine max
attttattactcttaaacttactctgcccattacagacacactccgtaccgcacacctgcggggcatattctaccctacgtgactacgaaacgctagagggctcactatgcctacacaggatgcccaaatgcagtgagcgccgttcatgacaaaaaacttacaatgagagggtaatcttggacatcaccaaatggtctgacc

SEQ ID NO: 69113 - DNA, 324 bp, Glycine max
atcttgacggtcgtcgggttgaggtaaaatttgcaattgaaagatcccatggatttggtggtggcgggtttggtggatcttatggcaatactccctatgatgctggagctggcactgggcatccaggtagttatggcaacactccatatggtgctgcaagtggtgggtatgacaatactggtggtggcaatgctgctggagtttatggcaggggtgaagatggtggaggtggcaattggccgagtggtaattttgggggaagcagctttggtaataactatggcgatgctggtgtctatgctggcaattctgtggagtatacac

SEQ ID NO: 69114 - DNA, 287 bp, Glycine max
cctatttctatcgcttgcaaagatgtgtaattgaatttgcatcatggttcgtatactgtagtgtgtatgctaaccaggtgggtgaggaaaaacacgaatcgtcctgtttgtgtatcatgatgtttctagtttccccactttcccctttttagtttgtggagcggggaatgtcatttgtgtaatattataattgtttaagttgtttagccaaaaaaaaaatataaaaaagtaaatgaaatcataaaaagcacggacgtagcttgctctgaatgctgatgggatacaaa

SEQ ID NO: 69115 - DNA, 315 bp, Glycine max
cttgcgcataagccttgggcttgagccatgtttcctagttccttaaacaatcaacgctattgggttttcattttcatcatttattcttcttttccccccaacccgcttcacagaatatcagaccaacaaactaactacatgctttgtcccctaaacttaacaaaccaccaagaatgattctattccttttttcttggcaatcaacccattaaagaaaaccattttcatcatcaccttgttgtgtcttgttattgaaagatctaaatgttaagcttgttgatcaaaaaggtatgtcggttatatgccttttattct

SEQ ID NO: 69116 - DNA, 183 bp, Glycine max
atcatatctttctcaaactagaagaaatattcttccatacataatcggaaatttcacattggtggaggtgaaaaactgggctgtgcctccacctactctttacaatgccctaattacatatgccctctacgtcattccaaatgctcttgattccaacaacattgtttaaaacgtttatgtaaa

SEQ ID NO: 69117 - DNA, 380 bp, Glycine max
  unsure (1)..(380): unsure at all n locations
aaaaaaaccgccccgccaacacttctccttttccacatataacaacacattctacaacaaaacgacttactacaaaaaatcgtctaatctttaaaaaaccgtcctcatccccaanttcttnccatacaaaccttaatcctaattccaactcatttttcaaataatcaattattaccctttcattcccatttacaccaaataccccatcttttttttccctccttccactttataccccacaaaacccttcctcccacctttcatccactacccctttctcaaatccaactttgattcacttaaccttatccaaaacccacatcantntnttatccaccaattccccactttaccacaaccttatttaaataacttcttac

SEQ ID NO: 69118 - DNA, 302 bp, Glycine max
gacccacgcgtgcgcccacgcctccgcgtttttgagtaagctcaaactaagaaatgaacttgcagatccgggtgcgcaatctaagagcatggccatccaaaaagattaagatcaatatgcaaaatatacaatcacatttgtggagaaaatgtacaaaccacaagctttttgtggagccagatctaggaatacctctacatcttcttgatctcacacattacaaacctcaccaaatcataccacctattgctcgacaatataaagaattgatgcgagacgatgaagctcttactcctattcaa

SEQ ID NO: 69119 - DNA, 386 bp, Glycine max
ctgctttcatcatatgaggttgaaccagagagagaatataactatcaacgcggatagataggcgccatgcacgagagcagttgaagagtgctaatgggatggaggcagaaaatggcttcattttccaccaattggatgcagtcagggtgctattattttcgattatgtgataaagatactgatggtcatgtcaaggcaacaacaaactgaagacgctcgagtcacagctaatttttattctgctctagattttactgctgttgctcgtcatcttagctatgcaaatcatttaatttgaaaaatttattataccggttttaattattaaaaaaaatatgagatgtatactctattggagctgcaaccatatggttaaatacaaataa

SEQ ID NO: 69120 - DNA, 290 bp, Glycine max
atggcgcttgcaaactgtttttctttgcctttgtggtaatacagtcaatgcaacagattctggtgcgtgatgaaatcaagagacggtcacaacaagtacgcaatactttcctatgctcgatgtacacattttttaaatattggaacggcttcaatatattctcaagatgtaaatgcaatcttgagaaataacaagcactttattaaaaaaattgctagatatatgagctaattatcgtgctgtaacatctgatgcatacttaacctaaaatgtttttcttattacacctg

SEQ ID NO: 69121 - DNA, 334 bp, Glycine max
acgaaaaaggaaaagaaggacaaagatgaagaaacagacacattaaagggaaagggaaaaaatggtgatggtgaagagaagaaggaaaagaaagagaaggagaagaaaaaggaaaagaaggacaaagatgaagaaacagacacattaaaggaaaagggaaaaaatgacgaaggcgaggatgatgaagaaaataagaaaaataagaaaaaggataagaaggagaaagagaaggatcacaaaaaagaaaagaaggaggatggaaaagaagagggtgagaaagagaaaagcaaggttgaagtttctgtaagggatattaataaaaaacacaagaggg

SEQ ID NO: 69122 - DNA, 251 bp, Glycine max
accactcgtccacccacacatccattattatttcatatatcacaatcccacctgctgccgtgtttaatattaatgaatgcccactacacacaaaacaccattccttataatactctcttccaacaacccaatcattctcacacccattcatctatcatatcttaatcttttccatcacacaatcaacacctcttacatttattctttaactcatacttcttaccctttttctcttaattaatctaaataat

SEQ ID NO: 69123 - DNA, 359 bp, Glycine max
acgcaaataaccaaaggattgaaccttctaagagcaccatggaccctgacgtcatcggcgttcggtctccaattcacgaccctccaagattccgcgagcagaacaaggtcattttgcatgatgtgattgacattgatgaccactctgaggatgtagtgataattggtgaaaaagttaataatagtaacaaagggaagacaattgacgccgttcatgatgatcatcaagttgtgaaaacggctgattatacttactctctgcctggtgtggaaaattttggatcagttagtgagattgtctcgttctaaatttcttatgtcaatatatacacaatatgcatggttattatattacatata

SEQ ID NO: 69124 - DNA, 309 bp, Glycine max
  unsure (1)..(309): unsure at all n locations
cccacgcatncaaccacncgtncgcccacacttccgaagagagtgagagttatagaaatgggggtcgggttttttggtttggggataatgcgcaacgctatggcaatcaatcttctacgccatggcttcaaagtcactgtttggaacagaaccctctccaagtgtgacgaactcgtgcaacatggtgcttcagttggagaaaccccaacaactgtagtcaagaaatgcaagtatacaattgcaatgttatctgatccttctgctgctttatccgttgtgtttgataatgatggtgttcaatgagcatat

SEQ ID NO: 69125 - DNA, 66 bp, Glycine max
aaaaaaaaaaaaaaaaaaaaaaaaaaaaaaaaaaaaaaaaaaaaaaaaaaaaaaagggggaggggt

SEQ ID NO: 69126 - DNA, 411 bp, Glycine max
cccacgcgtccgcgctcactgccgaagatcattgttggcctcgcttctctctctctgcgatgcattcatttcttcgttcttctccaccatttaatacatattattatactacaaaaacataacctccagaacacatttatatattcccttgttgcatatatactttgttgttgttgttgttgttgttcttcttgtaaatggcgaatgcatctgggttcttcagcccttcggttccccacttcaaagtgagggttaagcctctcaccactgccattggattctccgccaaagtcatttgcgttgaactcaagactgaaaatcttcacgttccttttcaattcaaacagctgcacaaggtcagtattgattgcttgtggccacttaatttatacacttcaaatgtgtctatat

SEQ ID NO: 69127 - DNA, 400 bp, Glycine max
ggtgtgaagatggacactactgactgggaagtcctttcttatgatggcctttctgattttggggactatgacttgtgcacctcaccaaaattcaagaaagcctctgaagcatcaaggaattttcatccaagggtgcctaaacagattcttcatattccaattcaattggaaccgagaattgggaaggccccagatgaagggtcaatggaagaaaacactaaggatcatcatcgtgttgaggtccctcttgttccatcatcaccaactaccattgagaatatcaaaggagggattttggaggctgattataactgtgacacttttcaacaagaatgattcaagcatgtaagatgtgtcctgttgggttgaatgagacaaggtgaagccagaaatatgcttc

SEQ ID NO: 69128 - DNA, 403 bp, Glycine max
  unsure (1)..(403): unsure at all n locations
gcgtaacgggggaagaatgatggttactttcaagaatccgaatgagggacccaaacgaatgtgggattgaanaagggtgtaacgtgctggtttgcgcgtgcaccaaaaancctcgtcatgagaggtgaactgatatnggatngactgacgctgctcgtttcaattctgaatgcannaatatattatnntaccttaccaattattattctgtatcgggtgattgtgaattgaaaaaatctagaactatngatgttgccctgttagtctgaacactctcttgttttaaaggggaacacattctaaattattgattaccgatggttcaaaagatgttaaagcttttcgttgtgttatctggtaacaaaaagagatactgcttagtctatcaaaaaaaaaagaaaaa

SEQ ID NO: 69129 - DNA, 406 bp, Glycine max
  unsure (1)..(406): unsure at all n locations
gcgcccacgcgtccgcccacgcgtncgaaccattgtggcctcactaagggatgaagcatataagcggcctcaagcacattcaagtcttcaaggttcaagcacaaaaatggtaaccattgtgggttcttacaatgtcactcctaatcaaccaactccaaaggatccttcatggctatccgatagtgaccaaatcggtgtcctaggtcatgtagccattgtctacatatacgaagcaaatcccaacagcaacaccattgagagattgaggaactctcttagcaagcttttggtgtactactatcaattcgctggaattactgcaaagggtgataatggtgaccaagaggcttatgactaactaaccatgtatatgaacttactcagtgacagactgtcaaatgtatct

SEQ ID NO: 69130 - DNA, 392 bp, Glycine max
  unsure (1)..(392): unsure at all n locations
gggcggccgacgcgtccgaaaaacaccaaattacatagaatttttaggcgtaaccaaagtacgtaccaaaccgtggcatggacaaatcaatggagaaaccttcttgcagctctagaggctgaggaagcagcccaaaaatccaaaggtaaagtgaacacatacaccaaccatggcgatgggtttcagaacatcactggcactaagaccaacagtggtgcatattctggtgatggtaacactcatcacgccaccaacaactacggtggtgggcctgctataaataatagtggcaatttccagggacatggcaattgaggctnaatgggtattcatgctaacagaatactataattatgatacaactatgataatatggtttggctctatctaat

SEQ ID NO: 69131 - DNA, 167 bp, Glycine max
ctgacgcgtgcgccgtacccgtctgcaatgcctggttattcggtcggacctgtcgcgcgacggcgaggaagataacgataacaagatcgagacgacggtcgagccggcgaacgcgccgcaccacctgcggcagcagaagcggacggatgcggcggcgcaggtgccga

SEQ ID NO: 69132 - DNA, 483 bp, Glycine max
agagctatgacgtccgatgcgcgcgtccctttcgcctgaggctaccgtatcactgtcagtgtatactgacatccgagatacacctgatcgaggaagcggctacaacgctacatcgctcatatcaatccatgggtacttactggcatatctctgtcagcggagtctccgaatatgacatacaactacgacctacttcaagttgcgcttccagcccctgatgtatctctaactaatgtcacgagtcgatcacttagaccactacttgtacgaatcactctatgatgatattcagcattctatcaagtttgacacctgaatgcaccgttacattcaataaccttgacaatatgtcgctgagcgtgaagctgcttggaaggctgatcttttttgtcccgatgcaacaattgctcgtgcagatgcaacactgcatatcgatcgtgacagtctacatgtccagaaaccagtcttaatatgaactggatc

SEQ ID NO: 69133 - DNA, 85 bp, Glycine max
acagttggtgctacatcataattcccatcaaatttaattatcgatgggttagaatttcattaatttatgattttggtggtgctgg

SEQ ID NO: 69134 - DNA, 290 bp, Glycine max
ctcacgcctacgctcaggcctggtccttgactcatacgcactccaatctaccgatccggttgccttaacaaagactgcaccgtttcaacggacgccgtcagatcttcccatgaataccatgccatcaaggtctaagggtcttactagcgcacttctcctatctacacttcactggactcactgcctagacttcagcccctctctaaaccaacgtctgcgctgtatcagcgattcctaccttctacaacatgattgctatacacataaatcgtagtagtaatactgattat

SEQ ID NO: 69135 - DNA, 200 bp, Glycine max
gtcgacggcgcgtccgcccacgcgtccgggaaaacttaagccattccttgaccgacagtttcgaacatgatcaagatgctcggatccatatgggcatgtcgtggtcaacgattacagacccagctgtcagtagatcggctggtgtcaccaaagctgtactattcataacacccatttctcgtggcgtgcacagtgccaac

SEQ ID NO: 69136 - DNA, 336 bp, Glycine max
cagcctatcatggcgtgagttggtgactacactatcaacataaatgtgtcagtgtgacaggtagaggctactggaggctagcacacgagtttagtacaagtatgacgctcgataatcttccagctatacctacactagtccttgtcatgatgggcctgactaatatccctggataacggtcaaaatcatgaatcctatgaactcagcttctgacgggtcatgcgaaatatgacttgatatctaattaaactggtcctgtatattgtaacacttaagacgtcagattatgagtcatatattcatccattgagtggttcactcagaatctcactcaga

SEQ ID NO: 69137 - DNA, 433 bp, Glycine max
ctcactctctctttgatcaattccacatccataacaagacatctacccagaagttgatctggggcaaactctactgcgacgaatagcggatgaggaatatgacgaagattaagaccgattatacgctcacagctagtgcaatgaaatcaaggttatatgtatagtagactagctagtcatattgcctatgtattccacatgtgtgatcattgttatcagccaagctttgagtggccatctaggatataacgaattgaccgttcatgctctcgtatcaccgctctcatatgttcgtcaatgcagttctgctacaatgatgacagagttactaacactatgtggactagcatatacaacctcagaacatggccagatcggagtatatcttcatagatcatggacagatttgctcttaactgcaattttgctattt

SEQ ID NO: 69138 - DNA, 271 bp, Glycine max
ggcgcgtccgcttataaccgatcatccgcacgtacataggtttccgtggttctcaatactgaactatgctagtgcggtggctacctgatgtacgcacaaaagggcatcagatatgctcgtggtgattctcaggatgccctcgttagcaaactgatgacgtaacgatgtcttcatacaatcgcttaagaccttcgaagattaagtggactgcattggacagaaagtgacactgaaaggacattgatacagaggctttgagaacaaggacaca

SEQ ID NO: 69139 - DNA, 421 bp, Glycine max
cccacgcgtccggctactcgtactagtcatagccttaatggcctctgtattgatccgaggtggggtcctcagacatgttcttctcactgcttacaagacttctgatcgagacctctcctaggtctcaaggaactcctctttatctagacttgccaacagggactgcaataacatcaataatgataagccttatgcaaccatatgatatattgagtaaaagggatcgagatgaagcatctgtcattcaaggtatgtataatggcattacatactatgtagacaaatacagggctaatgtcatcagttacagacctctttacgacgatattgactgaggtgctaccgatgatgactacgctgacgatgctactgtctagaatatctgtgctgcgacactacttgatcttttagctctgactgc

SEQ ID NO: 69140 - DNA, 361 bp, Glycine max
gctattctctcagctattcaccagagatagcttccatttttgctcatatcttactctggctgctcctgttcctaggaggatacttcccacttgataaacagataacaataactgctccatatacttttatcaacatacatttacagaagttgcaacatctatgggaatcatcactcgcaggtctgatgcttgaaaaccaagtcaaattatcaggatatttgtgacaacctttattattataattctaggattctcatataggagtatcaaactcaacagtgtcattaacaaatttgaatctcccatatagcctgctttccttcatatgatcattattacattcaagacagatatacaggtc

SEQ ID NO: 69141 - DNA, 409 bp, Glycine max
cccactcgttcgattgtcattgcaactcggtattcctgatgcttccatcgctcaacagactgggatcatctaacctatggcgctggtttctcggaatacgactaccgccatgcgcaaatggccaaaatgaagcgctgacacgacatgatacgtgtatacaaccactttcaaaccaaactcgatgctcgctgctccgaatatgaacacttctggatacataatcaacttatgaagcactctactgtgtataggacacatgaacaggttgtggcattacacgctgcatcacctatactctccaaactattgatgcgaatgagaaaagtccttatgaaatctatgtatcactgaaaccattggatgattgcaacgaactactagcatgaatgcctgatattgagataccatc

SEQ ID NO: 69142 - DNA, 332 bp, Glycine max
ccacgcgtacggcctctgatacccagcaaagtcctctgtaacagctactatcatagtcacgaaggcttattttgccgcgtgcagatgacatagatcacaacacgataagcaaccgatgatgggatgtctggaactatcggaagtggcttttatgccagttattcatgtcctacttatcagtgcattgagagctttgatggcaactcactttttcgatcatattctttcaccagacattcagtaagcctcgaacaagattgagctcgtgatattcacaccttcacttagcgcatacagttttgccaaaagtgtctgactcgatgatatgacat

SEQ ID NO: 69143 - DNA, 451 bp, Glycine max
  unsure (1)..(451): unsure at all n locations
gtcaaaccctctcctcgccgtcatcgtcgcatcattggccaccatcagtttctccggctacggggtatgctgttagctatacttcacttacctgctcgtacttctgttctttatcatgaactgtgtactctattctagtgactgcaccacccagttataaatcacatggtttatgttttatggacctaattcaattttgtcaaattgttatggttcagaactcgagaaacagcacataatcaaacgtgtctgcgtaacatcttcgcatttgttaccattgaatttaatcattacctgactttgacatttgctaaaacctcgctgaaatccattgttaagctactctttagcgtgttatacaaaattctcacctttaatcatatcagaccatngttctttaataacatcaactctagatgacgatgatctaccactattataatcgctataa

SEQ ID NO: 69144 - DNA, 312 bp, Glycine max
cgcaaataattgctgatgctaaagggtgaacatgtttaccctgataatctctaacctgtatagggacgagaaacatcactattgagcagaaaaataaatgggattccagcttattcatgaaattgctgaagaattacaatatacctgattattgagtatcctacgaattttcgatgcatatgctattgatataatcattactcacattgtcatatatattactattatctttggatgtacctataataatgcgatgacactgagattctaacatatacatataataattacacatatccttttcaagaaata

SEQ ID NO: 69145 - DNA, 236 bp, Glycine max
ggtcttgaattaccggtcgacggcgcgtacgtcctgaacctctgcatgacgagtcccaagactaccatgctatgcgaaggaccaagcttaggggtgggtgccctgctgcagctgtgactcggggatctgcggtcaactctgaaagccctgactgactgccacaggcttctacatgctctgaacttggatcgcatgcgtccttaaaaggatctagcccttatggtaatgatgatccc

SEQ ID NO: 69146 - DNA, 55 bp, Glycine max
atacaccattctctctctctttctgatctatttaacgccatttcaacatacctat

SEQ ID NO: 69147 - DNA, 387 bp, Glycine max
cccacgcgtccgcccacgcgtacggtttgctctataaacctcacctccctctctcggggagggtatctctctctctctctagagcgcaccgcacaggaccgatggaaacacaatgatccaaccctaacccaagcgcctcttacatacaaggcctaccattaccatcttaattgctgttccatatgctgtcaatgatctgtctcatctatggtgataacctcctattaatgcgcatatatgtcaaaaacaattcactgcattgtgattgattcctaaaatcggtatcgtgaaaaccactaatcagcgacactataacacggcttaccttcaatccgagttgaattcaccatgggttctccatacaattgaggtcaaccctgtgtattg

SEQ ID NO: 69148 - DNA, 161 bp, Glycine max
acgtttatactcattttttttccttctgattacaatttcaatcactactattataactgtgtcaggcttttgctaatcgatatttcaacccttaaatttatctatctgataattaaataatttaggttaaagccaaaccaaaccaaactaaccccttatcc

SEQ ID NO: 69149 - DNA, 92 bp, Glycine max
gaaagtgcatgaaactagcatttacccagagtcagtcatatgtactcctatgggcactgtgcctaggactggggaggtgatggagaagtctg

SEQ ID NO: 69150 - DNA, 156 bp, Glycine max
agcttgagctgctcttgtactcattcttagcttaatatcatccaagagacaccctaagacacggttcacagactctctcaaagagttacaagataaatcatcatggatttaccaggatgtgcgtttgtgcagacacttaatgtagcaccctgtcat

SEQ ID NO: 69151 - DNA, 154 bp, Glycine max
cccacgcgtccggttagccaaaaaattccatggttaaaaccttccggggactgatacgctagatggttggaatctgaattgtcttgcttgaaatggctgcttgctaaggcatgtaactctttttcagtatggctgagtctggggcattctttaa

SEQ ID NO: 69152 - DNA, 456 bp, Glycine max
cccacaccgacatggcggtactatatctggtcgccaactccgacgccaagagatcgtaggggggaaaggcgcgtgttctgccggacaactgtggcggcaaagcatggcaacaacgggaagaagaagaagagagttcataagatgaaagtttaagtgtgattccaaggttgagtttggaaggagtggagtcagggcttcagtataggttaaattattgtaggtcaaggaagcctgatatggagactataaatgaggaacctgttaggctaaggtgatcatgtaatgaaactcattcgttaatgcatcagattttattttatatttagcttcaagagagatttaattagttgaatcatacaacacttcaaaatatgtatagttgatatggtgtctcattagcatcaaatttgtacataagtgatatacatacaagtttgtgtgagatacatattgact

SEQ ID NO: 69153 - DNA, 363 bp, Glycine max
tcccacacatacattgccagcactctgttttattataaactgctccaacatgatattgagttgggatattacgcttaatatgacgactaactttctcggtatatcattcaaccagctggacaaactagaactctcaatgcttgatgaaactttaagtatattccaaatgatgaccatggtggagaggaggatgaacttgattactacttcaattatcatatgtcaacttatcctgactcttacaccatgaataagaaacatgattaacaagacttatcctacgatgacaatgatgcagcaatgactcagactcccttgaatcattatttacttcagatatatatattaatgaaccatactcat

SEQ ID NO: 69154 - DNA, 216 bp, Glycine max
atatagtacaagcgtcagaatgtgccgttgtggctcacattatcgacgcggcataccacgtggtcgacgatgaccacgacggttaattcagcctctacgacctgcgctcattctacgctggagtctgcggacaacgagaccacgtgatccgcgcattgatgacgctggtcggcactaccttggactggctcgtggagtactaggagttcgagcgcg

SEQ ID NO: 69155 - DNA, 248 bp, Glycine max
cccacgcgtccgtgaataccaatgcaggctatcaaggcaagaaaaaggttatttgatggcggaatttcagcagacaatagactcgtataagaaacccatgatcaaaggccgattttctaatgacatgaacaactctccatgaatgagaagtaggagctcaacctctttttagcttgttgaaacttgaaagtaatgctttatgagattgtgtttgattatttttcattggaattggttttcgttaaatt

SEQ ID NO: 69156 - DNA, 245 bp, Glycine max
acgctatagtacaagcatcaaaatgtgcccacgtttctgacattctcgaccgacattccacattgtcttattttaccacgacggcggaatcagcttctacgacctgcgctcattctacgcttgacttcaccttacaacgagaccacgttacaccgttcctttataacgctggcctacacccacttcggctgactccaccagtactaggtattcgatcgcttcttctccgatcattgcaaacccat

SEQ ID NO: 69157 - DNA, 310 bp, Glycine max
gaaaagcgtaaggacatgaaagagaaagctttgcaatggacggaattgacaaaaggtgctggttttacacctgtcggatcttcattagctaatacgtataacatatttcatgatgtatttctagtcaaaaatgttaactattcgaatcagaagaactcacatattttaacttactctataattatgtgaatactcatttttttaataaccttaccttcatccgacatgaaatgtaccacataccagcttatcatatgcataatctactaaatctttacacattcgttctaaaagatccaatcttacatac

SEQ ID NO: 69158 - DNA, 360 bp, Glycine max
gcagacgacaggtcctgctactgcaaattgccgtcttggccttcattaccgctccgggtgggctaccacgctatgggatcgatcagattcctttcctcgtccattaaattccatgattaggtcatgaagcaccgtttctcgagcagtgtctaatgacttaactgcgaacccctagctctacatctgactaagcacacgttctatcgcatatacaacgcttctctctacttcacatctgatattgagaagcggtaccacgcgaaatacggttatagagagacgatacctgttgctgcacacgatgttgctatctcaaaccatgctgttctactgaccgcaattacattgttccagattgca

SEQ ID NO: 69159 - DNA, 391 bp, Glycine max
acgcaagttgcaagagccatatgcccataccgtaatgctctactagtgtacttgatctcggaacggcaattagattatggcttgccataaaatgaggttagccctaataaggatacactgtccaaaagatgacattctatgactgggaaagctagtatctgcatattcttcatacctaacaatgtctgtatgccttgattatcataaatcaatccctttcttggggaactcttgacatatatctagatctgaataactatagtccaaaggctatcacacacagagccaaggatctgactaccaacaaatgaaatatctagcccaatcatgatgcgagacaatgagagtagctgtcccactaatctacaatatcaacactagtatgctactc

SEQ ID NO: 69160 - DNA, 317 bp, Glycine max
cccactcgtccgctgacgcgtggatttttttttttttttctatcatcacataatccaggagggttctaaaatcatgaaattctctaccactcaaactattcttatattgtaacctatatcacatgatactccaaacttcaacaaacatccatgcgtcttaatactaccacaaccttcaacttaatatcacatatctctattaattctcttccaaatataagacttccataacctataactatttttagagaatttgcccctttaataatttaagtactactacgtactcaacctattctagacactgtcattactcc

SEQ ID NO: 69161 - DNA, 347 bp, Glycine max
ctctggcgaactattcgatcactctctctctctctgttacacgctgtcatgctctccttgagttgcgccaatggcgtcgcagctgctacaatggccggggccctgacgacgacaggcatcagtagagacggcaacatcgacctgttcactaccaatgccgcaggaaaagccgaccaagatgctgacttagattcagagagcatcatgaagcgcatcaaagagctcgtgccaagacctacgcagaccctggctcgaaccaacgacctgagcctttacggactcgccatggccatggactgccaggtggtctgtgacgtgggatgctacatgtgaataacgctatagct

SEQ ID NO: 69162 - DNA, 397 bp, Glycine max
cactatcaagattggaagtttatgatcttgaactttccaaccacaatcacaatggcgcgtcgtagtagtatggttctccaaggcttgcatcaattggtatagaagccttccacatgtctctcaattgcaaacaagtgttgcagggggtgatgcttgggctacggatcatatgatggaacattatgatccaattgcaaggtatataggacttgagtcctgcatcaaaagtatgggatttgatgtgggatcattatatggccttgggatttcttcgcacaatggttagcttacctatatgtactagggtcataaatgcttttagatcgtcgaccgtcaggtaaagccgaatatatacataacattgatttaatctcttctagatataacagaacctttt

SEQ ID NO: 69163 - DNA, 224 bp, Glycine max
acacctcagacatcctatcactcatccctctatatctctcgctcacttaatatacctataacggcggatttatttaccaaccggtacttgctctacatccatattcttctataacgtgtcgtattatatcttcgcttattaatatcaatacttaccatcctgtcttatattctatatccactcacaattccacacatcatactacaccgaatcataaagttcaa

SEQ ID NO: 69164 - DNA, 345 bp, Glycine max
cccacgcgtccgtccacgcgtccgtaaattttcaattggactctaaaaaggaagtggaaacgactgctgcttatccagatatatgtttcgcaattgatgattttgactccacttttgatgctgtggttttgactgaaaaagatcattgctattgtgtagttctaaatgcacatgatggggcagcatttccgagtgaaaaggtgtccaatgattgtagtactagtgatagctcctctctgcaagtccacactatttctgcaaagaaaaaggatacatagcttacactatgctcatgatatgtgagctatcagatggtccgagatgcttatgatgctggtaggtcta

SEQ ID NO: 69165 - DNA, 194 bp, Glycine max
acgctcacgcgtacgtccacgcatcactaaatctttaattccactctaaataagaaatgcatacgactggctcttatccacatatatgatacgcactccatacaatttgactccactttagatgcttgggttcttaactgataatgatcatagctattgtcaagttctatatgcacattatggagcatcatttc

SEQ ID NO: 69166 - DNA, 341 bp, Glycine max
aaaaaacaaaaaactaaaaaaaaaaaaaaaatatacaaaaaaataaacataaaaaaatggagggtaaattttatccctaagctgtcataaccactcaaactaatcaattacacaagtgatcttggaagacgaacatgcccaatctataatgattcatattacttactcagttctcacatcattggccattctctttccttccatctctattcttatcattttttagataaacgctttcctatatatatacctcatgtacatacgtcatgctcaactgatggcgatttgtcaccttttttttcacactctctataacactgcattgttcaacctgtactctc

SEQ ID NO: 69167 - DNA, 327 bp, Glycine max
caaggtcttagcatggattgctcggtgcttgctcatggcatatcaacatcacctgttgctgggtcttggctggatcaggtctccgatactcaagatacattacatacaaccaatgtgatggacacggttgtataggaggctgaaaatgtgaacaacgaatgggatgacacatacaggaaaccgcatgagcacattgtggcacatgcacagtgtggataaccagatggagcaaatgatgagaaaaattctctcaccagactgaatggcattgctgaagatggctgggctacatattcattattgctcttgacacttgatctacttgct

SEQ ID NO: 69168 - DNA, 410 bp, Glycine max
  unsure (1)..(410): unsure at all n locations
cactaacctatagtctctgattattgatctcgctctgcacaagcttccccatattacattaggggactttatttaccactgcccccctttttcctagtttcgtagtatattctttgaaatttgccttagctaatgtctattttattacatgtcacatttatttgctgtcaatttcggttccaattccatggtgtctgattgatgacctatctcacccctatgatatatgtcgtgtactttatgcatattatcatttttttaattgttgtgcccaaaaataaaacgagctaataatggcagcgggaagaacttccttttattaggaatttattaagtgccgtggatataattgatgcccaattttatacttgtatgattctgcaactcttatcnttttgcttaataatttt

SEQ ID NO: 69169 - DNA, 303 bp, Glycine max
cagcaagcagttcatattctaatgaggggtccacagatgagcaaggtcttaattgttcttggagagcgataaagattgataggacatatgacaagggtcatgaaaacaggtatgttaagttcttggtttggtttgcaacgggagtgggaggacttgaacttctgtgcgcatttgtggtttggttttttctggtgagaacaacggagcaacaagattctggtgcagatgggcgggtctacgctctggccggttttagaaaattcagttattctgagctgaaacaagccaccaaagggtttagtc

SEQ ID NO: 69170 - DNA, 421 bp, Glycine max
atgcgcgcgtacgtaacctcaggcttccgctcgggcatattaccatcgtatatttatcgagtattatatgcagcagcatgccaatgtcttatgaatctatggagttttcacttacttgctgatgagaggcacctacacatgtattcatgaacggccatagttttgagaccggtcttactgcgaccttgataaaaagaatttgacaagctacagaaatattgacaacatggatgatcttcgacctggtgccatatatcgtggtgtgagctgaaagcatgtacatggcgtggcccatgtatcagctaccatacaatgtctggagaactgtggtgatgactgttcacatctatgatgtatgcgcctcactaaccttgaattgtattccgtttaagatttgataatgccggttatagctttatat

SEQ ID NO: 69171 - DNA, 295 bp, Glycine max
ctagatttcaacttgatacacaacttcaatatatatctgtcttataacccatactagcgacggactatttcaacttatctacaagctctacaaacactccaattcccaatcctaccctctattaccatattaaactgcactctcccacatatatcatcctcaaccactcaactaacatcatttacttaatcaccaaacttccactctactacaatcatcactctcatacctaccacaataccacatttctcaaatcataaaaccacacctgatcacataataccattatctcata

SEQ ID NO: 69172 - DNA, 293 bp, Glycine max
acgcccacgcgtacgaatacaatcactttgacgaaaacgctgtcgattgggctttgtaggtctagtacggactatacctgttacctaactgccactgcatcagcttcgtcgatcgaagtggagcttccatttcatagacggagacaaagatagctaggacgctcactaggctgaccctgagcatgacgaataacaagcctacttacaactgtatgttacagcctaagacacatattatgaaggactccgtgatgaatctagtagtacgggtgagcaaacatagctgcataaca

SEQ ID NO: 69173 - DNA, 223 bp, Glycine max
acgctcacgcgttcgtacagctggatcataaccgtatttgactcactgcatctgactgatccgaatgtacacctctaggaagttaattcacatcaataacgatgcctatcccactgacttttatgagacagtcgcacagtacttgttctactcgcataacaccaatcatcaatctatattgagactcgtaagatctctacataaatcatgcaattcaaatgga

SEQ ID NO: 69174 - DNA, 293 bp, Glycine max
ctccttctctctccgtccaaaagcgacgtcctcaacgcgagagcgagagatcaggcccaagggctcggagtggttccgactctctctagacttccaaactgcgcgtctatgaatatctctcatatggaactcatgttctccatcatctacggcaaactctatcctttcaacgcattctacttgtgctcacaactctgtattggtcgtactctttaagaacctcacagctcctaattctacttatgatccacatctgcgaactcgctttctgcgttcaatagctactctcacat

SEQ ID NO: 69175 - DNA, 280 bp, Glycine max
ttacgcatcacaatcgattgttatttgtattctatggactacgatttcaaaagcgagtcagtcccatttccaacgatgtaccttccttcacctccaccttcacctatgtaccctccatcaccgtatcaacagaatcctacttcttcttcaatacttgacgttattgtttatataaagccttaatatattatcacaccttcatctcatttatcattacttgctctatataatccactgatcaacttccaatttgattttttattgtacaaaaaaaatttaa

SEQ ID NO: 69176 - DNA, 281 bp, Glycine max
accgaacctcaatttcgagccaggcctacgcgtacgctcgaaagtatctggagcacactagcatgtatcattggaattgctggactctgcggcctagggtgtatcatggcacttctgtatgcatatacatacgcataatgcacctctaaggaagacattgagctgctgtcaatatctaaactccggttaattgtaagcaatgagaaacttaccggtactataccatgacctatttgaagcataatgaccgtatgccacgcttgttcacctattgaacatgc

SEQ ID NO: 69177 - DNA, 301 bp, Glycine max
tactccactcctactatcactcacatttacctcttacagtagacaactgtcatctttgcatatgggatcttagactactaatcatatttctattcactattatcagccacacattgatctatctaatttacttttcaacctactattttgattcttactacatccccatctctcatcttcctctacttctattccaaaatccatacaattttcatacatcatgatttatcccccatagaacatatttgaatacactataagacacttatcttaacaatttatcaaaacacagtattaccaa

SEQ ID NO: 69178 - DNA, 326 bp, Glycine max
gtcacgcgtccgttaaggtataatgagcgtcatcaattgaccagactgccactgtggcacagatgctcactctgtgagcagacgcggagctatcttctttctaggacactggagctggaactctgagaaacattgaccgaaccactacttgtgaaatttgctagaaaacccagttctgttctcgaattcgtgcccacatggctagacccttcatcagaggctccagagctcagcgcgtgtctggtctatcttggtgcctcagcatcttctgaataagccccgctaatgcaggaggcttcactgacttagcaaacaagcgggacctc

SEQ ID NO: 69179 - DNA, 389 bp, Glycine max
cggacgcgtgggcggacgcgtggtcggacgcatgggcaacaattgctccatatgaggctcggcgtgatcggcttcgatgatgaagctgtttcagttccagaaaccgtatgatcagcacgcgcagtacgtgaagatggaggagcacaatttcctcagcgcggatgaagcctgcaatttcttctaggatgaacaagcaccgacccttcaatggtactgtccagaacagtggagctgagaaaagaaacatggaaattaaaccgcttttagaaattttagtttgaaggtagaaaatgaaatactgtgcaaacgaaacagagagaacagagatcaatggctgcatggcgtggggtcggaaatgagaggttgattatgactactctcgaccgtgc

SEQ ID NO: 69180 - DNA, 438 bp, Glycine max
  unsure (1)..(438): unsure at all n locations
cccacgcgtccggagttatgaaatttaggttagattggactaatacttggacctactccagtcccggcttctccgccaccgcctccaagcgctgctgttcctccgagggaaagcagcctcactacgacttgtacacgcgcctcctctgcgcgtacctacgcgcttttgttccctcttatgatcttatcgcgcaccagccctaccggacttcgattctccactacggctccggctacgacggttctgttgcggcgcgggccgagttcgtggtcaacgcgcttatccacttctggctcgtggacaacgatttctcgccgctgccggcgagtgtttgccggagcctcggggtttcgtttgcggtgggggaggcgcctacgncgncggggctgggggaggtggtgaggctgtttgtgaggtactagaatttgagcaccgtcg

SEQ ID NO: 69181 - DNA, 278 bp, Glycine max
ctcacacgtcatgaaagtccttgtcttagatattgtcggctattcttataactttagccttgggagctgatatgtttacaacagactaactcattctcaatcttacaaacttctgtattaattcaacactttcattattaccactcaacacatatccatacatacaggagaagactccatattcttatcaaattaccaagcaccaatattctaatcttactattcaaaacagctccgcttattatcggactatacatatgcaatccccttattactat

SEQ ID NO: 69182 - DNA, 115 bp, Glycine max
acgcgcacacctttctcaacttctattccacatatctagtcctctattattctaactcatcctatggagagggagcgaatgagatcatggagcttcgttcgagcttacgagactc

SEQ ID NO: 69183 - DNA, 181 bp, Glycine max
cccacgcgtccgctcactcttacggacagcctgaaagcattactcacataaacaacaccgggtatcgggttcatcagatccttagactgcatggatgctgcatttactacattttcctacctagtgcacacggtttgttgtgccaatacacaatgtgaggatacttgactggactagcaga

SEQ ID NO: 69184 - DNA, 372 bp, Glycine max
acggtctaacgctatcagaatcaacacatcggcatatacattaacgtgctatgctgttgagttagtaaacaccgcgcctaaaatcgttcgtatcagattgaacatgtctccaagtagcacggctgatataatggctacccctgatgcagctccctggcagctcaatgtagatacatatgatgcattcataatcaggaacaataatttctacaccttattatcgcttcaactttgacacaacattaacatgcatacactctgataccacatctctgatgacaattggactaaggttactaatatatgttcatcatttgcatttaccctagccaaatttcatcaacaatgatctcttggataacttatatattg

SEQ ID NO: 69185 - DNA, 375 bp, Glycine max
accgatctccaattccgagctacgcccacgcatccaaccactcgtgagtgcatacctaacacatactatgaccaacatggactactacacgggcgaggtataattcgagacttgatcctaccatattccattctacatcaaaaactattatattcacctacctacaccctcaaactcaccaaaatctcaactactatattctttataagccagttaccacaactggaaccctccacatcctcaagcatcaacacgatcctaagactaatgagatagacaaagaattaaagtctgaacaaggaactcaaagactcattatctatgaaaagaaagccatttatagacaacgaccgttactactctccaaaaccttga

SEQ ID NO: 69186 - DNA, 318 bp, Glycine max
acggaaaaaaccgacacaaagatctagacctagctagaatcaaacaggtgcgacctaaggtagagagcacatgagcatgtcgaggaacttgcgagctgagcttactgcagtaggcaccctcctgcatggatgagcaacccaaaccagacacatggtcagcgatgccacagggctggatcatccctgctggcggcgctgccacctacaccgactgggctttcaacaaaaccttgaccgtaaacgacactctcgagttcaacttcgacaccggccaacacaacacggccacagtaacgaaatccaatgtccacacgggca

SEQ ID NO: 69187 - DNA, 272 bp, Glycine max
ttgcttttcatgtattaatttttcttatatgactattataatctgttggacctggttcaaataagttactaatataaccgatggatttaatttagttttaaattttcctgtaatttcactttttttcttatttttgaccaatattgcattaaaatttaattttcaatgaataactttgttacaaataaaattgcttctatttatctcaaatttcattacccttcactattggtttcttttaactttcttttattctttattggtatttcaat

SEQ ID NO: 69188 - DNA, 305 bp, Glycine max
acgctctcacgttactgatcgtctattcggcaaacctagctatagtattggagccgatcctacggggaggaggaacccgagcacttccagtgacgttggagacaagataactagtgaaggcaggtgtgacgatgaatgagactatctcatgaaacatacgaccaacttggtttaagattaaacactacattatcaatctgcataatcatgactacacacaaagatcatcaacaacatgactatgaacaacaccaagaatactaacaggaacatgcttaaccaaggagctgcaacagtaactgaat

SEQ ID NO: 69189 - DNA, 252 bp, Glycine max
gtttctccctcgtatgagtgcgtgtgtgagctatcttcttgactcttcacttatgttgactggcatggctctatgagaatccgttgctgggtaccactcgaacgttcctgcttatgcgagtttgacgtccaccaaaccaagtcctaccacgcttgactctgtgctcccaatagccattgaaaacataatcactaagatcgtagcatctcaagtgtagcccctctggagacattacatcagatcacgcggatc

SEQ ID NO: 69190 - DNA, 291 bp, Glycine max
acgcgcacgcgtccgtgccaagcttggtctctatctcatttagaggactgtggagaagtaacggcgacaggggctatcactcttatatgctagcaagctatctaagatatcccgctgcgtcataatagccctaggcttcccatatactccatttgacctacttctatacagattccattgcttcttatattggcattggatctataccattcaagggtacgggattctgacattccgaattatgcacacaaatacttcttgaagtcccttaagataactagatgcaaatat

SEQ ID NO: 69191 - DNA, 162 bp, Glycine max
tatgctcacaactttaacactgcttttcaattatacatcacactcccttttactttcaccttcaaatccaccttagaatctatagatacaacacaactctaatatactttacaaatttttttccaacttaaatacttcatacatatcaaaaaattcttctta

SEQ ID NO: 69192 - DNA, 339 bp, Glycine max
acgctttagggaaggatgaacgaacaactatactactattatccttattatctgcatcattgcaggtaaggctacttattataggtataagatgtcgttattatgcctcacatatggattcgatatgcctctccaacaactcagctgtttatcgattcaaagacccagcgtcccagttgtccccttccatgtctaggatatccagatccctcatcacagactcaccatcactacgcactaactgaacattcacaaggacatgaaccatgctgatcagcatcctttgtgtgcatgaacatctgccttgcttctacctgcgactggctgcacaccgtgctg

SEQ ID NO: 69193 - DNA, 233 bp, Glycine max
gaactgtcgatcatacttctactctccgaatccgctacacttgcatctcacatgggtgcaagcaccaacactagcatattgaaacccctcatatttcatcacccagagcagcttctgtattcccaccggtcttatctacgcttgcacaccaaatctaagacccactgcggagcgaattctcggccgatggtttcgaaagccacggcggctccctgagccttgaagacagaaaa

SEQ ID NO: 69194 - DNA, 277 bp, Glycine max
tcgatccttgagttgcctttctagccccaaggattcattggtgacaagcttgataccaggtgaggtttaacttgaggaagagactatatatcgaaaaatatgaatatcgtaataataatctcatactttcacatcgaagcaatatccatttcaaacggtgctaatatcatcctatttaatgactgcctaacttatttggctttctttgtccaattgccctaattgagtgcttctaacgctattccaatttattggcccaattgagcttcgttaattt

SEQ ID NO: 69195 - DNA, 402 bp, Glycine max
atttcccgtggtccccaccatctctccgcagtcatttaaatcatgctattttattgtatcggtttactctcacaaagagtctgtttgtttcctcgattcaattttccttgatatggttgtccaaatccaaccagatagattatcaaactcattctcactcattcccttcgtttgtgacggaaattggtctcctgcttagtcatatctgcatctgattttgcacgtggcgtacacccagacattctgcctgatctagttgggataaagtgtttccttatattgccaagacgagtttactgtgtggcgggagtgtttttagtttggaggcctaatatacttgtgagacagacagcttttcgactttgagtagttgggtgatagaagaaggctaaggttctttgg

SEQ ID NO: 69196 - DNA, 333 bp, Glycine max
acgctacgcgtacgatccaacggcttcagagatgaaactttcgaacccactgagggagactaaagtgcggtaactcgtcctgaatatctctagtgtctagagtagcaatcgtgtcaccagatcctccaatgcgtcatcatcaacttatggataataccacctaccttacaaaatcatgttcacagtctccgtcatcaataccaacaataactaaaacaacggttaccatgacaactacatgagataccttggcttagcacctgtgtcacaaactccagaatggttatggacctagtcaccatactagggaagcttatcgacaacgttggattt

SEQ ID NO: 69197 - DNA, 353 bp, Glycine max
acgcccacgcgtacgaaaaagttgttgttgagatacatgtttgtggactgcgatagtcgagctggaagtgctgctactggtctacagtcagctcaatggcgtcttccatctgagctctgtcgccttacgtccaatcacagctcactaaaaccacccttgcaggtacaatccctctctatcaacgaagcaagtgcgatatgagcaggacgaggtctgcgtgtaaaggaattacggcctatgacagctcgatcgcgggttctactctgacacccacatgcagaaccatcttccatagagctcgaaagattgcccgacaagccggaaggggacagttattggacatggaagactca

SEQ ID NO: 69198 - DNA, 270 bp, Glycine max
ctcatctatggacttaagtggcatatctaaacctccaaaattcatgtgaatcctactttttggtaattaaaaatgaagtttttaaacctcttgaaaggcagacttgtcaatcctgctcctgtccttcatcatggggcctggccatcctgccaccaacccaaaaccttttttttcaaagtaaccgccaccattaccaccattaccaaaaccaccattgatgtatcacccaccttgggaacacattacctaaccgttagtgtcccaaactcc

SEQ ID NO: 69199 - DNA, 266 bp, Glycine max
ctcttttcttacttatagacacattctaatggcacagcgctttacgtggccatcgtggccgtggagcgtgcccgtttaccgacgttagatcaagtggctatgactccaatgtgacagagaccgatgccaactccgaggcaccctacttgagtataacgaaaagatgatctcaatgaccatactggtacggctggtaaacgacgtaacaatgcacagactagaacagatgtacctgcactcaatcctcactcaagaacaccacatca

SEQ ID NO: 69200 - DNA, 331 bp, Glycine max
actcgaacctcaattcccacctagacccacgcttccagcgtatacgctactgtcttattccaaccctctaccaaatactacattgctaccacgtgtacgtgatacacatccaccctaatttcagctcaactcttgctaaccagttacagcatgacttttaacatacacaatcatatattacatccctattctcaaacaatacgcccattcccggtccgtatcttcaatcggcatgccacaaccactatcactatcatctacacatatcgacaaagacacgccttataattagtctaaaaggcaagatccatttgtgcccataacctattcc

SEQ ID NO: 69201 - DNA, 83 bp, Glycine max
ataaaataagagacagactctgtaaaattcttgtacatgctactgctgtattctatcacaatgaaagagacaaatactgctgt

SEQ ID NO: 69202 - DNA, 137 bp, Glycine max
aatctctacatcatatcactcaatatgatcaacctaaaacttaaccccttgccttcacctttcgttgatgacaaatttatttccaccctcaataaagtaaaacctcatctccttaaaaagatgctctcccccatcat

SEQ ID NO: 69203 - DNA, 266 bp, Glycine max
acccacctcggaatctaagaatgtcctaacgatatcatcacaggactaataaaccaggtatggatactcggggtgtatcctcctaatctttgttcctgaacagttgacatcatcaaactttacataggatcacatcttgctgtttgccttcagaaccttattttatacttttcactattgcaatgatgccgataacgaaataactactaaaagcagccatgaatgctcttcttacactgcctgtatctggaaactctgaaagtatt

SEQ ID NO: 69204 - DNA, 321 bp, Glycine max
cccacgcgtccgcttcactcccattttttcaaaacattcacctctccttcagaagaaacgtgctagggactcggagcctcttccgatgaagccctggccactgagtatagcagttactctcgccctaagcccaggcccgctcctgcaggcttcaatcccgccgccggatccgggtatggtaggaagcaggagtcggaatacggatccgggtatggaaggaaggaagaaggagaatacgggtcaggatatggtggaagaaaggaggaatcagaatacggatccgggtatggaaggaaggaagaaggtgaatatgggtccggg

SEQ ID NO: 69205 - DNA, 305 bp, Glycine max
  unsure (1)..(305): unsure at all n locations
cctggctccaccagcttcacctcctccaccatctcctcctcctcctcctccattgcctgtgcttgaaacatcacctgaaaagggtgcaaactctcccattagaagaggccctggaaggcgtggaagagatcgaagagctggttcacggcaccaccgcaaagttgttgctggaagcagagagatggaaccaagttaacagttttgtttgggcgagattatattattagtagatttggttaaaattccacctacggaaatcattcngtgcagagcttgantggaaaagtgcaagatgagtgtttttt

SEQ ID NO: 69206 - DNA, 267 bp, Glycine max
gcgcccacacgtccggtcaaggttaggaggtagccaccaaaatggatgtaaaggcaatgccaacatttttgcggctgaatgacagagctgcggtggacaacgtggttggtgccaatccataagagataaacaataggatagatgtcgctgctgagtccactcgtgtatcactagcctagttaatcatatgtatgatattctactgttgcaagttgcatgatatgtgctcatagacatgcactgaactatggcatctgagtcaaagct

SEQ ID NO: 69207 - DNA, 353 bp, Glycine max
tcgcccacgcgtccgcaatttaccagctatacttgttccttttgaaggttagaagtgctacaggacaaacaatggcagctactcaggaagatgtgaagcttttgggtattgtgggaagcccatttgtgtgcagggtccagattgcccttaagttgaagggaggtgaatacaaatttttggaagaaaatttgggcaacaagagtgatttgcttctcaaatacaaccctgttcacaagaaggttccagtgtttgttcacaatgagaagcccatagcagagttctttgtgattgttgaatacatttgggaaattttagacatggaagaacaaccccatcttaccttctgatcctta

SEQ ID NO: 69208 - DNA, 249 bp, Glycine max
cccacgcgtccgcatttcaccagccatgctagctagttaagaaacttacatgggctacgcgtcaaacacttgctgaaacgcgctaagatgtgatcctttcgcgcactacggtaagcctacttgagctcaacgagcaaactgcacgcctcatgagagaagttgaatacagaagtggggaacaacaaagggacagcatgagcgaaatgctactcaaattcaacgctgtgcacaagatgggcacagcgtata

SEQ ID NO: 69209 - DNA, 282 bp, Glycine max
acgcagacgcgtgggcggacgcgtgggttccattggcacccacttttgaatatattactattggttctttggtacttcacttgcttccatacacataaccatgtcttctcaggtcctcaacccaatgcctccttctattcttgcctttagcacttcactcagttttagtgcgcttgatcattgtcattctgggtgctgtactttattcggctaatgttgcttgatatgggtctctgctctaagcgtatgtgctgaacttgatgagctcccaagttgattgag

SEQ ID NO: 69210 - DNA, 263 bp, Glycine max
  unsure (1)..(263): unsure at all n locations
cccacgcgtccgcattaatgtgtgtttgtcacgagacccatagtgctgccaaattatagtggctctgtttctctatctgaagaagaagaagttctgaagaagcatgtgtggaagtgctatcatctcagacttcattggtgtgaagccttgccccaaacctttnccggcatgatcttgtgtcccaacctgaccctttctcttaccttcttggcttcgataccaccaacaacaacaacaaccaaccacccctttcaaaccaaaaa

SEQ ID NO: 69211 - DNA, 378 bp, Glycine max
acgcccacgcgtccgctttccctctgttgactggtagtttcgaaactctcttctttttccacatgttctaacggtttgctgcttctctcttcatgaagatccccaacaagcatccactattatatgcaacatggaacaactctctcaaccatcatttcaaccccatcaagtctccgaccatcttcttcattcggatagagtcccttgcattgaagtgattttgagagaaaaacaagaagaggagttggagggaaaggaagtggagtatttcaaagaaagagttgagagattggagagtgagagggaagaagttaaaggtaaatggggtcatgtttaaggctttggaatctctcacttaatcgaagggaaagcttgtct

SEQ ID NO: 69212 - DNA, 276 bp, Glycine max
attcccaatcgaccactcataaccctactcttaccatatatatacaccaatcctttactcacttaccttcatacacataaccagatatatttacacccatgtcatccaatcacccatataattacaaaattcatctataactaacaatcttctttttaacacatttctaatcctattaaacaatcacaactaacaatacaatcttcatcctacacttactcaacatttacaaactcaactaattacatattcaaatactacatcaatacatccaac

SEQ ID NO: 69213 - DNA, 386 bp, Glycine max
acgcacacaagcactacaacattttctttggtctctcattctctctatagctagatgggttctggggctttagaactacttctgatcttgggtcttctggctagctcatgcttagcacaagccccaggtgctgcacccacacaaccacccactacaaccccatcaccaccaccaccaagatcagcacctgcaccagcacccaccccgccagcaacaccaccaccagcaacaccaccaccagcagcagcaactcctacaccagcaacatcaccaccagcaacaacaccaacgccaacaccaacagctgcacctttaaaacccaacctgcttcttctcctgcaacctcaccagtcccttccgctagttctccaccagcaccaggcaca

SEQ ID NO: 69214 - DNA, 354 bp, Glycine max
aaacgtgacgtttttaactcaagacccatgttctcagtctaagcactggcatacattccgaaacattctacactatcaacttgtacaaaggtcactataactcaaaccacactctctatcactttgtataccctcacatcctctaatttgcaatcatactactcgaatcattctctctaacgctaatactttctaatccattcaaccctctatcttcatctctcatccaatactcataacatgctttcttggtacaatacgctcacttacatgctgctcttgtttgcctatacaacatcaccattgcaaacatcttggctaactaactaacacagattccaagagtttacagca

SEQ ID NO: 69215 - DNA, 235 bp, Glycine max
aacaaacctcagaagccaggcatgatactctcctcgatccaacaccctgagggactatgggggtaatacagactcatagcgtgacaggtcactacgatccctaattcaagtgcaaaaaagaccacgtgattgctcctagtcacaacacgtgtaaaatagaattataggatatcatacataacctctgcatcaagacaaatatatcgaaagacgcgctactagacatggatctaaa

SEQ ID NO: 69216 - DNA, 341 bp, Glycine max
aattctgtaaatatatatgtatatgatattacggtcaataatgatgcactcacaaacttttctacacctttactatttaaggtaaaaaaatctctaataaaccttttattaccacattttactaaattaatatttcactttaaaaaaatcctataattttacataaaaacttatcaatttttaaattcaacttacttaacttctaaaattactatcaaacatactctctttattccaaattacaacttctactttaaaccattaattctcaccattaacacatacttttaaattaatcttcacactttactcatcacaatttctcatttacacttttttat

SEQ ID NO: 69217 - DNA, 270 bp, Glycine max
gaccacgcatccaccatacgatattctatgcatgccatataaccttatatcattattggatctcacaccatggtctaggtcacacactgacttaagcttatcatgtggcaatgctctatgaaggaaccccacatcacactactgtacacgattatacgaggaacctgcttacagcaataggccatttcgtgctctccttgacgatgatcttattaaaactacatccggtaaccgtctcttacttgaccttaatgcaactcaccatgaagc

SEQ ID NO: 69218 - DNA, 242 bp, Glycine max
accggtccgtagtctccacgcttgcggccttttggctaagatcaagtgtagtatctgttcttatcagtttaatatctgatatgtgggccattggcccacacgatattaaatttattttttgaaggggagatcccaatgcagtagcttgctactggggttctcaagcgtcgtccttgttttgcactatagcattgtcctggcgcaccctataacataagtgtaaatatctttaatggtttagt

SEQ ID NO: 69219 - DNA, 352 bp, Glycine max
cccacgcgtccgcaatttaccagctatacttgttccttttgaaggttagaagtgctacaagacaaacaatggcagctactcaggaagatgtgaagcttttgggtattgtgggaagcccatttgtgtgcagggtccagattgcccttaagttgaagggagttgaatacaaatttttggaagaaaatttgggcaacaagagtgatttgcttctcaaatacaaccctgttcacaagaaggttccagtgtttgttcacaatgagaagcccatagcagagtctattgtgattgttgaatacattgggaaaatttgagacatggaagaacaaccccatcttaccttctgatccttacc

SEQ ID NO: 69220 - DNA, 381 bp, Glycine max
  unsure (1)..(381): unsure at all n locations
gttcattctctttgcgcagttccctacctctcctttcaagatgcagatcttcgtgaanacgctaacctgaaagaccatcacccttgacgtggaaagctctgacaccatcgacaacgtcaaggccaagatccaggacaaggaatgaattcccccggatcagcaacgtctcatcttcgccggaaagcagctcgaggacagccgtaccctcgccgactacaacatccagaaggagtcaacccttcaccttgtccttcgtctccgtggtggcatgcagatcttcgtcaagactctcactggcaaaaccataaccctaaaagtcgaaagctctgacaccattgacaacgtcaaggccaagatccaagacaaggagggaatcccccc

SEQ ID NO: 69221 - DNA, 342 bp, Glycine max
acgcgtatctgcaaattcagttcatccaaaagcaagtgtatatgcaaatgataattcttatacggattcgcaaaagcatcccttgcggccatatcttgactacattgaatatctttaccaaataatggatcctctatctgatcaagaacattttcagcatatcatgccatctaggttacaggaatttttaacaataacctatgcaacctttgatcgatactacagagactcatacttacgatacttttaaaagagattcacataaatccattcattacaaactaccaatcattcaatcattcatacacaagcttactgatcaaaatacttctattaaaacca

SEQ ID NO: 69222 - DNA, 324 bp, Glycine max
cgatcagattctcaagtcaatggtttttttgatttagggttgcttcaaagaacacaaagtgggcttctttggaaccctagtttttttggttctcccaggtattgctgcatcgatttcctcttttagaattatttccactgataattgatccctttttgcacacttttaaaattttattatatcagtgtcaattttttaattaatggttaatattttaaatccccatattctgatttcctttttcctttcattttatctttactttttacttacttccattcattcatggaacctaaacaaaaaccctaggatgtgttaattttc

SEQ ID NO: 69223 - DNA, 408 bp, Glycine max
tcgcccacgcgtacgctttgcataccaatttttattattatcattgtttcttcgtttcgtatagtctgttatcgtatctgctattaacataaaaattaaaaccaaagatgaagatgatcttaaaaaacggttcataaacgtcaagaaattttttgtcccaacaatcacatggaaaatgtaattcaattaaaatcctatgacggaggtaccttgatttattttaggatttaactcctctaatcttgatgatttatattcaaatatattcaattcctttaatatgtaagtaaggttttaaattggaataccaaaatcgtttatatcttgatatttatgagaaattactaggcaaatgaaacctatggggtggtaaacccaaaatcttgaaattttaaattaaaatatttt

SEQ ID NO: 69224 - DNA, 279 bp, Glycine max
aattcctcgctcgacccactcgtcctaaaaaatataaaatcatcaataattaataattaaaaaataataaaaaaaaaaaaaaataaaaacgcaaaaatataacaaaaaaaacatatctatctcttctttctttatttttcttcccctttttccccatccttcttttcttcctcttctttcacatctttttccacctttatcaccttttttactttctttttcttccaatttcccctttacttactcctcttttctctctcactaacatcacttttttta

SEQ ID NO: 69225 - DNA, 297 bp, Glycine max
cttcattccccattaccatggtgcatcctatccaccaccactattatccccttcactgcaaagaacgcttctactagattcccaccttccaattcattctaccaccacaagcaacgttgatctctggataccagtgatgttcgtctcgcctgcatttgaccctacaatcacattcaaaaccaagactcttccgacattaattacaatggtacctccaaatcataacaactgatcacggcgtgagatcatgatgatgattctgatgttcttattgaatgtatatatgtgtataagtct

SEQ ID NO: 69226 - DNA, 200 bp, Glycine max
acgtgataatgaaaatattcaattattgttcaaggaaaaaaaaaaaaaaaaaaaaaaagaaaaagaaaaaaaaaaaaaaaaaaaaaaaaaaaaaaaaaaaaaaaaaaaaaaaaaaaaaaaaaaaaggaaatactatctaatcacttaaatttaatcaacttgttcaacccatacaacaactttactatgcttaccctaaa

SEQ ID NO: 69227 - DNA, 381 bp, Glycine max
gtcaatcttttgtgcaaccttactcgaacgcctacggctgctaaatattcaaagcgtatggctcaattgtactgaatggtcaacagaatacaaagcaagctctcgtttactatgtagaatgagaatgatctatctcaaaactgtttcacatgccaacttctgcgaaccaatgcatacaaatagtgcctctaatagctgctaagatagaacaatctcagaagcacactgacatccattaagagaacatcatgccaatatcctatcagtaattagctgcagtatcgagttcaagcacaccttattaatgcttgcatctatgcactctgcaatgaggcacttgttgctataactaatgcagtagaaccatatcaggaactggat

SEQ ID NO: 69228 - DNA, 243 bp, Glycine max
ctttctgacaacataaccatcacttgatagcatgtgcaaccaagaatgcctaccacaccaaagaccagtgaaccatttatcctcataacttctcaagtcaagccttccagaaaagtctcttcattgccagaacaacactctctcatacaaccatcattcttaacacatactaatacatgaacatcaccaatgcccttacaactacactcacttatactgcataaccctgtgatcttcactttt

SEQ ID NO: 69229 - DNA, 253 bp, Glycine max
accgaattccaattcgacccacgcgtacgcgcgtttgcaatccttcgccgtcatgtgatcccatgagaacgaatagtatgtcctgctaaggacggggtatcacactttttcctgtgcccgcatgcccatctaaacactgtcttgactagagcagccacatcgacgaatccaaccatctaagtgctattcaagtctaaacacacacacttgaacttattaacttatcacatagaccactcctataccctatcgc

SEQ ID NO: 69230 - DNA, 210 bp, Glycine max
acgcaccctaacatttttcccatcaaattttatgtaaaattcccaaatctatatttaggcctttgatctgttacaccttttaccccaatcaaaaccaacacaacgcctcaaaaaaaaatcagtgcttagataaatatacactgtcacattcactgtacccatgtaccacatcattattgcatagtattatcattttaccttatcactata

SEQ ID NO: 69231 - DNA, 309 bp, Glycine max
caattcccaattcgacctacgcgtcacgactctgacaattcttccatcaaattttttgtaaaatttccaaatctattattagtactatgatctagtacaccttttaccccaatcaaaaccaacacaacgccacacaaaaaaaacactacatagtaaaaaaaacactctcacatacactgtacccctgtaccacatcattattgcttaatattttctttttaccttatcactatacccgcttaccctgtttactctgttataattactcttgctattgggtgcccttcgttttcatttttgagaagcttt

SEQ ID NO: 69232 - DNA, 134 bp, Glycine max
acgctcacactttggcggccacagcaacaataacaatggcagcctcactacaagctgcatctacgttgatgcaacccaccaaagtgggcatggtcactcacaacctcaaatctactcaatgcatttctaaagct

SEQ ID NO: 69233 - DNA, 266 bp, Glycine max
taattcccgtatcgacccactcatactaccacaccttcaccaaccagacattcccaattcacgaatagcaattcatacacggcatttctcaatctatactatagccataccagtattcacattctatcactaccttctctaaaacatccacaatatataaacaaccctttctgctctttaccaatttcaatttaacccactaaacttctttttaaaccacatctaacactctcaaaccctatacttccatctctctctatataatt

SEQ ID NO: 69234 - DNA, 209 bp, Glycine max
tcgacctcccacacctactcctaatcctcataatttcttttctcacaatctctcactctcggtacctgtccaattcctatcatcgccataaacccacaaacaatcccaatttcatctccatttaaactcaatatttatttcaaacatctttaacctcttcattcatataaacttatcttatatctaatattaccaacccttaatatact

SEQ ID NO: 69235 - DNA, 238 bp, Glycine max
tataattaggatatcactccttgacatagctctcatcgtttcaccgatctaaatatcgtgacgtgggtttaaatagacgctataagaaacctttgaactaaatcattcatcgttattagatcatactttttaccgatgacatgcacactttaattctatacatatcattctatcgtacattcatatgcttctaccttactaaatccagctcttgcaacatgtgcactacagtttattt

SEQ ID NO: 69236 - DNA, 167 bp, Glycine max
cccatttaatttttttttaatttaaaatattttccttattcttctaaataattaagtaaagcctcgttttacattgcacaacgtataatatctccaaatataacacccttattaactcacaaattaacacacaagagaacaccatatttagcacaaatatgaacaca

SEQ ID NO: 69237 - DNA, 314 bp, Glycine max
cctcccgttatttaatattaaatttctatgtaattgtttgttgtaataatcattaacttactcaggggccgggggttgtcctgatccatcacaacactttgtcacttaaattcaaaaaaatggcgttaacaatgtttcgtaagaacatcatcacccactacttccagtttgcttcttctttgtcttccttgcctctccattcctcaatctacaaccctctctctatgtctctgtcttcatttcatatccaaagtgttagtggtggttgtgggttgccatatttcatacctggagctgtgtattttgaacacaac

SEQ ID NO: 69238 - DNA, 254 bp, Glycine max
attccgacgctacgacctacgcgtatctcacacgcgtcctcatatgcaataatgttcgagatcatccacactatttcatagagcatcgatgtcctagaacactagattgaggatcacaaacgagtacactttgattagcaaacattttaactcgactgattactctcttaacttcacaaaggtcttcacaaacttaaacaccaccattgacagcacatttagttacttgtgtatatgatcattgactagatcca

SEQ ID NO: 69239 - DNA, 408 bp, Glycine max
aggacttattcttcacagggaaactctactaatttgccttcaccacactcactctagagtaacattcgcagcctgcgtatatcaatttccactagcccgaacgcactcacttcaaagatttcttgagaagcgaattaacaggttggctaacagatccccttatgccttaacaaaaaaagtgattcacaccatagacaacaactcttattctgacgacactccacattatggttccttgaactagcactttctttaaggcaactaatgttaagtctgctttataagaagtggtactattctggaataacatttgcatgcatgtagaaccatacaaactcatataactatgttatagctctcgagaccatatcatatgcctaattagagaacttgaatgtgtcaactatg

SEQ ID NO: 69240 - DNA, 399 bp, Glycine max
cccacgcgtccgaaaaatcttgctagagatttcttccatcactaagccacaccggaccacggttagcaagtatcaattgggttatttttggtcatctaataaaaagcaaaattaagcaagagttactttgaagaagacttgtacaaagatgagttcagcaagcataacttgagctgtggcagcaagtgttggagttgtggaagccttgaatgaccagtgcctgtgtacgtggaacattgctttaagatcagcacaacatcaagtgaaaaaccatgtgagatccttgtctcacgataagaatgtttcttcttcatcatcttctgctgtggtttctagtagattaaaggaagatggtgcataacagtcacaggaatcattgacgaaattaatgtactttaa

SEQ ID NO: 69241 - DNA, 151 bp, Glycine max
aattccacatccgacccacacgtacgccaatgagcaccacattgtaagattcgctagtgatgcacttactattgcaagtgatgctaggatggacaacgttgagagtagtataatttcaaatatattatccatggactttcatgcctcatat

SEQ ID NO: 69242 - DNA, 295 bp, Glycine max
tcttcctgatacttctatatcgccagctgccacactatcatcttattttttatattttttagttttgttttttttcatttatttattatacttttttatctatttttttctttttctctatatttttttctttattcttattatttattttcttacacattttctacttgtaactctattttataccaatctttactattatctaaataatttatttaattaaatcctgaaatctattctaaatccctcattatacaaaaaaaaaagctctaccgctcatataaatccaatctta

SEQ ID NO: 69243 - DNA, 337 bp, Glycine max
tatacacataaatccactgcgtttttgcattaccacactctgtacctcacataaggctacagtcaccataacatctatcaggaccgtcaatcataccactaactgctgataaagaacaaccttgactgctatcaacctaatacaaatcggtctcactctaaccgacgccgacgataaccttcccgatctgtccggaaaccttttcatttgggaatttaacactcgtgacttcgacgttacgcgtcacacctacgcacttgacttcatcgatgtactacctcataaaggaatctatactctgcattacgccatcgaacatgtaaattccacccacttc

SEQ ID NO: 69244 - DNA, 227 bp, Glycine max
acgcttacacttccataacttaatctatctcaatactgatctgcatccgactaccattaccccacggtcagctccttttgcttattaactctctagaaacatgccaagacaatccaaaaagtttggctccaacctctaactaaattttaaacccaataacgttccttatcactcataatgacattaacttcatcaaccaaaacttctaattaatcccatataacatt

SEQ ID NO: 69245 - DNA, 364 bp, Glycine max
actcgaacctcaattccgggctagacctacgctttcacttttatatatgaaaaaactcatactcatttcattcagccagataccatgtcccaaagaaaaagacattttacttattaacctattgaacttgcaaagggattcaaaaatttggtccaacccttaatcaatttaaaccctacaaggttcttaccactcattatgacattaactttattagtcaaaacttctagtttatcccatttaacatttgaaaaaagtcatattctgtaattacattttggtttcaaatctttcactttactcttgcttgatttctttaaaggttttatattttcacaaaagatttaactttaatttatattac

SEQ ID NO: 69246 - DNA, 201 bp, Glycine max
acgcccacgcttccataacttcttctgtctcaacctcatcttcatcctactactactacccaccgtctggtcctttgctgatcgagtccacaaaacatggcagacaatgaggattgaaaggataagactactcgtcggaattaattgcatgttttatctcttacaacatcaacatattcaactgcttcttgttctgattaa

SEQ ID NO: 69247 - DNA, 210 bp, Glycine max
cgcttttcaaacccgttgctggacaatgatttcaaggctgggttcaaagaattcaaggtggattcggaaatcgaggatgttgatgacaaggacgatgaaaacaaggaggagttgaaaaaaaacccctttgggttcttttgttccagcaacaaggctgcttttaagcctttttttcgtggatcaccaactttggaatcaaagggccaacct

SEQ ID NO: 69248 - DNA, 172 bp, Glycine max
gaattcccattccgacccacgcgtacgcgacaacaacaatgtcggcgaaatctagatccagttctacaacaaacatggtgactcttaggtctgggtcagttctcccgcaacgcacgcaaaacatccgataagtataccatgttgaacgccaattaccacttggtcaacttca

SEQ ID NO: 69249 - DNA, 450 bp, Glycine max
cccacgcgtccgctccaatgccgcagaagtacattagatgtgcgcagagtgattatggaggctacaatgtgacagagccacctattgatgcgccgcgagatcctctgtataaaactgagagggagatcctcaaggtgtacttgacaaaacactacaaaaatcgaaggaagggtgattctgagtttgtgcttgattttgaagagatttatgttattgattccaaatccaagtcaattaccagagccaaagttttggtaacagctcctggagggagaacaagagatagaaggagtgacttgcttgttatatctgatcgtgggagctccttcaaaataatacatgcgagtgaaaaagaggatccaacgactgtcatagaaaagcaggagtgggagcataagcagagagaaatggagagacatcttaagaagcttagagacttcaacatttcaa

SEQ ID NO: 69250 - DNA, 135 bp, Glycine max
acgtaaaagtcctgacccctaacctactatgacctaacactctgcaacttctcagccatgggcatggcgatcgtttgtcgatgatcacctacatgagtcacattccatgaaccagctcatctcatcccgctatca

SEQ ID NO: 69251 - DNA, 259 bp, Glycine max
ctacgcttacttccactcttcctactgaatctaacatcacgctcaataccaaatatctcttacaaagcactcgtgttaaaaccgagaaggtattactccttccgcaaatcattaacccttcactccctctgctcaaacatcacctaatacaatcaatatttacccaaactaacttttcttcaattctatacacctcaactatacaccattatacccatatacttcattaaaaacttaaacacatacttcataaaatttt

SEQ ID NO: 69252 - DNA, 133 bp, Glycine max
ttccgtcgacccagcgtcgctaattgtgggagctcggctctgatgcttaagggcaaactcctgtgccgtaagtaacatggccctaggctaagggtatgacagttgacactaagtgcaagatgataccgtgtaa

SEQ ID NO: 69253 - DNA, 237 bp, Glycine max
acggattttgtgtgtgcgcctttgtcttgatcattgtgctgttaatagttgtttggatacagaacgggggggatgaatgtacttagagactagaatatcatattttgatgctttattttgttttgaaatgggtggtataaacattatatgcttcttgttgagaaacctatgaccatccatctttttgagattgattgaggtaagctgactttacactattttgtatgatgcccacac

SEQ ID NO: 69254 - DNA, 190 bp, Glycine max
tcgtccacgcgtccggactggcgtttgtttggtgtgtttttcgtgtgcgtcgaaccctcggcgttggttaattttgttttgtgttttcggatcaacttgtttcgcgttcggttgcggggatcttcggtttaggtaaatgagtggtaaatgagtggtttttgagcagaagcaagtaaaagagaaagggatt

SEQ ID NO: 69255 - DNA, 377 bp, Glycine max
  unsure (1)..(377): unsure at all n locations
actcctatacttccaccacctccantattctcccttccaccacctgatcaatactattatagcaagcctccttctcaacaacactctccacctcctccttcacctcattcttcacctccaccaccacattcaccaccaccaccaacaccattttatccctatttatcaccaccaccacctcctccacttcactctcctaccccaccactttattcaccaccacctccacccccatcttcaccaccttttatagaatcaccttctcctccaccacctacaccacctttttaaaatcattcaccacctccaccatcaccacactttttcaccttaccatctctcaccatcaccatcaccacccatcttccccattcaat

SEQ ID NO: 69256 - DNA, 151 bp, Glycine max
ttccattccatcacaatgttcaaaacataaaggagacgattttttttattcagaacaatctcttagatatcaacaccatcaccatttcttacgctatcttctgcacccacttaaacttcttatgcattacactctattcaattactttttt

SEQ ID NO: 69257 - DNA, 381 bp, Glycine max
  unsure (1)..(381): unsure at all n locations
gaaaaagaaaagagagagtgagagacaaagagagagaagggaagcaaccaccataccgtgacagcgttgacaaaattagggctcattangaatggaaaatgccaccctttcacattctaaggtcatattcaatcagaaaagcaggtgcaaatttagttgaagtatgacaggttttgtgatagttgaggggtgggagggtaactttttgtcctacctagatagggatttcgatggaagagatgtcctttgcggttgcagtgccattaagagtaggtaattgtaattgcaattcagtctgtgataacccaaccacagtagttccccacatggatgtatccagatttaagctgattggggatacaaggttgttatctaattctg

SEQ ID NO: 69258 - DNA, 129 bp, Glycine max
agtccctttcctttacttcgctcgctcgcacctctcatcacaacgcagctcgtgtcgagaccacccctccttccccctctcttctcgcgcacccggacgtccctacctcaacacacctgagagcattcg

SEQ ID NO: 69259 - DNA, 230 bp, Glycine max
  unsure (1)..(230): unsure at all n locations
catacttttcattctccttaaccttttatctctncaccnaacaaccaanccctcaaagaaagacttttatttanatctgcccccaccctctanccccacctttnttattcaaaatttttcttacaactcatacaataaatcacatctcttaaatttaatcataaaaaaccttttacttattcatccctatccaaataaatatatcctttattttatacccttccccccaa

SEQ ID NO: 69260 - DNA, 307 bp, Glycine max
gccaagcgtccatacaactcaatcaacagattggtcaggccaaaggacagcattgcgttgcgaggtagggctatgcgaaacgctatgagattaggctcaagcctcaccatttggcacagccgtttgcacgtttcgtcgacgtcatacctcgacatcgtcggcatcatctttatcatcgtgctcaatgacgtcaagctcgacgctagctacgtcaccatgtcattcaccaaccaagattcctacaacgttattaaaccgtctacagtagacgaggataaaaatgatgaggatctcgtattggagttac

SEQ ID NO: 69261 - DNA, 237 bp, Glycine max
ttttgttgcttcaaaaaaaaaaaaaaaattaaaaaaaaaaaaaaaaaaaaaaaaaaaaaaagaaagaattataaaaaaaaaaaaaaaaaaaaaaaaaaaaaatgggccgtccgttctaaataatccaaatttccttccgcctacatacaaccaaatagaacttcaataggctcaccaaaattaaattaactgtccgtcgttttaaaacttatttacttgaaaaacctttaaataacc

SEQ ID NO: 69262 - DNA, 230 bp, Glycine max
tcttccttccactcttcctacttttaaccctttcttcatcccaataagctaactttttcctacaaggtaagtattatttcacttttcctttcttcttttcttttcttcattatcatatttcaaaatcatgttcatatctcacaaattgaatattttctcatttctatttttcttctcttcttactatttcttcccctttcttttatttttatttaacaatataatatcat

SEQ ID NO: 69263 - DNA, 111 bp, Glycine max
  unsure (1)..(111): unsure at all n locations
tctagatcgcgagccctttttttttttttttttttttttacttgtttggtcgtttcctgtcgtgtagattcagatctactttgttgcanagcagcttactttgttactttc

SEQ ID NO: 69264 - DNA, 202 bp, Glycine max
tcgtccactcttccgacatgtaaccatttctacatcccacatagcttaatgatcactaccaggagcgatcatcttactctaccgaactatttctatctacctaactacaccagctcaagtgcaagtgcttctcaaaaatcatgagcttaaccgcatgactctctacgacacctactcaacattcttaaccgcttctgccaac

SEQ ID NO: 69265 - DNA, 309 bp, Glycine max
gagactctctctttctatctcccacagtgcacatcttgaagttgcaaagcgataatggatcgagaggtgtctttatctcctctttctcttcccatctttacttacttggcatcattctgcttccttgctatacaagactcacattcacctactacacttattgataccacaactactaagatacagcatcttcacaatgcatctgctctacttgatagttaccgatctgatactctgaacttgtaatggtaagaactcaccgcacatcttgatattcttgcaaaatacttgcataggcgcttccacgaa

SEQ ID NO: 69266 - DNA, 474 bp, Glycine max
  unsure (1)..(474): unsure at all n locations
cggacgcccttttngaaatcatacttttgaattctgcaccatacatcaatgacttgtctgtagcacgtataactggactgttgatactactcccccaacatcatatgttacagcctcatcatcttttacaagttctttaaatgtgtctgtaaacatatctttcacagaaccctgtataggtggaggtggctttggatgcaagtcggtaaatgcctgcaatcttcttgtctatggtgctggccaggtcataccatcttcctttagaattatacagccaaacctcacgtattctcttcttgttagtctatcgtctacagttcaatatggccgggcaatccttgtaatggataggaacttctgcactgaccgtgctgtcaacaactttatgaaaatgccaaattcaactgtttatatacattttgacagaataaaagtttatgtcaacatcaggactcatttaccaaataactactt

SEQ ID NO: 69267 - DNA, 313 bp, Glycine max
ctaacgcgtacaatatttcatataacatcacatatgactgcacatatgcagccgcatagcagacccgctaatttgctcacacatatggatgacccactattgtactcactactgtctcttgcgcttgctaacactattcataaccaagtgcctcggcaagggacgcatgcaagtacatactcaagcacatactcactcgctgagtccacagttacaaccacagttacaacccatattaattctgatagtactttgcctgctatgcaccttcataatcactttcatcattgctttgaccaatgttgtcacactt

SEQ ID NO: 69268 - DNA, 245 bp, Glycine max
aatcctcttaatcttaatctcatggcttacttatacaaactaaagaaggtcttataccaccgcaacttcacacactacttcgtccttcttatccatcctcaccacaccaatactacttaccccacgttacatactgtccacacctctaacaatccttaacctattatcttatatcttacatattatatcttgcttaccaggcatgtttcaaatacactacacctatttcatcataccaacttttt

SEQ ID NO: 69269 - DNA, 333 bp, Glycine max
attgaagttgaagtcttgcccttctctcttcaactccaaacacaagacatcatcatgcatggctgcctccgtctccactgtcggagctgtcaacagagctcttttgaacctgaatgggtctggacctggggtttcagctcccagttcatccttctttgggagcagcttgaagaaggttattggctcaagggtccccaacacaaagatttcctctggaagcttcaagattgttgctgtagaagagaagaaagagattgaagagacccagcataccgacaaggacagatggaagggtcttgcctatgatatctcagacgaccaacaggacatcac

SEQ ID NO: 69270 - DNA, 246 bp, Glycine max
cataagtctacatgctctctcttccccttcttttcgttttctctctctaccgctacttatgatcagggcctgataatcgcagagagaaaccaatctctctgttgctcatctgtaacgaaaggttatggcctacaagataagcagaacccacttcagtcttcactatacatattaagccataaacattaacggactttagttttaagagatacatattggaagaaaaagaagcttaactatgtccgc

SEQ ID NO: 69271 - DNA, 240 bp, Glycine max
cactggggaggaatggatactgaatgagttgcacgagttatgcttggcaagtcgacatgactgtgacctgtgaagtgcataaaaccagacaaagattttgggtgggtttcctttagaagtttggtttttgtatatgaacgaactattatatgattgttatatgacatgacgtgtgtattaccagtgtttttgaatgatatatggatgtcatctggctcctccaccgtctattacactagg

SEQ ID NO: 69272 - DNA, 259 bp, Glycine max
gctagctgtaaggtgcttacataataatcatcaatatgagaaccatggttggggaactcgggtgaatgatcatacctcttgtgggagacactgaatatgtcacaattcatgatataacctaatttcggtatattgtcacaagtgatcctaggacctgaagcgccaaatgggatcataaaagggccacaatatgaccagtgcatgctacaagaatctgcacagtatagatactatctggttaacaatactttcatgtcaa

SEQ ID NO: 69273 - DNA, 367 bp, Glycine max
cttgagcgagattggagaatagattgtgttcctgtgttgtggatgatttagatagagagagaatggttggtggttaattacatcatgggtcattgtttcttttatccgaatgggttatggtttcctccatcaacaatgttcaaaagctttggtctaattgctaaagtggctctcttagcctgaaatgccaactcttttctttattctcctgctttggtttcccacctcataatattgctatcgctacttggtttccctttccataaacgcaaaacaaaagtgtctttgtccaatgaattctattttatttctctctccatgttccatctaattgttcaagggttattcatgtctggaaaaacacatc

SEQ ID NO: 69274 - DNA, 386 bp, Glycine max
cccacgcgtccgacagcattatcttaccttgcttcacaaagatatgaccccaatacacaacacacaggccaaagctctcgtcacgctcctggtacgccttctagaaacaggagggggcaatgatttggagctcaatgtttggtggatatatacaacataatctggacaaaaattcaagtatattatttaatggtcttctcaacttcaagatataggtttatagatgttaatatcattgtcctttggtggtgttctttcagttcagaacacacactttaaaaggaaaaaaaaaaacttgtggaattctggactagttctggtactcaaaactgctcccatttctgtttggagctaagaaagtacttccactttattttcacgaaaaa

SEQ ID NO: 69275 - DNA, 249 bp, Glycine max
tagagcgggtcctgagcctatgtcgagcgattgcgattgagtgatacaggaagaaatcccattggtaataatcccagatggagctttcgactccaaattcttactcgaaacacttgtccatcacaccgggttctaaagctttgagaagccctatctccgacgaacagatctggaagcgcctccgaaaacactggctgcgccctatgaaaggatctaagctcaaagacccagcttcgctaattgattaca

SEQ ID NO: 69276 - DNA, 311 bp, Glycine max
  unsure (1)..(311): unsure at all n locations
cccacgcgtccggaaaaagccaaaaagcctaccttgttcttatagacttggagttaactgggattggaattaagtatggagtctccaacaccaataatccctttcaacgatcaagccttctgcttttcctcactgctatattttcccacgtacttgcatccacggctgacatgaccaaacaaattatcatcataacatttcacatgtcagggataacgggatgtgaaacactcatgtggattctcattcatgactntatgtgctactttatggtcaacttgcttcttttactgctgctagccaaattcttc

SEQ ID NO: 69277 - DNA, 383 bp, Glycine max
gccacgcggtccgatcacgcgtccggattgatgaatgatgatccccatacatcaatctgctgcatggtaagtagacttggcttccacaattcacatcgctgatgaagagtatgtgttcgtctatcttaacttgttcgggttttggattcggtagttgttagaagtaattaacgatgtaataacttgataagtgaaaggttttaatgactattggtatgtgtgtaagtgtgatgataatttccaatagaggttactcttgaaattctaagaaataatttattggtgcttatttgggaagtctttagaagtcatcactgccactaaaatagaggtttttaagatgagaaagaacaaccccaacttgaagaggacatcatgtaccc

SEQ ID NO: 69278 - DNA, 174 bp, Glycine max
tcgtcacgccttaagaaatgcggtcaattccttagtgaacctcagtatctacaggtcctaggaacacctgagagatctgacctttcagtgttaatcttaagatgccaaccacctttccatcttgtgggtcaactaactactgatgcattctctctcactcaatcacgatcatgc

SEQ ID NO: 69279 - DNA, 415 bp, Glycine max
gatacacgtcatcatggatctgtccaaagccagcttgttgacgcacctcacaaccctctgcgattctcacggacgaccttcctcgtgcgtttcaatccaggctgctctacttctcactgcccggaggaggccgcggatgagcgccttcgaagaaagcaccagcttcaaatggaacctgccatgtgcaatattaaccgtaccgaaaccgcttcaaagcccatacaatcaccttattatctaaacattatcatccccaagctcctagaacacgtgtctgcactcaccggcaacctattgaactttgactaccgaattctaaccctaatccgcgagagcgacctcgacgagtcggctctgtacacgcgccagtcgatctactccaactgccggcccaccatcttcaccattaacgccg

SEQ ID NO: 69280 - DNA, 166 bp, Glycine max
gtctgattgatgatgccgaagaacaagggtatagggaggtcagaacagtaagagtggtaagaacgaggctgacgactagaagcgatagctgttgttcaaggagcgacgggcaggactacgcgcatgtgctccggatgcttatgaacggtctgtacgaggcgatgtg

SEQ ID NO: 69281 - DNA, 220 bp, Glycine max
cccacaccttctactcaagatatatatatttatatcaacacacacacatactatatcctgggtatatttcaaactttctcatctcataactaacccacttctttccacatcctctaatacatttaaatcttatgaatctgcaaacatatctactaacgctcctattcttctctcatcaaaaccacctgtacctactacatcttctactactatatcaaat

SEQ ID NO: 69282 - DNA, 436 bp, Glycine max
  unsure (1)..(436): unsure at all n locations
cccacgcgtccggaacaaagtaggaagcactttacaagtccaaccttctgcatcttggtcgaaatttaaatcccctaaaactggtgaaacaaaacatactagttagtttttgtggcatataggattaaaaaataccaagcgcctaggttggactggaaaatagacttattttcataatcttgtaagttatagccaacaaaccatcagcggacaactcccaggaagacacatacaaaatatgagctttgtatgattttgtattacgaaccgcgacaatcaaaacaacggagtatgaggtctggagcatgcagcaacaaccaaaatcatcaagcatttacttaacgatcagataataatgggttaatatatttccatgtcttcagtacatatgcctcaataatgaaattcagaaactangtaggatgtcaagtggcca

SEQ ID NO: 69283 - DNA, 324 bp, Glycine max
gtcactcgtgcggagcttccatgggcgctggtatatccaggcgtgatccacggcatcatcgacaagctaggatgctcgcaggaattggccgcatagatcgatacttggatccatactggagaccattcggcatacataattgctatgatatttgctatgatatgaaagatgtttggatcgtaatggattactgaatgtggtatagtttatgtggatgcttaactgggtacatatgatggtcattatgaatatcatatcatatatacgttcataagcacattatgtaacagtatacagatgtggtaacaggactggtaacatgac

SEQ ID NO: 69284 - DNA, 435 bp, Glycine max
ggtttttattttggtgaaaaggagcaaaggggaatcaagaagtacttaagcaaaagtcttgaagggatatctcatgtagctaatcctattgttggtcaagatttgaggaaggggaggaatctttagctcgtcaactaccaaagggtttgagcaaggaggaggaagactcattgctagggcaagtggaaatatggaggtacatgacatgcttcacggactccgtggccttgaaagctgtcatagagcttcgtatagcggacatactagaccgttatggtaaaccactatccttgtcgcaaattgtggaagaacatagaagacgcaccctccccagatgcctctcttctccagagagtcctgagagtgatggtgcgcataaagatcttcagtgcacaagaatcagagacaggagaaacccttttcggcttgacacga

SEQ ID NO: 69285 - DNA, 222 bp, Glycine max
gggcaatgagggcatttctctagccagactttaacttaaccccaaatcgtatcagcggaatgcgttgttgcaattttgttgcttgcttgtttgtatgtcttactaaagattgtagattgccgcttttctgtgcgttctgttttaatatccgtgaggtgcttctgtaaatttgaaacttttttaacgttacgttggaaatatactggatttattttcattgtc

SEQ ID NO: 69286 - DNA, 233 bp, Glycine max
agggcaatgagggcatatctctagccagactttaacttaaccccaaatcgtatcagcggagggcgttatggcaataatgctactggctggcaagaatgtctgactaaagattgtatatagccgcttaactgcgcaatctgttttaatatccgtaaggtgcttctgtaaatttgaaactttaataacgttacgacagaaatatactgaatttattttcattgtcaaaagctaac

SEQ ID NO: 69287 - DNA, 105 bp, Glycine max
  unsure (1)..(105): unsure at all n locations
ggaaaagagangggngagctaaangcncgaggaacncgaaagcngaccgggggaacaaggggganngcgcaccacaaacanccaccagcaagagccagggaggaa

SEQ ID NO: 69288 - DNA, 327 bp, Glycine max
gggcattgctttgttgtgtactcaagcatcggctgcaatgaggccagccatgtctgaaggagtaagcctactcagtagcaatgacttacttgaacatatgagaccatcgatgcctatcttttttgagtcaaatttaaagccccgcaatgatatctctgcttcaactagttcctctatgactaacactactacctcaaattctataatacctgctcgatgattgagtatatgatctaaaaataaatttttgtccagttcattatcaaagatgggtataattatttgtaaatcttacttatttttatgaaaaagttacattgacattcc

SEQ ID NO: 69289 - DNA, 255 bp, Glycine max
gcgtccggcgaatgtgtctgcagagaaccttacggggtacccagtactccatgaaggatgttgaaatgtccaaatatgttcgtagcttgacactatttattgaagacaatcagtcaggatcagagatcactattgttcagatgaacggactgcatggtacaacagttgaaacacctgacatgaatggcttgactaagattgaggatcgttaactcctgggatgaggagattcaactttgctcctaatcacttctt

SEQ ID NO: 69290 - DNA, 436 bp, Glycine max
cggacgcgtgggcacgggctgccattgaagatacttatttttccaccaaggtgttcgttgggtcctatgtttctgtgtatgattccttgatctcatgtcatgaatttgtgtttttataggatacttttgagagacatcgcgtggttttcaccgttggaacttccattgcttccgttgccactgcttggttattccttgcgccatttacatgacaccaaagttgatcaaaggcttcaatctatcgaaaattctatgaaaaacaattccaatctccaacattcccaaatcaaagacattgtcgcgggttccgcttccggagcttttagtatccctgcttgtgttgccactgctggaacctacttaatcatcggggttgctcccacacttacttgcaaacaacatgctcgctttgctccttaacatatagttaggtcta

SEQ ID NO: 69291 - DNA, 352 bp, Glycine max
ggtgcacaaggttactgcgtggagaaggcaagcctccacattacgtgaaagtagattgggagtaaatgggtggatgaggatgaagatgatggtaataatcgtgaaagtggacattctaacacatgcctactataatattaataatgataacaacaacaacatcggtgttggtggtcttagaagaatcccaccaacgcaaactttaattgacagtaactgcacagtcatatcccaccttagatctacccagctcgagtcccatgcgccgaacgaatctcgacggcaaagacttatacatgttcacaggagagcaagcatgttgtctcaacgagtgccgttcagggctaacatt

SEQ ID NO: 69292 - DNA, 349 bp, Glycine max
gacagataacggcagcggcatgcttaatgtttccagtctctctgtgtgtgatcatgattctgcgccgcaccttattgcggttccttcacactctgacaatatctacaagacgaagtcgtgctcatataagagctatcacacgatttttatgactgaggacatcgtcaacttacctcagaccattcatcacgaccctggcctgcaaatacggtgctatctaaactctccggatacgatcacgaagcgtgatattcatcgcgcatagagccttggcacactaagcgctaatccaaaacggcttcatactctccaatcgtccgaatgccttctggaccatcaacatcatcag

SEQ ID NO: 69293 - DNA, 218 bp, Glycine max
gaaagacatcttttgatttgacctagatcgcgtcatggatcatattcagggaatgatggcttcaggatcagatgcttttttgatgattgattatcaaaactgctagagatacgagctcggcaatccaaacgctttataagaaaggtctgatactgggggaattgaaccggattaaaaggaagcctttaggattcgggctttttggaccatggttcccc

SEQ ID NO: 69294 - DNA, 439 bp, Glycine max
ccaaggccttggctgaagttctcaagtttcatgggaacataaaaacccttaagcttggttggtgccagataggagcaaaaggggcagagtgcattgcagatgctttaaaatacaataccaccatatcgattttggacttgcgagcaaacggtctaagagatgaagatgttattgttttatgaatcaactattgcagggtgcacagagcctggctcgcagcttgaaagtggttaatgaagctttaacctctctagatttaggatttaatgaaataagggatgatggagcttttgctattgctcaagcactcaagtctaatgatgatgtagctgtcacatcactaaacattgccagtaacttcctaacaaaatttgggcagggtgctttggctgatgcgagagaccatgttttggagatgaccgaaaaggaaatcaacatc

SEQ ID NO: 69295 - DNA, 315 bp, Glycine max
gcacagcgtacgcctatgcgtctgaaacaaagtatgaacctttagtcgaaagagcacggatccgagtgaattagctatcatcacagatgctgccatgatctcagacttcatttcatacgtgtacagtcaacagagctcagctcgataccgctgacatagatatggacgaatttgtatagacatctggtctatgtaatcgatgatgtacgatgatttcgcatcaaggttcaccgtatatatacttgacaataatgtcttatatatgctagattatgtcgattacactgtacaggcatattataagatatatctcta

SEQ ID NO: 69296 - DNA, 380 bp, Glycine max
acgaacgtatctatatattcataattgcacgttctcttttgttgacttcagttcatataatattgcatttactcagattcaggcagactttcaaattcacattaccttcttctctgatactcttactatcaaagctgactgcataaagacctgatctactattgaaagatggcatctttgagcatgacccagatcagaactgagagatgttcatatgggtttgacttagatagtgctcgaaagcgcaatgcatcatgcactcagagttatacttaaagagtacgctatacagactcatgctacacaccctgatcttactgtcactgttaatgggttgcacatgcctaaccgattcgttattggttcatgcacaccatgta

SEQ ID NO: 69297 - DNA, 312 bp, Glycine max
atctatatcgtaactgtcacagatcctgacgagtgatgaaagcctcatctttactgtctcaatagatattgctatggcagatatcgctctgttataatggtggattgacattactatatgtcattctatacataatatagtgttatgaatcattagtattttctctagatatacttaacaatcctgttatatatatgctcctatatgataatttcactctacatccataccataagtgatttcaataaccaagtctttaagctttctacacaacattcatcatctattatgaaatcctgacacaatgtatac

SEQ ID NO: 69298 - DNA, 441 bp, Glycine max
ccaactccaagatataaataagggaaaggggggaattctaggaggaggaggtagaagtagacacagaagtggcagaaagcaaaaatgttctatggccatgatgtttgatctaatgactaccctggaatttccaccaagtaatgacctgcaactaaaaatttggggggggaaggactaaggaagagcatagtttatacaacggccattgtaacttcctgccataccatgcaaaatctatggtactggcaccttcaatctcttgttcccaatgttgcaattgtacaatcatgctagtgctttaaattgaaatcaattgaaaatccatttaagcctctttcatttatgcaaattgccacagttcaaaagtgcaatattaaccatttattgaagtaattaggcacagttcttaatgttaacttctatttgaaaggaatattcttt

SEQ ID NO: 69299 - DNA, 364 bp, Glycine max
aaaaaaaaaaatttttgtataaatttttatttttaaaaaataaaaaaagttaaaattattattggttaaatttttatttttttatgttttttatcttttctatttatagtatctaagtttatttccctttccttgcaattactaactttttttttagggtaacctaatttaatttcacttacttcccttttaaaacgttttgattgtcaataccttgccttacccaaattaaatccctttccatcactttttcttttgcttacctgtttttattttattttatgtccctttcctattttcctttccatacatttccctaatttgaatttttactggaccttccctttttccttaatttaaaccc

SEQ ID NO: 69300 - DNA, 257 bp, Glycine max
cccacgcgtccgggcactccgttttagatcaagagagcaatacgatttcagcgcaacaaatgggcaaatacccacgagaggatcaaaagcacccaaaagatgaaaacaagatcaaagccacacacaccttgaactagcaagcagccgaaaccgatatccccgttttgcctgccgaacccgacgaaaaatacgagcccgcgtatcaaacacaagacaacccactacatgagacaaacgcaaaagaatcctacaccaac

SEQ ID NO: 69301 - DNA, 394 bp, Glycine max
cgcattcgtaggataaccgttgcacggtggctactgttctgctggtggctacacgcatgatgcatagccatgacgcatgatgccatcctgagtattgcactcttagggataggagatgcgctttgtgcataggcagtacactgtcatagcacccttggcaaggactagcctatctgacatggcttgtgcttgctacttagggcttatcgtgcatatgataaataccgtttgagaatgaggatatgttgccataagaatacaggtgagcaagggttagagtgatcgatgaccacacacctgagcgatgccgaactgagatctctgctgagcgtgagggcagtacctcaggatcgagctggacagtttctgggtggacaaagggtcctaaagcttt

SEQ ID NO: 69302 - DNA, 429 bp, Glycine max
attgtttgttgttgtaactcgttcttcttattttgaggttctgtgtttgtgtttgttttttggctcacctgaaaatgtcttgctgcggtggtaactggagttgcggaagctcctgcaagtgcggcaacggctgcggaggctgcaagatgtacccagacttgagctacactgagtcaaccaccaccgagaccttggtcatgggagtggcacctgttaaggctcaatttgagggtgctgaaatgggtgtgcccgctgagaacgatggctgcaaatgtggaccaaactggtactgcaacccctgcacttgcaagtgaggtgttgggagagcaagcttcaagcagagatagcccttaattaggaataatgataaactattaatgtgtagctaaaaacttatgtattatgtctgtgaagggattcgtgcactct

SEQ ID NO: 69303 - DNA, 506 bp, Glycine max
  unsure (1)..(506): unsure at all n locations
cgnntccgcttggtttggttggttggttgtnntggaagcccataaactccttagccagccccggcgagantnatggcagaccgttgggaggtnntgatgnntggcggcgttngcggcgggcgggcgggcggcttgcnnagggcagcccnnnaagaagaagaaccgnnttcaagananngttcagctttnncaggggggnntggatcnntggacgcngcccttctggacatnnngtccactgnnacgaactcnngtgaaganntgttcagtggcttcgcgccacgcccagaagggttccccagagangggtctcacnnncagaaagggcccatggcnccttgatnntaaaaagcttcnncgcaaanngcgaaannagggaagccaccanngcaggtgagaaagccccagaaccccagttcgcnnacccatctttccgcaaccatgggattattggtgcnnctgagaaatgattggtaagcattttcattggggagtctaccaatggg

SEQ ID NO: 69304 - DNA, 111 bp, Glycine max
tctctagtgctctgcgcccattccttccattccattgtggacgcatcttaaattcacgttcacattcgctcctctgcatttgcttcatccactctactctgctctgctcta

SEQ ID NO: 69305 - DNA, 224 bp, Glycine max
gtcatggtggctctcaggttgcaaactatatgtcgagaacatacccattgggccttggctgaggaaatagaatttgtgacggaagttcgaatcagcgtgagaatgaaagatggttgtcaaaagcagtacaaaaaggttagcaccaatcgtttcttaaaggtcgatcctcacgttggtggcaaagttaataactaacctcttgccccagaaactggtggctccac

SEQ ID NO: 69306 - DNA, 168 bp, Glycine max
  unsure (1)..(168): unsure at all n locations
atatgtnttaattatattttttttgaataaattaaactattaataatcgtgaaataaataacaatgcttttacagtatatatatacctatatcaaaactttatatgtcaatcaacctaaattatactttcttccactttataaaactcttcataaatcaaaataaaaa

SEQ ID NO: 69307 - DNA, 396 bp, Glycine max
ccggtcggcccacgcgtccgcccacgcgtacgacgagcgcagtaagtacgtcatctgtggaattccagggcactgtttggtaggtgaaaaaagtagacatgaacgtgatcgagatcagcaccgccgccccaccttccgccgcggccccccccaccactccttctagcccttctccagccggtgctgtcactcctcccccacagaactctggtgctgcatctcttggagttgttggagtatttgccaccctgctttcagttgccgccacttttatctattagatactccacgagagtagactagacaggagcttgcgagtcatcatcatcgctctttgattgtgtttcatgaattcaggttttctcttatgtttttgaggatgacactaaagttagc

SEQ ID NO: 69308 - DNA, 332 bp, Glycine max
agcatcactacggacgttgattatatcacatgttcctgaaactcaagcggcgccaagatcggaccctttcaaagtctgaggctcattatacttatcacgacacttaatatctctacaaggactacctgatctcgtcgtcttaatccacagttgacgaacgcacatggctaatattccacatgagcttacagagcagcatacggtcaattacaacgacgaccatcacattcaccacattcgcaaccgattgcaccacttacaagctagacgatctgtcgattattgatactctcttaaccattacatggctcggactctccattaacgccctt

SEQ ID NO: 69309 - DNA, 289 bp, Glycine max
aaagacagggccgggcgccgcgccgctctgaggccagcctcctactgagaacagtccctcccttgtgcgggtcgcacggctagccgcaggttcggccacgtcaaatccattctctaaaaaagcagggagcagagctctctcttcgccgacgacgcaaaaaggagctggggaggaaaaagctgctgccttttgcgctggagattcgtgatcaaggcttctcattttcccaggctgcttccccttccgcatgaggagcgtcctgagactaaggaaagagcctggaaaatgg

SEQ ID NO: 69310 - DNA, 394 bp, Glycine max
cgccgggatgtcgccggtgcccggagcacacgcccctatactgccgggatccaagtccaaggatgttccgccggccaccgtgttcggcgccgtgttgaatgtctgcaccagcataatcggcgccggaataatgtctcttccggcgactctcaaggtcctcggagtgattccggcgttggttctgattctcgtgattgcttttcttgcagagctatccgtggagttcctcatgaggttcacacgtgccggcgaaacgacgacgtatgccggcgtcattagagaagactttggacccttgggagcagtggcagctcaagtcgcttgttgaatcaccaatctcgggtgtttaattatgtacctaattattattgcggatgtgttttctgggaatcaa

SEQ ID NO: 69311 - DNA, 401 bp, Glycine max
gtttttcttttctctccgtcttccgaagcttcgacaatcatagatactgctgagatgtctggggaagtttttgatggacaagatgcaggctatgtgcctgagaaccctgagtttccgcaaaaccattctgacgaatacgatggaggaaatgtgattgatgactcagggtttccgcaactgcagcctgatgaacacgataatggagggtttccgcagctgcagcctgatgaatatgatgccggagggtttccgcagctgcagcctgatgaacacgatgctggagggtttctgcagctgcagcctgatgaacacaatgcccgcaaattagcttaaggatgcaatattcctgaacataattttgacgggaatgatgttaaagggtgcctgggaacccctgattt

SEQ ID NO: 69312 - DNA, 409 bp, Glycine max
aattaccagagatttaggaaaaatctcaatatcttactagttgaagctcgtggatttctgggaaccatgtgatcaactgtgtatggcttgtatttgtataaggcttgaaaagaagagttgagaattaagactactaattaaaccagcagctggagacaaaaatagagagctgatcttttgccaggcgaagtatttggggctacagaaaaccgagtcctatcttcactgggcatttgtaagtcatatatatcacttggggttgtttgcataaataaaagctttttggtttgtcagatgctattgcaaaagcagaaaagctgtctgaagatcttaatagcaatttagtgacaaaatggttgttgaggcacattcttttctgtcaagttgcatcgatgtgtatatatacatt

SEQ ID NO: 69313 - DNA, 211 bp, Glycine max
  unsure (1)..(211): unsure at all n locations
gtcacgcgatctgttgagtagacagngggctgtgaaaagatcgactgcacattgaaagtaggggagcttgaaaaggaagaggggagagagagtaggctgatagcaatcgagagctataggaattgaggaagctccagaactgcctaccccgcgtgcagccgtacaccatggtgaatgtgacgatagtgcccaggcatcacgccataataat

SEQ ID NO: 69314 - DNA, 233 bp, Glycine max
tactgctagattcatcaactcggatttagttttacgcacacgacctcaacaacgtgtagcggttccactggtaatgggctcccagccattactttatgcaatggcactcattttcaggctagataatgacaactttaacaatagtcacactatagccgaagatttaggaacccttataacaatttcatgagcaaaggttcatactcattactcaggctaaacttttcatctca

SEQ ID NO: 69315 - DNA, 68 bp, Glycine max
ggacccctggatatgccggtggacagcgtgatgagatcgcgcgcgacatgctaacatcatatgaggcc

SEQ ID NO: 69316 - DNA, 299 bp, Glycine max
cacgatactctcaccacatcactcactaaaccctaaccaaccgatacattctccaccatgaccgccatgaacgctagcaatccattctcctacaacgccatctactattaacacacccaccaacataccaacaacaacattccttccatactcaaactcaaccccattcacaacaacattcccaatctgatccacattaacaaacaacattccgaatttacaaatatccagaactacattaacaaactctcgaatcataaagctgccacccttccctctaaccctaataatatagctct

SEQ ID NO: 69317 - DNA, 427 bp, Glycine max
aaaaaaaaaaaattaaaattaattaaatgtcaaccgaacatgttcatgtgaataatatttcggggcacaatattcctaggggtacaatattataccgtgaaacgaataccccctaagttataagattggaatcacaggcctaagttgtccaagacttttactcttcagtggaataagatgattagttgaattagtcacatctgtttggagcttagctgtaataatgccaatctatgttggagaagaaaacctagtgggataaggattttttttttgttgttgttgttgtatgtaagagaagcaaattggtgagaactgattaacaaaattatgtgacacaacacagcagtctcaacatccttttaattgggggttaaattttataactcttggaaatttggatttcttattgtgcatagacaacaag

SEQ ID NO: 69318 - DNA, 248 bp, Glycine max
gtttgtctcagatcttttaacagtcgacacaacaccattgcctctctctcgctggcccgtacaaaatgtggaccaacctagccaagcgagcttcctcaaccttaaggaacaccttccgcgtttcttctttatatccgagattctgtaagccccaaacaagtaaaacgataaacccatacccatttcaggctttccctaaagccggggtgagccggtccaagtttcttttttacgaaggcttttctagc

SEQ ID NO: 69319 - DNA, 424 bp, Glycine max
gccacgcgtacgggcatttatgacttgtataatggcttgactaacctattcacaaccctggctgatgcatcgtcttacgcatcagcgaaagacataactgcgcccgccaatgcgtacaccaactggcgtacgaacttgctggcattgaaccatgttttgaacaacaacaatataaactaccctgtaagaagcattggcgggagaatttgcaagagatcaatcagctcgataacaatctctctagctatggcaaacgccaagaacaactctgacagcacaagcaatatcacaagcgacaattctggttccagatagaattcgttacacttaccgtctcttctaccgcgtattaatgcgcgaaatagagtcggttcatgttccggctcaggtccatcgtgtaatttgttgcggaatagatcttcct

SEQ ID NO: 69320 - DNA, 453 bp, Glycine max
  unsure (1)..(453): unsure at all n locations
cagatcaactatatttcattaaaagaaaattcggttattattaagagagttcattacttgttcctaaaattaatgggaatttggtatggctatagttgatttgttctgcttcctcttgttttgtcaccttgtactcattctctccgctggttatggaaatgggcaccaagattgtccacactcctttacttgtggtaatcttggaactttccattaccctttcaccaaggcagaaaaacctgactgtggcttgctagccatacatgattgtgataatcctcatcaacacagaaaaatgatccagctcgagctaaatggaaaaggcatagtgcttataggcgtggctcagcagaatgcgatttcaattttggatgaagattttcacaagcgtttacaacanaacccttgtggcactttgaagaataattatagtcttccttcccctttttcttc

SEQ ID NO: 69321 - DNA, 411 bp, Glycine max
  unsure (1)..(411): unsure at all n locations
cccacgcgcacgctcgngcaatcaccagcgagnaagcgagacgggcccaaaaccaaaacggtgccgannagcccaaggatctctctatggattgcaagaagcgagttcgggatgactcggacgagtcagttctggaatcgcccgaggcgaatcgactgacggacgatttactctagttcttcgacgacgccgacgacgcaccgttctctcaggaccttgactccgtcatgaagagcctgcaggaggagatttccggcgtggtctcagattccggcgagtctcaagcgcacatcgggtaccttctggaggcctccgactactagctatgtcttacacccgtcggaaactaatctgcgccagaagagaagaacgtggagaccgagtaggtccgagtcgcgtctgactcgtacg

SEQ ID NO: 69322 - DNA, 352 bp, Glycine max
aaatatcacaacattaaaaaacacgatgactgaaccacatcagagcgacacttctttcagggccggggtataatatctgacttgactagaaaccttctactctttaatacatactgctcagacctagatctgatggagcagcacatgatgttcaacatcggtttacacatctacacaggtcatctccaaataatggagcctaataacgagactgaatgccagaccactgaactccccattgatagcattaataattgtggcatctttcgaagagcatctaccattaacattttttacaaagtgaacaaggacatgctcttgaatcaagatcaggagaaatttttagtatcat

SEQ ID NO: 69323 - DNA, 251 bp, Glycine max
aacaaagatgctcgactcacgaaaaccacaagccttcttaacgttgtctccgccaccaagaggccctcttactactatgccatctaatcatctacttgtacctaacgatctctaaatgacaactccgttaccctacaagcattcactaacatcgggagacaccattacctatataactttctcctcagactcaaagaccccaaatactaggattatatctacacctttgaacgactctactatcctaaaac

SEQ ID NO: 69324 - DNA, 436 bp, Glycine max
cacaaacaaactgtgctcttgagagttgagacataagaaaagaccatttgggaaattcaacgatctcctgaaatcaggcagcgaaataagtgcctgatgttgagagaatctgcacccttccaataatcaaagggcttatttagagccacatatcatccttgaaaatttcccagccaatttggcgccaaatgttggacctttctacatgactttgcaaccacgttgaaggaagccacaattgtctcatagtttcatcctctggaagggtgagtgagagggtgctgagtctgaaacctagttcagtgttctgcttttgaaactgcaaaaagctaaacaagggcctcctgatttggaccgtgatatatcagagcatgaaaaaggcctttctatcactacccaaccaaagcagtctctgaattatcatcatcatcaatgc

SEQ ID NO: 69325 - DNA, 427 bp, Glycine max
gtttttgtttctggtcagttttgtgatcacatcagctaagtggcggcgaatttttggttgggtgcacaaagagtagccacttgggtgatttagactccttgctccgctacttcaccaagttaaataaactctgcatcccttaaatagtgtgttaccttacccgtatccatcacaggaagaggctggatagtttctctttctctctccatggatcttcaggatttccttatccgtgctcgggtcttgaggctttacagacaagcattgagaattgctggtcgagccccttcttccgctaaagctgaactgaggcagacaattaggcaagagatggaaaataatagaaactgcattgacaagcaaaggatccgtttcttgattagtgagggattggataaactgaaacgactggatgaaatgctagata

SEQ ID NO: 69326 - DNA, 247 bp, Glycine max
ctctctcattctctctctgattcgagcgacatgcatcgttgaattcatcccatcgcggagcgtgcaaatttgtaggggagcaactattgtgctatcgctatatgctgatatcattctcttttgtgcttttattccgaaaggacagttaccaggtacttccaccgtgcccgcatacctttggacatcacacaatgaacaggcctctgataatggatatgaaggaatctgtaaattaccaagtcatttc

SEQ ID NO: 69327 - DNA, 141 bp, Glycine max
cccacgcgtccgcccacgcgtccgaaacagaaactcataggcggggcacattctcaacccagaaccctaagagcagagcgaaagtgacaacaaacttcgcgaccgtcgcaagactcggcggcgcattagctgcatccacct

SEQ ID NO: 69328 - DNA, 337 bp, Glycine max
aaattatttatttttttcatttgggggggtttctttgtacgggtatctatcatttttttttttttattttattttttttattaaaaataaattgttttttcctctataggatcctttcttcaaaaaaaaaaatgcttcctcacacttaaatttcccttaaaaaaaataccatttggggtaaaaaaaaaaaaaaataaatgcggggaaaaaaaaaaaatgtccaaccccccccccctttaaaaaaaaaaacccacccaattttttttttttaatgggacaccccaaaaaaaccccccccccccaaagtgtgaaaaaaaaaaatgccaaaacccccccc

SEQ ID NO: 69329 - DNA, 390 bp, Glycine max
  unsure (1)..(390): unsure at all n locations
attaatttggaaatgtaaaaaaaaaattgggtgtttccgatagtagtagttgtagcggtcaagccgagccgatccgatgacgcgagccactcacacactgggggttcccccaacaacacgcgcccctccccggcgaccgtaccgtattatccctcaccattcccactctttcgccttgccgtttcgctttctctctcttcttcttcttctttctctttctctttctctttctcttttccctttctctttatctctcttccaaccctaattccctttttccgatgccggactttcacgactcccttctcaccaccacgccgncgtcatcgggccccgtccccgtccgcgaagactgctggtccgaagaggccttctccacgctcgtcgacg

SEQ ID NO: 69330 - DNA, 91 bp, Glycine max
aagtgaaagccattctgttaagtggttaactgtatcatgtcataattattattattattgaatacattgtgcaagtatttatcattttttt

SEQ ID NO: 69331 - DNA, 129 bp, Glycine max
catcaacgatctgcagtctaacaaaggcttcgtgaaattgccttatagcaagaagggtggtggattgccagtggaagggaaaaatccaaatatagaagaaacaggggacgatggaaattgacattgtgg

SEQ ID NO: 69332 - DNA, 179 bp, Glycine max
ctgtggctcagagtactgcatcagataagagagaaaacggctcttcatccgttgggggaaatccgaccatggtgcacgtctcctcttacaggtactatggtgagtcgcttaacaagcccccccgtccttaccataaggatcttttagacgcgtatcttaatcttgttccggagtactgg

SEQ ID NO: 69333 - DNA, 419 bp, Glycine max
cacaatctcattcgatcatcaatcctcactcgtggatttcaatctcgttcagttcctcccattttcatacacaaataattttctttatatttctgcattgctttgagtggattttgcataatcatattatcaatttttcattcattttgggatatgagtgcagaagtactcttgtgaaggttggaaaaaagaaatctcaatttgatgtatgaaccaggggtgtaagaagaagttgaggtgatggaaccccaggatgaagaagagatccataactgtttgatcaagctgagaagtaatccggaaaggcgaaaggataaggtttacattggttgtggagctgggtttggtggtgacaagcccttggctgctcttaagttgcttcaaaaagttcaagaactaaattatctggttcttgaatg

SEQ ID NO: 69334 - DNA, 358 bp, Glycine max
aaagagatcaactaatcgtggttgatgacgtttctcatctagcatggctcctatcttcaggtgtgaatgcgcaagagggcgtgtttatatctgagattggctttgctatggccgtggatactcatatggccagggagaaattggttataggatttgcaagcagagaggctcttgaagaggtggtgggaatcaaatataagttcattttgtgacccacgggtgtcagatgaatctaacgtgatggtcccctgttaatacaacaatataaatcgctgttgtgaccaatctctgactctatttgaagaacgaactgaatgaggtttacattctgtttgaaactatatttgaatttgacaag

SEQ ID NO: 69335 - DNA, 388 bp, Glycine max
ccggaccggaattgaagtgttccggcccagcgcgacccgtcacgtccaatccgatcatcaatcctaactcgaggattccaatctcgctcagttcctcgcattcccatacacaaataatgctctttatttttctgcgttgcttcgagtggatttcgcataatcatattatcatattcttcattacatcctgggatatgagtgcagaaggactcttgtgaaggttggaaaaacgaaatctgaatgtgacgtatgaaccacgggtgtaagaagaacttgatgtgatggaaccccacgatgaataagagatacatagctgtctgatcaagctaagaagcaatccggaaaggcaaaaggataaggtttacattgattgtagagctgggtttgg

SEQ ID NO: 69336 - DNA, 184 bp, Glycine max
atcaaatctagcattacttcaccatcaacaactacagtgattaatgacgaacgggtgcagggcataacttatagggagctcctttaacttctcctttaggcttatcttgctaaatccaaatatcatctactcctattactctttatcctttatttcaaactaaatccccctacgagcactgtat

SEQ ID NO: 69337 - DNA, 181 bp, Glycine max
attcaatcccacggattctaccttaggcaggtgatcttgtatatatgattattaatggggaaggtgggctggttttgaaagacaactttgagggtggggctacgtgggcatatgaagttgggtcactatcaatggtttgaaccattggacccgtggggctcgtttcaccgcggcagacgct

SEQ ID NO: 69338 - DNA, 380 bp, Glycine max
  unsure (1)..(380): unsure at all n locations
cccacgcgttcgcccacgcgttcgcccacgcgtncgctttcttccttctccttctcttgggtggttctcttttgatgggcgaaaacaatgaagctcattagcagcattaaccccaaaaatctcaaactcagtcccaaacgcttctttcgcaaaaaggaacgatctttagtctcacgctccgacccaccttcattcggatccggatcttcctccgacgactccaccacaaatcacaagccttccgccggtaaccaaactccgaccagcgtcctcccgggcgtctccggagactggtccgacgtcgccgccgtcgacgtgcggtgggacctcgcccaggcctttcgcctcattgaccgcgacaacgacggcgttgtcacgcg

SEQ ID NO: 69339 - DNA, 396 bp, Glycine max
gaaaaaggtccctactaatacacatttcttaccaaaccaaattacacagagtaagagagagagattttactctgtctctctttctcttctttttcccctcgtttcgtttctttgttaatatctccccgtcaaccattgactctccgaggtaccaccaatagcaccaccaccaccgtggcggcgtaaggcttgttccttctccacgccacattttgagtttcttcaaacagcagctgcaccagcagcactagcatcaacaacaatggactccaccacacccaattgctttcacctattactccgaccgcttctgctgttcaatctccgacatcatctgtccctcctaagcccgtgaccagatccgaattcgcctacccgttcccgacttcctttttt

SEQ ID NO: 69340 - DNA, 204 bp, Glycine max
tcgcccactcgttcgatcaatcttagtgaactggtctaacttattctccctcatatagatgccgttatgtcttgtgcacactgtttcctgtactctatgataagtactgatgatttgattgatccacactcagataatagcagtcattgagaataaaaagctttatgtcgtgtttgtagctttggtctttagttatttcccatt

SEQ ID NO: 69341 - DNA, 419 bp, Glycine max
gaaatccaggaaaagttctttatttaagtggccatgctttggaaagttgcctacaacccgagaactgtctccctattaaggcttggcagcagcaagatatagatgacacagctcttttggattttataccatttcttgagtgtaagcattccttaagatatattgaagaatgagttcatgtttgaattattgtttttattttcacatcactccttgagtgtaagtccattcccttaagatgtgtttataaatgaattcatgtttgaagttactgtggtgactttttatgcttgtaaaagttgcactaccttctctgttatctatttgcagttgttgcccgtagtagtccacctgatataagaccagtgctagcctcttaccaaggatgtgatattccaagtgagttcatcaagcgttcc

SEQ ID NO: 69342 - DNA, 399 bp, Glycine max
ggattctggaattctggaaggttcttcaagtcaaacgcgagtcaatgactgaggccgcgagcctgcaagcacttatacgaagtcccgcaggtatgctggcttcctattcactcacttgggcctgtttgtaactgagggttgatctgctatgttactatcaacacccccttcgtcgaaaacaaccttgtccgcaaggttgtgaagatcacgtaagtcgtcccaaagttcccaggacgcctcctccggaggaagaccctcccattgcaccaaaacacgttttaccggcgtcatgcccgaggagtcgagtttccagtcgaggattgcgaaagggtgtacaatgggttttcatggagttcctgcaaaggagcgtctacactggcgttctttcttggttaaact

SEQ ID NO: 69343 - DNA, 377 bp, Glycine max
cacacaatggaaatggattgtcgctgcacctagagattcaattcaacacttcagaggtagtgtcgattttggagtttctccgcgtgatttcatgtgagtatgttttcaacaccgcggctgatctccttcttatttgaatgatgcatttgatttagcgctatcgacccttcatggtttatcaatcttccctcaagaaattttggtaaaattttgatcttttctaccctttctatcaacccttcttgctgcatgttgaagcgtggatacataccaaagccatggattggagcacagaattgcggggtctctgtgtttctcatgtttttcacattgatgcctatgttagtgggtttccttttagtatttcattatgatag

SEQ ID NO: 69344 - DNA, 418 bp, Glycine max
cccacgcgtccgaaacttgtctattgtacctgacatgaattattctaggctagtataaaacagcttatgccaaagaggagattttattgaaggtttttactccatctcattctaacatgctaatttgattcttaaaattcattttttatgtgattgtttgattacttcattgattttaccagaacaatgacataaataactctagacttgttggatcttatttttagtaaacagtgtacaaaataggaggactcttgaaggtttcttctccatgtcattttagcatatgccaattctaaacttgatagcatttgtgatgtgattgtatgcatgacttgactgcatgtcacctttagaaattttaaatttggttcttttgaaatttcttaacaagaaataagtaatctagaatagtcta

SEQ ID NO: 69345 - DNA, 300 bp, Glycine max
catttttcttcctgcgtagccacaagaatagtcaaagtggtggcttttttttattcatcgctgcttgtgtgcattccgcagtaacaaaattctgaatcctcagagcatcttgttggactttcggatgatgttggtgctggcttcatatctggtcatagtactcaacctgccacttcttctgagttgaatgtggacaggtgtagtgatttgccggctcatgatgaaattgggaactcgtgggtctcaaaagagatcagggctgatcaaaaaacattcttctttgatcttgggagcaataat

SEQ ID NO: 69346 - DNA, 242 bp, Glycine max
aaaacaattctacttaatcggtaccactcgttctgattcagaattacaatactaaggaggaggcatagaacgagtgtatctaaacgtattactcttcacttactctaacaagaaggaaggatggaaggcagaatcagaaagccctatttgatttatcggttattatcccttgatgaaaatgaaaaggcgcggtatcagctcggaatggataatcgtattcgtatacgcttttcttgggaggt

SEQ ID NO: 69347 - DNA, 404 bp, Glycine max
cccacgcgtccgcccacgcgtccgcccacgcgtccgcaaagcgggttactgtctggtcaagctaccatctctctctctctttcttagtgcctccttgccagaagttaaaatggcccaagaaactttcctattcacatctgaatcagtgaacgaggggcaccctgacaagctctgtgaccagatctccgatgctgtgctcgatgcatgcttggagcatgaccctgacagcaaggttgcctgtgaaacctgcaccaagaccaacatggtgatggttttcggagagatcacaaccaaggccaacgtggactatgagaagattgtgcgtgacacatgcaagaacattggttttgtctctgatgatgttggtcttgatgctgacaactgcaaagtcctcgtcaacattg

SEQ ID NO: 69348 - DNA, 93 bp, Glycine max
tccacaacatgcgcaagcatagatttgcgcgctcttgatgctcgctcttacatcttgggcgtggaggatgtctcatcggcttttgatcatgcc

SEQ ID NO: 69349 - DNA, 382 bp, Glycine max
aatgctcgttaaaaccaacgtgccccatgagaccttatctgcacagaatattcaggtccaacatgttccaaaatgtgtgtccaataaggcgctcgagaagatctatgatgagtcacaggtagattttgattataaacaaaattgattgagctctactacaattcccaagacgttgttcttgatctcaccggcaagaatattcacttaccaagaaatgctcgaaagactcaaaagcgaatttgcaccatgacctggcaaaagattcagaattggttttatggagatctgttgcacctgaaactgaatctataaaaaaatggttaggtttatcagcaaggacacttgtttttgaactcaatggggaatgaattcaaaaatttca

SEQ ID NO: 69350 - DNA, 385 bp, Glycine max
ggagattgtacggctacaaggatgcagagaagagttgcaaaggaaaaatgttgagcttgaagcaaatcttgaaggtgttgagagcagcaaaggtagcggaagtaaagttcaatatttgagagttccacatcctaagtctggaattgattctatggttgagatcctcaaatgcttgaaagacaaaggagtcgataccagaagcatcaaatcaactttctccccacaggagttgtttgcagtgttagagacagaaactgatgagatgctgatgttgaaagcgctacttggggaacacatgatgaacttgattggaagcttcatttcgatgcccgggaaggttcaaattaaaagcaaaagactattcatttagaatttgaccaaattt

SEQ ID NO: 69351 - DNA, 228 bp, Glycine max
cagaagcatacaaatctatatgcagaattggtacttctctgaatcatagagatggggcgcgagttctactttgctgacacttacttggatcgcagccctaaaaacagagactagaagggctgagacatccctgaagatcccagacctcacttaggatagttatgtcagacaacatattggtactatatcaagctttgctccttaaatgtgttcctcaaaacataccac

SEQ ID NO: 69352 - DNA, 477 bp, Glycine max
ctttgaagctttctctatttgctatgtaagctctataacattttcccctctctagcattctccacgatgtcttaagatcagtttgaggtcttttcttctccagtacaacatgaattacaaaaccaggcagatacagctctgggggatcatctgcggatggattttcagaattcggaacagtatctataaactgagacactggatcatgatttgaatgtgcatctatagcaaatggatttgtaaattcggcattgtcaatttcaatgatatgatcccttgccctagtgtcagaccaaagtgaacattgttcatgctcattattgaggcaatcttcacttccaaaaggattcatatattcaccatagtcagcagtaacaagatcctttctaatagcctgaacctcttgttcgatgctacctgctgcaatgatggaagaacacacgatttccatcactcattatagtggtaaaaatatgt

SEQ ID NO: 69353 - DNA, 316 bp, Glycine max
catcaatctactcactatcacactgtgttaccgtcatctactgaatgcatattgcataggccgtacacactacattctgccaggaatggacacttatcagctccgatctcacagcacgagcctgacagtgctcgtgttgcaaatatcaatagtccggctgatagcggcccataatactcccaggattctgatagacaaatactcagcattggacttcagtttttaaggacattctttcctggctgagaaaatcacgtcgaagaatcaagtgtacctgggacaactgcaagttctggcttagatcatgctggaacat

SEQ ID NO: 69354 - DNA, 430 bp, Glycine max
ctatgccaagccgagccagagctacattgagcgcggcgtgttgaaccatcattctggactggcttctacaaagccctataccttctctaactggtactcacctgatggaaaattagatcgggccgtaaatggataacagctgtataagctgtggtaatctgtatactttggattcctaggctacgacactccactaacatagacttcatccgacttgttagcgaatgctgactgatgatccacatgtgcctagggttaactcacttgagaaggatgctccaccgaaatcctgtgaatctggtgattacaaggggaaagagcacctaaagctactgctatgccacacttggaacagatgctatttcatcatggttagagcacttgtactttgactaggagcaaattgagtcatgattgcaattttaagggc

SEQ ID NO: 69355 - DNA, 407 bp, Glycine max
actcggtctttaattctcgactcaaccgtcccttaattccactccttcttctacacatactacatcattttattccatttaaattacataccatattagtaatcttctaaaaagtggagccttccattcattatatcaacactaaaatacattatacatttcttcctaatcaaatctactatatttaactattactacttccaaaaccaaattttataaatatatatattcatcatcttcacatatttattttcattattatatacaacttctacatcatcaaaatatacttcactactatatgcctacattgacttatacttctactaatcttcaaaaccattctcatttcatttctcataatatcatttatttccctacctcttttattttcttatcattatttt

SEQ ID NO: 69356 - DNA, 226 bp, Glycine max
tcttactcttaattttctcttcattaaactcaacgtttccctctattccctctgcgttttttaacttggtgttttcccttaacaaatccgaatttttctttccattacccaaacccaaacttttgaagattccaaataacttgttgttcttcaagaaaaataattcccctaaaaaaatgtattccatttgtgattcccttcccgaaccttctccgaaaaattttcc

SEQ ID NO: 69357 - DNA, 376 bp, Glycine max
ggtttggtgcgcttgaaagcaaaaaatatttacactctccatcctattattgaaactagtttttagacgatgaaaaaagtctactgttgcaatttgctttataagagtcggtatttttacaaactattatgtgcaccataatccagttaaaagaggaagtataagaaaattcgactgccaaaatcggagttactgggcaccacttagcgcagaaagaatctataaaatgccgaccaactcagaaatatcaaacactcagctggtaaccaacatggcaacatccattgttcatctcaatactgtcatataagtgcagccagcattgctccaaggtctgtcaatgattcaagagtgctggctatttgagccattggag

SEQ ID NO: 69358 - DNA, 326 bp, Glycine max
ttcccagctcgaccgactcatactcataaccctaaccctaatctttctcccactctttcttactaccaaacaatccctaatccacgcatgtcttacactgcttgtgttcacaaaccatctcacatctcttcaaccattaccacaactcgttccactccatccatcactttaccccaccatcattctcacatttcatattttttctctatcttctacctcacattaatacaccatcattaacatctatttaactacaactactaattcttactctacttcaattatatatcatccttaatatcatcatcaccatttgcacaatcaac

SEQ ID NO: 69359 - DNA, 298 bp, Glycine max
aatgaatctgctgcgtgcggatcgctagaacgcctacgagggacgacctggcggcctcaatgactttgaactcacctgactcagctcaaaggctaactatgtggtaatgacactgatacctaattgcactaaccctattgacaggaagattgataagggtctaagtcggcctaaagggctctccagaacctttagatactataccttgcactgatctggctggagaagtagctgatatctgaactgaagttaaagatgctaaagctgcgaacacaagtacttgctaaactcactcatc

SEQ ID NO: 69360 - DNA, 334 bp, Glycine max
ctcgaacacccactatctcacgagagtcagggtctcactgagaacttaatcccgttataagggtgcagaaaccgatggatgatattatactctcgtactgatttgtatgccagttaaagaagttaacatgaaacttgaaggcatcatgaactgtgagagtctccctatatgcacatgcgcttaagctggatacttctgagtgccaacgctttaccttctatatgaacctggagagataggatcgtgaccttgatttcacatagtcctatcagaggaagtagccactttcatgtatctgtacatcacagtgattgctgagatgggtgagatcata

SEQ ID NO: 69361 - DNA, 383 bp, Glycine max
tttggttttgggtttttttcttgctgtcatataacgttagttattttgtttattagtcattctgttttccccccttttttatatctttgtttcttctgcttttacctcaaaataaatacggtatatggtatatagtaattatattcctgttttattttttcaaggaaggtatatctctttcaatttttcccttttagtcctagatgttttcatttgttatttcattaaagtaattttctttatttctcttcgaagatacggtgaaaggtcttcctacatggattcatgttttaaggtttttagctaagttcttcattattatttggtgcagataaaaaaatattgttggtaatatgtcttcttttttttacttgatttgcgtt

SEQ ID NO: 69362 - DNA, 200 bp, Glycine max
tccactcgtccgaaatatgccataattcaatgactggttcgagttcaacattggcgcatgtagacatggggattatggaaaatttatgaggcgttattcgtggagtatgatgtgcctattaatgtaattggagacacatgaataaataacttgtgcttctatgtaaggtgtttcctattgtcagctgaatcaataacttg

SEQ ID NO: 69363 - DNA, 438 bp, Glycine max
atcagctatgtctttcggcaagaactagcactacaacagggcctcacgttgtgggatggccaccaggttgatcttttggaacgagcgatgatgaatcacacgaaaaacaacggtgtctctctgtacaactcagttcggatggtgtcccttatcattgaaaggatctccagtgattcatgtccatgactaaggactataaaaggctatgaaaaaattgtagtgactaaagttgtagtattaatgcatcttgcaatgctcgagtatgtatcatatacaaatactttcatatcatacgacgtaaattcgcgttcatctcatactacataatactgagtggactagaatgtacataaccatattgacaacaaaggttaaagccaaatgtaaaagggtgtactcctaactgtcccacggaaagagaacctacaagatttaaag

SEQ ID NO: 69364 - DNA, 131 bp, Glycine max
tcggccaagccgtccgatcatatcccactcttattctatgtcacttaactctatgtatttagcggatatgggggtgaaatattgggtctgtgaattttcgagagaaaaagtgtgcgccctttaatagggtg

SEQ ID NO: 69365 - DNA, 70 bp, Glycine max
tctgatcgatatgatactattatgtgatgtggagggagggagagggaggtagagttgtatatatatgtaa

SEQ ID NO: 69366 - DNA, 259 bp, Glycine max
tcactaccttattcttaaaaggtatcaacatccgcatatttttaatagagggaaaggggccttcctaaatattttttaatcttatttttttcatgtttaacatatgaagcaactgcttcaacagcccctgtaaacactgcagaaaaaaaaacaaattaatgcacattcaccctgcaactaccacagtaataataacccccaaagtaactgctaacccaatcccgtaccctccttccatcactccctattacaactaccc

SEQ ID NO: 69367 - DNA, 306 bp, Glycine max
  unsure (1)..(306): unsure at all n locations
cccgggctgtattgctgctattggggcacggaatcagaatgagtggcaccaacttagtcttaaacgtcatctgaatctcagttncgcaggcttacgactaattgtgattgattggtgtgaaaaggatgaaaggaaagagtgactttctttttaatattttggatcctaaattttagaagctgcatttgatctttgtatttcggagctatcaagatcggatgtcaatccatccagatctttattgttgaatccccaacacctattataatgtgtactcattctcttgatgctgctgacttgagctcc

SEQ ID NO: 69368 - DNA, 166 bp, Glycine max
cacaacaccatagcctttctctcgctggcccgaacgggagtgtttaccaaccttggcaagcgagctttcgtaaccttatagaacacctttctgcgttacttctttttattcgatattctgtaagccccaaacaagttaaacgattaaacccttacccattttaggc

SEQ ID NO: 69369 - DNA, 224 bp, Glycine max
gtaaatggaacccggcatagtgacatcactgatcctaatggccagaacagagacacatataggcccaactgcaatgagtgcatgggcattcatatagatagtcctggtcataatttatcataccgatcctgacatatttagaacatggaacaaatactagctcatccatgaaaaaattcgtcatcactgcatagctaaaaatcccaaatttattatggataaac

SEQ ID NO: 69370 - DNA, 229 bp, Glycine max
gacccaaacggccgacaagaacagaccaacgagaacaccgggaaaataacaaacaaaaccaaaagggaaaccaccagaagccaaggccaggcgaaagcgcaaaccacgcaaaaccacacacagacacaaaaaaccaacaacagcgagaaaaccacaccaacaaacaaagaccaaaaacacaaaaaacacaacacaaacacacgacccaacaacacacacaccaacacaa

SEQ ID NO: 69371 - DNA, 174 bp, Glycine max
gcctgcatgcggagacagctgctatcgggtcttatctgaggctggctccaggggcctatttagaatagcctgccccggattgaggctgcgttatagcactgtgaaatcaagcttggcgaggctactgcacgagattgaatggataccatctgatgagcgagacagttgatctaa

SEQ ID NO: 69372 - DNA, 292 bp, Glycine max
  unsure (1)..(292): unsure at all n locations
gcttgtggcttttacagaaagctacagtccgatanttgatcacacctccaagtggctttcttaggcaggtgcttacatgcgttcgtctccattactgctcaatatcactgatcaattcatgtttttcgacgacagctaagagtctagatcattatcgcatgaccaatccagtaaaatactagtgaggtattacatacatacatcttgtggactagatattattgcctatattgatgctattcagccaatgaaaagcttgtgtgctaattaaacattatattatatatcctat

SEQ ID NO: 69373 - DNA, 188 bp, Glycine max
gctcttctgaccatgactttgacattttcatcaggtctatacatgtgccaaatgtaccatgagaacatctcatgccctgtcgggcaccatgctcaaccacaacaaagtgatagcaatgtttcgatgagaggcttgtgaaacacctcaagctgtgcaactcgctgggcctgaaagataatatgcatcct

SEQ ID NO: 69374 - DNA, 239 bp, Glycine max
ctctttctctctatgaccaatcccaaacccataacacaatttaaaaatgggaggggatctggggccaaagctgatgggaaaaaggaatgaagaggaagaagaacaagaagaagagtttttattgggccaaaaggtttggaatgagaaccatggtatttggatagtggcggtaccagccatatttacaaagggtttcaccttttgaatcaatgttataatcccaactttttttggccata

SEQ ID NO: 69375 - DNA, 117 bp, Glycine max
aaaagcagtgtatttctattttaatcttgttatgacatcatgggactcttagggttttttgcaaattcatgggggatggatggtttttccattcccaataatacctgacatttttct

SEQ ID NO: 69376 - DNA, 184 bp, Glycine max
agcgtaccgtcgcggacatctcatgattccctcaacgacatgtcaagacatgttcaaccatcaacaaacttagagattatcatgtcatgattatagcgcagctaccaccgaagctagggtcatataaatcgctgacgataggtatattatcgttataggaatctacgacataacatgactaatg

SEQ ID NO: 69377 - DNA, 203 bp, Glycine max
aaaaaaaaaaaaaaaaaaaaaaaaaaaaaaaaaaaaaaaaaaaaaaaaaaaaaaaaaaaaaaaaaaaaaaaaaaaaaaaaaaaaaaaaaaaaaaaaaaaaaaaaaaaaaaaaaaaaaaaaaaaaaaaaaaaaaaaaaaaaaaaaaaaaaaaaaaaaaaaaaaaaaaaaaaaaaaaaaaaaaaaaaaaaaaaaaaaaaaaaaaa

SEQ ID NO: 69378 - DNA, 325 bp, Glycine max
taccttgtcaacccaagcgtaccctgctcatccacacacaagcctggacgccctgtctacccatttatcccaagtggagacataagaggactactctaattacaaaactgatatctcgacattccaagcttgccaaaatattattctaactagatttcttatcttatcaacactagaatctcatgacaatttatcacagatttctgatatcctagttaggtactccaccgaggatatacgatgatgcaagaaacctaatttccaagacagtattggcaaatccctcaaataggaccgcaaatccgacagtactaacatgtaaaag

SEQ ID NO: 69379 - DNA, 96 bp, Glycine max
  unsure (1)..(96): unsure at all n locations
gccaccgtcggagaaaagtggggcactactcnactttttccttttgcttgcgaatcggaatcaaataatcagatcatccggttcattagttcatca

SEQ ID NO: 69380 - DNA, 305 bp, Glycine max
ggacacaggtgatgttgaaactttagatgtctaacaggggatctctaatggacaattgaatgcacctcaacttctggataggagtgaataaaagcgtatggaaagtggtggtgttgacaagaaaaagaaaaaaagaaagaggaaggaggttaaagatctcaagtttgaaatggaagtggataaaacaagctcccagttaaaaagaaaggaacgtaagaaaaattatttcgaatcataaaagaagaagcacataaaatccaatgaataaaaaatggactttcctggacaagaaaaaattaaatttg

SEQ ID NO: 69381 - DNA, 305 bp, Glycine max
gtacacatctcttgtttaaacttttgacacctactacatcataggaaatgctggggatacgcggcactttcttcaaggatttggggctagtaaatcttatccaacaaatggcagctgacatgtttaaggacatttatagagtatgcaggacaatgattatagctaacacttgaagatccctaatactccctctcatttacctacttggaagcgttatactaccaaaacgagacattcctgattaatcacaataaactcaactgagagtcaccattcacatacggatataatgccttgtcatgtta

SEQ ID NO: 69382 - DNA, 340 bp, Glycine max
gccacgcgttctgcattgctctttgcaaccttatttctagctaattattatgggtattatggaacctgatatcggggataatggcatacttaatcaaatacacagaggccaacactccttccaatattccatacgcttgactagccactcctcaagctgaacctaaagctgtaaccacagccatcaccatagcaatcatgcatatatacacgcatattgcttatactaatccgtctaacattcaatctgatattaataatgatcttaataatcattttgataatcgtgaggacaaacgtaataacttatggatcaccttctaacaatattcttcatatca

SEQ ID NO: 69383 - DNA, 344 bp, Glycine max
acaagcctgaactaccttgtcaacccaagcgaccctgctgcaactctaacatgccactaggaccttttacccactcttgcgaagatcctgcactgggacggctccgtatagcgctatgtgatacgctagccagagtggcaatgtacggcgagaacgcaagcatcaaagagatccagtacatgaacgaaatagccagcatgtacgattacaaggctcaggcgaagaaacagctctgcaacatgcctctacaacgtgatgcttcaatcccaatgttacaccgagatatgcactatgagcatagacactcttaactataacactaacaacatcgttctacgcttcaa

SEQ ID NO: 69384 - DNA, 367 bp, Glycine max
tcaaattccaattctgaaacgttttttgtgatattttattttggtcttaatcttattttccagtattgatgaaaaggaccatgggttatttgttttgcgtatcaataaaggttaattttattaaaaaaaaaaatactaaaaaaaaagaaaaaaataaaaataaaaataaaaaaaaaaatcaactataaaaataaataaaattttacatataaaaaaatataaaaaaagggcgggccctttttgaggttccaatttaacgtaccgtggattccgaattaatagttttctaatggggttcccaaatttaaattcatgggcctttttttaaaaatgtcaaggcttggaaaatcctctggggttcccaaat

SEQ ID NO: 69385 - DNA, 143 bp, Glycine max
cacacagccccgcctacttgcgacccccacgaccctccgaagcccgatcacgcctcgaggccgttgacccacgtcgtccgagctggcgactcattgggccatagcgtgcgcccgccggctgacctcgagcgactcaggaatgg

SEQ ID NO: 69386 - DNA, 252 bp, Glycine max
caatcacttgctgacgacaagatttagcaacttctggagttcactccgacgttggggcgagtcgcgccttttgcacaggggatactggcgcatttccctcgccattaaacacctactacattatcacggaaagattctcaaatccaaggaccacaaacctatctactaatctctccacaatatcaaagaacacctgacgctatcatggatcatatccctgcttttaagagatacacaaaacagcatcaccaa

SEQ ID NO: 69387 - DNA, 325 bp, Glycine max
tacgttgcacccccagcgacccttcgtgagccggatcaggccattatggccgttctacccattcttccgagtacaatgtcgaaggtggtctaagcctgttaaacggagttgcaccgcctgctggacgtcgtgcaggcgtacgtgcattctactgaacaggtgcctcacttcatggagttatgtcagggtcaatgcgctctgaagccattgaactcgttacactctagctctgaaaatactctcttcaagtgcgtacaaccgcttcattgtcaccactactcgactttaccagccagcttgtccatattgtacagaaaggatggca

SEQ ID NO: 69388 - DNA, 52 bp, Glycine max
cccacgcgttcgaaagagaatgtgactttactcatcagttccactagaaagt

SEQ ID NO: 69389 - DNA, 229 bp, Glycine max
gctcacttgtagaagctgctactaatcacggtcataagaccaacaactcacaggatgtgttagctgcacaacatgattctgcataaaccctgtacctgaggtcgcagacattgaattctatctcaaggatctccaagacccgttcgactgttgataaaacactgactgatgctacatatgcatccttactatacgcagacacaactcatgaccccgatgtggaccatat

SEQ ID NO: 69390 - DNA, 329 bp, Glycine max
tccacgcgttcgcccacgcgtccgcaaaatgtggatgctttcatgaaattgaaattatcaagggaaaacctcgtccgaggaatgctgtttcatcaacagtggaaggatcttcgaacagtacaaatcctttagatgttgcactatcatgggtacaaaggtgtatagggtttgacactaaattctcaactttgaggtgcctaatagccattccggtcgcatatgagatttatttgccagatttcgcttgactgtatcctacttcacaacatgaagtccatttaaatcatggttttcatgcattttgctcaatggtcaaaaggcctgccatg

SEQ ID NO: 69391 - DNA, 178 bp, Glycine max
tacttgccacccccacgaccctacggaatcctgatcaggcctcgacatccgttgacccacttatgcgacacgctttacaaacgggtcttatgctccagacattgggccgtccatgttcaatgccctatacacatcgtactcaatacctcagccagatacggtgcagaaaacctacaca

SEQ ID NO: 69392 - DNA, 109 bp, Glycine max
ataggtttttattttatactatatattttatttaataaaatattttttaatttttttaatcttatttctaatatatatttcatattatattatattttattagattatt

SEQ ID NO: 69393 - DNA, 62 bp, Glycine max
tcgaccacgcgaccgatagatctatactcatcaccttatcacacgaaccactacggggaaac

SEQ ID NO: 69394 - DNA, 58 bp, Glycine max
tccacgcgtccgcccacgcttcctaccacgcttccggcctctcttacattggggcaca

SEQ ID NO: 69395 - DNA, 313 bp, Glycine max
atttcaggaacgttagattcttggcaaagttcataacagaggctggaattcttatgaagagaagccagactggcattagtgcaaaggctcaaaggaaggtcgctagggagataaaaactgcacgagcattcggcttgatgccctttacaacaatgggtacgaagtcttttgtttttgggagaactatgcagaatcttgatgaagactttgcatatcaaagtagggtggcggatatggatggggaacctgatatggaaggagaccatgcttagaacattgatataggtacttatgcttgggggggggtgggggg

SEQ ID NO: 69396 - DNA, 339 bp, Glycine max
cccacgcgtccgcccacacgtgcgctctgacttacttatagctgcacatgtccgatacacgagtctggcatatcacgatggaatccccaattactgtcgcaacacaagaatcattaccccaaaacccagaattcaacaactaaaccccaatgatacagactgatttatttcaacattcttaatacaaacaaacttcttatacgaaaaatgactttcatacatttcataaacactatagctgctagctatcatcctttttctcacacatctctttttcctcaattccatactcctcttctttcataagattaccccaaacgaattcgctattctaactcc

SEQ ID NO: 69397 - DNA, 155 bp, Glycine max
acgtaaaccctctatatagacacacccagtggatactcttcattgactgagccatagcgtaagggggtctccaattagggagcattgtgtggaacaaagtctaaacctttattcttatgaacatgcatctgaaaagcgttgattcatcatattgt

SEQ ID NO: 69398 - DNA, 388 bp, Glycine max
tccaaccatacgctcaaaacttttaaacctttatgttggaatctgatggaaatctcaatggacaatcatatcggtggctaacagaaaccaaccactgaatgattcttatggaattgctccaatccatgaaaatggcactcttcgcattgcttaacggacagaaacaatttatttcgactacttatctctccaactcgtcatccaataaaacttcccagtattcacattatggtaagctcgtccttaccaaatccacaactggaaacatctcgtaggatacttttcagcaaccttcaaatacattattgcccggcatgaaactttcaacaaataatagctcacgtaataaagtatagcttacattgtggaaaatcccttctaatccttc

SEQ ID NO: 69399 - DNA, 102 bp, Glycine max
aaactatggatgttcttgttcctcagatgtgtttttgtgtttttattatttaacactcgggaaacttttgggaaattcaattattgaatgcttggttggcag

SEQ ID NO: 69400 - DNA, 500 bp, Glycine max
aattcccgttcgaccgacgcggccgctaaccaattccaaattctcaactttcctaactttatcaaccatccaagaagttgatcaggtactggtctctccttgagttatgaaaccattcacagtcttgaacccaatttcactctttgcacctcaaacaccttatatgcctcaatttcacacccgaaaatgcaaagttcaatctcacaatctgagatctgcatcactgattaccttctaccccaataagttccatctcaatttcaatttccagatatgagcaacatttacataccaatgaaccataccaaccttcaaatgcctcaaatcacatctttctccaagcctacaaagtccttatcaaatctaaacatccgcttaccgttcttgagaaacatctcaatgccttccataacctcaagtcttacaacaactatggtacaaactacaacatcatacttcaattagctcaaccatggattacatcaataaagttacttttt

SEQ ID NO: 69401 - DNA, 339 bp, Glycine max
tcggccaaaacatcgcgtgggaccagaagagcatgaagtccgggtttgcctccgcccgtgatctgggagggaatgatctcaagttaacttgagataggcacttaaaaaaatttgttagggattccggtatggttcgtatgtcattggttttctaactttgtaccatacagtgttatttgcaatagaattgtgtctcttatgtttgtctctagcaaaaaacaatacactggccgtaattttacaacaaaaggactggcgatttacaggatccaagcttacttacccgttcatgcgacattatagttttgctatagggccacctaacttcaatgccctggc

SEQ ID NO: 69402 - DNA, 54 bp, Glycine max
tacccattactaaacctacacaagcattcatttatagcttatttctcacactca

SEQ ID NO: 69403 - DNA, 464 bp, Glycine max
  unsure (1)..(464): unsure at all n locations
attttatgaatgaatgaaaaattaaaggcatgaggggcaagtgtggaaattaaaagaaacggctgcatcgaccagctcgtcacttcttcttcctcttccatttccatttctcggtgttgttgttcttcatccatggctttccctcagcaccacttccaacggcactaccaaagccagcagcaacaacaacaacaacaacaacaacaacaacagcagccacaaaccaaaaacttcaggcaattaatctaattatcctctcaattttttatttatttattgaaatcccaaaccatttcccttcctttccacccttcattttaccaaccctttttgatattttgtttatttttacaatttaatcttctttgcttctttatantttccccctttattgttttcctttgctttcagaaatctgcaaacaatcgatggtcaaatgtcacagcatgtggcgttttacaacc

SEQ ID NO: 69404 - DNA, 180 bp, Glycine max
tcctggccactctccttctcttctctctaggtcttcagcgcatctccacctaggggtaatgaaaatttatatggggaatgttcgcatccgtatttttgtcacctgctatttctacttttgtaaatccacttccactccttaccctatttacaatctttcatgccttctctagcctgttat

SEQ ID NO: 69405 - DNA, 59 bp, Glycine max
tgatgtcgtagaatatgaattaattcagagtttttgatactcacaacatgcagcagtca

SEQ ID NO: 69406 - DNA, 210 bp, Glycine max
accgagggagatgtagtggcatgatatgcgtatgaatcggtaagatggatagaggatagagcactgatggtgtggtggatgtagatgatcgcctgacgtagggagatgatggattggagacatatgacatgtctcgtcgtcgatctattaatcctgtcgtttacgatgacgtccttcttctaggatcttgactagattaatcgcctattg

SEQ ID NO: 69407 - DNA, 81 bp, Glycine max
gtgcaaagaacctctgctctcctcttgctattgatagataagaaagaagcgatacgatgtgggacgcgttctgcagggact

SEQ ID NO: 69408 - DNA, 201 bp, Glycine max
cccacgcgtacgtaactgactatagcgacgttcttaaactgctgctaactgaggaagacgaggataccatttagcgtgaacctgacaacagcccatgtgcagcagaatatatcgggatccaaaagatcttaagatgcagttccatgatggccctttaataacgatcaattcgctcaatcttggaaaggaatcctagggaaa

SEQ ID NO: 69409 - DNA, 269 bp, Glycine max
acgcccacgcgtacgatggtacgtgaatatgtccaatttagactatgcttaaaaatgaggaggagggatataaaagtatacatgggatatgtgatatgatatggtagaaaaataaatagaaaaacttgtgttaatgaaatatttgaaataaaaaattgtatactataattactctttaatatttttactggacagaacaatttttttttctgtagactaagaataatgatattcggatattcatatatcataaatgcatatttgatatt

SEQ ID NO: 69410 - DNA, 284 bp, Glycine max
cccacgcgtccgaccaattccactagggattcaattcctatgcgattccgagcttgctagggccaccgcggcataccgtccaggagatcgtacgcttacatacaacgatctacctatgctcaacaggcacctcggatcaaactggagcacgacatgactgactgccaagcctgctatgaacgtgccatatcgtacattaacaactgtggattacatgcaagtgcagccaccatgaatatgtgctctaaatcccacacagacatgtttttgaaacaggagcacac

SEQ ID NO: 69411 - DNA, 61 bp, Glycine max
gcgatcacgcgtgcaagtagctgtatgacaccttttttcctgcggatctcgacctagcagg

SEQ ID NO: 69412 - DNA, 87 bp, Glycine max
gttgaatcacagatacacggccatttatattaaagcggaaccactgtttataacggggctgggttaagcaaccgggtgcgtagctta

SEQ ID NO: 69413 - DNA, 350 bp, Glycine max
gatgttacacccaacactctcctctcactctctcacaagctgtgtccaacgttattgctatgaacacacagttcacggcttaacgctctttcgttgttgattgatggaaagctgcatacttcgctaccatcacccaacactcctcactctgacatcaatttcgcacaaaccccacttgagattcttcacagggcctgatctcggtggtggcagtgtctctacttcttcttcatgagcgacatattataggcgaagaccctctatcagagcaagtgctggaacaagctcatgtgagttcagtagcctgaactctagcatggagccacgttccatggtgacgaagttactca

SEQ ID NO: 69414 - DNA, 287 bp, Glycine max
aacactcgttacgacacgcgtccggattccgcatcagagagtagaaaagatggcgcggttgatcacagtggtatggtgcgcggtggcggagctactgtgatccgagtagtgcccgtcacgtgtggaggaggctgtaaaccacataccaatggtgactgcagtgtaggcacgaagtagttcgactgataaggcagcgactgcacgcactgaacagtgctaggattatgatcaggatagcgaagagttaccgaagccaggaatagatgagggagaggtacgagatattc

SEQ ID NO: 69415 - DNA, 207 bp, Glycine max
ctcacgcgttcgattcaaaagatcaatgctgcacttcatgcaaagacattttcaaaatatgggcacgcggataggttctacaggagcgacctgaggccaaatgagcagctgaccacatgatgcaactctgatggctatacatcacgctgacctgttgtccagacgccctggtaggactggtcaacgtcaactaattgccgatgcact

SEQ ID NO: 69416 - DNA, 246 bp, Glycine max
tgaaattctaaaaatgactgggagatacttaataattcaatcatggaaatctatggattgggcaaattaatcggagggggcgtatggtttcaaaaaaatggtgtactaactcccatttcttattcattatccggattaaccgatcaactagctgtgctatcgaacatatgcttctggtactcaaaaatctcgcggaataaatctgcctctacttatatttgcaccctattcctactactctttggg

SEQ ID NO: 69417 - DNA, 341 bp, Glycine max
gaatgatagcgaaaaccaaaaaacaagtgtcatcaccttcttctcgtcctttccttgattcggttggttccatctcttcattcatacctggatccgggatctcccaattcctaacttgaaagtttgaagaaggaatagataagtaatggcaggagcagaaccaggggctctgtggcagagaactgctaatcgttgctttgtccagaaagatccataaagagctcccaaattgggcttagactccaaacacctagttcacaggggattttttgtataatgtccattagggttatcaattatgttatatatggtctgggatacagtcttgacttacagttttt

SEQ ID NO: 69418 - DNA, 185 bp, Glycine max
acgctaaatgtacgctcaaccgctcgcatcacacacactctcacgatcatcgctatatacaccgacgcagtgcaaatatcatgagtacacggtaaaccacacacatacctctaattagaattaccacatatctgcgagacctaccactatatgcacatcaaatgctgatggtctggatcaaaatc

SEQ ID NO: 69419 - DNA, 247 bp, Glycine max
tatgctttcaagttttaccaattgggcactttgaatagtgtcgtcattaatgctttcatggtcatcaattaaaccccctaaacagcatttatcttgctagccaaattacttattaattaggcacataatgttaaacccataatcctatttgtcacctgattttaggttccaccctaccgattatgaactcattcttcactaccttagtaaaaaggtatcatccatacccttgctctattccatcatt

SEQ ID NO: 69420 - DNA, 195 bp, Glycine max
aatacactgattttcacaacatattagtatatatttatatgcatacaatgatgcacacacacgacgagcgcgttctcatgctgaatgcttcaagagctattatctgatactccgtacaattcatctctaacttgtactgcctttcccctctgacgaacacttaattacttatgatctcattggcagtcctgctag

SEQ ID NO: 69421 - DNA, 224 bp, Glycine max
acgcatagttatgggacccaaatcacaggagattgtcgatattcaatttaagagagctgggctactcgatcgtggactacgttctatgaggttgaatggtgaaaaagcgagctggtcaggtattatgaaggtacatcttggactcgacagttaattcacgactgagcaatatactggagatgtgttaaaaactcaagtctgactatacatgcgttgacgcattt

SEQ ID NO: 69422 - DNA, 290 bp, Glycine max
atcgatcgatcgctctaattcgtaggtgacttcctttgtgtctattctctgctaattctgagtcgggagatattctgggctgtgcaggctgactaacactacaatcatatccatgtaaataatgaggctgttcactatgatcattaacataattcttgcggacttcgtatgcttaaggttcattacatacggaagtgcatcatatcaatatctgaacgtgtcagacacaagcgttcagcaatggacactatactatgttgatgaaacattggcagcatcattgggacata

SEQ ID NO: 69423 - DNA, 456 bp, Glycine max
gtacggttgctccaaaagcccaatgacttttatgtccactttggcatatgggacactgtgcatgctcctggcaatgagattagccaacactggagattctggtgtttttacatcacctaaccacaaaatacaggttggcaaaatggattattaccaaagacactgtaattgcaacctctttcagtctcatgggaggcataattcaaaattagaatgttttgaatgattctaattgtaattgctattattttatgcatgtggtctttgatgggtgcataaaatgggattcaatatggtccttttgccattccacagaatggattgcccataacactatatcccaaataaaaagtggaggcacactaatcaaggcatggaagcaacttgctaaatatggaaaaataactctttcaaaaatatttgaatatgttaaccagagaaagtgatgaaagtgac

SEQ ID NO: 69424 - DNA, 62 bp, Glycine max
aacagtacaatatcacagcgattcgcatacgtgggttacgatagcgtgctacgctatctgat

SEQ ID NO: 69425 - DNA, 123 bp, Glycine max
cctcacacccccttctgtcaggcaaggggggtgtgcatagggatcattgattccctccaagtgaatatttaacatggcatcaaaaatcatgcagttgcttccttacgtttagtcatgaatgga

SEQ ID NO: 69426 - DNA, 428 bp, Glycine max
cgtttttctctttccaaatctaacttacaccttacaatacatgtcatgtgaactcgtgaagtgtgcagtgtttggtgcttctttttgttctcctctttccttttttggttcacgattccttccctcctcatggagtctctggaacttgttcctcttcttcttcttcatccacgcgcatcaccaccactacaatcaataaggcaacctcgtttcccttctcttctcaatagaaaaactagaaatgccaacttgcgatcattttccgctaaccttcaaggcggcggtggctgcgctacttcacaaggcggtcccttctctttcgaagaccaaacctctcaccacaaagacgatagagctcttctcattgccagagaaaccgacgattttggctatctcgttggcttttcgttgctttctgactctggtct

SEQ ID NO: 69427 - DNA, 436 bp, Glycine max
cccacgcgtccgtttgttgttgtaactcgttcttcttcttttgttgttctgtgtttgtgtttgttttttctctcacctgaaaatgtcttgctgcggtggtaactgtggttgcggaagctcctgcaagtgcggcaacggctgcggaggctgcaagatgtacccagacttgagctacactgagtcaaccaccaccgagaccttggtcatgggagtggcacctgttaaggctcaatttgagggtgctgaaatgggtgtgcccgctgagaacgatggctgcaaatgtggaccaaactgctcctgcaacccctgcacttgcaagtgaggtgttgggagagcaagcttcaagcagagatagcccttaattaggaataatgataaactattaatgtgtagctaaaaacttatgtattatgtctgtgatggttttcgtgcactc

SEQ ID NO: 69428 - DNA, 338 bp, Glycine max
acataacggaatttatatgatggaagttgatcgagttctaaggccaggaaactatggtctgctctatggtgattgaatcagatccaaggcgtagctacaaacactagctgagacctaatctagaacttgcgaaatacctaatactgattgaagagacgtgtacatcatacattactgtttcactagagcatacttcaggagaatggccattatgcaaaaggtttcaaagccttgaagatagctattaacaaaaccttaacctaggttggaatgatccaaatgataatattgcgacctcaccaggattcagcaattggatccactgatatcactgattc

SEQ ID NO: 69429 - DNA, 169 bp, Glycine max
gctaccaaggttaagagtaattttagcacggtagaggataacggctactagtgatgtagctatttccatcatactcgcacttttggtggatatgacacaatcatcaactgcgatcgatcacaacatgatcagaattactaggcagatagctattcgacactacttccct

SEQ ID NO: 69430 - DNA, 206 bp, Glycine max
gcggtcatccgtgctagatcacacgcattcagttttcgtgctgtcgtcatgtcaaacagggggagtgctcacatctaacgagaaggggttccagagcgtattcaatgccttaactgggaaaaaagctaaatcggcccgcgtgaaggccgtcacataattggccaagatgcggatacctgaattaaactacaacggcagggtgcgaa

SEQ ID NO: 69431 - DNA, 180 bp, Glycine max
accacgcttgataaagatctataacaactccttacatgtataatcacaaggatattaatctttccatgcgtattatcattgcttgagcgttgagagtacacttgacccaaggattgtcaactccagtctagatactaaaggagagactaatgcagatgccaagttcaatgccacatatat

SEQ ID NO: 69432 - DNA, 287 bp, Glycine max
ttgaagtgatacctctgcatggagcataggacttgctggatgtgttatgaatatggcaataagtcttgcaaggtgttcagccaattggcaccatcattgagacaactaatacagaacgaatattatttactgatgatgcagataaccaattacttgatgaaaattatacgtatattcgtgcaccgtttgatggaaatcatccatttaatgttgtctaatttacatttcacgtgactggaattatccatgataacattcttgtagatatggtcatgcacatcaaaaca

SEQ ID NO: 69433 - DNA, 94 bp, Glycine max
ataacgagatcgttctaagatcaaacagttcttagcgatgttgcccataacgctgggctaattgctcacacaaacggcgtgtcatatcttcaca

SEQ ID NO: 69434 - DNA, 374 bp, Glycine max
acccacgcgtccggccacgcgtccgtccacgcgtacacatattacccaatcccctcatattatctaggcgtctcttacaccagcatgtcctacaccgcgcctgcggtgcttcccagctataacactacccagcccggacacgaccaggcatgctacaccaccattatagctcctaccaacatcccggacttgccctcctttatcgacaacctgtgcaactcccttcgccacggccttcaacagcaccgatcctgatccgatctcgactacctttcatcgatctctaaacccgagtcctactcctaagccaccctccgtgtccgcaaaaacttcttctactttccgcgtcaactactacgctgtcgtttcactca

SEQ ID NO: 69435 - DNA, 193 bp, Glycine max
ctggatctcttactccgcactattcaaggcggtcaccatcgcgtgtggcgacctactgaggcgcccagctgtcagccgcttatcatctcacaaagcgtgcacttgaagcgctcagcaaccctgagctgcctgttggcagacccgcaccggctaataggacaactgtactgatagctctggtgctgattgttga

SEQ ID NO: 69436 - DNA, 311 bp, Glycine max
gacacagtcatgtgcactactggcactgtgtctggcttgcactccaacacagatgcgatcaggcaaaatgacattgaaaactggtggatcgtctataattggagaacgcatagtgcaccttttcaatgttcgtgtgatcccaaatatctaaacatgccaagtgaaagagcgaagaaaagtctaagacaatgtctgggatcagttacacgattgatgagacccttcatgtgtgatgccacaagaaagatgaagagcacacatggaagcaacaccatggtggataattcaaaggggagcatcattgtgaacac

SEQ ID NO: 69437 - DNA, 343 bp, Glycine max
gaaagtgagtcttcagagtctctgtcttctttatactttcctcatcaccaaccttctcaaacagttctgaaggatctaataatggttcacatgcttggccttgtttgtacttctaaaggaacatttgctgactgtttgccacatgtggtaacagagctgtgcaatttaggtatcatttctgactcatcacgcgatatggcatctgaaccaccttgcatattcaacaaaaccttcaatcgtgttttccagaaacacctggctttatctataatatgtcatttttggaaacctgatattggacgcttaaacacaacttttcatggttctccatatttcaatgatt

SEQ ID NO: 69438 - DNA, 278 bp, Glycine max
tccacgcgtccgagcgagccaatttgttgcaatggatgcgcatcctagcttgtaaggtatctagagactgctcttaaacgccttcgatgtcaaactgtagtagtgccctgcatttctaggtcgtaggtaccggatggagcgaaaatataatgaacagccatatagagaccagttctgcttctgcgtttaattgacacagaaagaagccggatgtcacctttacagtgcaaatacaaattaaatcagacggtaaaatcactgagaatgctgaaggtcct

SEQ ID NO: 69439 - DNA, 177 bp, Glycine max
ttcccgttcgaccacgcgtccgattcaatccattctaaacagctattctcatttacacagactacactttcgataagaataagggcggttctgattgccgttcatagaaggggaagatcagatattgatatgatggttactaagacatacatggctgagctgtacactgctattaaa

SEQ ID NO: 69440 - DNA, 266 bp, Glycine max
  unsure (1)..(266): unsure at all n locations
gccacgcgttcggcggtgacatagtgtatgttatataactgaatcatagtctctgttttagggacagccttctgaatgttcagcatcttaacattcaacacttacgatctcccttaattnagttatggaaaaataaatttgtgccgatcacatttcctgaaacactggcttatacacacagatcatcatgttaaatagtatgttgtatgcttgtcggaactgccatggaagggaacatgattcttactctatggatggcttcttgt

SEQ ID NO: 69441 - DNA, 390 bp, Glycine max
cccacgcgtccgcccacgcgtccgggaggggtacaccaaatgctaggctttttacaggatgctgataactggagaagatcaccaattaaggatgttactgaatctgatgatgatagtgggggacgaggatatagatcattgcatgattttgctgaaagtcgttatctactgaaacttagatctgcgtatactaatttggaacgtccagaaagtgtttgattgatcaacatcaagcaagtactgactaatttacttggagcaagtcctgcggattgcatgctcttgaatatggatatactttttggatatatagtcttacaggtgatcatttaatgagagatggtaccatatgcattggagagtggaaactattctttttgcgcaacatta

SEQ ID NO: 69442 - DNA, 348 bp, Glycine max
gtttggcctacgactccacgcgtggacctgcgaatctcccctgatcgcatctcaaatctgctatccgtggcttcatatcactcgacggggaccttcgcttgacccatctgaagatccagttgaatctggatctgatcgaaactgtactgactcaaatcctctgcagatctgacgcgcatgatcgccattctcactctgctcatcgtatacgtgcgtcagaaatgtctcttttaccgcaaggcgcactccttcaaatcactgagagttgcaacgattacctacaggaggagttctacgtgttccgagaaattgtcaactagtataactacgaggcgacggattcctagt

SEQ ID NO: 69443 - DNA, 107 bp, Glycine max
cccacgcgttcgggctctacgtgccgacactctcatcgtccaatcgcgaacgtcaaactacagagctatggggatctgaagcttatgttcaatgaccaaggacaagc

SEQ ID NO: 69444 - DNA, 284 bp, Glycine max
aaaatctttctatataaaaccatgcataaaatggtgccaaaaagataaaggtggatcgtgactagtgggagatttttaagggatggaatcaacaaatttcatgctccaagccggatgtgaccactcaacaccagctgttaaatattttataggtctttttaacagctattaaagaggtagtgaaagatgagggaattagaaagaaggactagtgtatttgtatgtgtaagtacattttgtctttttacttttaaatgagggagttaaattgaaacccatatggc

SEQ ID NO: 69445 - DNA, 101 bp, Glycine max
  unsure (1)..(101): unsure at all n locations
cccacgcgtccggaatcagagnattcttgaccactatcacgctcagggatgggagtcttaaggggcgtcggtgtctactcatcaacagttccgttacacgc

SEQ ID NO: 69446 - DNA, 357 bp, Glycine max
gccaaccaacttcttctcctttttctgcaatgggttgtttttgatcttcacaatccaagcctgatggtgagccaccccttcttttcaatcctctcaaaacctcttctttgcattccgatatttgtgaatctttttctattttatcatgggtcgctgtcaaaatcccttctttcttcttcttgtttcatggtattcgtgaacaagcatgtaatttttgctctaaaaaattgtactagtttttaagggggagagaatcatgaaatatagtgcataggacaaacaaatttaaaacctttctgttgggatatagatatattgccacattttgtattgaacaattgaagtcctaccctctgt

SEQ ID NO: 69447 - DNA, 98 bp, Glycine max
cccacgcgtccggaatcagagttttttctaccactatcaggtttacgattattatgtgaagtggtcatcctgtctactcagcttcatttcctttacac

SEQ ID NO: 69448 - DNA, 210 bp, Glycine max
gtttgttgttgtaactcgttcttcttcttttgttgttctgtgtttgtgtttgttttttctctcacctgaaaatgtcttgctgcggtggtaactgtggttgcggaagctcctgcaagtgccgcaaccgctgccgaggcttcaagatgtacccagacttgagctacactgagtcaaccaccaccgagaccttggtcatgggagtggcacctg

SEQ ID NO: 69449 - DNA, 72 bp, Glycine max
aaaaaaaaaaaaaactaaaaaaaaaaaaaatttataaacaaaaaaaaaaaaaaaaaaaaaagtgaaaataag

SEQ ID NO: 69450 - DNA, 106 bp, Glycine max
gcgacgcacagcgtcagaacagaggcggcatcagccacgttcccgggcggggcaccgaaagagcatcgggaatgcccaggaggacacaaggctagacgccggcagc

SEQ ID NO: 69451 - DNA, 279 bp, Glycine max
cccacgcgtccgactagatggtgcttttaggattttccgtgaaatgcctgagagaaatgtggtatgctggagtgctgtaattgcaggctatgttcagaatgaccggtttattgatggatatgaattgatgaaaggatattctgaaagtaggtatgggggtgagtcaatctacctatgctagtgtattcaggtcttgtgcaggattatcggcatttaattggggcacacagttgcatggtcatgctctaaaatctgattttgcatatgacagtataattg

SEQ ID NO: 69452 - DNA, 236 bp, Glycine max
gttgctccatggaggaataaccttattctgtgaaggaaagctgctctagctttttgttgatgggggcgtctctgatggcagctgccagcgctgcatccatgttttgttctttctggttcttggttttgtttattctgtgcactgttgggaccggtctttcctttgtcctcagcaacaatcttcttggttggatccttttctgcggctttttgcttatctggactctctattttgtc

SEQ ID NO: 69453 - DNA, 71 bp, Glycine max
aattccggtcacccaaccttcggcaaccttcctccattctatgaccgaatctaagccaaactacaaaaatg

SEQ ID NO: 69454 - DNA, 103 bp, Glycine max
gccctagatcgcgatctacaacgcgaacagtgccacaacacaacacagcatcaccataataacgacttgaccctgcctgaccttaacacccaccaccccgaga

SEQ ID NO: 69455 - DNA, 418 bp, Glycine max
ctctgtcactttgcctacccactaagaaaaatcgatcctttcttatcttacttgcgcatcggttctcttcattcaattcaattttgttgttagtgaaataataatgaggggtagttgagcattcaaacaacccataccctcatttttatgtgtgggataccgtcggacaggtcggtgactccgggagctaaaccacttcttgtttgggatttgtagtagatttggcctaatatttgaattagaccgtgtagaattgcatctggcaataggttgttgagtagtacgcataacgcattgttttgtgttacaaatattcttaagcttttctggggaatttttttagtttgtgggatacaatacaatttgtagctttggttagtgattctccaagatgtcaaaatttgagggtgttattgtc

SEQ ID NO: 69456 - DNA, 205 bp, Glycine max
catcattgtattgtacagcacagccccaacttcttccttgtgttctgttctgttctgttcgagtctttcgctttctcttctctgtttccacgcgattctttcaattttcaatagggatttagtcacatgcttttgttacattctagattccttccttccttacttaaaaattcttatattatgcatcatttctcaccaaccacct

SEQ ID NO: 69457 - DNA, 187 bp, Glycine max
cccacgcgtccgcccacgcgtccgaaaagaggggacggtgaagccggggcgagttcacgaaggatggctagggtgcaggctcagcctgccaatgcacatggtctagtggagcaggcataggcataaggcggcagaagggagcaggacaattcagaagatcgaccaaaatgacgagagctcgacggac

SEQ ID NO: 69458 - DNA, 209 bp, Glycine max
aggagccaccgcttccaataaatgtagaccagatacatcgaacccgaatatgacacactaagggggatccaattaccgcagccaaagcctaccgaaaagatcagaagagcaaaagagaaacataaaaagagacacaaggaatgacagaacaccttactcaacctgcaccacgacccattacagcccaccaccagtaccagcagcacacc

SEQ ID NO: 69459 - DNA, 192 bp, Glycine max
cccacgcttccgtccaagcaccattacgccacctgccttacgcaatttacgggtccatctgtggtccaattcgagttcttcagcgacttcttcggatgaaacatccacttactgatgccagagatctcaagaagaagagcaattgaaatgactacgatcatattctgcataatgagcttatagcatagcatg

SEQ ID NO: 69460 - DNA, 182 bp, Glycine max
aacctttggagcttcgacgacctgccttccatggcaggagtcttctgaacaccttcatatgcgtctttatgtaaataaagctgcacgaattgtgatcgtgatgtaggtgatggaatccacaagaagaaaacccgacctggcaggagcagaagcaggggctctgtggcagagaactgctaatc

SEQ ID NO: 69461 - DNA, 113 bp, Glycine max
cccacgcgtccgggcaacggcatctaccaaggaaacaactgatagtgaatctcctaaagatggactctaaagcttctgcattgaaacttgcaattcttggaggtccatacagg

SEQ ID NO: 69462 - DNA, 259 bp, Glycine max
gaaactcatccagataaagactagacccaacaaacgacccgacatacaatactctaaatgaacctccgaacgatgcggccaaggctgtagtcacgggcctactgacaagccagcgtgagagtcatcctcaagagacatctagtagcaatgcttaaccccatgcttaaccattccttcaagcagaactgcattctgtacaggaacccttctcgaaccagtcctccaaccgcaatggccaacccctggtcctaacctggcc

SEQ ID NO: 69463 - DNA, 273 bp, Glycine max
gttacacggtcgtaacaagcgcaagcgacctggattaccacggtttgacaggaacacgatccttaacgtcatagtgttctctaagacaccagggtcccatgtgctcaacatcgttgaagttacacataccctaacccgataactctagcttctcatgggagtctaggtcgattcccttaatagagtcaatacttttcacatgaaagactcctactctacttctaagggcgccagtgcttacctgtgcatcgaatatcgcgaaactagtcttta

SEQ ID NO: 69464 - DNA, 453 bp, Glycine max
gattatcctaagtctttgggaatagtgctgcaatggcttcaagtcaggaggaggtgacccttttgggagctactggaagcccatttgtgtgcagggttcatattgccctcaagttgaagggagttcaatacaaatatgtcgaagaaaatttgaggaacaagagtgaactgcttctcaaatccaacccagttcacaagaaggttccagtgtttattcacaatgagaagcccatagcagagtctcttgtgattgttgaatacattgatgagacatggaagaacaaccccatcttgccttctgatccttaccaaagagccttggctcgtttctggtccaaattcattgatgataaggtttttggtgctgcatggaaatccgttttcacagctgatgagaaagagcgtgagaagaatgttgaggaagcaattgaggctctgcagtttcttgagaatg

SEQ ID NO: 69465 - DNA, 343 bp, Glycine max
gatatccctctctttctttctcatagttttcagttttctgcgaaatcgccgatgctagaatcggggcttcacgatttatccgatgacgccgattacgccgcgtcgcagcaacaaggatctgctagcgtgatgttgcggagtgacagtgccaaacagagttcccctcggaacggtgctgaaattgtattttcgaaggacaatgttgcaattcatccgactcaatttgcgtctgaaagaattagtggaagactgaaattgattaagcaaagctcgtccttgtttatggtaatcgctggggggtttttcaagttactttttggttgtcagcgtcttattgtttatg

SEQ ID NO: 69466 - DNA, 261 bp, Glycine max
gccacgcgtacgttaatatcagatgaatatgagcgtatcacttaaagagatgatgctgctctcgcgtacttatggaatgctatcacaatactggcatgcgttcatctatccacatatgcaattgaaaacttgatggaagagctatcactctatggagcatgctcacgactagctacgatgacagctatcactgggacatgactgcacacttgtctatgtacaatgcaatgcttattatcccagcgatagtgatattgggat

SEQ ID NO: 69467 - DNA, 320 bp, Glycine max
ctcaaactctctttcatgcgtccattagattactttcacaccatagtcgttcgcgtacgagagcttatatctctgtaagcgcagaacctcgtgctgcgtttggcggctaatgatgccagggaaaggaccgaaggggtagatcacaggctaaacctgcaccaacgacaaagacaaggacgagaagaaacccatctcgcgaggtgctgtgccagaccttagatcccagttggacgcctgcacctgctcttgaagttaacgacaaccgctaatggcatatctggggccacagctactgtctactttgctgctatctagagata

SEQ ID NO: 69468 - DNA, 348 bp, Glycine max
aaaagcttcaactgtgaagctatcttcgtatcgagcatggccaaatatgcatgacagtcggtttgcgctttacaagttgccattgcgggttcccaaagatgaccaagaatatgctggtttatggggaggaacttttggttggcctcctggaaagccttctgaagacaagcctggaaaggcttcatatttatatccgcattcttataacgctttactgtatcaacagcatctgagttcaacacaaattttgtaaggcactcactatgtgttacatgctaacggttcatcaatgattacagctaatatcaatgatcctttatacgaaccctttacctgggacactgatgc

SEQ ID NO: 69469 - DNA, 460 bp, Glycine max
cttgaacgtaacgtttgtcgagatgcaaaagaaagtcaggtattaatttgtttgacttgatttcgagcatgattggtcaattatagtaagaatcaaattgtcacggtttggtgtgtcatgtgtgtccttttaagtttaattgtctatctcagggcttaactctgaagtgccaaatccttattatatatatcctcattcctcaaacgctgtattttatcgatggaattagtgttaaatgctggttatatgaaaatatattacattggcgttagattctctgctttgttagagtttctgtaggaagacaagaatgatcttttataagttataactattactcttggttcatcaagtttgaactgtcttgttaattttcaattccaaattttctttacaggaaagctggaacacctagacctctttggaatgcatcatctcagcttctaatggctgtaggtta

SEQ ID NO: 69470 - DNA, 262 bp, Glycine max
gaacacatgggaaatgctagagtagggcctggtagttttggtatggttgaatgtcacgtccactgtgcaacaatgcgttcttgaatctggcggactgtgatgtaccagcaggatgtgcatcatccaggacatgtgtggtgccgaaacacctctctatactgataaccttctaaatactgctaaaacaacttctgccgaggcaacatctacttcagtgattgattaggcgcaacaaatgccttatagacatattatctgatat

SEQ ID NO: 69471 - DNA, 446 bp, Glycine max
  unsure (1)..(446): unsure at all n locations
aaaattctctctctctctgttccgtgttccgcacccatggccaagtcctcctccaccaccactccacaaaaacctttcctcaacttagacccactcttcttgaaaactccttcttacacttccctcaaagacgtgcttcctttctccgccgctgcttgcaactcccccgccgcgagccaccaccagtacgtgtccatccgcaaccgcctcgtgaagcaggccgcctgggcctacctccagcccatgtccatttcccccagcggcccatcaggcccacacttcttccgccacttctacaacagattctcctnccccacccacaataacaacccttttaccacatgtctcagctttatataccgaaccctacaccgaatactccacgctatcccttgcttccttcatgtattcgaagaatagcacaataacacgtttttttttttttc

SEQ ID NO: 69472 - DNA, 370 bp, Glycine max
actttctttgctggtaatcggactaattctctttatatctctcatccccctcctgttactcctccgcttactctgcaatccctattctgttatatcatctgctatttcaacctcctgatttttcttggttttgcctcaccaataatgattctaaactttgaaaattttttctcgaaagccattgtgttttcataatcgagatccagctttttttttgcttggttttaaaaaaatattattttctttcgttcaccctcgaaggttgttttttgatcccctcaaaaagctctcctttctttcttatctttccttggtattttaatgggttgctctattattatacctacttccaatacctttttttgttggt

SEQ ID NO: 69473 - DNA, 239 bp, Glycine max
tgacggtgctttcagtcgcgaacgatattgattaccatagtatatccagcacaagatagtgtgggtcatagccttcacttagtccccagggtcccaagagctccacatcgatgaagcttcatataccctaattcgatcacactagctactcatgggagtctacgccaatttccttaatagagtcaatacctttcacatgcaaggcttctactcgacttctaaggtcgccagtccttacc

SEQ ID NO: 69474 - DNA, 207 bp, Glycine max
atctcacgcaagaataaagcctgttgctgatacaaccaattgggagaccttagatcatccggcatgcggaagctcgtgcgaatcctcctattgagtttgctactacctacgcccatctttttctgttacccttctttactctaagatagtcttcctatgtctatacgtacatgctcctgtgtattcaactttgtcaatatgtcttgc

SEQ ID NO: 69475 - DNA, 332 bp, Glycine max
atggcgacgtccatctctctgtctaaccctatgacactcttggcatctattccctcatgggctcttctctctgacttcgcaataaaaattacccactgctaatcagacaaaaagtagagtggttataaggccattagatccttcagtttgcacacagctttcaccagaagaaactaacaccttccgttactggctaacactgtgtgcttggcgaccctatgctgattatcactgccacaatcacaaccaattgaagaagaagtttctgggttatggctcacgggtgccgtataggtatataatctgagctgggccccattgcatacgcaact

SEQ ID NO: 69476 - DNA, 204 bp, Glycine max
cgggacgacccacgcgaacgagaacgcgaaggaagaaacagcaagaaacgacggaaaagacaagacaaaagcgagaggagaggaagcagacagagaaagcagaggagcggccagagcagcagaagaagaggaagaagaggagcaagaagaagcagcgagaacggggacaagcaaccaagaaggaaaaagagaacggacagaagg

SEQ ID NO: 69477 - DNA, 96 bp, Glycine max
gatatggtcttgggtgttggacaagtattacaccttttttcggtggtttagcatctgatgcgtgaaaacttgagatttctctcaagttgtttcctt

SEQ ID NO: 69478 - DNA, 376 bp, Glycine max
tttctaaggttccaggatcagatctcgttccctcgccactcatcctcggccgcgcgtcgcgcgccacgcgccaccatcaaccgcacctcttgccgtaatggcatctgaagaagttctgaaggctgttttccctttcctggacggtgttgatcttgcttcttgtatggctgttgataagcagtggaaagacatagctagcgatgatttcctttggaaatgtctgtgtgccaagagatggccttcgatctgtaagcaacctaatccttctactttaacctactacaagttttacaaaacctttcataaactccagcaccgtataactcttctccctactagaattttttttgatgatttggagttcttcattgacatt

SEQ ID NO: 69479 - DNA, 274 bp, Glycine max
acgaaaaattgttgaatgataattaataaattccttcatatgtatagagataggagggaaaatgtacatggatatagctagtcatgctcgggctgctttaatggaagttctttcattgtctctttccctctcagtatggggaagaagtggcctatacaggattctcaaaagtgagttaatcggatctaagtacccatatttgtttatacttggctttttcaatttctataactttaactattgatttaaagtatttcatttatactaattaatt

SEQ ID NO: 69480 - DNA, 428 bp, Glycine max
tttattcgttcgttttatatggaaaaaaatattgtagcaagttcgtcgtacaaacaaaatgccactattttcggcacgccggtgctgaatatgcaatctgaggtgttttgtcttcttgtatttatacgtgatagttccaaaaagcctaacgcgagagattgattagcttttgaattattgctcgaattattttgaaggaatgatccaaactggttgaaatattcatcatcaacaacctcacgctgttatagatattcgctctctctatcttgctctatctctctctcacacacacacacacacagatcctgacatggacgaagaacaccgatgctaagctgccgaatgtcacagactctgatccaacaactgcgggttctttggtagccttggcaccatgaatctatgatccaaatgctgcagagaca

SEQ ID NO: 69481 - DNA, 391 bp, Glycine max
accacacgatcgattttattattgccgagcgttctcccgagtggcctcctttttcgctcatttctatggtcatggcgatcctgatggcaattgctctcggaatagacagcgccggatacagcatcccattacggatccgaaagcagcggcttgagtcggctctctagctggctatctcgctctctacggcgcgctcgacgacgatcacggcgaggatcaccgcggccacggccacggtcaccacggtcacgaccacggacccagagactgcccctgcgactaccattgcgatgaagctggtcatggaactctacggaagacccgatggcggcgctatagacgagcctgataagctacacaagtggctgaacaagttgatgatagagaccgt

SEQ ID NO: 69482 - DNA, 181 bp, Glycine max
gatagagtgtgaagactcctactaaccattactggctgcagcctatatataaagtaatgcgaggcattgcctatagcatacatgatatgtacagggtcaatggctcgacgtctataagaattacatggacaagacaatactcacgcgatgtaacaccatatatctaaacagcatctgtaat

SEQ ID NO: 69483 - DNA, 51 bp, Glycine max
gagagctgctgcttccgtctgctctcaaaaattagatctagagcatggttc

SEQ ID NO: 69484 - DNA, 416 bp, Glycine max
cccacgcgtccgcccacgcgtccgcttaacttcgtattgtgtcttgagatttttttccttgcacagttgggccctttgtcttccgtgatggccaggtgaagtcttttaaggaaaaggatgaagtggatgcgtggcttttcagcaaccctatgcggcgccttgaagcgcttcattttcggagagaaactacattgttataagctacgatcttcataccaattccaccagtcttcagcagcgatggaagtacgaggatcccacggatttgtttcatcttcctcttcagcttgctgccgatagggaaattgtcagataccttattggtggtgtgaaaatttttaaaattaactcgttatattctgccataattgaattgtatttgtgtttaagagtttggaattgggtgtttctgaggg

SEQ ID NO: 69485 - DNA, 164 bp, Glycine max
cccacgcgttcgaccacgcgttcgaaaaacttttgaaagatattatccaattgaaatttggaaaatgactgggataaacttaagaatttaattattgtaatttaatttgtaaactattaaattcgattggtcgtatggacttaataaatttgggtactatgttt

SEQ ID NO: 69486 - DNA, 57 bp, Glycine max
cttcaattgctgaaattatggatagtctcacttttatatacttcatcatcccttatc

SEQ ID NO: 69487 - DNA, 222 bp, Glycine max
tcgtccacgcttacgtaaaaatacagcctcaaagaatgagtagatgaacgacgttatgggtaactggggttgttgttgatacaggtcaatcttatctgtcacaatccattctggcgccctcaaaacaccctctaacttaacaaccaatatataaagaaaatgattaaaacttgatcactctttctcttgccagtatcagatcttttttagatatgattttaa

SEQ ID NO: 69488 - DNA, 274 bp, Glycine max
cccacgcgtccgtcaattctgaacaaagagattctagcgccaatcatggaccacgctacaatggagcattgacactccataggctcaatccaaaccacttgcacactgccagcaggtttgaatcagtacaggcactcatactaggacgtagccattcaagcacagctgacaaggaccctaacaagacatagagaccttctagccctttctacatttacatggccgcaattatatagcatatctggcaagagcatcctaacaacaaattcctccc

SEQ ID NO: 69489 - DNA, 252 bp, Glycine max
gtcaagcgcaaggcgatccacattttatagtttcacaggtgaattaccatgccttctatccggtgcatctcccaccatgatggcgccatcacttccaacctcagtactactaatgccttcccttcacttgccgtatctgcctcaaactcggccacaccgcttttctgcacgctaataacagttgcgtgcaacactctgacctctcaaataatcgttccctctaatggcttctaatgcacaagccgattctta

SEQ ID NO: 69490 - DNA, 152 bp, Glycine max
catttacatcgaaagacacaggatactatcattgaacagcttcaattcctattcctgatagcttgcggggctcacgattgatgtcttgttcattactgtctcactttttcatctaaaccagacattgacttatatggtatctttcccaaatt

SEQ ID NO: 69491 - DNA, 218 bp, Glycine max
cctaaacgtccgaacttatggctgtaacctattcacgtacagactcgcaaaggcattcaaggcgaaaaaaagattcggggaggcgaaaataatcgaaaatccattgatacccgatataggtcaaaacatactaactgcatgctgaatccattaggctctcaatgatacaactctgttgaacttgaatacatcttaatagccatattgataataataaa

SEQ ID NO: 69492 - DNA, 147 bp, Glycine max
accacgcttccgataatttctaaactgtttgtcacacttacatgaaataacttaattacaggccctaccaagtctttaatcctttctttacatgtctcaatgcctactgtcaacctatgccaaatatctgcacattctccccctaac

SEQ ID NO: 69493 - DNA, 160 bp, Glycine max
aaattttccggaaaaaatttgaatctatttttatatgcgaatcaatcctactacttctgggccttaatattgggcatgttcaaaataataatattataattaaaataaaataatatatttatataatttaaaaaaattatttaaaataatataaaatata

SEQ ID NO: 69494 - DNA, 203 bp, Glycine max
acgacatctcgtgaacacactcatacaaccacccaacacgacatactcccataatccaacatgggcgacatcacattctagggcacatacacacgtctaccaaactagcttccaactatttcttcaaaactcaccttcctacatgtatcagacacacaaaccatacactttctacccgacgccaccttctgtatcatcccttc

SEQ ID NO: 69495 - DNA, 310 bp, Glycine max
cttgattggagagaaaataaaagagaaagagagagaaaaattgtcttcttgaaacaaaagttcaaaattttcctttctttcattttctctttaattcaactttcaaatttttatcttttctcttattttctttccaccttaacaaatggatcctttattacttccttcaattttcttttaccataccaaaccttccaattaggtcctttcattcctattttaattggccttaggaaactgctttttgtaaaagaggaaaaaggggaatttggaatttgagatttgaaaacttaccccttgaagaaattaa

SEQ ID NO: 69496 - DNA, 155 bp, Glycine max
cgcgctcccatctattccaattccatgactacaccaccgacttcttcctaatcttcacactggcaatcctccgggtgccaccctccctcctcctcctacttccccgattcctttcacctttatcaacccgcaaccactcactacgctttgcccta

SEQ ID NO: 69497 - DNA, 246 bp, Glycine max
gacaagcgcgagcgcatgcgtgcgcacacgcgtgcacactaggagagccagttctgattcgcgatagtagcggagtgcaagcgcagtcatgtgtgtcatgtcaggcctgctaacacacatgtagacgtgtacaagctagggctttaatcaccattcacttaagctaaattgaatgcatattcaacgatgtatcctgatcgaggtaatgcagtatctcgcacattacctaatactggataacctcta

SEQ ID NO: 69498 - DNA, 136 bp, Glycine max
ctcacgcgtccgcatattacatgacacacacttctcttcatccttgtcactaaggccagagggacaagacaattgcgttcacacaaactacgcgtacttattgacaaagatgcactacgttacatgccacacggtc

SEQ ID NO: 69499 - DNA, 273 bp, Glycine max
taattccctgatcggccgactcgtacgaaaaggataaccttcttttctctctatgtggttgttattcttatttcatacctaaaaaccatgagcaccttttctgctttgtagaattacattatcgtatcaagaaaactctttaactacacgaaaatggtgtctgctaacaaagttattgtcgtgtactgcttctacacccttcttgctcactacaacatcacagattctcctttcactgccttctatcatgctcaacatttattgtttgttaca

SEQ ID NO: 69500 - DNA, 210 bp, Glycine max
ataaaacgttccacgtccttttagctaccattcctaacaaactgctaaataaattcacatggggctcttaccatccaaccttaacataattaatatcataataatgtcaaatgcgctagctcttattcccccaactgaacccaactactaccgctagctctcaactacaactatcccaacacacatacaccataacagaggctttacttt

SEQ ID NO: 69501 - DNA, 140 bp, Glycine max
attactcttgaggccgagtgcactcacgcaatagaccttataaacacagcaatccaataggggattggtatgtctgctcaccaccaaacggtgataataggaagattacacatttaaagaaggacatactcgttacatac

SEQ ID NO: 69502 - DNA, 352 bp, Glycine max
tctacacttgcttatcatatcttaaaaactgtctacttattatataacattgtagaaccgtggctagatcttatagatgcacattcaattgtaaaaccacactatttaatactgatatatcaaactatctatcataaagtcctcatatgttaccttcttaagccgataactaaatatgattatgattataattataaatgagtaatattccttgaacattaagaccattcttttcacttctaccttaatgaattagattaaccagactatttatatattgaatgagacaattacatattgtaattatttgtgatcgacttataatagaatttaatgttgaagctaaatttta

SEQ ID NO: 69503 - DNA, 360 bp, Glycine max
cccacgcgtacggatgatctcataatcactatccctaatgatagtatcgttaaaccacaagttcaatatattatacacatcacatctatctctctatcttctatctcttatctatcttcgagcgactgcacaaccatgacaatctccttaaagaccgcaacatacctagaacttaacacgctgactacaccatgatctgtgacctaattatgccttgctcgacaagacactacttatcacttctcctgcgattctcaaattaaccatactgtctctgtaggaccgttacaagtacatcttgtaaccattgctgaccgactcaagatggaattgaaggtggaagctatcgatagtgctacc

SEQ ID NO: 69504 - DNA, 254 bp, Glycine max
aagtcaatatacctgtattgcgagttctggaaatcaagattcatactggataactattgcatgctggttacgctataaattaaaggagatgctatctagatttaccaaagatttgtgtcaagcttacttcttctctaggagtatagatgttactaataatcacgttgaaagttaagaccccttttatgaccaaattcgcttgtctaattcattttatactgttggaacttaaaaatatgtatttgcatcataat

SEQ ID NO: 69505 - DNA, 137 bp, Glycine max
tcctttctctcttgcaaatttcatatcgcgctgactttctcatccaagcatctctccctttttcatttccaatttccccttctcttaactcacctatttctcctccttcctttcccttttctcttcaaattaatact

SEQ ID NO: 69506 - DNA, 413 bp, Glycine max
gtaactaaagaatgatgtgttacacctctggtgcaaaaccttggttgacctcccttttttcaagactggacatattcatacttagaggcaaggctcaggctgagaaggttaagaaggctaaagctaagaaaatccatgcggagaaagataaggggaagcaaatagaaaatccccaagatgacttggtacctcttccttctcctgttactaccgatgtcactatccgagaagacctatgccttttagtggtggtccttctaagaggcaacggttggaaccggtaccggtggatattcctttcgtcatagatggccatactgcttttagtaatagatggccattctacttttttgttaacaaaggaatgggtttcttctctttggaagaaagatttcaacccctaggctctcatt

SEQ ID NO: 69507 - DNA, 370 bp, Glycine max
cccacgcgtacgcacggatacacactacgttctatcaaagccagtgctaggatcaatgaggggaatcaacgaatctacctgagggacttgcatattggatgatctaggcaattatgcgtctagacagaaaactgtaccgcagaacaaagcattgcaccagttcccaaagctggtctggtaagtggaaacctaccttatgctaagacctgcacatgagaatactgatatactcagaaatatgcctctacctcgcaattgcttatgcagtttactcttgctgagaaggatattgattaccacaaagtctcccataatggatctgatataaaaactggagatgctcaaaagggcgctcaaccagttgttccca

SEQ ID NO: 69508 - DNA, 115 bp, Glycine max
cgcatacgatcgtgctccacatacaccactttttcatgtatccttaattaattcgaatgagggaccctacttacggattcttcttgttattactacgcttctatcaaatatattg

SEQ ID NO: 69509 - DNA, 165 bp, Glycine max
acgcccacgcgtccgcagggatacactctatgatctgtctgaacctatgttcaaatttattaaggtggggatcgtatatacctgcgcgacatgcattttggattatttaggcttctatgaagctcgtccgataactattttgtagaacaaagctaagcatcaatt

SEQ ID NO: 69510 - DNA, 313 bp, Glycine max
gaattcccgttcgaccccgcgtaccttacgaaacgcaatgtccactctacttcactccgctcccacttcttctccttccttctcgggtatcatcactactaagggcgggacctctccaatcactcacatctctctcctaaacggcatccgtaacactgctatcgaaacaattaacttgcacaatggaataccaatcactagctatttcatattcatcgtatacacaaacgcaattcctagttacctttatactccaaacacgcatattcacagatttgtataacctaaactacacctctccttctaatattta

SEQ ID NO: 69511 - DNA, 200 bp, Glycine max
acgtcaactctcttgctactctcttacacttctttcacgatttttccaactacctcccggggagggttattactaaagggggtgacataatgcacacatttaatacataaactcagcacattattcccaactgtcatctaaagcctttccaatcacactgtcatacccctcatgattgattaacccctccacaaacatac

SEQ ID NO: 69512 - DNA, 180 bp, Glycine max
acgatgatactaatggctccctcttccacctgcattacttgccttttacttaccaccctgttgggtgcttttcaaagtaggggaagatactgcccaatcttaatccatgaaatccatacatactaacccactgacaaagaaacacatcttactaacatagacataccattaatgaacata

SEQ ID NO: 69513 - DNA, 344 bp, Glycine max
acgattacttaacacatcttgattctcatcctcttttatcggcttaattctttgcacaaggggacgttcattacaaacggcagcaggtactatttgccattccacccatattctgagttctttcctttatccatctctttctacattctctctactcctcacccataaaatttcctctcaaaaggttactatcctcatattgatcattttttactcactactcacttgattctctctaattattatcacatctagattacatatttatcatgatttatgaatctattctttcttttatatctattgtacttttatctttgattcattattattaatgatatttc

SEQ ID NO: 69514 - DNA, 356 bp, Glycine max
ggattctgatcctgctgcacatacaccacaatcccatgcaacctagggtgctaagaatcagggacaccacatcctgatgcttctacttctgcgagctcttgctccagttgccgtgtcgctgaatccattcgaactttatgggagtcatgatactatgacaagtcgtactcaaatctccatatacaatgccacatgctgaccgatctgtccagaaagacgctgacctatatacatctcatgctacatcgtgatcaatattcacacgtacctatcggcatctatgattatcaccataccatattcagccgattgatctcggagttgatcactgctgatattaacatgactagtgaaat

SEQ ID NO: 69515 - DNA, 456 bp, Glycine max
gtacaactattctcgtgtgtgttcagtttgaacggtttaggcgaattgttcaccattctagggatctagtcttactaggtctcaaggagagaaagatcatgagcactttgtttgtcgaggaggtacaatgttttggttttcttcatcatcttttttccaagtttttctctgttgtctaaactgaaattatgggttgatgaacttcatgcataacaaatacaagcagcgggtttgtattcgtggaagtcgacctgaggaagaggagatatttcaacttacaatggttcatgtttgatcataatttcttctactacttcatagttcatatcatagtcatacttgtcatgccatttaatatgtgtttgtttgtgtcagattatttgcaaaaaattatgccttttttatttgtttggaaaataattaacaattatatgttgttatcgcaaaatgtgaact

SEQ ID NO: 69516 - DNA, 309 bp, Glycine max
acggcacatcaagtcacatggttgcaatgttcatacattcatctgttgccacatatactgcggcgatgcctcctcaagagcgagaattcaatagtgcaatcagacacacatggctttcaaaagagacccaaaatgtctttataaaaggcataccattattcaccgaatttgcaacctgttaaaacccaatccatttcaatgcccttgaacgaccaattagagatttccatgaggttttaaaaccgttaaaccatgaccatgacaaatttaaggcaaacatcaaaactgttgttcttaaaaaggggattc

SEQ ID NO: 69517 - DNA, 387 bp, Glycine max
ctgctcattttggcagtgttctcatcggggggcgtatgtctccctactctttactggctaattaagaactccatctctcttctcaccatcaacaacaaactctcttgcccttcctgcctctgttactgccctacccctctctctctcttccaactttcttccttgctttcgaatctctctctctcacattgttcaattaatgacctctatctaaatgatgatatttacaatcattttgtcgaccttctttactatgatttctagtttcaatagtcttttactgaatcaaacactcttcacattaacataactttttctgaaacccaaatattcgcattttattaccatcaaaactctttttaaatccttacttcaaccttaacattc

SEQ ID NO: 69518 - DNA, 123 bp, Glycine max
gactcgacctgttcatcgatttccgttcacgctcagctccaacgctcctctctaatcttgcactatgctagtgatcctccattactaggacacactcatatacctatcatacaacactttgat

SEQ ID NO: 69519 - DNA, 61 bp, Glycine max
acgacctgtacaatcaccttcttccatgttctactccaacatacaattctaatatctaata

SEQ ID NO: 69520 - DNA, 361 bp, Glycine max
ctcactcatcctttcaagttcactttcgacgctggcgaacaattatgcaaccgcacacactgataccatacccttactaagttcattcacctcgacccttatcacactcctataactcgccatcctaaactatcacacctattcctaaaactacttcaacaaaacctactttccaaacataactttgatcgattaatccatcctaaccattctatctttcttaaacctgatctattctaccttatatcaccttctgatcgcaatcatacccgatttcgctcatcttattaccacacatacacctcaaacatacctaagttctcttaccatctatctgaagcatattccattagattctatt

SEQ ID NO: 69521 - DNA, 128 bp, Glycine max
gttaatattccatccagaatggaacactatcattgtaccttcacagaccccatatcatccgtgggggcacaaaattgcttggggactggtaactatgctgaattaaaagcacaatcattcactgatct

SEQ ID NO: 69522 - DNA, 409 bp, Glycine max
acgcacgaagtagaaacacgaaactcataatccatggcgacaccagcgactacgaatcgaatacgagtgtttgtgaacgtgggtcagttaataccttccaccaatgactacacactgaccatgaatgtattcaggttccattcgatcaaatccctcagtaccctctgatctagaccgatggttctattcgaaccctcattctgctttactacatggagtactgtagcaggctcacttttatcgctcttcaatgcctccactaattacctactgtccttctctcattcatcctctatatccatctccacaactacaattttatcaacctcatcgttttcacattctatgtactttctactgtattactatgattacaggcgcctattgcactgatgcatcttattaatgc

SEQ ID NO: 69523 - DNA, 68 bp, Glycine max
gggcgtgacgcccacgcgtctcgggttatttgatgattgctatatacgctattctcgaggtctatcat

SEQ ID NO: 69524 - DNA, 118 bp, Glycine max
cccacacttgaagctcgaatataatactggttcacaatatcgctatctgcgtctcgtctgggatacactactcacgcaggtacattattgaacacactcacttactcattcactccat

SEQ ID NO: 69525 - DNA, 364 bp, Glycine max
acgatcatctatcctatcctgacaccgaccatgtacaatagactctctatcgctatccaacgggggaaacaaagataaacgcgtgtctgatcacaaatgtacatcaaaaaggcttctactgctagatatcatacattctgacattaccgacactgctggcaagattctctaatatgttgacataacttgtgcacctccacttgccacgatacttgataatgataatgatctcttgatatgtcttcacactgactagcactcatgctcccaattttaccttgactgtctatggagtagccataatgtcaaaatgaagcttctcaatgtacacgtaacttgcactatcgccacgatttatatgact

SEQ ID NO: 69526 - DNA, 462 bp, Glycine max
gacaactctaaccctagtattggtcccactcttgctgcctaccatacagtccctaatccacgcatgtcatccactgcgtggctgcataacagcagtcagatggctgcacccatgatcagaagtggatccacaccagccatgactgcaccccatcatcatactcacgagtatcatgacgtctctaacttgggctcacgtgccgacactctcgccgccgaccgttctacatcgacttctattgataacaattctacatcaagcagccattgctaatcataatcaccaccatggagcaatgaagcccatgctaatcttgttcatggatactctgcttgctctgttaccaatgatgatatgacttctcactgtggtccacacgacgatattggctcctatttctaggatgcatcgactgataactcatacacactacatgccaacgattactcacaatgacatggc

SEQ ID NO: 69527 - DNA, 288 bp, Glycine max
aactatcctgattactctcacccattgctgcctcattcaccatcaacaactttctctcttacttcgtacgcacaaaaccacgggcagcacccttatcatcgcatttcatccccaccacttttcatatccagaaacccttcttctcacatcccctaattgcccaatacaaccctccttcttcaccctcttgctcttcttcttctgagttgtcctttgttatatgcccattcatggcgtactccaacacgctcttcttccagtctccgtacaacttgcatgttgtttttt

SEQ ID NO: 69528 - DNA, 308 bp, Glycine max
ctcacgcgtccgaccacgcgtccgcccacgcgtccgaccacgcgtccgcccacgcgtccgggggcgacgtcatcgtcgacggaggagtgttagaattcgaagcccgtcgtggaaccggtggtgccgataaatggttgcggtgatcgaatcaatgtcaatgtcaataatgtccaatgaagttgctgttggtgttccgatatcgcttaactaccccaacattatttatagattaatatttataaatttacattatttatcttttataacagtcaatcattatagaagacgtttagctttaattgaattat

SEQ ID NO: 69529 - DNA, 301 bp, Glycine max
ctcacgcgtacgacctcgcgtccgcccacgcgtccgcccatgcgtacgtccactcgggcgggggctacttcgtcggcgtctgctgagcgcttgaattcgaagcccgtcgtggaaccggtggtgccgataaatggttgcgtgagatcgaatcaatgtctgtggcaataaatccaatgtagttgctgttggtgtaccaatattcaataactaccatcaacattatttatagattaatatcttaaaattcacattatttatctttcataactgttaatcattattgaagaatttcaattataat

SEQ ID NO: 69530 - DNA, 119 bp, Glycine max
acgcccacacatatgctttaacatccattcggattttattcttccttagtcttattaacaatagtattatttataaaggttgttacactctatccgttatttacacacttcaatcctta

SEQ ID NO: 69531 - DNA, 326 bp, Glycine max
cattatgcttacgaactgcactttaagagtggctactttgattctgtcattatatacagatcgagtctggtatcagagggctgcactttaggcgatcgtgatcgcgcgtgtgcttgagcctgatgataccgttgtcttccttgtgtctactatgaactcattcctcatcactactgatgactagatgacaccccagattcatattggatgaaaacttacactgtgattcacatatgcaatgttgacaaactaacttacgtagctgataagagtaacctactatagtataaccaatgtggactacctcttagtatcggctgaatgaa

SEQ ID NO: 69532 - DNA, 346 bp, Glycine max
acgcccacgcgtccgcccacgcgttcgcccacgcgttcggttcagaaacgcttcacagacaagtataattatgattatgtgaaggacatgcctttggagggacaatacgagtgggttaaattgaagtcataaaagtgaaagtaccaaccttgaaagaagaagaagaagaagaccgtttattaaaaaatcatgccacttgctgacattatttttacgttaatcaattgactttaggtacttcattttatactttgacttttcgtgttttcacggtaagactacgttttggtgaacactttaatcttaatttttctggatctgatggataaattcccttttgtaaaaa

SEQ ID NO: 69533 - DNA, 316 bp, Glycine max
tccacgcgtacgtcagattgcaacccaaatttaaaacgaagaagacgatgaagaatatcgtgtcggggactataacaaattcaattcccacaatcaaacatctatactatttgcatcccctgttctctttctatggaaccgacctatcctcggctcctattatcataaaacctattaaacactctaccaatctctctgtcaccaactccgacactttcagcaatagaatcattttatacaccatttaaataatcatttcacccttctaatttcagatctcactcattttcaacctcacttctcaatccaactttct

SEQ ID NO: 69534 - DNA, 432 bp, Glycine max
caatctgcttacgaactggactgctatgagtggatactttgattctgtattctctagatatgtagacaggtatccagtcgctgcactttaggcgctcgagatcgagcgtgtgcttgggcctggtggaatcggtgccgttattgtgtccacgagtgactcaatgccaaataatactgattagagctagtaccccagtttcatcttggctgaaaacttgcactgtgatgcatgtgagccatgttaacaacttaactctggttgcatataagaagaacactcgaagaatatcagcatttggaggagccttgcctatcgtatgaatgtcgctctgtgacatggaacaagcgtgcgattccaaagctggagcctattgtgaaggaaagacctgcgggatttgacaaatacgtggcttatttaccaatgcttgttgat

SEQ ID NO: 69535 - DNA, 353 bp, Glycine max
ttacctctccaataaatggatgggactcatagctaaggagacattgcttgagaattgcaggcgcagattccaatgctagggccatgaatacatgcgtgaaggtcaaatattacaggtaagtcttaagatctatatggatttacagtataaagcaatgctgactatattaatgtgttgaatgaaatctgagtttaggtgatgcaacagtgtcctgtctattgtacttatgaggctaccatatgcactaattgctactagcgaccctctgttcatgaacggattgcattcaaatcctgcctcaagctacagcgcattgctatgccaattctgctgctaagatgattagctatacg

SEQ ID NO: 69536 - DNA, 121 bp, Glycine max
acgctttgtgtcacctgagcttaacatctaaccataacctcccacctttcaccatttctttatgggagggaaatattatctggagcacactcacacacactcacacgtttaactaacattt

SEQ ID NO: 69537 - DNA, 228 bp, Glycine max
caaatattatctatcaacatcacttcgaattcacagaacccacttatatttacagcatgtttcaaaacgatggctcaattaccttataacttgttatacactacttttccctaaacaaagtaaatattactgtattattcatctactacaactaaccaaatcattattaactcactatcccttcttcactatttacaaatattaattaatctttattacctacattct

SEQ ID NO: 69538 - DNA, 131 bp, Glycine max
attctactctcatgctaatcataacaatagaatagaatgtcactagcatattagctgaacagataacagtgcgggtacctttcgaagctgtctgagcacgctgagcggtactgaagagatggttgagttca

SEQ ID NO: 69539 - DNA, 308 bp, Glycine max
ctctctctctctctatctttctctttctctaacctttcaactctcggatacatctcgattgggtatctcttctgggtgctctctctattctaatgctgtgagctactttgagtgaaggataataatgactggctttatcttctcgaggggaatgatacaccatcatacaaacgttgcttactctctactctaatgtcttcccaaaacggatctcattaaatctgtattcctcaccgattcttgaatcccagtgctatgctcgaaacctttcttaatattctctataaaccgcttccatctgatccaat

SEQ ID NO: 69540 - DNA, 450 bp, Glycine max
ttacctcaccaagaaatgcatgggactcaaatcaaaagagatatcgctttagaatcgcaagggcagattccaattctagaggccgtgtatcacatgcgagatgggcaaatattacagttaagttccaagatctatatggatatacagtggaagtcaatgcgtactatattaatgtgttgaatgaaatcagggtataggttaggcaacagtgacttgtctattgaacttttgaagctagcattggcgctaattactacttgcaaccctctgctcatgaactgatctccctcaaatcctgcatcaagctatcaacgcttgctaatgccatcacttctgaatacactgattaccacgaggaatcccgactgatactcgttccaagattggattctcattatcagtatctgccaagaataaacttaccgttactgatcactattacaatgattt

SEQ ID NO: 69541 - DNA, 419 bp, Glycine max
cacagaggaaggtataagttttagccctttagattgtttctcttttatcaactgagctggtgtcttttgctcaagtcttggtcttgttttgattttcagagatgaagtttacattgatggccctcacaaattttctagagaaagacatcaagatatctcccctagaaaaactagaatgaattttgttcgaggtagaggaagacttaacaatcgattagattcagttcgaaatgattgggaatctgaccgtgaattttctggtgagttttataacggaccaagtcagtttcggggacccaggcctaaatatgcatctgcttttgccgatactgatatggagtacaataacgttgcacctgatgggtcatatgttggtaatggtcgattacgcagaaagccattgaatgatgggtcttaca

SEQ ID NO: 69542 - DNA, 322 bp, Glycine max
ctctcgtctccttctgagtccaaactctgctttcttccccacttcaatccctgtgtcctcagggtcgaccggaatactctctcgactacctctctctcctacgtcaaagcccgctactacggctgtcgctgcggacctagccgctcgcccaacgactcccgcttccgcaagtcctacgattccgacgacgacgataaagcttttcgacactcaccagatctcaggtcagataccgggaggctgatcgatcatagccagaacttggtcggagtagtgtcaacagatgacgccatacaaatagctgaatatgtctaacttgact

SEQ ID NO: 69543 - DNA, 253 bp, Glycine max
tcgccacgcgtccgcggacgcgtttggagagcttcgacaccatcgacaacgtcaaggctaagatccaggacaaggagggtattcccccagaccagcagaagctgatcttcgccggcaagcagctcgaggacggacgtacccttgctgactacaacatccagaaagagtcaactcttcacttggtgttgcgtcttcgtggtggtatgcagatcttcgtcaagacccttacgggtaagactattacccttgatgt

SEQ ID NO: 69544 - DNA, 374 bp, Glycine max
atactctttgtctgcatgctatttatcaagttcaatattgtatcatattcaatataggatgatttgagaggttattacaactagtgcaacatgaccaacccaatctaatattatttaaactgagacacttaattcaagtttaatcgatcactaccattctacttcattagtataaaatattgtaactgttaaaagtgtcaaatattaatcgttgttgttttgaccccaagaacaccaccaacaccaaaaacaccaccattttccaaaaacttcaccttcaccttcacctacacaatcttcaaaggcaaacccaccaaccgtatcgccgtcgttaccgataccgtcaccatcttgtcattcaaaatccctatctt

SEQ ID NO: 69545 - DNA, 381 bp, Glycine max
aatcatcacacctgtctaaagctcatacttacacatacttcatttcttttcataccactgaattttttgggggatatgctatataaagaactcatttatcgttatcatactcattttaatttcatttaatttcacttattgttctcaattgcaactatttctcccttctttccccaaaaatttataataaagattgaaaataagtaaagcaaaatggcatttcattggctgacttattgtatgctttaaaatcatgttgaaaaatactttttaagctaatgtactttataaaaagatcacaattcttgttttgactattatccattgtatctgtattgaaacatatgacttaataatttcaacttaccaaacatacactta

SEQ ID NO: 69546 - DNA, 431 bp, Glycine max
ggagaaataaattcactaaaagaccaaggaataattagttctaggcattcacgtccatatcttaggagaatccagatcacacaatggcttttcaagtaaactaagatgcatgtcaaatatcatcacaatattcatcatctttaaaaaaatgaggagaggcagaaagtggagacacattatacactatatgctgctgttctcagatttatactgatatctataaagtgttttgtatactcgtgctgcgcatatcgcgtgtcctgctgatttacacatcacgtgttgtggtgacacagtttttatatgagatgtaactctttttgccccaaaaaaaaaaatataaattaaatttatattttattttaatttaaatatttatttattttatttatttatataaatttatattaaaaataaataaaaggggggcc

SEQ ID NO: 69547 - DNA, 173 bp, Glycine max
cttcttcctctctcttctacctttctctctccctcatcctaaccctcaccttcgccgcgcgcgagaaaccccacccctcaccggccaagccaccagccaagcccgccgtgaccaccgtcacctcgccggcaattcaacaagcctgcgccgcgacgcgctttccgcagcaatgc

SEQ ID NO: 69548 - DNA, 264 bp, Glycine max
ctcacgcgtcctgtccgtccttttttttcttttttagttgttaatgatctaagtttcccgtttgattttatattatttaaaaacaagcctttcaaatcatccttgcaatgcatattgatacaaaccagaatttactaaatattctgctgatgctacattcattcaaactctgatattaatgaaaatatcatttatcctaaatacaaatatgctattttaaatctatattactgttataatttttaaccaaataacttttaccta

SEQ ID NO: 69549 - DNA, 261 bp, Glycine max
cgggacgacccacgcgaccaggagaggagagcacaaagaaaagcaaacacagacacagcaagagagagcagggaggagaggggaaagggagaaagagagacaccggaggcacaggaaaccaaggacacggaagagcaagagaccaacgagaacaaggacacgcagagaagaccacaacaagagcagacccaggacgcaagagagacgagagcaaacacacaaaccaacccggcgcaacagaaaagcagaaaagccacaacg

SEQ ID NO: 69550 - DNA, 159 bp, Glycine max
gtcgaccacgcgtacgagtcctaaccctatgaacaccttattagctcgggtagacccaatagttatggggtataagggcaatttcgggataggatctatgatccaatcactctgagcctgagcagtatctgaactccatcttttattgacacccttatc

SEQ ID NO: 69551 - DNA, 225 bp, Glycine max
cacacgcgtgcgatgatagtgaagctccacaaagactggtgcaagaaacaggctaataattcggctacgacagcgactgttgctggccaagaatctggtacaacaagatgatatctgaaacgatgacctctctggacaatgcttctttcgacggaaagcccaaggtgcaccatcacatccttgatcatgaaggaggaggggatcctatgaacagtgtctgcagtt

SEQ ID NO: 69552 - DNA, 340 bp, Glycine max
actcggtccttaattcccgtgtctggtccactccttacaatccactcgtttctgcaatgctgatcttagcaaatctaatgattatcacatactgcataaagttggtgatattcactccaagggcattatttctcttgtcttaaattcaattcttacattctttcaacaatttaatatgtttcacctactttaatatttttattatatatatattatcttttatattcttttttcaatttatattttatttttatttatttctatattattaatctttttcttatttattttttatttattatttatcatacttttatcttttttttttctatttattttt

SEQ ID NO: 69553 - DNA, 408 bp, Glycine max
cccacgcgtccgcccacgcgtccggcctcagttggcaatgcttcacgattagtgtttgatagatctggggaaatctatgtagagacgactggtgggactagaaatagaatcctacctcaagttgataatactcttgataccgaggtgaattactacagagcgacccttgatttcagtggagttttcacgctgtatgctcatccaaggaacaccagtggccaaccaaggtggagaatcatgaactatgttcctgacaacatttgcgatgcaatattcatgattatggtagcggttcctgtggctataatagttattgctccatggaaaatgataggcctacttgcaactgcccttatggctattcactggttgatccaggtaatgaatctgggggatgccaacccaatt

SEQ ID NO: 69554 - DNA, 438 bp, Glycine max
  unsure (1)..(438): unsure at all n locations
gcagttgtttcatagctcccttacatttcctactccagtgtatcgtgtgattaaggaacaactggatgaagtacttgcaagcttcangaatttgaaaggtcttgaatgcaacctggacaggacatttaatggttctcaccgagtgaagataacagcgaacgccacaaggacagtggcagaagttagaagacctctggaagaactattgagagggaaaaccattgagcatgacagcctcacccctgcagttctccaactcatgttgtccagagatggctttagtcttaaaaactcattgcatcaagagactggaacttatattctttttgacaggcacaacttgaatttacgggtgcttggcttcccaaacatggttgcttctgctcatgagaaagtgatacagttcctactttctctgcatgaataatagctgttaga

SEQ ID NO: 69555 - DNA, 419 bp, Glycine max
  unsure (1)..(419): unsure at all n locations
aaccacacttctcttcttccattgtctcacgttatcagcatcaacacagtgtcacatccataagcggtgagcttctccctctctctctcaatcatccttttctttgcatcatgttcacattccatcaaaagggtctcacaaagttgtgattntttacccaccccgttcttgaactgaatcttataagcttgccatttgaccctgaaaccaaagaaaaataagattttgtgaaatacgagcttgtcccttccctgatctcttttttctctcaactagttttcaatgcagcaattctggatctgagaaccctttctggatctggttggaatagaagtgaaaattgtgttgcattgttaaattttttttgggtgaatgattggagttcaattttatttggattggtaatagctgatgtgact

SEQ ID NO: 69556 - DNA, 107 bp, Glycine max
caaagttaactttgtaagtgctactactactgagccactaaactctgcatctggcataaagtcctttctgggtacaaatgtacgcagttcatatccgatgaaatgat

SEQ ID NO: 69557 - DNA, 351 bp, Glycine max
  unsure (1)..(351): unsure at all n locations
tttcttattaactacaggttttattgcaagattaagccctttgttcaactcaacttctggacattcaatagcttcagatagttcaagtttaaaatttgaatccattgtactaccctcattcaagctaaatgtatcagaatcagttgtgataatttcagaactgttgtcatcaatgctaccattcgagacaaaagtggatgactcaaaattatcacagccagaaagatcaggtgatttcctgacatttctattcctttgtgcacatacactctgagctgcantggttgatgggttaccagcactctttccactatcattacaagggcacacacagttttgagcccgtgatga

SEQ ID NO: 69558 - DNA, 80 bp, Glycine max
taacacgcctacgcccactcatcagagccactttaaccctactccaccaccacacctctactcggtaaaactgccccttt

SEQ ID NO: 69559 - DNA, 239 bp, Glycine max
aaaaagcttgcatcttcaaggtttcaattttactgcaactggcaatgactctgctgagccttgttcaaactgctacgtgttaaatactttggtccttagattttgttctttgcataatgatgcaagggttctctgcatatctaattctaccctttccattttgacaatattagaaggacaaacttatcaaattgtgctttctactccaaatcttaagtcttttactatcaggggttcta

SEQ ID NO: 69560 - DNA, 266 bp, Glycine max
cttatgctaccgagaggggggtgatggagtattttgctacttcacttgtctgctcatagatgcgtaatgaagcctcctgctaatggcttatacatatgacgcattatagcacacgtttgcatctactatcattactgacattacctgtgaagattaatatttaaactggagaagtctagaattttttatttttttgatatataagcctatttttgtacttcatttgaaaggtcatagtttgaaccctctttttctggagatttacc

SEQ ID NO: 69561 - DNA, 423 bp, Glycine max
  unsure (1)..(423): unsure at all n locations
acgcgttcncggacgcgtggggttttagaaacttaaagggaaaactttactgcctatggtggttttatctgacttaagcaatgaagattttttatcccagtttctctttcattatttttaacactatctcctgtggaaaagaaagtgttaaattcctgcttatcatgtataaatatctctaaatgttcttcttatccttggaaaaaatgtgatttgggtgggctatcggattgggggatattttggggttttgggcttaatcctaaatcccctttcttcttttcattactattaatggatggtctatattaccttctgattagcttggacccctttttagtgatggcaattttattaatattatgaacctttcctgggaatttactctctaatttctttcacaacatttttaaggaccacttt

SEQ ID NO: 69562 - DNA, 119 bp, Glycine max
cgacgatgtacgctcagacctcatattctactttctcttaaacgcctccatcttggtcaaacggtggttacctttatttataatatttaacgtaaaatctagatcatcttaagcttttt

SEQ ID NO: 69563 - DNA, 52 bp, Glycine max
  unsure (1)..(52): unsure at all n locations
cccacgcgtccgcccacgcgtncgctctctcacgagaagaatactactaact

SEQ ID NO: 69564 - DNA, 164 bp, Glycine max
  unsure (1)..(164): unsure at all n locations
gccccgcgctcctcacctcgttactctncgattacgattgcaacctcctcagggggatgtgaagcttttgggtattgtgggaagcccatttgtgtgcagggtccagattgcccttaagttgaagggagttgaatacaaatttttggaagaaaattttgggcaac

SEQ ID NO: 69565 - DNA, 56 bp, Glycine max
ctatacttgttccttttgaaggttagaagtgctacaatacaaacaatggcatttat

SEQ ID NO: 69566 - DNA, 424 bp, Glycine max
  unsure (1)..(424): unsure at all n locations
cccacgcgtncggattcgttacaaacgtaaggaatttgatatgaaatactatgttgaatgtgggattgaagtgactgccacaagtactgcaacatgctttctcataatagcacctctggttgtgctatggtgttggaagctactaaagtgggtgtggatcagtgcaagggggaaaaactcttggaaatagaggtcttgagtggctcaccgaactctttaacgaaattatgagggcaaaacccatgccgaaggaatggttggaaaacaacgtttggccaattttttaaaccaagggggtttttcaaaattgggcaaattttaggggaattaactccttgggccaatccttggatcaacaaattcggtacgtgcgtgcatttctttcccatactgcttagatttggactcttatctgcaaatttct

SEQ ID NO: 69567 - DNA, 308 bp, Glycine max
ctctctctaaagtcaccccattatttaccttttaaatcaagtctacacctatggcattcacaacaaatactacaaactttttttacaccatacacctttttttctttttttgaaggtcttaatatctcaaaacctctggttcggattttccaccatgaaccaataactacaacctgggacttgtcgttggtgtttgtgtttgtgtttgtctggttacatggcgtaccataaccaccacaaccttttacaacaagaccttcctccactcaaccatttcccgaaccaatccatgttaccagaccaacaac

SEQ ID NO: 69568 - DNA, 392 bp, Glycine max
acggacgcgtccgaccacgcgtacgtgaaaaaaacgcgatggaagagagaaacttgagcagcgtgtgcaacaagagagaaaaaaatggtggtagtagaaaggttgataataataataataacaaaaatatggcacaggtgaataggaaccggaaccccagtttttcacctgacggtttaaagacaccaagcattggtttcccttgacgaaacttttcaaaaatgtttgaatgccaaatggctttggcttaaaaccaacaaggggccaaaatattggccaaaccccattaattttcccaatggcaacattcccaaattggaagattccaaaacccgtgaactttaaactttggcttttgaatttaatctatttgaaactttgggttcattgga

SEQ ID NO: 69569 - DNA, 404 bp, Glycine max
cccacgcgtccggaaacttaatcgatcatcacttcacttcactaatacatcatggcagacgagacccagaacaagtatgagagctctgaggttgaggtccaggatcgtggtgtttttgactttctcggtaagaaaaaggatgaagaagacaagcctcatcctcaggaggaggtcatcgccaccgagtttcaaaaagtcactgtctcagaccaaggagagaacaagcacagcctcttagaaaagcttcaccgatctgacagcagctctagctcttcaagtgaggaggaaggagaagatggagagaaaaggaagaagaagaagaaggaaaagaaagggctgaaagagaagatcgaggagaaaatagagggtgatcatcatcatcacaaggttgaggacccaagtgt

SEQ ID NO: 69570 - DNA, 282 bp, Glycine max
cacgcagtgagccaacccgtccgaacatgatggggagctggatacacgttacctgacctttgcgaggggtgaggtagcatcaacagaacttgctatacccgttatgtcggaagacccatcaagaaagcagagcataaagaataacgccatacagactaatacagaaggcatcaccttggagaacacaccttggatgacagaggaatcaagatgactccaaaatctgggagaacctggtggctcataccatacgcagcatagagacactgaaatataaggcat

SEQ ID NO: 69571 - DNA, 341 bp, Glycine max
gatggatatctgcagaattcggcttaagcagtgttaacaacgcattttacgcggttgctcacgcccctaccaactgcactcttggcatcactttcaacccagacaatcctatgaaaagcgttctactgctataatcttatctaacttttcaacttacacttgatttactttaaccaacactttcacttgacattattctctccaccttcgccgatgaccatactttccttgacctcactctgatcactggacatacactctctatcaacatcaccattgaacacaccattgttgatatcaccacagatagctatctgactaccaacaatacccgtcttaac

SEQ ID NO: 69572 - DNA, 408 bp, Glycine max
acacaagccaagtgaaagtgagaaaaaataaaaatcaaagagcatagtgtcagggagcattcacaagattggggagacccttcatgtgggagggcacaagaaggaggaggagcataagggtgagcaccatgctggagaatacaaaggggagcaccatggtgaacacagtagtgagtacaaaggagagcatcatggtgaacacaaagctggagagtaccatggtgagcacaagccagagcacaaataggggttcctagacaaagtcaaggacaagatccatggtgagggctgcgccgccgatggcgagaagaagaagacggagaacaagaagaaggagcatggccatgagcatggccatgacagcagcagcagcagtgacagtgattaaactgctgcattaactatata

SEQ ID NO: 69573 - DNA, 272 bp, Glycine max
cacgcgtgcggcaaccgtgcgagctgccggacacattttaattaaatccagcgctccagcacttcaggcgctcacggcctgacagatacatcgtccgctccgctacttatggatgctgcaaagcttctaaatgagaagttccagttcgaattcctgatatctgcctgctgacactgttctcaactgctctattcattaagagacagcttttattctcttgcgcgacgaagaagactcactgctggactacttcgtggatagtatattatccc

SEQ ID NO: 69574 - DNA, 346 bp, Glycine max
tcgacacacgcgtccagccaaccatgcgcacaatcgtacacacatgcgttcaaattcctagaacttgcacctcaggcacttacggtgtgacatttaaacagtgagttgagctgatctgaattggcaccaaagaaaaaaatacagttttcaatcctaaaccactaacaacttcttgctttcacacttctctgttgccgtgataatctggttgcagaagtttgactcatgcttaataaacttcactaaccactcaacttatatttgccgactaaaatatcccttatataactactaattctcatatgtgagaaaaactgaaccctctaatatcaccatattttacttc

SEQ ID NO: 69575 - DNA, 381 bp, Glycine max
gtaactatgtgttgaattggaaacattattgttaaaaacagagaaattgttgtccaggagataacggtatgacagctagattgagagttttgcggggaaaaaattgcaaaaaataaataaatgaaaaattcagtttttaagttctaaaataaaaaaactttgactcttcttcgctgctgggataatttggtttcagttctctttcttctgcgttattaacctcaataatttctcaacttctgtgtcccttgcttattttccccctcatattaattagttctcattgtaaagaggaactgaaactccttcaatctctttgttttacttttttctcggacaccatgattttcgatcaaaggtcaatgcaatctaagtccaacc

SEQ ID NO: 69576 - DNA, 307 bp, Glycine max
ctgatattctgcattttctcgcttacttttcttcagcattcaacaaacttcttcaccctatctatgttgcaatcctttttttccattccctactattccctatcatctctctttgtgttctcatctttttccttttcccaaggcacatgtcaacacatgaaatggatcccgatgtcgttcgctggggtcttcatctcctacatgtctgcacactttctcaccatggttcccctaatattgtaactcaatatgatcctgatttaagtcaacttgaatatgttaccgaaggcttttgccagcatgagta

SEQ ID NO: 69577 - DNA, 242 bp, Glycine max
atggatatctgcagaattcggcttaagcagtggtaacaacgcattttacgcggggatataacaaagtaacaacctgtctacatctctgcaacaaaagcttaccagcttaccttctagaaccttccataacaccgattaaaccgttcgttaatcaccgcaatggctgccgttaagcgtatctcctcattcatcgctgatcaagttatagtgattgcagtcagacgtggatttgcgagtgctgc

SEQ ID NO: 69578 - DNA, 195 bp, Glycine max
gatggatatcttcagaattcggcttaagcagtggtaacaacgcagagtactttttttttttttttttttttttttggttgataatgataccatttataaatatatatatatataactaactcaacacattacccccatttatagtggcaatgattcaaacattaaccaaacccgaaccccatccttaaccccaaa

SEQ ID NO: 69579 - DNA, 221 bp, Glycine max
gatggatatctgcagaattcggcttaagcagtggtaacaactcatattactctgcgaccaacaaccttaactagaaagcatcctaggaaagctatcgtttcccacaactttaatcactacagttctaaaatggcaaggaccgtaatgatggttttatgtgcggcgttcgcttgcattgtgaatgtttcaccctattcaaaagctatcactttgtgtcaaat

SEQ ID NO: 69580 - DNA, 148 bp, Glycine max
tcgctcctcaacccacgcgtcgcgctcacacatccggagaaaagttagggttcacatcgatttctcttccttcttcttgcggagtttcatcaatgcatcaatcatccattcattattcatcatgtcgatcacgacacaaaatcacttc

SEQ ID NO: 69581 - DNA, 110 bp, Glycine max
ttgcatttccagcttttaacgttaaattgagtgcgccgaaacttgaaatgggttaaacggtgtgcctcagcttcgcatcattgaaattttgattgagacaataattagtt

SEQ ID NO: 69582 - DNA, 335 bp, Glycine max
gtcacaatgtccagaatatgaaacacttaaattgagagcgcctaaagttgaaagcgggagacaacggtgttacagcatgctggacatcattgtgatgaagattgtgacaataattaatacaataataactatactataaagcttatattaaaatagctttaaatcatcctcattccagaaataattttgcttcaaacaattataaacatctgtattaacgatactaatacactaacttctgtgaccataacatcatatgcttcacatcatgaccaacgagaatcgctgatataaacggagctttgccgaatatggtttatgatggttacttcatt

SEQ ID NO: 69583 - DNA, 304 bp, Glycine max
atggatatctgcagaattcggcttaagcagtgttaacaactcatattacttgttttttttttttttttttttttgttgaaatttaacatatgtataaatatttaaccatacattcacacaatttaaaattctcacacatttaaaaacacaaatatttttttcaaccattttattaataatttatttacaactattcttacaactattattttaattattactacaacacttttctattgattaagtactccaataattattttaaaaattttttttttaaaatttttaaaacactatttttttt

SEQ ID NO: 69584 - DNA, 335 bp, Glycine max
atggatatctgcagaattcggcttaagcagtgataacaacgcattgtacgcggggatcaccaaaagcaccaccatgtcttcttcgcaaagcaaatcctacgactaggtgtcacgcgcccgaaacaacatcaaacccctcattaaaaagccccaactccattcgcacggcctgtttcttcgcttctccctcccttaaccaattcctccaatatgcaatcctcgccaacggcttcattattaacctaatccaaaacctctgtgccaagttcctgcctaaagaacccttttttttaacaaacacaccgttcaacatcttgttggcccttaacccttac

SEQ ID NO: 69585 - DNA, 262 bp, Glycine max
cccactaggatccatgaacgcctcgaccaacatcctagctcaacaattctgaagagatgctgacacgtatgctaagacattgtcatacaggacattagatgtaaacatttgatatgaatgtagcatcaggaacatacatctgctataccagatgcaccactggcacttaattcctatgctacagagcactacatatgttaacatctctgaaacctacatgcgaatggactcaaggaatagctgagcttactactaccttttg

SEQ ID NO: 69586 - DNA, 395 bp, Glycine max
gatggatatctgcagaattcggcttaagcagtggtaacaacgcattttacgcggggaccttcataccggaaataaggattcttcggcagtcactaactatgttctatatttctttacctggatctcaattacattgttggacgtatgatgttttaagcatcgatggtgtacccactaagtctctaatgcctcagtggtaccctaactattatagaataatgtaatccccacccccattctctgaatctttcctcgctttttgctcgactcatattgcgttaagaacatgaactactttatgttttgatatcagttccatattccactgtaattacatgacacgacttatttctcccatcaaagcaaccccttcttattcattaacatactttacc

SEQ ID NO: 69587 - DNA, 317 bp, Glycine max
gcgaaaaagctaacaagaaattcaaggccctcacggcgaataacgcggaccaaaaccaggacctactgagagacataaacatcgggaacaacaatccaaccaacactgatccaccacaccagaacataatcaaaaccacggaatacccaaaataacacgtgaacataaaagacacacacaacatcactaacgtacacctactcaacaagatggacacacacgccgtcatttcactacaccagaacactctatacaatcacacgtattccaaccacatcttaaaaaacgccggattcaccgagtactagaacaacccc

SEQ ID NO: 69588 - DNA, 360 bp, Glycine max
gatggatagctgcagaatgcggcttaagcagtggtaacaacgcattttacgcggtgacaccgacaaagatgtcttgggtaaccgcgacagcagcactagacacgcatactgcgtttcacactaaggacacggtcgaatcagcggagttgtcctcatccgacgataatgcctccttgtcagctggatcggatgatgaatcggaacgattgagtggaacggaggacacaggaaagaagcagactcgtcagggccgtgattggcgaccaaagagcacactgcacctcaagatcgcgcgtggcgaaaaattatctgcggtcgagcgactggcttcgcgtaccttgttaccagaggagtactaca

SEQ ID NO: 69589 - DNA, 370 bp, Glycine max
tcccctcctcaacccacgcgtcgagcccacccgtccgcacctccttcgaagtctcaactgttttcccctccgcatgaaaccgaaatccaaagcaccatcacactttcgctatcaactcaatggaaaatgcttcgccctctatcaacatctcctctctaaactttcacttttaccattgaaccatacatcgatgcacacaagaaggttgtccacgttaacctctgaatcttcaagaccaaaatcggaaaataatctctgtaactagttattgatattgaaaaacaagttcccgaatgctaccagggctaaatagggttgaacacatgacagtgagacgaacctaatttttgcgtacaaaaccctgtcataa

SEQ ID NO: 69590 - DNA, 333 bp, Glycine max
acgaagatactccagacctgcatgaggaactctatacacacagacaagggggagctatgggatcaaaagaggaagaagacagagaataatccataagcaatcacatctatatgtagagcacatcatacaggagggctatcaaactcgcagatctaatataatcaggctctcgaggatactgcatacatttcatgcatatggcagcaacggctaggtatcatgctacaaaacgattacactgattgctactgtacatgttccatcaacagggatggcatcacaggataaactagtgactaaaccaagttcatcagacgatcttttgaccactat

SEQ ID NO: 69591 - DNA, 281 bp, Glycine max
gccagccttccgaatttactccactctattcacgggcatacaaattatctaaggaaggttatctacggcttcagctcacaccggctattaactcactccaatatgattggaatatgaagctcatcttttccttataactgtcactaaataccataggccattactcttattccaagggactcttattaattgtttcatgatccttttacaggtaaaagatatgaaagtaaagtcagaaaaatgttaaaggtatagcctatcacatatcggtctgctacact

SEQ ID NO: 69592 - DNA, 318 bp, Glycine max
acgaccacgcgttcaaacagcacgcagggatcatcatgaaccaccgcctgtctataaagtgagaggagactatagcgccctcatgcataaacatgggacactgcaaccaattgctaacaaaccaactgttataatggccacaactgacaagctagccgactagaacttggcatagatcccaccgtttagaatataatcaatgcgttataacgtgcacatgattactctatacccctatattcgaaaccttattacaccataccacaacttctttaatacaatgtacacacacgcataaaactattacagatatagtca

SEQ ID NO: 69593 - DNA, 374 bp, Glycine max
ttttccactcatttcaactcatttatatttaatccattttttctatcttatctattactcaatatcctacccactttcctttctttatcataattaaactatccaatcaaaaccaatccaataaataaacaaatccattcaataatcaaaaaattaaacatatttattctaaccctctatattaaactataccatttttcaaaaccatatctatcaaccactcatccatctctcctaaagacaatattatttaattcctccaaatataacataaccatattattatatacctccactatcatatatctcttattctattttaaatctatctatccccatatattaatatatatattatccaaacatcccttatt

SEQ ID NO: 69594 - DNA, 245 bp, Glycine max
aatgctctggaaataaaatgcttattcactttaatgatcagggtttacatcagtaaaacttgttattcaaacacctgttactagcataccattaccataagcaccaactcctagcatttaatgtccactcacaaaatgaattatgagaattgacgcaaggcttatgcaatttttgttgcaaatattatcatgaatgctacagtgtaactgatagaacgtgctatcaagaaattttggcctattaa

SEQ ID NO: 69595 - DNA, 301 bp, Glycine max
tggatatctgcagaattcggcttaagcagtggtaacaacgcattttacttggttttttttttttttttttttttgttcaaccggtgaattataagatgttcttcaatcacaacttcatcaatcaatcaatcaatcaataaatcaatctcaaacaagatgatttatgatttatggtctaattcaacaattttttgatgataatccctaatctcaaattttttcaatcatcacaaacatcaaattaatcattatccaattcaaatccttacaatttttcccgctttaaccaccggatttttcc

SEQ ID NO: 69596 - DNA, 385 bp, Glycine max
gaacaagcagaacaaacaattctaattccatgtctaggaaatgagcctctacctaatcctgagtggaagaatagcatgtttggtttcacatctcatctcagatatagtttttcacatttattgagaagctagtagttataactttagccttttatatcctaaacgtgatttcttacttctcaactggtttctaaacaggcatgtatgtaaggaattttggatcctcaaagaaaattgaatgccaccatccaaaagaataagattattcattaggggtacttaatcataatcaggagaaggaagaatacatactcggagcatgtggagacttttcttgaaattttggaccaaaagggggtgacagttcctgttctggtgttggttt

SEQ ID NO: 69597 - DNA, 279 bp, Glycine max
gtctaatcactctagctgatgcaaatttctactatttttcaatggcttctgcataggtcaaattgggatactttcatgctgggcttgatatgttcaccggcatactattccctacataaagcctttacaatctactgctacatctatcaatctatagctatcaactaccgtgatactgtaaagttcagaggattccgatctgttacctttggctcatatcaatccatgaatgatactatctgcggaatgaacaaccaatacctttactgattcaacatc

SEQ ID NO: 69598 - DNA, 272 bp, Glycine max
tcttcctatcactcgtccaaatctcatgatgtctacataatcatatcaatcatgctattctgctgttctctatgactatgcatttccatccatagatccctaaatctacatttaaaaaggaaaccccaaatctaatgactaaactatcaatcaatcatattaataatccatcaatcaattatcgaataccatactcaaagacctcaatactatcacacacatctataaccgatacttcatcaaccatatctactaccgttcttttctgaatc

SEQ ID NO: 69599 - DNA, 278 bp, Glycine max
atggatatctgcagaattcggcttaagcagcggtaacaactcattttactatttttatttttttcttaaattatgtttaactggacattcatgatgttagtcatattatatacttttcaaatccttcttacttatacaattcaacaccaattaaaaatccaattatacccttcacttgttatttttaaaacaaccaaaaaaattaatgttaccaataaaaatataatttaccaagtcaattggagcttttacaaagaacaaacattaaaatgaattac

SEQ ID NO: 69600 - DNA, 188 bp, Glycine max
tcgaacacacgtatacttctctctgctacttacttcaaatgcccttgtgtctcactggggctttcttaacctcaaaatttttaagaatctctaacccatcctgaacaatcaattccttctttcactcaattgccgacttaatttcttaaattttgcggaattagggtacactttaggaaaattccaaa

SEQ ID NO: 69601 - DNA, 436 bp, Glycine max
agtgcgagggatatctgcagaattgggcttaagcagtggtaacaacgcattttacgcggggattattcaaactaataaatgcacacaattgtcttttcaacaaaggagtgattttgatcttgattacaagccctaataacacaagttggttgaatcaattcatttgtgttgtttagttagttgtgtttgctgtaccgtaaagcagcgtcgtgcatgcaactctttctttcattcattctctctttaatcttattcaatctttatctttaagcatgcactttatcccttcatcttaaatcaatcttcaacttcaaacaccaaacatcaattcagcgttttcgtaacgcgaattggcagcaaacatcactcggattaagtagtagtatacggcttatgaacgacaagcattctgtgaattgttccacctagaggacac

SEQ ID NO: 69602 - DNA, 293 bp, Glycine max
ctcgctcctacagtgcatcacaggggcacgcccgaagctaaaagcgcattccgcgtgcattaaagaacctgcggtcactctaaactctgaagcattgaatactaactagataggctcaatatcgcctcatctgcggtacatcgtcaccggtatccacatccgtaacaaaaaatctagctgcactcacaatccccaaacatcttacagtctaacactatgacttcctataccttggacattacagagcatcatcctcatgttcaaacactagcccggtctctaccatgtgctgc

SEQ ID NO: 69603 - DNA, 241 bp, Glycine max
atatctgcagaattcggcttaagcagtggtaacaacgcagtttacgctgtggtgaatgatctacattcactgacagctcagatcaaacttcatctcttgatttcgatatgggtttcatccaatttccaaattccattaacttctaacaccaatcgttcccaacttatcaagattttacacttcttcctatcttcgctattttcttcctcactgttcgttttttcctctacaggttcatttt

SEQ ID NO: 69604 - DNA, 282 bp, Glycine max
atgcagcgtcaccggtgcgcgactccacgcgtccgggacactttaacagcattctctctctctcgagtctcttcactccgacattgctcgccttcacaccccgcaacacaacggacacattctgagactatttatagttatccccattctggttatgttctttctttcttactccctctcaatcaaaccgtgttagggttagaactaagattagggtttctttactttacccgcgttatgtaatgcgtcgaaaacccgcaattctacccttctttcaacaac

SEQ ID NO: 69605 - DNA, 259 bp, Glycine max
  unsure (1)..(259): unsure at all n locations
ttcccggggtcgacgccacgtcgtctcgtcccacgcccgtctcgtaattttgactggggctatttaatagcatataattgcttagcaaggggcttctannattttaaagggtgttggggttgaaggggtgttggctttaagtgtgcagaatttgcagatagcataggggttttgaaatacatctgcaananngttgtcctagngnnagcatttctttaactttgaatannacataattatgannaatttttttctttca

SEQ ID NO: 69606 - DNA, 142 bp, Glycine max
cttccggaaatattggttaaaccggttgaaatttggtcaaggaccctgccaaatgaaaccgagggaaaatctaaggttgccctttttcaggattaaatggaaaagccattggtccttgccttggcaattggccaaaaccggt

SEQ ID NO: 69607 - DNA, 254 bp, Glycine max
  unsure (1)..(254): unsure at all n locations
attcttacttagctcacactctgcactctcttttcaattctgcttccaacacactttactgcacattctccattttcgttctcacttaattggcgcgttaaacccttcttcattgctgcaacttcacgcgccagatctgcaaaaccattaagctatgcttcagcaccactacgcatagcttattccaaaaatgtgcaattccaatcctaacaaccgtaaccgacacgctccgtcgccgncggagcccaagccca

SEQ ID NO: 69608 - DNA, 63 bp, Glycine max
tcggagccactttatgaaattacaccatgaatatggcggatgcaaattcctaatttctaagaa

SEQ ID NO: 69609 - DNA, 147 bp, Glycine max
tcgcccacgcgttcgaaaaatatctcctaatgaaaggcggctttcttatgctcaaaaaagggtttcacatgttcctgatatcttttatcgaaagggccttacttaccgagatatttttgcactatcttgaggaccttcacttgggag

SEQ ID NO: 69610 - DNA, 171 bp, Glycine max
gacacgcgtacggagattccaaacctcttggattggctgcaactagccttatcctaagggagacaaaggagtacctgaacaatgtaagccgcataatgatcactcattgctcgcgcaggataaagagtaggacagtcctatgaccgctaaggcgaaggccaagaagcacac

SEQ ID NO: 69611 - DNA, 362 bp, Glycine max
gcgctcgaaaattcctacagagagagcgagaaggatgctgaagagagagcaaggcaagtacggctccgggggacctccttggtccttccgttgacgttcacaactcctttgccgatcagaacaataaaagaattgtcttggctcttcaaagtggtctgaagagtgagctgacctgggcgctgaatattcttacgctgctctccttgaaagaaaaggatgacatgcgcatggacgcaactcccattgcaaaaattcccggtttgcttgatgcgctccttgaagttatagatgataggcgtgatatagcactcccaaaggaattagccaagacaacgagggtgaggacgttaggtgcaagttct

SEQ ID NO: 69612 - DNA, 111 bp, Glycine max
tcgtccacgcgtccgaaaataagacattgtttggtttgggtacttgctcgaatttccctcgatcgcttaaagtgtatttgattaggtaaaccgaacgcggaaatctctttc

SEQ ID NO: 69613 - DNA, 427 bp, Glycine max
attacatgttttgatgtacataggtttattttaccgcttttataggtccatgataggattaacacatgacatgatctgaacttgtcttgatccggactaactctcatgtaagatcattatatctgatgcacttacggctgatgtcaatgttactttattaccatgtctaaacgaatcagctattgaaaaattagtagcttcttggtgcgctattgattttgtttgtgtagagataaatgcgattatttggtcgatattgttttgtggtttatgaatgatatgatggacgtaggaggatatttgatgagaacgcagggtcatacgcctgatggtggagataaatggtactagtatagctgcttactaaaatgtaattattggtgctagataatacacgagactagatctctttccatgctcccttttg

SEQ ID NO: 69614 - DNA, 245 bp, Glycine max
  unsure (1)..(245): unsure at all n locations
ttagatcctgtggctgaaaaacttcgccaacaaagattaatcgaagaagcagattataagggcactaaagaatngttcagtgggggaaaagaaaaagatgaaaagaaccttgacactttcatacccaaatctgagagtgatttcttggagtatgcacagctcatctcacacaagctccgagcttttgagaaaagttatcattatattggcttgctgaaggcagtaatgagactatcaacgatatc

SEQ ID NO: 69615 - DNA, 163 bp, Glycine max
taagatcatccggatttacgacactggttgactctagtacgacgagcaccagcatatggttcacgaagcggtgtattaccaagccgaagctgaggagcacatgtcgacggtcgacctgaagaacgctttggagaaccatatgtacaacattatgaacaccatt

SEQ ID NO: 69616 - DNA, 367 bp, Glycine max
gcggacacacgtgctgccacgcttccgggtgaaaggaaagccatttccaatccaatacgcgcaggataggaccctgttggggatacacgcgtacaggttcataccgatcaacttggctcatgggtagtcatgagaactaaattgccatatatgatgcctttaaatgggacgcattcggcagtgggtttcctcaagatgttctgtcttgtccccatatcatatgcagcttatttcctgcacagtcaggtaatatatgctacatcttgtgatgccaacattggtgtttttgatgctgatagcttgaggctcagatgtcgcattgcttcatcaatatgcttgtcaccggcagctttaagtggaagtcaag

SEQ ID NO: 69617 - DNA, 304 bp, Glycine max
agtaatcattctgtggcaatatagttgatattttggagacaagattcatttcaacttgccttaattgtcaccattggattcacaggttctacatctgcaccaatgagcatgtcatggatcagtttgcctccaataggtcgatgctttgggaaaaattttccctggattttggtaatcgagattgtaacttatgggcttaatccatgcactatgttttaatctgaataatgattggctgacacctatggcaaatctataccttgagagagagacttagaagagagataatttgatgagtgacatg

SEQ ID NO: 69618 - DNA, 137 bp, Glycine max
tcggcttcatagaagtgctttaatgatcacttcaccttcctttgaagttaaaggctccttacttccttcgtgcttagctatttctatgaagctttcagtttcactggaaaatagtgaatacttaacaaggtgatata

SEQ ID NO: 69619 - DNA, 413 bp, Glycine max
  unsure (1)..(413): unsure at all n locations
gaaaaagctttgaaagatgctggcttgggaagtagacaagtcacaccttttatgaggttacgggtagttggattaacttataaaactagacaagacaaacctaaagaaggcatagtagcaatctggaatccaactgagacacagcgtcaggagttggtggaaggaggagcatatgccatttcaggactcatgccatcaagttctgattctgatatccttcacttggatactagaggatcttctaccaagtggttgccattatcttataattcaaggaaacagtttaagccatttttctgcaatagaaaatcgatcccattgactagcttgggtgacatncctctttccaacgagtttgacattactgcataatgtgtgcatgttggaaggggttatatatcaaatcaacaaag

SEQ ID NO: 69620 - DNA, 329 bp, Glycine max
gcgtaagcagtgctaacaacgcagagtactttgcatctgtttatgatttattttactgggctgtgaatcaaacatgcttgatgccatacttgttaagattctattagtatccaggatacaagtcgacttctacaagctgacttataagatgagagagcagagctctgtctaatcgaaggaaatgaggttatcgcagatacataacattaaattgactagattacccaattttccatgaggtagaagcggtggttagaactgcacttgtaaagatgtaatctacagaagagtggactaatccaaccattcatgcaggtacaatgaaaagt

SEQ ID NO: 69621 - DNA, 133 bp, Glycine max
  unsure (1)..(133): unsure at all n locations
cgaaaacattggttaacacgaggatgtgatacgcggatcangctaaatacacattcatagccaacatgcgaagactcatgagagagatcacatggctgaatacgaacaaggttcttacaggcacgtaagctat

SEQ ID NO: 69622 - DNA, 355 bp, Glycine max
ctcaccttacctcttattccaaatcttaattcaaatggcatcggaaactgagacgtggggctttcatgctctatatcaaccagctcctcagtctaatcatcaacaacttgtacagcaacatggacatctttcttagtgagctcatcatcaatgcatctgatgcttagtacaagacccgatttgagagttttacatactaaatcatgcttgatgctcatccagagtcgttcattcccattttttctgactagaccagctccacattgtctatcattgacaggagcattgccatgactaatgcctaatggatgaatatcactaggtactattgcaaggactggtaccaaggaattta

SEQ ID NO: 69623 - DNA, 207 bp, Glycine max
atgaaacttattagttcacctcaaccagaatgacctacttatataattatgattcccaggtcactaggtgataggtacttagagtgataatttgagtggacaccactcgaatttctgactgactgactttctaaaaatgccgttcttatattaccattcatacacgatccatcccattgaatcgatttttcataacccgaatgcttt

SEQ ID NO: 69624 - DNA, 229 bp, Glycine max
accacgcgtccgcaataacttcgatgctaaccacttagcatggccactaccattcgaagcctgataggcactaatgggctcatgtgccaagtcatcaccatacggacatgcgtcgtgcacggactcattctaatcatggccggctcctccgccacctacatgttacgcctctactccggagacctctgattcgacccggcctacgaccaaaccgcctcaaacctcctta

SEQ ID NO: 69625 - DNA, 328 bp, Glycine max
accacgcgtgcgctagatttgaagatcttggcattgcctcactcttgcttgcgccaagatctgtcctggtccgctccccgcctttttctttttttagatcttggtcttatccatgatgtcgtataacttcaaatttgaaagctttacctttctgagattgcttcttttttgcttctatccccttccccttttggagtatgaaaattttcctgcaaaattactgagctacgatcactgagtgagagacaagacttataacgatgatgaattatttcccggacgaggtaatatagcacatatttgactatgtggtgtcacacagtgatcg

SEQ ID NO: 69626 - DNA, 236 bp, Glycine max
aataaacgtaccatactgtccaagatgagaaagaataactgatcgagtgctgattcagcggcatatgaggagaattgggacctatcatgataagttggcataacaccctctgatgaataaacttgataagtccaaaataaaggccatttttctgaaactagctttaacggaccaaacggatggacctgttgttttttagccagaattcttttaaccagaatcaggatccatatctg

SEQ ID NO: 69627 - DNA, 142 bp, Glycine max
  unsure (1)..(142): unsure at all n locations
attcgntcctcaaactacttaagaaacactcagtttagcaagtgaatagaagtagtgggggaagcaggggaaaaaattttagtttggaccaaattccagaaaattacccatattatggagacaaatgctaaaattctgattt

SEQ ID NO: 69628 - DNA, 333 bp, Glycine max
  unsure (1)..(333): unsure at all n locations
cccacgcgtccgctcctctgaaacccactgagggtgttgttggcggtgtctgttagtgttcattggggttcacttttcaattgggggattttcttctggaatctgaaattgcatcaatttgggaattttttttgcaaaatgatttcttctgggattaacttggtgatgactgtgattgggtttgcggtgagcaccatgttcattgttttcgtctgcaccaggctcatatgtgcacgaattcacatgaatactgcgaggagatcttttcctattgcatccagatccaatctcagcatgatggagcggngttgccatggtcttgaacgtgtgact

SEQ ID NO: 69629 - DNA, 447 bp, Glycine max
aagcgtacgatgaagacattgctcgagatctgcctctagtgcatggaccggggtctagccagggtataacatagaggaaaccactctttagagcccagatgtaggagaagagtagaaatccttacgatgggtaatgcctatgttcctgaattgactttctgagagaacgcttgttcaacattctcaacggatgcaaagattgagaagaaaagaaagattgtgcagtatatggagaggctcgataggactcttgcctcgcctgatcttgcaaatgatgagatgctcaaaaagcttgtccgaagtcaactcccaccttctttagaacctgaaggttaaggatttagagcataattattagaaaccaagactgcggaggtgtctcactttcttggtatgttgaaggagtgcttcttcagatgatagccgaagatcttatacattacacac

SEQ ID NO: 69630 - DNA, 448 bp, Glycine max
tcattgctagagatctgtctttactgcttcttatgagctcttcctagaggatcaacattgaaaaacactacctcttcagagccacgatataggctaagagtacaaatcgcttccaatgcgtcacgcctcatgtcctgaattgactttactgcgataaaggttgctcaacattctcaacgcatgcaaagattgagaagaaaagaaagatcgtgcagtataaggagaggctcgataagactcttgcctcacctgatcttgcaaatgatgagatgctcaaaaagcttgtccgaagtcaactcccaccttctttagaacctgaagtagaacgatttagagatcaattagtagaaaccaagactgcggaggtgtctcactctcttgatatgctgaggagtgcttcttcagatgatagcggaagatcttatacatgacacactgattggaaatt

SEQ ID NO: 69631 - DNA, 237 bp, Glycine max
aaaaaaaattgtgaaccttaaaatcattagaaccttttgtcagtgaagcctcaagggagtatggtaaaaaaattgacatactttactaagaaaaaaaggggtggccctttttaggggcctaaactttcacatccgtcctggcaacgcattactttttatatggggtaccctaaattaatttaaagggccgatattttaaaatttcccaactggaaaaaccctggggatacccaattt

SEQ ID NO: 69632 - DNA, 371 bp, Glycine max
ctacccatcgtcccactcgtgccattggattgtgctactagtgatgatgctataatcctcatcctaacattctcctgcttgatgggtataccagactctgcgctgggactgcctctttcacccgggactaccaacgttcatgtcagcacaccttgctgcacatgagcatctgcgccaatggtgtattccacgtgtatatctgtatatatcaatgccccgtattagcaacaacactgcctatctaatcactgaactgatgaacattgtcttgcaccatagctcttggtctcagaattagtgtactgacttccactcgttcaacctatcaagttctcttgacgtcactggcaacaatttctatccttcaacaa

SEQ ID NO: 69633 - DNA, 331 bp, Glycine max
gcgggttgggacctagataggcttcaatgtcaatgtctgcgactactatgatcactggacatgagttccttaaacgactttacattaaaaatcaacaggttttgacttgatgaaggatctaatttaataacaccacaaaacagagaaaggtgaaggggttttctcctttcttttggataaatcatgtccttacattctttccaattgtacctttactttttctggctactttgacttttcctgaatgggattactgcttgatcaatgcaaagctattgtaacttgtaagtcaccttatgtgtatatttagaaaataaataaaaattcattc

SEQ ID NO: 69634 - DNA, 133 bp, Glycine max
ttatgactacaaaccaattaagaagccaccagtgtacaagcctccagtgtacaagccaccagtgtacaaaccatcggtttataatcctataatatcggtttacaaacctgaaacaccggtttacaatctacca

SEQ ID NO: 69635 - DNA, 325 bp, Glycine max
ataatctccaaaagaggactcccaaatataattacagttgtgtggagcacagttcgtccggtggtcaaatcatgctgatggaaatagagtttgcattgcttcaatacaagatatatacagaaaatagtatcaaatgtacaagcttctttaaattttgatgggcctcccctgccgttaaatttatgttctcacaactagcatacaatgaatcaacaactttttttattttattattactcacatgttagttcaaaaaaaaaaaacaataggaatatgaaaaacaataaaagaaaaaaaaaagaatagtaaaaataattttgaattt

SEQ ID NO: 69636 - DNA, 182 bp, Glycine max
gttttgttagttattttttaagtagttacgttttcactcttgatcgttagttttagttatttatttatgaaagtgttaatttgtaattaaagaaaaagtgagacttgattggatttcttatgctagattttatcgtatctgtatggtataattaaaaaacatggaagatggatttgttcaag

SEQ ID NO: 69637 - DNA, 411 bp, Glycine max
attgatactgggggtttggcacctttcaaaaaacatccttttaatataacactgtcactgtccatgttagtttcaagcccaccacatgaaatttttccttgaaaaagcttcatcgattttgctcaaaaagtcaatgctattaaacttgctaagaaatctgtcaagaatataaacatggatgcccttccttgacaaacttatagagttatacctaatcttaatcccaagcacttgttttctggtaagcaatttcaatttaaaaactgagagacgcttggacatgggatactttttaatgcattttatagtacacctgttagcatttttcaagtcttccaaataaaaatgttatttaatggtaattttttgttggactttaatgttctgtgctggctacataatttacttata

SEQ ID NO: 69638 - DNA, 371 bp, Glycine max
cacttgttcactcatttacacactcttcccttctccttcttcttattatatctcactctatggttctgggttatactccaccaaactaacctctattcacctctacatattcatacatctgtaatctcccatactactcctacattgcccatgaatcccataacccacacttctattaatacaattcttcccctaacttaccatttcctactaacttgctcttctctgcaccttcctcgctaattccttcattctaatattatcatccgccaactatgttgccttcttccatttgaactcaacaactaagcttcagacggaaacaactgtctccttattactcttacacgagtacactactttcattgtct

SEQ ID NO: 69639 - DNA, 429 bp, Glycine max
atgaaatgttcaaagatgtgagaatagagaatttagaatgtaattgaattttaacactatggtataccccctacctcatgtggttgaccttgtgtaaaaaaaaaaaaaaaaaaataaaaaaacaaaaaaaaaaaaaaaaaaaaaaaaaaaaaaaaaaacaaaaaaacataataaaaaaaaaaaaaaacataaaaataaaaaaaaaaaaaaaaaaaactattaacaaaaaataaggggcgaacttttaatgtgccaaacttaacatacacgaaaatgtggaacctaatccctcaaaaagtgtaacccaaagtcaattaaggagaacaatgtttaaatcattgaattttggaaaaccgggtgctttaaagatttaataaaggtcgtatatgtccataattagccattttgtgttaaagccaaagggatttt

SEQ ID NO: 69640 - DNA, 245 bp, Glycine max
cccactcgtccgatccgtacacctcaacatccgtgaattgcatgcaatatgaaactgcatcacgtcatgcttcacgaacaacaggatgatcaaattccacgaccagtctttcctaccatcgaatcagattgctcaagaagcactctccacgatacacaaacacctaactacttaaccatatacagcatctatgagacaagtactatcctacgttcttatgcaacgtaagaataccctatttttac

SEQ ID NO: 69641 - DNA, 204 bp, Glycine max
atccctcctctctgctttcatgttttataaaatcatcttctacttttagaacatattcgaccgtgtcttggtgatgttcttctatttgccccttgtgaatcacccggaagaaacccaacttataatttttttaagctaaagccatcagtattcttctagacacttttaaaaaaatctctgatattgagactattgggatcaaaa

SEQ ID NO: 69642 - DNA, 218 bp, Glycine max
attctacaacaactctcgagaaagtacgtatggctgcctacacatcgattagtccttccggctcagtgtgatcatctatcctttcatcctcaaaatccatatttgccgcaactagatcctctatctagctttgttgtcatcaatgcctatccttatccattttccacacgttctttcttaatgccttgccatactataccattttaccttgatggttc

SEQ ID NO: 69643 - DNA, 338 bp, Glycine max
gctaaaacacaagcagtttctctcaaactgagtcgtgtgaattaaccaagcacatgaagtgaataattttcaaagtacaaacatgaccatggaccggttatcacaaagcagttcggactcacccacacgaggagaccccaaagtgttatccatagagtgtctcaagggaagttccaaagcccacgagtggaccggagacatgcttcaaaccggagacatcgtcgaaaagcttcgaatcggaacttcttctaacgcgcttatcaagcttagatcgccttttaaaaacggcaagagtggcgttaatagaatcctgcaagacttctacaagaagaaagaca

SEQ ID NO: 69644 - DNA, 295 bp, Glycine max
atcccggtcgaccacgcgtccgggccaattctctcgctgctacatctgtctttccaacgcttgccactgtggtgttctcgagtggctgatggcaatatggttgttgactctttgaatgacgatttgagaatcaacggatcagttgaaccgctgcctgaggactttgatgccacagctgtgattatagatcccgggcctctggcagctgtagacgatgtcatttgtaaggaagaggcgctcatcatttaaggacatgcgaattgggtcattactctgtgaggaaatattcaatacc

SEQ ID NO: 69645 - DNA, 290 bp, Glycine max
agacaaatccttatcatctataccggtacttgcaactatttcctaatttatgatatcaacaggctaacggggacaagttaatgctatcatatcataaacaaaactatatgtaacgagtcagctgcacagtaccattacagaactctactccaactatacatcgttcaattctaatctattatacatcatccattacgcctactggatgcattatatgtatcatatgaaaaattatcgatacttgccatactccctctactagatacatacatacttaatggatagaatca

SEQ ID NO: 69646 - DNA, 417 bp, Glycine max
ggacgaccttcttgaactgataaaagttcactctgctagtcactacaatctgacttcagaaggtatccgagaacaagatgttcaccttcatcaacatgatggaattctgaaacgaaatcctcagatatcttgactcgaaaacataatcctaacatgattaagtggatgtacaaatcctctgatcctgctcacaatacttgagacttgcaatcatcgatacactctgacagaacctatggactacgcaagcaactatactcaaaaatagatacctagacatatcaatgtgctatagctgaagacctgaatcctagtgctgcgactgaacaatcatagggaggagctagcaactcaattgcactgctatgtatacagagagaacatataaggtctgagtattcaagatgaatctccatg

SEQ ID NO: 69647 - DNA, 446 bp, Glycine max
gttctttttggctaagccttcaagcagatccaactagggaaatgtaaaattttcaatttttggtatcagtatcccttttccaaaaccttccctcatggtctagatttggaaatcttgtcattggcttacttctgggtgtgccaagatctgttctggtccgttccccccctttttctttttttagatcttgggcttctccatgatgtaatagaacctcaaatttgaaagctttacctttctgagattgctttttttttttttctatccccttccccttttggagtatgaaaattttcctggaaaattagtgagctaggatcactgagtgagagaaaagaaaaaaaaagatgatgaattatttcccggacgaggtaatagagcacatatttgactatgtggtgtcacacagtgatcgaaatgctttgtctttggtgtgtaaaagttgg

SEQ ID NO: 69648 - DNA, 443 bp, Glycine max
gatgggttattgatatagtattttttttcattacatttagagtaaaagttatgtctgttattgtatgattgatcatcttaatcgtaagttcttaaacctccttttaaagagaacaaaattggtctttttttcagttagactcccaaagtgaaagaaacatggtgcagaatattttgtgtctactcctgatgtaatatgagttgggcaaactgaatcttgaatttctggttttttcttgtataagctgtaattttctgtggtagtccttaccgcatttaatactttgtgcaattaaaaaatcacttggagttctaaattagtactctacagctcttcatctttgactggtacatattttttttttatatcataacagacatttgtaggaacaccattctggatggcacctgaggttattcagaatactgatggatataatgaga

SEQ ID NO: 69649 - DNA, 72 bp, Glycine max
aaaaaaaaaaagaacaacaataaaaaaaaaatttaaataaaaaacaaaaaaagaaaaaaaaaagggaaggat

SEQ ID NO: 69650 - DNA, 228 bp, Glycine max
cctcactaatctacggcctctctagagtatccaatcttacttacgctttcatgcaacatcatagctcttctagatggcttctaaattcaattcactttccatcattttacaacatccatactttaaaaaccccttccttacccaacttaatctcctttcatcacatacccctttctccaacatttcttaataactaaaaatccctcaccaatcttcctttccaacatt

SEQ ID NO: 69651 - DNA, 132 bp, Glycine max
ctctcacagtctctaattcgaatgtgacatctctcatctactacaacattatacacattgtgccctcttcttacacccaccatgacccttacactaatcatactcattaccacctcatctatatctctctat

SEQ ID NO: 69652 - DNA, 360 bp, Glycine max
ccacgcgtccgcccacgcgtcctgaataattttatattccttaccgatggtgtaatcaataggcattggtgatttcataatgcggctggtgactaatatggaatacaaagatacttatacatataaaaatcttctctttatatcaatggcactaaacaagagtttttacataagtgatcatcgactccagatatgataaaagtgagtttatttatcgtcatatttgtaaaaagtgtttttgtaattataccctctaattcaagatttaagaaacaatgttcccatttaaatataaatattacaattatgtttctaatggttgcttacccttttgctctttttttctaattcattattttt

SEQ ID NO: 69653 - DNA, 205 bp, Glycine max
ccacactttcactaaaattttaattttaatctcacccatattaaaaaaaagggcctgtttattttaaacggaaaattggcactctctttctttaccaatactttctcaaactctttctcctaatttcaaactttcatctttccttttctgctatgatactctaccacctttttcaataccactcacacttactccattaccacaa

SEQ ID NO: 69654 - DNA, 301 bp, Glycine max
ttctgatttgttctctcatatctgattttaccgtcaccggaatccaactcaaccttggtcggattcttcagtatcatcgcatctccattcgttttatcctctcaataatagattttacttcacttcaaattcaaggtttgatttgaagtttaaagtcctaatatcttaactgttgcgtaaaacaaccaacacacaccatcatctgaagccaatacaacaacctataactatcatccaattcatttttatcttacaaatctactaatgtatttgttgctactcaccaatgtcttgtttcctc

SEQ ID NO: 69655 - DNA, 309 bp, Glycine max
taccactttcctatccctcagctttactttttcaatacatttcacttacacatcgcttcgtttcattttaacgctggtcctacttacttctctaatctcatcacaaatcttccataacaactcatacaaataaactctcaattacccttttctcatctctcctatttatatataccctcactttcaaccacatcttacatctatcaaccaaaatctcacattcaccactcacacatgcttctaccctaatacctcaatttactacaccaaccaactcatatacatttcaaatcccaccatcttaacatt

SEQ ID NO: 69656 - DNA, 315 bp, Glycine max
cccacgcttccttcaagcattgcatccctctttatttttactctgttttgtgctttacataacgcttcgtttcaaatcaaaaggtgttctaatatcataatttgttttttccaacaatgtctaatttctttactgctataatcttcacactctttgccatttccatacttcaaacattactaatctctactaatgaacaattattccacttgtatcacaacaataccaaatattcaatttcaactatcaatatttaccaattcccatcacaatactctaagatatatatccctacccaattccacaatcccttca

SEQ ID NO: 69657 - DNA, 114 bp, Glycine max
gaaaaaaaaaaaagccttttactttttttcttttgcatgatttgaatcttgattggaaaagcttcgagttggggtgttttacccatcaattcaattttaagccgtgccttcttc

SEQ ID NO: 69658 - DNA, 291 bp, Glycine max
ccacacttacgcccacgcttactccaaaacccaaaatattaatttcccttaaattcccaaaatccaaaaggatagatccaatatcacatgaatcccgctaacccataccaaaaccaatagagataaacaaatcgccaaacacgataacaagaataatactaacaaacccaatctcatcaatctcacttcaaaacatccatactaaccatccaaaaacgtattatcacaatcaaaactataacaagctaaaatcaacttttttcctatcaatcgcatcaaaactatgattaa

SEQ ID NO: 69659 - DNA, 344 bp, Glycine max
  unsure (1)..(344): unsure at all n locations
cttttgtactctcattcttcttgatccttcttttacttcttctactctaacatcacacataagganatgttcataaactcctggccacctccaatctatatcaaactcataattacacttacttaacccaatatcaaatcttaatacaaactataaaactcaaactaacaacattccttttatactacaaatgaccccgattcacaaaaagattcccattctcatacacaataactaacccatttaacaatccctcattgaatctcattacatcgatgatttttgccattacacccattacttgtttccttctgacccttatcatacacctcaacctacattct

SEQ ID NO: 69660 - DNA, 114 bp, Glycine max
gaaaaaaaaaaaagccttttactttttttcttttgcatgatttgaatcttgattggaaaagctgcgaattggggtgttttacccatcaattcaattttaagccgtgccttcttc

SEQ ID NO: 69661 - DNA, 290 bp, Glycine max
cttttctactttgagtcttcttgatccttctttttctccttgaactcaaacatggcagatgaggtggttctgctagatttctggccaagtccatttgggatgagggtcaggattgcacttgctgaaaagggtatcaaatatgagtacaaagaagaggacttgaggaacaagagtcctcttctcctccaaatgaacccggttcacaagaagattccggttctcatccacaatggcaaacccatttgtgaatccctcattgctgttcagtacattgaggaggtttggaatga

SEQ ID NO: 69662 - DNA, 284 bp, Glycine max
  unsure (1)..(284): unsure at all n locations
tctaaacaactctttctcttcttccttctctctttgttctccctcacgtanatcgacaatagcgganagctaaactttaactttccaccctcatatcaaccatctcctcattctcatcatcaacaccttctactccaacaactatattttccttctttaactcatcatcaactcctcctatactttttacaacattctattttatagttttacacataatatcaatctctattctcatccacattatttcattcatattatttcacacaatactatcaatacac

SEQ ID NO: 69663 - DNA, 441 bp, Glycine max
cctaagcaactgtttctcttcatccttcgctttttgctttccctctcgtatatcaacaatagcgtcatgttaaacatatcctttacacgctcatatcaaccatcttctcagtctcatcatcaccaccttctactccaacaagcacactttccctcttgaactcatcaaccactccttccatactcttgccaaaattctccaataaagcctaacatataacatctacctgctattatcacatcctaatgctcttacattttcattcatatacgactcacattactatcaccattattaaaaaccttattttcatccccaaccactaactcattatattattccttccaccaatctcacccacataccttaatattaacctcaatcttctttttaaaaactaaaaataatactatttgactcattttttaaaattataatata

SEQ ID NO: 69664 - DNA, 274 bp, Glycine max
tcctccttatttacaccgcacgtttttataaaaaatattgccgccctacttctatctcccacctactatatctcctccttctttacctattaaccaattaaacaacacacttcatcacaaaactttctttattccatttcctcaaacttattttatatatatattaattctatatctcttttctcatttttactatttttttcttcatttaataaacttaaaaatataattaatattttctatttctttattatcaatatattcaatacccctt

SEQ ID NO: 69665 - DNA, 268 bp, Glycine max
aatccggataagcggtagcattacaacctacctaagagcaagagttatcaagttgccaaaattaggaaggattcaaagacaactgaaatcgaaaacactcaagaactgtccaagttaccatgcttaacctgttactgcactatatatctcttttctttgtggtgtagttagtcaccatcacttatttatttcatttggctgaattaatctttattgtatgagaaatataattcttatttatatatttttttatgcctttagtgttttt

SEQ ID NO: 69666 - DNA, 111 bp, Glycine max
ctttgatttgattccttcgttgtttcgtcctgagagggtcaacagggacagccaggacccaaaccctctctctctctttctctcaccttccctcaaaaaccctagaaatta

SEQ ID NO: 69667 - DNA, 96 bp, Glycine max
  unsure (1)..(96): unsure at all n locations
cgaacccanngttcaagaacccatgcaaattggaccaatgtgctnaaaagtgnngggcaaaccaacaagggggtcaaaaagggtgnnngtggtgtg

SEQ ID NO: 69668 - DNA, 304 bp, Glycine max
cactcttctctacataatatttttttctaatcacaaccctaataataataaccgcagcttttaactagttacatccgccatccatatttcttatacacatcctttttaaggttatatcctcttcttcttttccctacataattacaccctctagcttactcaatatctcttcacaatatatttaataaaatatcttcatttttactaaataatattttgaccctatctcataattttttcattctttataattctcactcttatttctcatattaacaactttacattcatcaaaattcttttt

SEQ ID NO: 69669 - DNA, 125 bp, Glycine max
cgcaccaatatcaccgcacgaatatttctttgaaagcagcgatccgagaaaaactcgataaacttataagtttaccaggacctccttaccagttaacagacttcctctgactccttccgctacaa

SEQ ID NO: 69670 - DNA, 321 bp, Glycine max
aatatacaaaagttccaatctctatttctaaatcttatttaaagtccaattagctgtgcattttaattgtcatagaagcatactaacatactacttacaccatacatcataatatccccatctctataacaaaccaaccgtctctctatactatccactcaatctaactccttcattccacttcatagctcatgtatcgcatcacctatactcaatatcacttacagtcgcattcaacaatattactccaaaaaccctaactttacccaacttaaaagacaaacctcacacaccacattcatcaaaagccttcttaactaa

SEQ ID NO: 69671 - DNA, 344 bp, Glycine max
tccgggacctggtctctcttttctcttttctctcatccaatcttgaaaagggggaaaacacaatggcacgagcgctcccactccaccgaaagttcggtacatggcgaactgcggacaggccgagcgctacagagatgtggattcatggaaagtctcgctccgcgaagcgaggagctcccgggacgacgcacctcctctcagccctacagaactaatcggcctcgccgcgcctctggagcatcatctcatcatgagcacaagaggagagcccggcaacgatgaccaatcggcgtcaccggactaccggccaagatcgagccgactctacacatttgcacggaatc

SEQ ID NO: 69672 - DNA, 350 bp, Glycine max
attccctcgtcgacccactcctccgtacactcctagaaatatctctttttttttatctctcatccatatccataaacatcaacatttcttaacttcagctagccctcccactccactacaacagtccatgtccctacctaatctcaaacatccagcaacaccactactatcatactaattatttcacacataacgtcaccttctacaccttaaagccataacctcaccttacataatctcaaactcttcttcctaacctacacaaccctaatctccactcttctctactcctttcacattatatccaacattccccataattactaaatccttaaaaactaacaccattt

SEQ ID NO: 69673 - DNA, 131 bp, Glycine max
ctgtctacctgcccactgtcgtggggattttttcaccaggctagaggtagctaacttgctctacctccgttccccgatcgagcattcgtcatagacattgatgatattgagagcgttgtcttcaatgtaag

SEQ ID NO: 69674 - DNA, 258 bp, Glycine max
ttttgttcttatagataatagttcttccaaatcaagagcggtttgcagatcttataaaatttgtgtccctaaacaatctctaaattcttttctgctatcatcttatcactcattgccatttccattcttcaaacattatttattacttctaattatcaattattccacttttattacaacaatatcaaaatattaattttcactatcaatacataccaattcccatcacaattctctattacatatatccaaacccaa

SEQ ID NO: 69675 - DNA, 348 bp, Glycine max
cacactcctccgaccactcctcctatactcgaattcgcctaatacctcattgtagagcaataccttactatattatacttcataaataataaaatcttactcatttcattcagtttaaatcataatttataacatcctccattatcaatcatactatacatcacactttacatactacctccactcatctaaatacctcatctgtttcctataccactaataactactattagaccaacactcaatctctatcttacaaatcaatcgatcttcagataatcatctcactatccaactcgtttatacgaactacacagctttcttacatattatactcttacagaccca

SEQ ID NO: 69676 - DNA, 68 bp, Glycine max
cccacgctttctataacgctagggccgactttttttctccttctgaatctacatactggggcttctat

SEQ ID NO: 69677 - DNA, 157 bp, Glycine max
gcgtacgaaaaaaggttcatagttgatatcttctttttaacgatgaagtttgaagattttccagggggatgcatggcaaaaatactggcctacaccactctcgctgatgtattctagctttttttgtattacaaagcctttcatttcctatttaaat

SEQ ID NO: 69678 - DNA, 487 bp, Glycine max
  unsure (1)..(487): unsure at all n locations
ctttctgccaaccgtcaggaattcaaaccttttcttatantcnnngttggtggaaaccctataaatgtggtggcgtggagttggatnaggaaccggagcannnaacagaactatttagtatctcaatctctcttgatnagtagaagtgnngtgctgactttcttgtgatccagtganntgctggtgaaatctctctcacttcattctcatgccttctcaagcgttgttctgttgcagttgcagtttttctgcaagtgaaattggaacaaacccaagttgggttcccttaaagtccttaaatagcctctgctgttcctccaagcctagaaatttatgcagatttttgtgtctgagcactcaaaatggtggcttcagagaaaactctggtgaaagtggacttggagatgcagtgataattgtggatcatggctcgcgtcgcaaagagtcaaatctcatgcttaatgaatttgtggagatgtttaagcat

SEQ ID NO: 69679 - DNA, 163 bp, Glycine max
cgtacgacagcacataatggggctcaaagagattctttttgcgaaggcaatatatgatgaacacggcggattaaattttgacggcgcttcaactccctccctcgctttcagcatctaccactatgaatctcttcttatatctcatcctctagatcttctaaaa

SEQ ID NO: 69680 - DNA, 361 bp, Glycine max
cttacacatctcgtattctagtatgtacggtagataatctgcttattgtagggggttatcggcgaatatcatgtcggctgatgtttagcgatgataccaatcgatcttgtcaacctaatcatcccactgtaggtctagaactggaatattttagtgaattatacaacgaactgtttaataggtacttatggcatcatgcgatctgatgcttatagatacatgaatacggctgatgctaattttgagtatggcaataatatcttttctgccgagtctgctctttcactgactatcgaagacagtgatgctaacattagccaatcagagatgctgtaccacgaggcatattgtgagagttata

SEQ ID NO: 69681 - DNA, 305 bp, Glycine max
cccacacgtccagcaagcattgcatccctcatgaattgtagtttgtattgtgctttagagaaaaattctgccatataatgatgggttttaagatcataaggtatgttttgcaacaatgactaaattatttgctgctatgatcttgaaactctatgcaatttccatacttcaaacagtggtaatggatgctaatgaacaaggaggccacttgtatgacaaaaagagaaaacttggaagtgagagtgtaaagagtaaccaatgcccataacaatgctcgatgagatatatccagacccaataccaca

SEQ ID NO: 69682 - DNA, 178 bp, Glycine max
tcggcagagcagagatctagcgtattctctcgctctttctttcactgtcacagaggcacatccgaggggcttcccatccatcggcgcctctgctgcccagcccctaaactttctcatctactgccgcactgtctggattggcggccttctcggctccctatgacgggcccagtgcatc

SEQ ID NO: 69683 - DNA, 352 bp, Glycine max
cgggcgcttttcagactatcctttccaatttccaagtgcttcaaagtttctctatgatggtcatggggcattttccgggattatatgtgtccaacgtgctttcaaggttaccatctaacgtgttgtctttatgcaagtgcgtgttcaagtcttcttatgaattcataaccgattctcattttgtttccaattactactgtgactacaacagtctttaaagccaataggattttctcttggtaatttcaagatcctttttttctgtcctcaaaacttacattattgttctttctttgaacaccaattgccccaaaaagcaatttccttctgattttctaaaccccttcctatg

SEQ ID NO: 69684 - DNA, 59 bp, Glycine max
gcgacgccacagcgtaccggcaagtagagactgccaaaactcctaatgcggcgctctgc

SEQ ID NO: 69685 - DNA, 287 bp, Glycine max
accacgcgttcgtctagcattgcattcttattgatcagtcgcatgcattgtgctatatatgggggcaactggctaatcacgaggcgatttaagatcatagcgtgtgttatgcaacaatggctaggacctttgctgcctatcatccttggcactctttgccatttccattactttaaacagtggtcatgcctgctactgaacaaggaggcctctagtatgacaacaagatcaatatttcaaattgaaattatcattatttaccaatgcccattacaatgctctaggat

SEQ ID NO: 69686 - DNA, 317 bp, Glycine max
gtttgagtggacctgtctcagctacctttaccttggtattctctactcatgtcgtgcattcgtgtttcaaccggctccattggcttccttatgtcatactacttttgtgcacttccttggttctcattcagtaaagatagtttgaggttcttgttgtcattgcttattaactatgaaaaaggttgattgatataaactggttcacatttgcaatatatagggcatacggttgttaaattcatttgtttgattttatatttcaatggaatcttcaatttgttctccttatgcctgtttcccaatattattgtattaat

SEQ ID NO: 69687 - DNA, 284 bp, Glycine max
acccacgcgtactgaatacaatcaacagtagctttctagctaatcaagatgcagagagaaccgtgtatgtaggtgaattgcgagcaaaaggtagagactccaacaaaaaaagcattgcttaacacctacaatgcaacataactctcatccaaccagtatgtatatagatatgtgcaaacaatagatgcacctttacagctcgtatggtccctcataaagcgctttgagtatacacaaaagtacaagctctttatgaagaaatgcaaccttcttgatggtgatgg

SEQ ID NO: 69688 - DNA, 114 bp, Glycine max
gaaaaaaaaaaaagccttttactttttttcttttgcatgatttgaatcttgattggaaaagcgtcgaattggggtgttttacccatcaattcaattttaagccgtgccttcttc

SEQ ID NO: 69689 - DNA, 254 bp, Glycine max
gccaaaacctagtacgagccttagcttacaacccactgaaaccatggacacacgtacaggggaaaccgagctaaacccaagaaggggtcaacaaaccctcaaaaaagaagatgataagctgagagacccgacgcggcaccaaaacaaaccaaggaagaaacagaactacacaaaaaccaatgcagatctaaagctcaaccacatcgaacattgcacgctcgaagcaagcaactagcgactgaacaaaagtaaaa

SEQ ID NO: 69690 - DNA, 91 bp, Glycine max
cttatccacttcgagccttcttgacccttcttgttctcctcgaactcaaagcgagcgccgaggacgtggacccatccgagtgctggccaag

SEQ ID NO: 69691 - DNA, 379 bp, Glycine max
agagtactcaatctttttaatcatcgcacactgatataggactgttgtgggagcatatgtatatgagtactgggtcaacagtacagagaatggctagtttactggaccatgcttcatttaagtgtatgcttggtctgagtcacctagtcacacatccaatgatagaacacccactatttgtaccaatatgaaaacctcattgaaactgagtttaacgtactgggcaaaaaagttgtaacatactagcatcttgatactccataaggatgcaacatatggtgtttgtaaactgtaaatgctatgaaacgcggattggaaccaacattataaggcacgattaatgctaactggcatttcggttactcatatacatgacgca

SEQ ID NO: 69692 - DNA, 360 bp, Glycine max
tcatatttacacactttattaaactctatcatccattgtgacttatgcatatgatactaataccttccctgtacgtaaaaacaactcccgaactattcacacttaaagttcgtataccacaccttttcaattttccctactctttcctcaaataaaaatctatttcaactccacgcattatcctttcatgtaatacgcacttgtaagtccctcatctccctcccttcaaatgatattattgctacagtactttcctctccttctaaatgctattaccttaattgaattaactaataactaaaattcaaactaaatctaaaatacactcacaaatcaaacattttccataaaaatcactta

SEQ ID NO: 69693 - DNA, 300 bp, Glycine max
attgctgctgtttgcctataggtgtactttggggtactctaccctgctggatgcctcatgtagcgatcgcgcggaaatcagatctagagcagaacgaggcagaactagcatctatctgaattctctgaatatggtgctggcatactatctgctgctagcacaatttcctgttcttgctttatgaatatttgatgcactatgagtccactacgtcactttgtctggacatgtgctctacgtatcggctcttatcgactcgtagttgttatgtatgcatctctatacgtttctatgttttaa

SEQ ID NO: 69694 - DNA, 81 bp, Glycine max
tacatacattcatctcttgaatatgacctatctcactctgacacttgaatcctgtaaggctactgggcagacaaatttcca

SEQ ID NO: 69695 - DNA, 354 bp, Glycine max
gcgaccactcgtcacgaccactcattctgaagaagttagtgtaccttacggatggtggaactaagaagcgggcgggatatgcatagtccgggtgttgccgtagactgaagacctggctagtctcagagcccaaagactggtgtatatgccaacgtcgctaaccacttgaatgtacagtactgtaactcggcactactattcagaagtgtaagtcaatgaggtctcatatctgaaggatgtgctgatgccattataccctacaattactgagtgatcactcaacgctggaatggagaccattattgtgcacatagggcctataggcctgctaatcgacgagctctttcagaatca

SEQ ID NO: 69696 - DNA, 395 bp, Glycine max
cccacgcgtccgcccacgcgtccggaagaaaggaatctaccttacgaatggtggcatcaagaagcatatgggattgtatagctcggatggtgactaatattgattaccaagagagtgtgagacagataaatctagactttatgttaacggcacgaataagctgtttgtacagacatcagcatcgactacagatattacaaatgtctgtatatccgctgtcatatcagtaaaaagtggttacgtcattatacactgtaattcatgtagtaactaccaaggatgcgatggagatatcattagctcaatctttacctagctgtgacttactcttcgcactatcatcaaatttataatgctacttggcgttataacactgggaatgtctgcatacttaa

SEQ ID NO: 69697 - DNA, 321 bp, Glycine max
atggcgcatgctgtaaaacggcaggatccattcattgataacccacattatacggatgacctagacctctgtgagttcagcagcttgaagcacttgagcgtatgaatttacgctctggaactctcggactccgtatgaaactgtcttaattactgatgatcctgagtatgctaagtatatactctacgaaacatgtggtacgcacaagtgatctgactaggtagcatttgaagaggcacatgagactacggttgacgaggcattaaatgatgacccagttgactatgatgctgatgtggaacaggatgatgctgatgaatc

SEQ ID NO: 69698 - DNA, 332 bp, Glycine max
cggacgcgtgcgagaaggcctgggcttactcgataagcataactggatgaggaagatggagagagagtgtagtatatcgcttctagcgaatcggcacagattatgacggcactagtgatatcgtacaagtggcatgcatagaggtacactaatgtaagcatattacgcgtattatatcctttctgcggcaaacccctttctcatgagacacactgtgttattttctctaacagcgtctaatctcatgcagtactagctagaatgatactatatgctcatttatctatgatatctaattagctggactgagttgatgctaaattttgcgttat

SEQ ID NO: 69699 - DNA, 252 bp, Glycine max
cctactcctactcatgagcctactctttcagttcattgactcaacgggtgcggcttcagcaaagcggaggtagaccctgatcagggtgagacactcacggaaaacaagacgaatgtctcactttgtgtgagtcgtcactagataactctgctgtacatacagatcttcacggcagctgactatgctgctaatctccaccaaatctaccattgctcgctcgatgtgctcgacgaagcgatgtgaacactcata

SEQ ID NO: 69700 - DNA, 202 bp, Glycine max
cgcatacatgctccgaaccagcctcactgcatatatttttgagaaaactctgtatacatatacgtggatggggacctctttacaggtgatgagcttatatcggactcaataagttacaatgaaactgacaatggaatgctgtgggacgtcgaggagtagtcagttgttaaggtagcagttaatgttgaaattgttgcaaatc

SEQ ID NO: 69701 - DNA, 268 bp, Glycine max
cacaagcgtccgataagcactatgactctgtctaatatctactactcacaataaccaagtaagagagatagctcgtgcaaggaacataatgcagcaaccaaatgctgttcgagatctggatggtgaactgcgtcaagcactacgtatatcacatgatcgcgttcctcatggtatgcggctatcagatccatctcacatggatcaaggtgtattaccacgatgactgtctctatactgcacgatgcccgcacctaccttatggatgacg

SEQ ID NO: 69702 - DNA, 273 bp, Glycine max
gattcgcatgctaattgaaatgagcaagcaatattgcttaaacagtccagtgcatctctacataggatgcgctatgaatctaatgatgcggacgcactcgataggatcatatgtgatctacagctattactgactatggatcaattacactgttctgcaacataatatgtctcgggtgtacgaatatgctcacatagttctactaatcgctcacaaaagctaagatttatcactcaatgatattagtatacatattgaatctatggtacatgc

SEQ ID NO: 69703 - DNA, 64 bp, Glycine max
tctacgtgctcttactagacttatctatcaatgtcattgacacttagattgcggatgcagcgaa

SEQ ID NO: 69704 - DNA, 444 bp, Glycine max
aaaaaacattcctaacacagaaaaactaattacatattactcgttccagcacacatagtctccgggaggggacgaatagaattgataatgataatttgcataacttcaaataatataactagtctgcatacaaacactcgattctataatccaaatccattccataacggtcaattactatctactaacaatatataatacttatagaatgattttatgtcactaacgacatcttaaaattttttaattcaaatatatctactataatatttagcttatataaatcgcaattggtacaatacccataacgtaagccgaaacattatattaaggatacatatgtattcgccactaaaagtatatttatccaaataattaacttaatttccatatatatctcttgcatctaatatctaataatatatatttcgacctatatagata

SEQ ID NO: 69705 - DNA, 271 bp, Glycine max
tacaagcgttcgcgtacacgccatagcacgccacatttttcagcatacgaacacaatgggacataggtctgggaacataaaccgtctcgacactatatcctaacacttgactaacagctgacttaccttgtgacagatccgcattgtgctaataccttacctgtcttatgaacaatctccatatctattcacacttaaagcttgataacaatactttctcaatattagcgacagccatacttaaatgtaagctacacgccactacgctcat

SEQ ID NO: 69706 - DNA, 389 bp, Glycine max
attgagaatgctcatactcatcaagaggaaaccgggcctacgtacactattcctatgattccttatcctgggcgaccaatccatctcggggagtgctgacataactagcaatgccctgagaaacagatgtagctatgatctaaacaagcaccctagcatccatctttctgcacagaaactgtacatggagaagagaccactgaatgcactgtattatctgcatgccgaatgatgagacaggccgcctgacgaatgacatgaatgatgactgacaatcaatagcgattataaactgcattgcccgattgccgcgtatgatgcagtttgaccgttactgaatcacgcgatgcatatatggagccatatacactcatatctctgcaagccac

SEQ ID NO: 69707 - DNA, 340 bp, Glycine max
acgatttgacaacatgcaaatatcctctggtagtgggtctctacctttctggatgcctcatatagcgacagcggaaaggcatattaagagcagaaggatgcagaactagcagtcactagaattttctggaaatggtagctcttatactatctgctgctagcacagttgccaatacttttgtcttactttttgttgctgaatggggctacaagtcatttttctccacaattgcccttgcaatatcttcttatacccttggagtcataactggagcactggctgttcatggtgtctcaacattgctagctgtacttgggggttctatacttgggacgaattt

SEQ ID NO: 69708 - DNA, 310 bp, Glycine max
atttgacaacatgcaaatatcctctgctagaagatctgtacgatgatggatgcattgattctagatctttgaatcatacaccttatgcagtacgatgcagaactatccacgaatacataatatgaagctgatgcagtgatacaatctccttatagcacagtaagctatacatgggtatacatatgtgatgctgaatgcggctataagtcacattgctgcacaagttatcttgcatatggttgttctacactcgaagccatatatggagcactgcatgctcatcatggtggcactttcctagctcgacttg

SEQ ID NO: 69709 - DNA, 215 bp, Glycine max
atattcaaaggaacaatgatcatcatgatcacatccaccatcttaatagtaacttctattacatgacatacgtgttcaagtatttaactattaaaggtcagcttaagcattttgattaactctttaacgtcttatatacccaagtctatcaagagaatcccgaactcgtctagataacttaacccttattaaatttcaacaaatgaggttcattc

SEQ ID NO: 69710 - DNA, 171 bp, Glycine max
tccggttttccgagctacgacccacgcgtacgcgtacgtgcaagccttatccaacacatttagcgacatttcttcttcatacctcatttacttattgaggaggggatttctaagcgaggcatgcaccgtcctatggttgatgaatcatgaccctatcatcagaacatgaat

SEQ ID NO: 69711 - DNA, 289 bp, Glycine max
cccacgcgtccgctctagaatgctgccgatcgaaccctaattgtagttcacataacacaacattggcgtgtgtgacacgacttatactagctatataacagcatcggacagttgtggccctaacagtgatagtaataggaacgttgatcatcatgatgatatccactatgctaatattgccacctagcccataacatacttgttctagtatgtatctattaaagctcagttcatgcatttagatcaacatgtcaccgacttatatacccaagttgatcaagaaaatccc

SEQ ID NO: 69712 - DNA, 112 bp, Glycine max
agctatcctaagctcattattttacacatcgtatagattaaaggaaagaattgatcgttgatagtgcatggaggaactacagcgtgagagtacattaatgtaacagttacat

SEQ ID NO: 69713 - DNA, 52 bp, Glycine max
cggacgcatgctgtcttctagtatacaatgtctcgaattggcatatttcatc

SEQ ID NO: 69714 - DNA, 134 bp, Glycine max
acgctcaccagtttcaccgcacgaatatcttgttgattgaagcgatccgagaaaagctctgtggacatgttggtttacgaggatctccatacaggtgatgagctgctctctgactatcttccgttacaaggaaa

SEQ ID NO: 69715 - DNA, 271 bp, Glycine max
cgcacgcgtggactgatacatcctgcgctctagactcctgacaccactattatgcaaagaggatgcactggcattatcttcgtcatgttagtgcatattactcctggcatcaacagcaggtggtgatctctattcatcagaagcatcggtggacacaagatctgttgaggacactttatggatgatgccgtctgaggaccattgtacttcctttgaagatggagcgatttgctattggtcactatacaccgactcacgatgtaggcctcaa

SEQ ID NO: 69716 - DNA, 128 bp, Glycine max
gacaaacgtctaaggattctatacatctctcttttatatgaacagcatcctgactgcaatagggtgcacttgcacgatcttagacgtcaatgcagatattaaacctggcttcagtagcaggatgttat

SEQ ID NO: 69717 - DNA, 138 bp, Glycine max
gaagatgcgagtgccactgaatggaacatgaccatatatatggatacccggaacattatcgacttcactataatctataaaggcctcagaccctctatgtgaatttattcgaaatagcgtaaccatcgaaaaggtata

SEQ ID NO: 69718 - DNA, 293 bp, Glycine max
aagccttccgccaagccttccgtttttcggcaattctggatccaatggaatcaccattatttccgtccaaggggcccctttccaggtcaaaggcctcccccgtaccttccaaaacctaccttaagaaggccggtccattccgtaggaccggttccttggtattaaaaggcctcccttcaagggtgttgaaatttcgactttcaaaacttgaaagcaccgttacccctaaaggtacctttgttggaatggtatttttacttgccagaaaatttgaggtaatttggccttctttt

SEQ ID NO: 69719 - DNA, 218 bp, Glycine max
cgacccactcgtacgatttctactcaaacctacacccatttcatttttctcaattcccaatttcaaagtgaaatgggagattttcacaatcttaatgaccctctatttatacttcaccttacaatccctattccactacctctactacttactccctatgtcttctacgttgtcattcctaacgattaatctattaacctatcaaactagtctcataa

SEQ ID NO: 69720 - DNA, 298 bp, Glycine max
acgcccacgcgtccgcccacttgttcgcccacgttctcgcggacgtcagatgttcggtgggctggtacctctgtgagggtgagtggtatggagacaggaacctactgttggtggaagaatcatgaccgtgtgatcatgagcgtgattaacggcccgggtgagtatctctttggagtagtctcatctatggctgttaggatcgttcttaggacacttacatgtgcctgggaatggtcatactcgttgtatgacagaccttatatgaatataagacataatagtattagagatattaaaa

SEQ ID NO: 69721 - DNA, 269 bp, Glycine max
cacagtatgagcggacctgtatcatctaccctttaccttggatattcactactgatggccattgcattcatgtacgcaaaacgtcaccacaggctaacttatgctatcctacttcgtgcactacatggtcatatcaagtaagatacattgaggatcttgtggtcattgcatatgaactatgaaaaatgatgaaagatataacttgatcacattgcataatagggcaacagatgatcaatgaattgtctgatcttatattgcgatgggat

SEQ ID NO: 69722 - DNA, 285 bp, Glycine max
gccacgcgtacatcaaccattgcatccctgttgatttgtccgacgcaccgagctatacaggaatgctgtgacttgtcatgacgagctctatgatcatagggaacgtcttgcagcagtggctactttctccggtgcaataatctaggggctctttgccaatggcattcttgaaaccggtggaatggctgctactgagcatggaggccacttgtttgacaacaagagcatatatggtagcgatagtattgagatttaccaatgctcctcacaatgctctaggagatg

SEQ ID NO: 69723 - DNA, 262 bp, Glycine max
cccacgcgtccgcacacgcgtacgtccacgcgtgcgcacacacagtcggatgcctctgtcgcggaagtaagatctgagcatgcaactctcgatctctggcttcaataacactcgccatatgatgctcgaagatagcagcagacggcagacactgacgatatgcgacctgaggatcgtgacagtggaccacgaatgggcactgctggatgagctgagagacaatccccacgagctgcgtggacgcagaacgaacgacgatctc

SEQ ID NO: 69724 - DNA, 118 bp, Glycine max
tctgaaaataaaaaaaagccttttactttctttcttttgcatgatttgaatcttgatgtgaaaagcttcgaattggggtgttttacccatcaattcaattttaagccgtgccttcttc

SEQ ID NO: 69725 - DNA, 295 bp, Glycine max
cggaacgaccgactcgacccacgcagtccgttcgaacacatgcacctgtcactcatactgaaagatgggttagaagatggcgtggctgatccgaggcctttaagtgatgctacttctggactactctgaggtggcatccacgaatacaaaagaggaggcatatggaatggatgatgccaaatatcccggtggaagctatggacggggttacccaggtcatggcgctggcggttatcctggccatggccgaggcggttatcctgtccatgacggagttggtggctatcctggacat

SEQ ID NO: 69726 - DNA, 261 bp, Glycine max
cccacgctgttcggacgttctcagttcctgtgcagtcttgactggttgagctcggatcctttgaaatggtgcctgaagagcatcgtgttgtggcaatggccaggacaggatttgatagattcagtcctggacaggcgtaggtgtatccatagatttttggtcctgagttaagcctgggggattcataatctcaggctatagctattagttcatcgctaaatgtggctgatgatccggctatcacttcagactcatatgaat

SEQ ID NO: 69727 - DNA, 262 bp, Glycine max
acccactcgtcctaaacacccttgttgaccacaccttaattaaaaacatatataagcatattagcggattaatacataaaataagggaaaataaaacattttgaattcatatttacacacttgattaaaagctttcttcccttgtgacagatgtctttatgtactaataccttccctgatcttaaaaacaactccctaactattcacacttaatactcttaaaccacacctttttaatttttccgactcttttctcaaataa

SEQ ID NO: 69728 - DNA, 327 bp, Glycine max
taacttgctagagtgaataaatgttgcatgacttggcatatcgatttaggaagagcgttttcagactacacagggggggcaaaagacctcgaaccctctctcttctatcctacgaaattcttaacctcgaaaagttatcgtcagatgaagcttctgcgcagattccggctccgatttccaccggaactaaagtggctccttcacctgcgctgaattatgcggcactctcgtcactcaattgagaccaggatattgacaaaattaacatatatttgtctatggaggtaatccacgatgaataatgccgaatcctaatttaattccatg

SEQ ID NO: 69729 - DNA, 58 bp, Glycine max
ttcaatcgttctgcgactgcctagaacttgaacctatgaacgtagactactcgatctt

SEQ ID NO: 69730 - DNA, 382 bp, Glycine max
catactcgtgtcgtttcctattatgcaccgtcaataatcaccggatatcaacatctgatccaactgttacatgttgacccaagtctaccgctttgcattgtgctgttgtaacctgctcatacaactgtaagtcgtgatctgtaaactgtgagtgcacaatacatcagatcgatgcgtgacaaatgattctctgttctgagctgatgattatagatcgatgaatgcaggtgccgtcatactcgacgattgcattacgctctactgtgtggtgatagatacctgactgaattccaaattctgctactatgactaatgcgtataacagacactgtaccaagaatcatagactgacagtcatagatcaatcgctcagtctgaaatg

SEQ ID NO: 69731 - DNA, 187 bp, Glycine max
tcgctcacacgttctatctggaggtaatctgttctcatcgtgaagcctcattcagggaattgtgatctatacaatcaccaggggggggttcactacctgtccacgaaatccttgttgtggcgatcaatgtgcttcataaccagtattagccatgtgatgcttcactcaattcacacattgacacatg

SEQ ID NO: 69732 - DNA, 241 bp, Glycine max
ttcgaacacatgcccagtcgtccatacagtgagactagtttgaacatgatgttggtgatcctatacactgagactcatgctcgaaatgctctcgattgtcactgctatccatcgaataccccactaggaggcactatggcattggatgatgccaaatatgtgaagcggaagctatggacccggttacccatgtacactggggcgccacatttatctgagcatgtcgtttccggccattaca

SEQ ID NO: 69733 - DNA, 135 bp, Glycine max
tccacacgtactccaatcatcgtattctccttgcactgtagactgtaccgtgcttcatatttggggcctgactaaacactagggggtgcaagagcatattactgcgttttgcaactcttactaaattctttgctg

SEQ ID NO: 69734 - DNA, 144 bp, Glycine max
tccacgcgtacgtcaagcactgctttcttctttcactgtatatctgtttgtgctctatattatagtcctgggctatcactaagcgatttaagagcatattacctcaattgcaaccctcgttaaattctttgctgatctcatctg

SEQ ID NO: 69735 - DNA, 354 bp, Glycine max
atcaaacatccgatgatagacggacgcatggttcctgacagcataaaatgtggtggagggccaagacaagggacagctgcagcggttctatgaacatactgccagttacgccaacattgcgagattctctgctggaggcctcttgctgtttcagtgtcatatgctcgctatcgatacagtgattgtcttgacatagaaatcagagtcacgatatgcgctgcaggagcatcaacttattcaagacacatctttgtcactggtgcctacactgatgctacgacctgtggacctcgatataataccgaagctcttcaactcatggagactgatgccattgattagactgctgcctat

SEQ ID NO: 69736 - DNA, 482 bp, Glycine max
tccacgcgtgcgggcataaccaagattgaaggctctttacggaaagtctattagccgcttcagaattatcatgggttgttaaaagtccgacctaatgctttgtacgtatgctgccaaattcaaactcaaaaacggaaaatcgcatattttttgtaatttagtttgatttttggatttatatatatatatatatatatatatatatatatatgtgtgtcagttgagttttaaaattatgatattctctgtcattggtctcattatgactttttaatgatgtaagttgacaaatgtcgaaatttgatgccgcgttataaactgctaaatttaagataaatcaatgagaaagcatattagaaaatagcattatttcacttatgaaagtatctaattttattgagaataataaatatctatgatataaatatctatgtttagttgttattacactatgtatcttatctcacttatcgtcctatata

SEQ ID NO: 69737 - DNA, 355 bp, Glycine max
aaaaaccgttctcgaccacaccatagttaaccacatctttaagcatacaaccacaatgtgacataggactggggatataaaccattttgaggctatatctgcacacttgattaaaggctgacgtaccttgtgactgatgcatggcgtgctaataccttacctgtgcgtcaaaacaactcccgaactattcacacttaaagatcgtagaccacacctacacaattttcccgacgcttacctcaaataaaagctggaggcgacttcgtgcattttcctatcatcgattacgcacttgtgagttcatgatagacctaccctcaaagggtattgttgcgacagttcttgcccttcagtc

SEQ ID NO: 69738 - DNA, 307 bp, Glycine max
aaaaaccgtcggcactcacacgatagctacacacatattagagcgtacacgcacatgtagacgttgggcagggaagatttaacgtcttgaactcatattggcacacttgactcatggctggcgtcccttgtgacagatacctagtgtgcttatacccttgctgagcctaaaaacgcctctcgaactattgacacttaccgtatagagaccacaccttatcaataatggcgccgcttatctgagataaaagtcagtgcgtactacgcgcattgtcctatcatgaaagacccacttgtgagaaccgcat

SEQ ID NO: 69739 - DNA, 416 bp, Glycine max
cccacgcgttcgaccacgcctgcgcttacgcgttcagcctcgcttgctgaggcacatagagtgagagtgaataagatggcgtcaaacatgccgagtctcgatcagaaggcttccgaaatgacctacatatccttctaagacatatgcgcgattgtgctcacgaatctgttccaggaactctacctggacgcattcatttctcgctagaagcattattacagcatgtccaactatgacgacgcacaacgtgatcaatctactattcggacttacgccacagagcatgcatctggaatacaatgcaactatttatgcctaagtatgtgagatcctgctgtctattgtcatataagacgtcattctgatgtaatagctctacagtcgaccattttctgtgacgcgtaacattcactaga

SEQ ID NO: 69740 - DNA, 80 bp, Glycine max
taaatacaaaaaagcctttcacttcttatctttagcatgatattgtatcttgattgcataagcttggaatagggatgttt

SEQ ID NO: 69741 - DNA, 65 bp, Glycine max
gacacacgatcgaacagcttcgagtagacgtcagtcttttactgcatctacatcgtaataacatg

SEQ ID NO: 69742 - DNA, 233 bp, Glycine max
gccacgcatgcgttcacaccttcaaggaacggactaccgttaggtccaagtatatctgggaaagggtcgtattacaatgattctaataccctatctgcaccattcatattaatatgagcataaaataaaaactaggtcggtcgatctatacgagccaagctcacgtacgcctgcatgcaacagaatagctctgctatatggacacctacattcaatgcactggctctaaattc

SEQ ID NO: 69743 - DNA, 245 bp, Glycine max
cacgcattcaatctcttttcctaattttttccttctatgttttaaatacctcccaaaccttctaggacgggtttatattaatagactttacaatcgtcacatcttcaccaataattaatttcccccacaccccttatatcttaaattgaaaacaacattaagttcacttttttatgaacctcataatataatttcttattttgcaccctattaaaatcatataacttaatttcttaattttttta

SEQ ID NO: 69744 - DNA, 264 bp, Glycine max
cccacgccgtccgctctaccctgtctgctgtcttcttgtcgtataactactcactctataaagtgctgctatcacacatctttcaatctctttaattgataaccacaaaaatcttacacatccaacaaagatcgtcacaccgtacatatcgacattcattcaataactaccaatgatatcaactgttatagatgatgatggttctaacattatcaatatatcatatcacctacccttcacagttaccaatgagtatcattacct

SEQ ID NO: 69745 - DNA, 163 bp, Glycine max
agcggcactgctccgtgccacgttcactgcataaactggcgagagaactctgcaaacaggatcggttatcatgacctccttacaggcgatgagctgctctcggactgcttccggcacaatgaaaattgagaatggaatgccgtgaaaagttgaggggaagtgg

SEQ ID NO: 69746 - DNA, 279 bp, Glycine max
aattcccgctggacgccacgcatcctgttacctcacaatgagctctataattaaactcctagatcaaaaaaagagcgttcaattaaactcagaggcccgtaaaagcaatcattactacactgaatataattcctatacacctaatttgaacaccatagcatatcaaatctcatctactcataaccatcaattaccatgaataagaactttcaaaaacatatctctcaattatacaactaatgcaaatacaaacttaactatcatacacactcattacat

SEQ ID NO: 69747 - DNA, 317 bp, Glycine max
cggacgcgtgggttatcctaagtctttgggaatagtgctgcaatggcttcaagtcaggaggaggtgacccttttgggagctactggaagcccatttgtgtgcagggttcatattgccctcaagttgaagggagttcaatacaaatatgtcgaagaaaatttgaggaacaagagtgaactgcttctcaaatccaacccagttcacaagaaggttccagtgtttattcacaatgagaagcccatagcagagtctcttgtgattgttgaatacattgatgagacatggaagaacaaactcatcttgccttctgatcctta

SEQ ID NO: 69748 - DNA, 112 bp, Glycine max
attcagtacaatagctatagctactacatattttactactacaggagttcttgccgcaaccgaggccgctgcttcatgctatcaatcactcgcttaccataatcatccacga

SEQ ID NO: 69749 - DNA, 130 bp, Glycine max
acgctgtatgctattgcatgctatgggttgctgatgacccgttcatggagtccacttcgctcgccaatctactagtgtccaacaacaccgttcaagcagagctaatgaggagcgagcatgtgtaccgtca

SEQ ID NO: 69750 - DNA, 127 bp, Glycine max
ataacgcagccctatcgctcgatgataacccgttcatggagtccacttcactcgccaatctactagggtccaacaacaccgttcaaccagagctaacgaggaacgaccatgtgtaccatcaacggga

SEQ ID NO: 69751 - DNA, 367 bp, Glycine max
tccgcaccgcacgaatatcttgttgtttggagcgttccgagaaaaactctgtaaacatgttggttgaccaggacctccttacaggtgatgagcttctctctgactccttccgttacaaggaaattgagaatggaatgctgtgggaagttgaggggaagtgggttgttaaaggagcagttgatgtagacattggtgcaaacccttctgctgagggtggaggagaagatgagggagttgatgatgcagctgttaaggttgttgacattgttgacacattcagacttcaggagcaacccgcattcgataagaagcagtttgttaccttcatgaagaggtttatcaagaatttgactcccaagctcgatgc

SEQ ID NO: 69752 - DNA, 241 bp, Glycine max
ggagggtgtgatgagttattaaatacctgtttttaccgtggtcggatgccaacctaaacggggtcgctttcacatgcatcgtcggatttccattcgttgcatcgctggctcttgagatgcacttacgctttatattcatggccatcaacgtgattggaagttgtcatatctgagactgatggcccatacagctagactcgcatgcgctgtaagagtatacttcaacttcactaactatgac

SEQ ID NO: 69753 - DNA, 344 bp, Glycine max
cacctgtctctatctaaaaaacccatcactattttgaccagacacaaactttcctgaccttgcgtttccctctccatatcttcatctaagattacacacctctactggcagagacccttatacctatctgtctctcccactacaaaatcccttactcttgatccatatacactcgctcttgctaaccgcacgaaccactttactttactaactaattcgttggctacattacttctattgtgaactgactaaattccaagttctgcatgaatatccaaaacggcacatagttgcatgcgaagacacaggattgcttctcgtcaattcagagtgactccataccc

SEQ ID NO: 69754 - DNA, 112 bp, Glycine max
gacatcgcagactttgcaggcgcatcgcagtctatactcatgtcagaatgatgatgttgacgccagatactataccaagtgatcagacacatgaacacttgatcgatgatct

SEQ ID NO: 69755 - DNA, 291 bp, Glycine max
cgtccgcccgctcgtacgctcgaaagcactaccacatgcttctgacgactgctcatgagtatctgggcggggtgccttatgaagctaggtacttaaacgatgagctcaattctcatgataatgcgtataatagacatcatcgtgacatcggcgtacgagatcttgagtcaattcatcttctatggatactacttgatgtccatgagctttacgcactctaaacaaactttgggagaattcctacaggatgcagtcatgtacatcggtcatgacatgattacttaggccaag

SEQ ID NO: 69756 - DNA, 229 bp, Glycine max
acaggagtaacctatgaccctagcggagccttctttcttcagtcgaacattgcataagccagtgggaacgtgtctgacgtgaagcatgctcttggtgacaaagttatagctagctctggatctagacgacatgtgactcaggctagagtgaagtgactgtatgatcagaaccacgatatcatgatgaatgctaaaggacctaagatagaaagagacattctctacctac

SEQ ID NO: 69757 - DNA, 218 bp, Glycine max
acgcgtccgcccgcgcgtccgatacgataaatacatgtagtaatacactcaattgctcactaatcaaagttgtaggttcttactaaggcacactgcaaccaaccaagcacataatgaatatatcgactctaattttccatcagcatatctcagatattgcgaatgtcaatggagttactacagataacagatacgtcaacactctataggacccaagc

SEQ ID NO: 69758 - DNA, 133 bp, Glycine max
gagtggcagaggtttaaccatacatctcgtgtttactttacatgcgtcctggttactctcatggagttataagggaacggatcctcacgggccaaggccgtatgctacgtaagcaacagatcatcgggctgca

SEQ ID NO: 69759 - DNA, 111 bp, Glycine max
ctcgggcatatgacgagcctttgctaacgttctatagatcaccaacttgcaaatgcagcgagtgctacctggacccagctcggtcttcgcacaccaggctgagaaacatga

SEQ ID NO: 69760 - DNA, 305 bp, Glycine max
cgtccggttggtgttgtcatgagttgaaacttaatttacttttcaccactaaactacataacaaggcagattttttataaaataacaccaactatacattattaaaaatatcttttccaaatattcatatttaactcattttcttataacttgttcctttcctcataaaaaatctataaatatataaaaataacctattaccctccttcattctatatattacatctataattattaaattctaccatttcatacaatataaaaataatcataatataacacatcatactcacatctctaattta

SEQ ID NO: 69761 - DNA, 131 bp, Glycine max
cccacgcgtccggtaggattaattgatgtatttaagaatcaattgctcacttatgaaaggttgatgaggagactttggcacaatccaaccaaccaaccacaaagtggatattttgactctttttttccctt

SEQ ID NO: 69762 - DNA, 155 bp, Glycine max
cccacgctttctcccacccctacctccaatctacactgatccctacccgttccatttcatgccggtacgttaactactagctcttagctcccaacatacccaacgctctcgtccaccatctactaacactcatacaacctaccacccactcttca

SEQ ID NO: 69763 - DNA, 321 bp, Glycine max
aaggaagctagagtaaaagtctgtactcagtttttacagagtattgaaaggaactgtagggaggacagagatgagacatcacagctgaaactggatgactgctttcagacgagagatggttccactgcaagatatgatgatccagctactatgacgcaaagacgtgcatttatggagaagaagactcatgcggattcatcagatgctcatacagctgcgatagtggaagtgaagacaagccatactgaccatgctacggataggattgatatgaaggatgaaagaatcagcgatcctcatgatctggatcgacctgagaag

SEQ ID NO: 69764 - DNA, 136 bp, Glycine max
ctcacgcaccttgaccacacccagcctaattacatctccatgcctttgcccattagacgggaatcgtcactgacctatttggaatccatctatactcactggtttaaaggctaacgagcctcgagaccctagcttg

SEQ ID NO: 69765 - DNA, 146 bp, Glycine max
cgcgtgtgcggaaaaaaaaaaaagccttttacttttgaattattgtatgaattgaatcttgattggaaaagggttcttattaaggtggtttacccattaatttaattttaaaccgggccttttttaaaaaaaaaaaaatatagtat

SEQ ID NO: 69766 - DNA, 139 bp, Glycine max
cacgcgtccgcacaacaggaactcactatatggacaacgttactctcggtgtctttaatgtcttcgagagggggagatgttcacatataggatgaaaattcgcagggatatgcgcgctgacacagctgaatttacggaa

SEQ ID NO: 69767 - DNA, 128 bp, Glycine max
aaccggggccgactcaatctcaagacctggttcaacttctcgatagtgctttggatgatttggagtccttcaacctcaatcctccccctccaagtggggaagcaactgcgaatagcaagaacgagagt

SEQ ID NO: 69768 - DNA, 280 bp, Glycine max
cccttttctactacaccaaatttatatacatacaaaaaccaaaaacacaggaagacatattataaaaaaaatcaaacattttcaattcatatttacacactttattaaatgctttcatcccttttaacatatacttatatactaataccttccctattcttaaaaacaactctctaactatttcacacttaaatttcttactaccacaccttctcaattttccctactctttccttaaataaaaattatattctaactccatcattatcctttcatttaa

SEQ ID NO: 69769 - DNA, 355 bp, Glycine max
gttaaaggagattaatcttgactagctcatgctgattcgatctgataaagttgcagatggggagcatgaatatgaagaggcatggttgattaaatattaaccttgactggtactgttgtggtcttggctcagaaaatgtgagccgcattgtgcaatacattatagacaatggtgctctaatctctagaatatgctttggataggatatatcatgtatctggctgtcaattgatggtcaattactcaatgtggatcgatctgagactggctctactctgattaggaaccattggattgacgacccttacttgtaatctgtgtacatatggcactacgatatatatctataattctc

SEQ ID NO: 69770 - DNA, 287 bp, Glycine max
attcccggctagccacgcgtccggaacgggaacacatatacgtttaacggccgtttataccgtggtgtctatggcggtctgtgggggtgactatagacagcgactgcactgaactatatcaatccattatacatatgtatgtacttatacatgccaagggagcccactctaaagggggtatgcagacggtcacgtgcaagcgataagataggaatcaagttatgtcatgaagaaaggaacggtgtttcgtcaatttacaatgtcgggactgaatgaacaggggttag

SEQ ID NO: 69771 - DNA, 123 bp, Glycine max
attcctaacaccataatcatctagagggcactcttcatctccaaatctccatcctaaaacaacacatatctactgacaaaactcaacacaaccatcactctaatcatattacagaagaaagct

SEQ ID NO: 69772 - DNA, 255 bp, Glycine max
cccgggctttatttcactgattagaccatgtttatataaatcgatacacctttatattatcggtcatgatataatctatgaggggcatagacatacgatgtgaatctattagtcaagtggactatcgacatcaatatgagtgaagcatatcacatgacctcttgacgaataaaaatgctaccctcgatccatgcctcataaggcatgataattaccaaaatcatcacgaattcacgataaaccctcatgacatgg

SEQ ID NO: 69773 - DNA, 382 bp, Glycine max
acgcgtccggcggctcgccgcccacgccttcgcccttattatatcatatatcgaatcatccttaagatggtctttatttagagtcaatattgcactgtttaatttatacatatatcaacgatgccgcttactatgttagcataaccatatttcatattggaaccaaattttacttacacaagatatgtaacatcacacttcacaagacccaaaagaacacaagggaacatatgaccttgaaagtaccattcttgacatatacaacggaagcaaaaatgtcttatatgatcatcacccttaaaagacatatgaacgactatatcaacctttcttatcatgtgactacgaaagtgacactgtgataaaggacaaacacttgttt

SEQ ID NO: 69774 - DNA, 253 bp, Glycine max
actacgcgtgcgtaaagcattggatacatattgaggtgaagttagtcaagtgctttaaggggagacacatgccacatcatgaggggttttaagatcataacgtgtgatgcgcaacatggggtaagagctgaggtgctatgaacttgcaactatgtggcattcacatactttgaacggtgtaaatggctgctaatgaacacggaggccgcttgtgtgactacgagagcatatgttgaaggtgaagtgtcaagag

SEQ ID NO: 69775 - DNA, 87 bp, Glycine max
cccactcttcctacccacccttctcgaccacaccaaaaccaattacataaaaaaacctaaaatcacaaaaccgcataattataaaaa

SEQ ID NO: 69776 - DNA, 264 bp, Glycine max
tctctctatcacgcttacatgcagctgccactgtcactaaaaacgtaaattttaaacatctacgagcctctatttttgctctcaatctattgtatgcttagggccaatcgttaatgataacttgatgtctagatgatgcttcctgattggttgtatacatattgaaattcagaatgtaaaacttttacatctaaatgcattgctagaactgtagcactgaaaaaagattcatagcctactcattctgctaactaatgttcagat

SEQ ID NO: 69777 - DNA, 152 bp, Glycine max
aaaatcaaaaaaaataaaaaaaacaaataaaaacaaaaaaaacacacacaaaaaaaaaaaaaaaaaaaacacaaaaaaaaaacaaaaaaataaacaaaaacaaaaaaaaaaaaacaataataaacaaaaaaaacaacaaaaaacaacatacc

SEQ ID NO: 69778 - DNA, 327 bp, Glycine max
ccggggcggactgcaccagactcagcgtcttcttaccgcggcaatacactactaaagtcgatcgtaataatgctgtcaacagctaccataggctacctaatgacattctacatagggctctactagtgctgatcagatgagatggacagtggctcttgatgacattgcatattaacgatgaaaaacgttgattgatataacttgatcacattgaatagtatggcgacagatgtatcgatcaatgtctgatgctatatagcgatgggatctgcagatagttctacttctaactgttgtcaaaagtagcgggcgaaaacaaggatccaa

SEQ ID NO: 69779 - DNA, 405 bp, Glycine max
atccaatgcaccaaatcgactgagaggctattttccaaagctaaaccacctatctgaagttgaaccattcactcctactatatacaattgatcttccgttaaaatggaccggaaatgcccgaagccgctaccgacatatacttccacaacctccgcggcgacgatcgcatcaaccagactctatcgagacgatggctggggaaatatctgaggatgcttgtacgacccatatcatgcaaacaaatgagcacgctacttgcccactgaggcagatggggggatgcatctatgttttacatgaggatcagtaatgcctacattgacattgagatcagcaacaacgccaatgtcgaaagaactatcaattttgacgttgatgcttatgtatagacccgatcatgactt

SEQ ID NO: 69780 - DNA, 302 bp, Glycine max
cgcgaccgggcggaaaataaatgcctccaacttcagtgttatgcatgatataaatcttgatagacaagccatttttataaagatgttttacccatcaatgcaattctaagccactccttctttaacaaaaaaaaaaaaaataatattcaaaaaaaaaaaaaaagggacggccgttctataggacccaagctaacgtacacattcatgcaacctcttatttatatggtagagaaacctaaatacaattaaactgccgtctaatacaacatcatgactagaaaaactcacactttacgcaactt

SEQ ID NO: 69781 - DNA, 171 bp, Glycine max
caatccaccaaacattcaaaaacggacattttctaaaaataaaccacccatcaacacaacaaccatccactcctactatatacaaataaacatccataaaaatctacctcaaatgccaaaagccacttacatcattcactacaacaaacttataatatacaatctcatcaa

SEQ ID NO: 69782 - DNA, 216 bp, Glycine max
gtgtgaggacaacaatggctaacttgtctgttcttatgatcactgaaccaatcgccgatttccatgctataaacagtgtgctaaagctgctaatgaccactgctgacacatctatgacaacgagagcccatatggaagaggaagtgacaatagataccaatgcccatcacaatgatcgacgaaatgtcaccagacctaataccacatcccctttat

SEQ ID NO: 69783 - DNA, 330 bp, Glycine max
tagggatacattcctggtcgagaatgctgttagatgggagggatgatggcgatactgatgcaagggcttttcctcatgctcttcatggttttctgtgaggcgtcatccaccaatacaaaagacgccgcacatgtactgtatgatgccatatattccggctgaagctattgatgcggcaacctacttcatggctgagtctgctattctatccataggcttggctgcaatacttgacattgaggagttgatggctatcctggacacagatgcggtcacccaggccatagaggaggttaccctgatcgttggaaatgatactgtatggatcgc

SEQ ID NO: 69784 - DNA, 373 bp, Glycine max
cccgcgcgtccgatcattggttcttatttttaccggggaaagcatgaccaacttgtagcgtctattctatgaggagactactgtattggcaatgtgtatgtcggattaagtggattcgagtgaaatgtgtgatcacgggagtcatttccacatattttctggaatataacttttggattattagccgttaaatgcactttggatttgcaaactaattcgttggctaaattactccgattgtgaaactgtttaaataacagggcctgctgtaatatggatccaggcttacaggcaccagcgtacgacacaggatcgcttctatggcgtcacctagtgactacatactgactggctttttgcaacagggacattg

SEQ ID NO: 69785 - DNA, 55 bp, Glycine max
  unsure (1)..(55): unsure at all n locations
cctgaacaactctatctcttcttccttcgttcgaggannctccctctcgtagatc

SEQ ID NO: 69786 - DNA, 303 bp, Glycine max
  unsure (1)..(303): unsure at all n locations
cttttctactttgagtcttcttgatccttctttttctccttgaactcaaacatggcagatgaggtggttctgctagatttctggccaagtccatttgggatgagggtcaggattgcacttgctgaaaagggtatcaaatatgagtacaaagaagaggacttgaggaacaagagtcctcttctncttcaaatgaacccggttcacaagaagattccggttctcatccacaatggcaaacccatttgtgaatccctcattgctgttcagtacattgaggaggtttggaatgacagaaaatccttg

SEQ ID NO: 69787 - DNA, 177 bp, Glycine max
tatatgttacatccttatcatacacttattctttgaagaccaccaacttcaaaatgcaggtgctgatactataatggcactcgttcttccctacataccatggattaaaaatcataaaactaacatatataaattcaaggaaccataccttctcttaaatattcaaattctaacatc

SEQ ID NO: 69788 - DNA, 369 bp, Glycine max
tcaacaccttttattcaattgataccctctttccaaccacgatgagcttcaatcctgcaccttgcatcctatccttttcaataattgaatactccctaaaaatatatgttcatttttctaattaaatcttcctacaataattattgtcaacttcttacacaaacaaatgaaatagcaattattgatggaaaattctcactctttacaatgtattttatatatcaaaacccatttctatctcacttcacacattttacattcttttttttcttagaactttctctccccaacagtttcataacaatttccaattcccattattcttcaaaactatttcacatctatcttttttataccaatttcataaaa

SEQ ID NO: 69789 - DNA, 296 bp, Glycine max
tgtacgctacatgatctcaacctgcttattcttttgagatcaccaacttcaaaatgcgggtgctgctacttgtgtggcacttgttcttcccaatttatgattgattatttctcataaatctattaagtatgtcttaaatgatacataccttctttaaaggagtcaatttctaacatctgaaaaagcatacgtattatgacttactgcatcaacattacttcttgatggatcccacaccaaagaattttcccatgctcttatgaataccataaggattgcatttcccaacgctcaat

SEQ ID NO: 69790 - DNA, 378 bp, Glycine max
tcaaatagggatcactttatttatattttctttttctttctcaaataaaaataattttttaaattcctaatattcaattaaataatttatcccattttaactttttccatatttcaaatgattaatctaattccattttccctttttattctcttaataaaatttttaaataattttttttctctttacttatatacctctaacttattccactttaattttattccatctttccatatatattcattttctacatttaatctcttatatttttcatattttttagccatatttttttattccattaaattttcccaatacatttttttcctcttttatcaaattttttaattcctaccaatcatttttattttttaa

SEQ ID NO: 69791 - DNA, 349 bp, Glycine max
  unsure (1)..(349): unsure at all n locations
cttcttctaccttattttctttccctagtctattagattcatctctccaccaanttggtggggaatataaaaaaggctgaacattttctgcattcatgctaaatatttatgttgtccaacaatttcaatcattccacttaaattcccctcaatttaaatatcatcttttttacatctctaaattcattattgcaacattgaacaattaccaacttccctatctattatccacacccttattaattttttaaacaatttcttgtccagaaccttttcttcaacacttattttaaaaaacatttcttttatgcccacataattttcttattcctcaacatccctacaaaaa

SEQ ID NO: 69792 - DNA, 208 bp, Glycine max
attccctgttcgaccgactcttcctcccactcttccttttattacatttattgatttttattcacttgatctcatcataatcgttggcttctatagaagaagatgccactcacacccatctccttcttatctccttacttaccaactcacccatacacatctaatactcctttttcttatttcatctcatccctctatcttcatattc

SEQ ID NO: 69793 - DNA, 187 bp, Glycine max
ccactcttacttactatccattatttttttttattctttcgttcctttcaataaacgataatctttctaatcaagaaaggtgaattcaccatctatttttatattcattataatccttcaatattattaataacttcataatacacttatttatttattcaatctacaattttaaatttaaattact

SEQ ID NO: 69794 - DNA, 397 bp, Glycine max
cccacgcgtccggtgatttcagtgagtgatcggtgttcacttgatctcatcataatcgtcagcgtcaattgaagaagatgccgatcagaaacatcgccgtcggaaggcctgaagaggcgactcaccccgacacgttgaaggcggctttggctgagttcatctcaaccttcatcttcgtgttcgccggctcaggctccggcatcgcctacaacaagctcaccgacaacggcgctgccacccctgccggcctcatctccgcctccatcgcccatgcattcgccctcttcgtcgccgtctccgtcggcgccaacatctccggcggccacgtcaaccccgccgtcaccttcggcgccttcgtcggcggcaacatcaccttcctccgcggcatcgtctacgt

SEQ ID NO: 69795 - DNA, 306 bp, Glycine max
gacactccggcttctcttatgtttaattcatgcgatcaatttccatgttgtgactttatcttccaggccggttcaaatatgccagactgaaaaaactctcacttttaaaattatttcaatgtttcaagaataatgcattcctatatctttcttcaacatgattactaactcatcatttctatttctagcaatttcaatcaacttatattatattacgtattctctcctactaatatctcctgaatacattactaaatactcaaacatcacatatataatctactcaccaaccataaataaatcata

SEQ ID NO: 69796 - DNA, 428 bp, Glycine max
  unsure (1)..(428): unsure at all n locations
ccatttcttctattttcctattatttacttttttttctctaccctgctttatacctcatctgagcgggggtcataagtcaggagaagaacacaantattcataactatcaatctctgaattttctggaaatggtactttgatactatcttctgctatcacatttgccaatacttttctcttatttttttctgctgaattattcgacaagtcatttttttccacaatttcccttacaacatctttcttcttcccttgtagtcatatctgcatcacttgctgttcattttattgcaacttttcttcctttacttgggggttctttactcgtgacatattttttataaaaagttattacctacatctcaagttttctctttctcttctattccgcaattacctcattttaaattgtccaatatgccttaaa

SEQ ID NO: 69797 - DNA, 389 bp, Glycine max
attatttctcttttcctatctttttaccgttttatctttaccctactgtattcctcatctagcggggtcctaataagtgatgaagagcataaccttccttatctttcattttcttaattttctgaaaattattcttctatactatctgcttctatcacaatttccaattcttttctcttatctttttttactaaatttatccactagtcatttttcttcacaatttcccttgcatcttctttattctcctttataatctatacttaatcacattcttttcattttttttcaacatttctaatctttcttattatgtctttactttctacatatttttctaaaaaatttatttatctaacattaaagttttctcttttcttattttttcc

SEQ ID NO: 69798 - DNA, 109 bp, Glycine max
ctttctcctagaacaaaaaataaaacgtgattcgctcttatcttctaataaaccacaaaaccaacgggcgggaacatgatttagagaagatggggttgtcgttcacgaa

SEQ ID NO: 69799 - DNA, 297 bp, Glycine max
  unsure (1)..(297): unsure at all n locations
ggaaagccagggaaaacaangagcaccgaacgacgcggaagacggaggaacacacggaagggaaacaagcaaggacggaagagcgaagcgcggacgcaagcaaggacagcaagacgaaaaccagcacagcggacgaagangccaaagaaaaacagggaccagaagcaacagaagcaggagaagagagcgaccaaagccgggagcaggaaaaggcaacccagcgacgagcaaagccccgacaagaacagaagggacaaccaaccacaaagaccccaaagcaagcaggaaacacgaaca

SEQ ID NO: 69800 - DNA, 162 bp, Glycine max
  unsure (1)..(162): unsure at all n locations
gcaaaagcacaagagangggaagcaggaaggaaggagaacccaaccacggaaaggaaagagcaagacgggcacacacggcaagaaaagggaagaagagccacaacncagacaagccaaagcaaccacagagaggacacggagacgcacaagaggagaaaaac

SEQ ID NO: 69801 - DNA, 330 bp, Glycine max
cgcgtcgctgctccgtaccagtttcactgcataaatttgagagataactctgcaaacatcgtggtttatcatgacctgctggatgtgataagcttctttcgtacttctttcgttacaatgttatttttaatttaatgctgttactttgtttatttttattcaattttatttttatttttttttttattcattcttttattttcttttattatttttttttttttttttttttatttatatttttttttatttatttattattttttcttttatttttattctttttttttttatattttattcttttctatttttatatttttttatttt

SEQ ID NO: 69802 - DNA, 446 bp, Glycine max
cttcctctctctcttctcttctgctttacttgctctgaaccaaatggccaaagcccttagcatcgagtgctggctctttctccttcgagcgtgtgagtaatagttattgcttgtacatcttgatacttgaacactcttccacctctcttactcctcactcctcaaccctgattcacgtcccaccacactcaaccaccatcttcatcccacacaccaacatgcatactcatcccacatccaccactcaccaccatccaccaccactacatcacccagcaccatgtatccttcaccttcatcaccacaatcacacctactactcctacccctgctaatcctactactcaccatcatcaccatcaccctcctgctcctgctaatgcaactcctgctcctgttcatcctccatctaaacctactgtttctgttcaccctccaactaaacc

SEQ ID NO: 69803 - DNA, 287 bp, Glycine max
agacccacgcgtacgattccaaatctgatcttcaacgattgatctacttagattgctacagcactctacaatctgcaaaagggcgtggctgactctaaatggagcgcaagcttacgcaaagatcatagagagtgaactgtgaacatctgcatccaacagagccatggattcatgcctgagtaatactctacaactgtctgcatctggaactaccaatctcataccatggacaaatcttttgaggttaccgagatactagatcgatcggacatgtttattgaactcat

SEQ ID NO: 69804 - DNA, 153 bp, Glycine max
acccacgcgtacgcccacgctctcaatctcattaattagtctattgaattatcaattgctcacttatcaaatgggaatgggtacactttatcgcacttcggctaaccaacctcatagccaacatactgactcttcttctacctttatcaatac

SEQ ID NO: 69805 - DNA, 266 bp, Glycine max
cttatcatacaatcgtttgctttatttcaaggcataagtttaataactaaatgatgtgagttttctattcagatgtggttacatccctatttttaaaattctatttactaacttatttaatttcatttaactttataatatcataaattctttataatctacaaatttcatttcatctaattaaatatctatttcttcattcttaaatcatccttttatcttctttatactttcaactatcctatctacacttattaccattttta

SEQ ID NO: 69806 - DNA, 54 bp, Glycine max
gaccccgcggactatacattcctataactatatctacaacatatcatactacta

SEQ ID NO: 69807 - DNA, 477 bp, Glycine max
cgactcacgcgttctaaaaaaagtcagaataaaattaatttgatttttaagttaagggttgcccatctatctatatgcttgggtcattcttcatatatggaatggttcttcataattcctattacccctatttttatgtgccactttcacattttgcatatttatatttttcttttaacattttttatctattattgtttctattttatatctatttttcttttctcaaattcactttctcttttcttttacttatcttttcttcttcctatttataatcatatttctcttatttttattatttcttctattttctttctttatctattattattatttcttttttttttatttcttctattttttattttttttcttattctttttacttttttttttttttttttactttttatttttttttttttatttatttctttttcatttactcttttatttttatttattttttttttt

SEQ ID NO: 69808 - DNA, 358 bp, Glycine max
tcccaagtcgacccgcgcgtgcgcgtaacttacatgatgtgaagttgcaaatgctatggagttcaccttcttcataatgcagctactgctactggcgtggcacttgaacttggcaagagatgacgtaatatttccgatcaatatattatctatggataagagtatacatactttcttggcattgagttattctcttacatctgtaaaagctgttgtattaagacttactttatcaacagaactgattgatctagtccacaccaatgaatcttccaaagctcttatgaattccatactgatatgcatgtcaaaaggcttaatatcaccttgtttttgcactaacaagtgacaaagatca

SEQ ID NO: 69809 - DNA, 80 bp, Glycine max
aaaaaaaaaaaaaaaaaaaaaaaaaaaaaattaaaaaaaaaaaaaaaaaaagaaaaaaaaagaaaaaaaaaaaaaaaaaa

SEQ ID NO: 69810 - DNA, 200 bp, Glycine max
aaattttaaatgggcctttaacactctaaaatattttattcttatcatatattactttttacttataataatatttatatattcatattcccatacatataaattatatattaacaaaaaaaatcttttattacttttttaaaaaaaagtataaatccatttttttgtagtaaaaatactattccaattataataataag

SEQ ID NO: 69811 - DNA, 229 bp, Glycine max
actactacaacatgtagtattttttgatagaataaaaatctctcaaaaaaaactcgaaaatattttaatcataacttaaaggatttgttacgtacaaaaataaagatagattcatattcccatacatataaattatatatgaacaaaaaaaatcttatattactttttgaaaaaaaagtataaatccattttttttgagtaaaaatactattccaattataataataat

SEQ ID NO: 69812 - DNA, 318 bp, Glycine max
tacaaaatcaaggattttttgatatattttaataccctcaaaaaaaactctaaaatattttaatcataactaatacaattatttacctataaaaataaatatatattcatattcccatacatataaattatatatcaacaaaaaaaatcttatattactttttaaaaaaaaattataaatccattttttttaattaaaaatactattccaattataataataataaaaaaaaaataatattacataccttctatataatccaaacttacctactcattcatactacataataacacttatataatacacacctaatat

SEQ ID NO: 69813 - DNA, 325 bp, Glycine max
ccttattacctcctacctcgaatccttgaaacatactttacacttacccaaaaccctaatctcttccatcttacatatcacctcacactttacaccctacaactaactcccaacttactaaaaactattttctccaaactccaaatgcttctcctacctcaacctcaaatccctaaccctaaccaaaacatactcatattcatcttaaccctcatccaccactaccactacactatcattatttactaatcccataccaatcctattccttctactattataatatcatatctcttcctcacttatacccacctacttcaacttt

SEQ ID NO: 69814 - DNA, 429 bp, Glycine max
cccacgcgtccgcccacgcgtccgcccacgcttccggcggctagggttttagcgcagcttcttctagatgtaaggaagatgggtaaggaaaaggttcacatcagtattgtggtcattggccatgtcgactctgggaaatccactaccactggtcacctgatttacaagcttggaggcattgacaagcgtgttattgagaggtttgagaaggaagctgctgagatgaacaagaggtctttcaagtatgcctgggtgctggacaaacttaaggctgagcgtgaaagaggaatcaccattgatattgctttgtggaagtttgaaacaacaaagtattattgcacagttattgatgcgcctggacatagggatttcaaaattttttaaaaaaagggggaaaaaaaattttttaaaattttgattactgggaca

SEQ ID NO: 69815 - DNA, 183 bp, Glycine max
aaaaaaacaccacaagacccaaaacccaacacacacaaaaccaaacacacaaaaaaaaaaaccacaacacatacccacacacacaacaaacatacaaacaaaaaaaagctaacaataccattaaaaaaaaaatataaaaccacattttcaaaatcaaaataccattcccactataacaatacc

SEQ ID NO: 69816 - DNA, 264 bp, Glycine max
gacgcacgcgtcccgagcctccctcaacttttccccaatttaccatactcaacaggaacactgcaaatctcatgtgactgaaacctcttagactgatactgatccttctccatcttctgatcaagtaatcatagatatgtcacactgacataatatttctacaaacaacgaatgaatgtgaaatatgatttaataaacatgctcgatcatattcattaaactagcaacacaatttcactactagtagctataactttcaattac

SEQ ID NO: 69817 - DNA, 80 bp, Glycine max
aaaagaaaaaaaaaaaaaaaaaaaaaaaaatttaaaaaaaaaaaaaaaaaaaaaaaaaaaaaagaaaaaagaaaaaaaaa

SEQ ID NO: 69818 - DNA, 81 bp, Glycine max
ggggtcgttctggaggatccaagcttattttcgcgtgtattcgacgtcataactctgggatagtggggcctaaattcaatt

SEQ ID NO: 69819 - DNA, 254 bp, Glycine max
tactacatcatcaggatatatgaaaaacttcatactgccccttctacaattttcaaatcccatctcattatctcttcattcccactaacactaatcctatctccttcaacaaaacaactacaatccactcacctactttccctccctctctcacacctctaccaatcccaaaaataataatacccatacctactccctcacctaattcaccttcaaaccctacacctcctttacctaccaatatcccttcttcc

SEQ ID NO: 69820 - DNA, 246 bp, Glycine max
aaaatttacacatctaaggagaaaattcacaaagattatgattcttaaccaactgaattttatgaatcaatttgacaagcattttttgatctaaaaaataccaaccattaacttaaaaatgatcttaaaaatttattcctaaacttaactttccaaatttatttttttggcaacccaaaagcttttgttattcatattccctacaaactaatgaaaagatttccgaaaaattaatttaagcttttt

SEQ ID NO: 69821 - DNA, 267 bp, Glycine max
cacaaccaagaagaaaaaacacaaagcaaaagagacccaaccaacccaaaaacaagaaacaacaaaaccagcaaaacacaaaccaaaaaaaaccaacaaacaacccaaaaaagaacccaaaaaaacagacacaaacccaaccgaccaaaaaaaaacaccaaacaacccaaaaaccaaagaaaaccacaacccccacagaccaaaaaaaggacacccaaaaacacaaaccaaacacagaaaaaaacccaacaaaaaaaacaaagcaaa

SEQ ID NO: 69822 - DNA, 369 bp, Glycine max
ttacacatctataaataaaatttacaaatataaatattctaatccaacttaatttaatgaatcaattttacattcatctttttatctataaaataccaacaattaactcaaaatctatcttaaatatttattcataaactcaactatccaaattgatctttcttacaacctaatatcttttattatccattttccctacatactaattaaaatattccttaatattcattttatactttttatataactttataaaaaatttaatttaaaatatctaatctttaattaccaccaatttattaataacttttttaaaaatttttaatatttttttttttaattaatgttcaccaaataaattttcttcta

SEQ ID NO: 69823 - DNA, 360 bp, Glycine max
taaagaatgcaatcacaacaaatgattcataaacccttggtgtcattctgcaagcaaaagataaattttagattatttacttataatatttttaaagtctgaaaaaacttgttctatgtatggtaaggtattaatccatcccttgcataaaatatgcttgattctatgttcttaatattatttcataaattttgttttcattttggaaggtcttttaaaaaaaaaaaaaagagcctgtctttctaaaagatccaatcttacctacccctgcattcccaactcatatactttttctataaatttatgatttttttctcaaaaattcttcccctttttaaaaaaaaaaaaatttaaatttac

SEQ ID NO: 69824 - DNA, 256 bp, Glycine max
catccagcggggcaatccgcaaccactaaagagtgcaagcacagcaaatgatgcataagcccttggtgtcatccggcaagcaaaggataaattctagattattaacttataatattttgaaagcctgaagaaactcgttctatgaatggaatggtactgaatccatccatcgcataaaatgtactagatgctatgatctcaatatgatctcagaaattttgtttacattagcaatggacccgaaaaaaaaaaatat

SEQ ID NO: 69825 - DNA, 250 bp, Glycine max
ctccccaactttccatttttttctattctcatcaaattttaattcatcccacttactcattaacatttaatttaaattccaaaaaacatacttctcccactatacttttacataacttctactacagactatcctatcttatttcttcctacatctattttccttaaatccattaccatatcaccactcaccactatacatctctaatctctatatttatctcaaatataatattcaaaactaaaacaaa

SEQ ID NO: 69826 - DNA, 252 bp, Glycine max
aaagggccttgtcgaccacactcaaaattaaattacataattttatcataaaagcacaaaaagacgtaacatggggaataataaaacattttcaagtcatatttgcacactagattaaaggctttcaacccttgttactaatgcgtgtggttctaatacctttcctttgcgtaaaaacaactcccgaactattcacacttaaagttcttctaccataccttttcaattctcccgactcttacctcaaataaa

SEQ ID NO: 69827 - DNA, 311 bp, Glycine max
gctgagcgcactacgcactaaagactagcgatcattgtttgatactagcaccttttaacaggaacatgtaacataaaaagggtgacggaaagaaaaccatatcaaacccaacccaccttgtcctatctgccaccatgtgttgatgttgtgactcgaatggatgcacatacatgttacagtggcagtgctttatcatctgcaccaatgaaacaatatttacaccatttctcgaaactgattcagtactatctggataaatccactccacattccacgttcagatagattgagacttacgcgatagcattcat

SEQ ID NO: 69828 - DNA, 127 bp, Glycine max
  unsure (1)..(127): unsure at all n locations
catgtctagcgccgtgggccagaccattgggtgctgggtgtgcnantgcatgtgggtgtgagaagccgctgtgggttgaagaagtggaggttgcgccaccgcaagctggtgttgtgcgtttgaagat

SEQ ID NO: 69829 - DNA, 447 bp, Glycine max
ctccttcttctctctcttctctaacttcttaatcatgccaaaccttacatcagtgctctttaactctggagcggtactaatatttactatcatcttaacttctactctttcaccctcttaccctaccctaccctgtcactcctccacaccacacatcttactcaccatcaaattctctacccacactacaccataccaccaccacccttcacacctcacctataccttaccttctaccacattaccctttacccctcccatctaatcctcctactaccatcataccatcaccctacttctcctataatccacctcctctttcgaatcatcctccatataaacctcctgtttcatatcaccctccagttaaacctcctatttcatcttaccctccttttaaacctccttttattacggttcaccctccttttaaacctcctaattttc

SEQ ID NO: 69830 - DNA, 293 bp, Glycine max
  unsure (1)..(293): unsure at all n locations
cgtctcgcccacgtcgtctcgtcccacgtccgtctcgtagaagccccagttnntttctggtgcctatgcatagctacannccttcacagagacccgcaagatagaatgggaaccgtgggaagaagtaagccagctcttattggtccctttatgtcctnncaactgtcccttggttttcttccagcttttggttctgtctctttcaggatctgctgaggcctacaagtaattataccagttggagacctcgtttaggatggtttgacaatactgaganagtccaatgtcaatta

SEQ ID NO: 69831 - DNA, 86 bp, Glycine max
cccacgcgtccgaaaaaaaaaaaaaaaaaaagaaaaaaaaaaaaaaaaaaaaaaaaaaaaaacccacgcgtccgcccacgcgtccg

SEQ ID NO: 69832 - DNA, 180 bp, Glycine max
cttatgcttccgaatcgcgttacattattctctacaccttaatgctgctcaaccttatatcaaggcgatgcgagatcaagacgggcacggagatcattcaccttaacgtgtatcatctgatcccaattaacctgttttcatattggctctctcttgcattctactactctagacttcaag

SEQ ID NO: 69833 - DNA, 293 bp, Glycine max
acgtccatgctttcgtcaagcattacattcttctctacatcttaatgctgctcaaccttatatcaaaggtacagctaaacaatactggctgggttaccattcaccttatcttctatcatctgaccacaatcaacgtctatacatattttctcttccttgcaatttaccactcttatcatcaagtacatctatttaaatacaattaaggcacactctatcactacacaaccatatattttaaaagatcatcccaaacacttcccttcccttactctatcattgtcaatatttat

SEQ ID NO: 69834 - DNA, 236 bp, Glycine max
agcgcccacgcgtccgggagagacagagggagcaaaagcaagaggcgccgaggagagaggagaaccacgaaggggggaagagagttaggttaagggaagaggagaggtaggagagagcgcagatgtaccaagagaggggcagctaggccagaaggagcaaaatgcggagggtagtgagccgcagcagtccagagccagagcccgaggcagcggcccaagaggcagagaggttctac

SEQ ID NO: 69835 - DNA, 190 bp, Glycine max
acgcccacgcttgcgaccacgcgtccgcactatactctatctataaatatttactcacccgctaggggttccttttcaaaggaagcttaacttaccaacctaattttggaattccattgaatgttcctgtatttaagaatattattttattaaataatgatattattattaccaagcctaagcccctttt

SEQ ID NO: 69836 - DNA, 98 bp, Glycine max
ttagcacatggtagatacaggctcctaatgttcttacagtaccttacaagatatttatgtgcgtgacttgttagaagaagcaacactcttattcacaa

SEQ ID NO: 69837 - DNA, 121 bp, Glycine max
attagtcggtcctcgacttctcagcactgtctgttttagcagctgattctgggtcgttggagtaaacgtgtcatcgcgtctggactcaactacttagtccctcgattgaatatcttgatta

SEQ ID NO: 69838 - DNA, 187 bp, Glycine max
ttttgattatctgcaaccgtatttttgagattagtgtattaacttaccgatggtttattggattatgttatcactgatgcatgctttgctgtctatgttaatcgtctctgttgtagaacttgcaaatgtcatatattatccataattactatacacatatactagtggattttatatgatattaaat

SEQ ID NO: 69839 - DNA, 169 bp, Glycine max
tcatactaccactctttctccaacttcaccatttctcttcatctatcctactatattactatcctacgttactatataaaaatacgagttcactataataatatttcataaacccattatccttccataattcatttcactaatcattctcatcaacttatattactac

SEQ ID NO: 69840 - DNA, 115 bp, Glycine max
ctttctcctattactatccttttctttctttccatctattcatattcttcgttttctgtgaaaccagggtagacccttattacatttctccacacctgcctcagaacaagattat

SEQ ID NO: 69841 - DNA, 104 bp, Glycine max
  unsure (1)..(104): unsure at all n locations
gaagttgcgagagtgaagaaatggcgcaagacttggcattggatttggaggagcttcgccgncttcacagcatcgccaaaagacctcgaaccctctctcttctc

SEQ ID NO: 69842 - DNA, 241 bp, Glycine max
cttttcaggacgcgagcgtccactcatacactgattttatctatacataacaagatattggggattggctacactgcgattgtggtgctaaatgcatttttaatctcacgcatcgtcttcaaaacaccactgagaaaacatcttcatttatccctctatagtgtgaattatctgtttctcatccctcgtgagtttcaccttttgctccacatctatagtggatcttacttcaagcctctac

SEQ ID NO: 69843 - DNA, 134 bp, Glycine max
tcgctcacgcgtctcgtctactcgtccgttgatagtagctatatcctacaagatgttggagctaggctacactgcgattttctgcgaaacgcattttatctctaacgctcgccttcaaaacctgactgagaaaa

SEQ ID NO: 69844 - DNA, 402 bp, Glycine max
cccacgcgtccgcccacgcgttcggaagaatggaatataccttacggatggtggaatcaggaatcatttgggattgcgtagtgctggtggtgactaatatggaagacatatagagtgagagagagaaaaatctttgctttatgtcaattgcactaatcaggggtttttacagaagtgagcaacgacgctagatatgagtaaagtgagtttatttggggtcatatttgtaaaaagtggttttgtaattataccctttaaatttagagtgaataaacaatgttgggatggaaatatatatagttacaatttggtttcttattgttggtttactccttttgccttattttttaatttataatttgttttatattttattatattttgttttaatttgttaccttt

SEQ ID NO: 69845 - DNA, 382 bp, Glycine max
ttcacgcgtccgcccacgcgttttgaagataggaatataccttacagatgggggaatcaggaatcatttgggattgcatagtgcttttggtgacgaatatggatgacatagatagtgagagtgagaataaatctttgttttatgtcaatggcacgaatcattggtttttacagaagtgagcaacttactcctgatatgagataagtgagtttatttggggtcattattttaataagtggttatagtaattatactctataatttaagagttgaataaacatggtttgtaattgaaatatttaatagttcaaatttggtcctaattagttgtttaacacttttgacctcttttttctaattcataatttatatttataatata

SEQ ID NO: 69846 - DNA, 231 bp, Glycine max
tcttccacgcttccgtccactctttctctccatatagaataagaaactttattgatcatcactgtactttactaatacattgattcatactatacccatatcaattattattatctttttattttatgtccaagatcttagttttttttactttttttgtataaataatattaatattactagccttattcttattattatgtatctcctcctattttcaaaaatttactt

SEQ ID NO: 69847 - DNA, 76 bp, Glycine max
actatttctgctgtttgcctatttatttcttttatgtctctacccttctgtatgccttatcggtctatttccaaaa

SEQ ID NO: 69848 - DNA, 240 bp, Glycine max
tcctaccattccagatccccatctataactataccatttaatctttatcttcttgccctccggcccggtaaaaaaccaaaaccgggattatctacccaccgacgcacttatataaccaaattcaacacatttaacaagttcttatattctatattttcctaccacaatcaacatttactttttgtccaccacttttttttaaccctattacaacctatatgtcttcaaaaacaacctttc

SEQ ID NO: 69849 - DNA, 91 bp, Glycine max
tatcgacaattattttatacaccatcttattttatattcataattttcctttcaatatttattaattaacttttaattacactttttttta

SEQ ID NO: 69850 - DNA, 212 bp, Glycine max
tcgcccacgcgtccgtacagtccaagatatatggacaatggtaccgtactggcacaacgccatgatctatctgatcatcggagggttgatacaccatcgatgttgacatttatgatcgaccctacaatgtattactaactgaacttacactgagttgatttatgcactccacattggcgattggaaatgctgtaccgccattgtgttaaatg

SEQ ID NO: 69851 - DNA, 272 bp, Glycine max
acgtgaatgtgtgatgatttattaatttctttctctgtgacttggcttgttgtcattctgaatgctgctgctaatacatgcgttgttggagttcaattggttgctttgctgcctctttttttgcacttactttttatacttatttccatcaacttgatttgtagttatctctttcagtttaattcccctcaatgcttcaattgtatttactgttagagtttaattcatattcactaactatgatgaaaatcttatcataaattatccattat

SEQ ID NO: 69852 - DNA, 392 bp, Glycine max
gagaaaagcgtgtcgaatggatttcacggagaaggatctattcggcgaagattgcgacaacgacaacgggtcccactcctccggttcctcttcttcttcctccgccgcttcctcttcctcatcatcctccgcctcctcttccgcctcttcctccaaagccagcgcaagcagcggcgccgaaaacgacgacgagaatggcgacgtcgtagatagcaccaaagtccgcgcccatcaccatcacgactacgaagacaaagatctgtttggctccgataatgaagattactgtaaaaccctcgctagaagtccttaccccattcctgtattgcctgccatccgcaatgtgcataatcagggtagaggggggtttggcccgtgtcgtgggcaaatga

SEQ ID NO: 69853 - DNA, 171 bp, Glycine max
ccgggccgacaccacgcgtcctcccacacatccttccacacgttttttgatttaagctagttatatcaatatattgcaacttgtctacactgggatgttctcccaaatgcttctgattctcacactcgtcttcaaaaccccacttataaaactcatcattttttccctcta

SEQ ID NO: 69854 - DNA, 365 bp, Glycine max
cccacgcgttcgccacccttacagtttctgttcgagtatcctactacataacaattcatcgtgcctacataaagggatgacttcatgaaaatattcttgtgttgatcacatttccaagccattattcatttgcttaattatgcacataaacaaatatatcactgctatactccacatatatatcatagtatgaatccaatcccattgaccctcatgatacactaatctaactttgccgttgattcaattcttacatctggatactttcatcttataccactataattaatccaagcttacctaacaactatattcaacatcttattcatcatcttcttctagtcttttctatcattcgaattcta

SEQ ID NO: 69855 - DNA, 121 bp, Glycine max
cccacgcgtccgccacgcgtccggtttctggtggaggatccaacttcagagcaattcatggggccttcaaaaggggatcacttcatggagatgttcttgtgttggtcacaaattaaaatga

SEQ ID NO: 69856 - DNA, 52 bp, Glycine max
acgaccactccttctcccactcttcctctccatttacaatatcaaacttaat

SEQ ID NO: 69857 - DNA, 144 bp, Glycine max
acgcgtccggaagttgctagagtgaagaaatggcacatgtacttggcattggatttggaggagcttcgccggcttcacagcatcgccggaagacctctaaccctatctcttctctcctccgaaattcgtaacctctaaaagtta

SEQ ID NO: 69858 - DNA, 432 bp, Glycine max
cccacgcgtccgcccacgcgtccgctccttgaagctgattagaccaagacgatcatcatagtacacaattcatacatcatggcagtcctgaccattatcacgcatgacagctctgccgttgtgggacaacttcgcagcgtttctgtctatagcgtgaagagcgatcatgagtaccacggtggcttatcactcgcgagcgcggcattgatggcggttctcactacgagcctgtataacacggacgagagcccgcgccgcacctttgaggccagcataaccgatctgaccgaccatgtcgttatgtacgtgcgcatgctggaagctactgtcatggtatgaatgctattactctctatgatgattgactgattgagccattacatgagaaaacttaggtcactcaagatgaccatgggaactattcacaaacat

SEQ ID NO: 69859 - DNA, 74 bp, Glycine max
gctctagaggatccacgcttacgtactcctgcatgccacggcatagctctactatagggggacctagacacaat

SEQ ID NO: 69860 - DNA, 224 bp, Glycine max
acgctagagaattatcatacctcttcattatgatatcctacctactttcaatattcggattatggcttatacttgtggaccaatccatttcagctatttgctgcttataaatattaattgtctaagaaacaaatttatagtagttctatacaatcacccgatcatcaatcttccttcatataaactgattaagttgtatatacctcttaatgcactgtattatc

SEQ ID NO: 69861 - DNA, 435 bp, Glycine max
cccacgcgtccgcccacgcgtccgctccagagagaagaagaaacttaatcgatcatcactgcacttcactaatacatcatggcagacgagacccagaacaagtatgagagctctgaggttgaggtccaggatcgtggtgtttttgactttctcggtaagaaaaaggatgaagaagacaagcctcatcctcaggaggaggtcatcgccaccgagtttcaaaaagtcactgtctcagaccaaggagagaacaagcacagcctcttagaaaagcttcaccgatctgacagcagctctagctcttcaagtgaggaggaaggagaagatggagagaaaaggaagaagaagaagaaggaaaagaaagggctgaaagagaagatcgaggagaaaatagagggtgatcatcatcatcacaaggatgaggacacaagtgtccct

SEQ ID NO: 69862 - DNA, 259 bp, Glycine max
cccacgcgtcctcccacgcgtccggaagattggaatataccttacggatggtggaatcaggaatcagttataattgcgtagtgcgggtgttgactaatatggaatacaaagatagtgagagagagaaaaatcttcgctttatgtcaatggcacgaatcattggtttttacagaagttagcaacgactccatatattaaaaatgtgattttattttgattcatattttgaaaaagtgtttttgtaattatactctcttat

SEQ ID NO: 69863 - DNA, 184 bp, Glycine max
  unsure (1)..(184): unsure at all n locations
caagttcccagagttaagaaatggcgcatgacttggcattggatttggaggagctatgcgacctncgcatcatctccggaagacgctcaaccctatctcttctctcctacgaaattcgtatcctcgcaaagttatcgccagaggtagcttctgcgcacattcctgcgcctatttcaaccgtctc

SEQ ID NO: 69864 - DNA, 313 bp, Glycine max
  unsure (1)..(313): unsure at all n locations
ggccggccgacgcgtacncttgattatcccaacactttctcttacagtattcacatnatgcttaatcttgggctgagcggtgattatgatgctggtgaaacacattcttacatgcctcctcttgaggactcttatgcaaattctgatggtaccaagatggaataaattgattaaatctgacttaattgcctgttacttttttataaacaatgattgtataaacactctttttactnatgtttatgttttatgaattttccaaattttgaactttggctaattatgtgccgtaatttaatactttctttattgg

SEQ ID NO: 69865 - DNA, 312 bp, Glycine max
cacgaatcccacgccactcgcaattacatttcggagttagaatctctgcttacccctttcgggcctcttccgaatggataatgagtcgatcgacccatctcgcgcttccaatgacagccgctaccgacgacaataacaaccctgcacaggataaccctaacaaaaccctagaccccgccgaaccggatcctatccctgccaccgaggacgaggccgacgacgacactaaggactacgacgcgcaaactatccctccgacctgattgtgaaacgacgcttcgctctgcgacaatcagaagaaaatgcgccgag

SEQ ID NO: 69866 - DNA, 64 bp, Glycine max
ccaaggttacttacgcttgcatgcaacagcatatctcttctatagtgggggctaaattcaattg

SEQ ID NO: 69867 - DNA, 312 bp, Glycine max
cccacgcgtccggtgatttcagtgagtgatcggtgttcacttgatctcatcataatcgtcagcgtcaattgaagaagatgccgatcagaaacatcgccgtcggaaggcctgaagaggcgactcaccccgacacgttgaaggcggctttggctgagttcatctcaaccttcatcttcgtgttcgccggctcaggctccggcatcgcctacaacaagctcaccgacaacggcgctgccacccctgccggcctcatctccgcctccatcgcccatgcattcgccctcttcgtcgccgtctccgtcggcgccaaca

SEQ ID NO: 69868 - DNA, 121 bp, Glycine max
aaattaaaatctccacattcttgatttttttacttttgaacacacacaaacgttcagtgtttgaatttattacaccatcttcatttatttttctatataataacctaatttttcttatatt

SEQ ID NO: 69869 - DNA, 218 bp, Glycine max
caaccatgaccgactcataacaagaccttgttcaacttctcaacagacctttgggggattggcagaacttaaacctgaatcttcccttttcaagtgatgaagcaactgctaatatcaagaaagatagttcttatttgccgtcacgtgttcaaggattgggcatcggtttaccccatttgagaactaataaaaatgggaaacaaaaatctttaaaagac

SEQ ID NO: 69870 - DNA, 225 bp, Glycine max
  unsure (1)..(225): unsure at all n locations
nntaagttacattacgagaatttgcttatacttcatagatcaccaacttccaagtgcaactgctcctactctagaccctcttcttcttcgcacaccggctgaaaacaagatgatagatctattaggcatggtttacacgatacataccttcttggcatgcatcaatttccaacatccgaagaagctgatgaattacgactcattggacattgctcgctcgatgag

SEQ ID NO: 69871 - DNA, 194 bp, Glycine max
  unsure (1)..(194): unsure at all n locations
actctttctcctcttacgagccttttctttcagtccattgattcnntnnnttcggtgtcatcggaacctagctggaccctgatcttcttcttcacaccgccctagaacaagatgattgtctgcgttgcctttctcggtcaccataacaatcccctgttcatacagaactttacggaagccgatgattctcttaa

SEQ ID NO: 69872 - DNA, 407 bp, Glycine max
  unsure (1)..(407): unsure at all n locations
ccgtcgcgcatgagtttgagggtggactctgtctcaagctactcctcttaacctttgggttgattcaactaacgtcatggcgcaggttgcaatgcagctgttagtcaacgcgcgcaccactatggcccttccttaaatgtcatnnntctacatttgtggcacctacntnntgttctcaatctagtacaatgatagggattggaggcttcttgggttgtcactatgcatttattaannntatgaaaaagggttggattggtatatatacttggatgcacatctgcactagtaggggcacacgggattgtttaattcatctgtctggattttattattgcgatgtggatctgcagatttgttcttccttctggcctgctttcccaaagtagtgtactcattcaaggtat

SEQ ID NO: 69873 - DNA, 296 bp, Glycine max
ttcctcctctttcaaaccttttacttaaattaacataaatcctcatatcgacggtaaaagggaaaaatagaacattttttagtcatattttcacactttattaaagacattatttccttgttacagatgcatggtgagctaatacattccctgttcttatatacaattccccatccattcacacttaaagttcttagaccacaccttaataattttcccgacgcttttcttaaataaaatattatggctaattctttcattttccttttatgtaagacgcactttagattccctta

SEQ ID NO: 69874 - DNA, 167 bp, Glycine max
  unsure (1)..(167): unsure at all n locations
cggaatngccggaggcgcgcactcgatcataccaacactattctgtctcaacgattcacattatgctgaaacttcaactgagcgtggatggggatnctggtgattggatatcctgacatacattctcttgaggacgctaatacagattctgaaagtagcatgatgga

SEQ ID NO: 69875 - DNA, 52 bp, Glycine max
ttcttttattttattactttttttatttttttttatttttattttttttttt

SEQ ID NO: 69876 - DNA, 65 bp, Glycine max
cgcgtcgctgctccgtaccagtttcactgcttaaatttgagagaaaactctgcaaacatgggggt

SEQ ID NO: 69877 - DNA, 349 bp, Glycine max
tcagattcataatattatctctttttcgttttctctacgttttcactatttctgctaatcgtaaaattaaaaaactcaatggcctacacaattatcctccaacatcttacattacctttcctattttttcttaaaatatattccatttacaatctacaaatatatcttttccatacataccctattcaaaataatttcattctaattaccattcattatccttcacattattcctttaatccacccaatatttcattcaacacaatattttttcacccatatatatatatcaattttatcattttcctttatatatttaactatcaattctatcctctctataaccatt

SEQ ID NO: 69878 - DNA, 248 bp, Glycine max
  unsure (1)..(248): unsure at all n locations
aaacacccttgtcnaccacttcaaaancaataacataaaaaaacataaaaagacattttagcataatttttggcccctaaaacattttaaaatcatattctcacactctattaaaaccctacttcccttattaccgatacctcatattccaataccttccctatacataaaaacaactccctaactaatcacacttaaaatacccaaaccacaccttaacaattatccccacactttcctcaaataaa

SEQ ID NO: 69879 - DNA, 299 bp, Glycine max
tccctaaagactcattatgaactatattaaccatccttaggagcaatatatccgtcctcttcaatttattatcacaaagtgtgttacatattataccatagtctttttatcattgttgattcccaacaactcactttatcctattaaagcatcatcaatcacattgttatcataatatcattcatcaattgaaaatcaattacatcatgcatatgctatcaagcaattatatagctttcttccaacaaatttcatgctacaaacactctacccatattaccattaaccttcaccttcac

SEQ ID NO: 69880 - DNA, 259 bp, Glycine max
cagtcttcatatctaaaaatgttttcacttttccatctcaccatatcttaacgtgctttgcaaaatattcaaaaacctctacatttttaaattaacattcatcttaattgccaaatacttctcattaatctataccattttattataacaatttactacaataatcaatcaaatatctttaataatgttcaaaatcaatccaaatctatcatattgccattacagctcttaaataaacttctaataatgttttcaccat

SEQ ID NO: 69881 - DNA, 370 bp, Glycine max
aatattcacattctagaagatcaacacttctctccctaaagactcattttgaactctataagccatcctaaataacaatatatccttactactcaatttattaccataatgtctccaacatattacaccataacctttccatcatctattacctccaacaacacaatttacccttttatagcatcaactatcacatggcaatcagaatatcatccatcaatttaatatcaatgacatcattcataatctatcaatcaaagatattacttacttcccatcaaatttcatgctacaaacaccttaccaatattaccatcaacctccaccttcactcaactcaattataacttcatgtgcaccttaatactac

SEQ ID NO: 69882 - DNA, 241 bp, Glycine max
acattatcaaccacccttacaaacactatatccttccactctaatatataaccactactcattcttatcattaacaccttctacttcaacacataaatttttcttacaacaccattaaccactccttatcatcttcaaacacaattccatcttaaaatcatacatataataacaatctctattctcaaccatatatcttcattcatattattccacacaatactaacaatacactaaccat

SEQ ID NO: 69883 - DNA, 428 bp, Glycine max
cacctttgttcactcttcttctcttgcggctagggttttagcgcagcttcttctagattgaaggaagatgggtaaggaaaaggttcacatcagtattgtggtcattggccatgtcgactctgggaaatccactaccactggtcacctgatttacaagcttggaggcattgacaagcgtgttattgagaggtttgagaaggaagctgctgagatgaacaagaggtctttcaagtatgcctgggtgctggacaaacttaaggctgagcgtgaaagaggaatcaccattgatattgctttgtggaagtttgaaacaacaaagtattattgcacagttattgatgcgcctggacatagggatttcattaagaatatgattactgggacatcccaagctgactgtgctgttcttatcattgattcgaccactg

SEQ ID NO: 69884 - DNA, 263 bp, Glycine max
gcaagcatgtccaccgcaacaactcacgtgttcgcttatcccttccctacctccggtcacggtatccttcgcttagacttcaccaaaaccctagtctctcgcggcttccatgtcaccagtctgttcacactctactacgaagccttactttcaaataactattctccttttctacaaacgcttttactacctccatcctcatcaacctaacccttagcaaaacagtctctaatttatggtaactttcattcaatactaacact

SEQ ID NO: 69885 - DNA, 274 bp, Glycine max
ctactattgaataatcaaaacgattttacccacttttcaaacatcaaaccaatagaacccttatgaaatctttccaaacattcaaatacttttctaatcttattcataatttacttcctatatttaattctttatccatctctcttaaaccaattattatcatatatctttttattatttttacaatctatttcctatacttttatatcaacaattattttcctcttcctactcacatcaaataacaataattataatcccaaaattttaacaa

SEQ ID NO: 69886 - DNA, 438 bp, Glycine max
  unsure (1)..(438): unsure at all n locations
tgttctctgaagggctttaacgngtttccctctgaaccctaatctagacccattcggcaattcccagggaatttccttgtaaaagaaagagcgaagaggaaaatgcagaatcacaggctgaagcagcagcagcagcagcaacaacaagctcttatgcagcaagctcttctccaacaacagtctctctaccaccctgaccttcttgctcctcctcagattgaaccatatccaagtggaaatttgcctcctggttttgatccaaatacttgccgcaatgtgtatgttgggaacatccgtacacaggtaactgagccgcttttgcaagaagttttctcggatactggcccagtttaaagttgtaagcttatcagaaaagataagtcatcctatggattcattcattactttgatcgcagatctgctgctcttgccatatta

SEQ ID NO: 69887 - DNA, 223 bp, Glycine max
ccccaactcctacccagttatgtctacccgctttcaggcactaggatattttaagctttttaaagtaaagaaaaaccataaaacttgcacaaaatcaaattgcagaccacctttaagaacaaagtgctcgatattgcgtcttcacaagattaaatgagctaatctaccaaaatctttaccatcaattcccaatgccaaaatatctgataactttaaatttaat

SEQ ID NO: 69888 - DNA, 245 bp, Glycine max
aaacactgccatcacggctattgcgaccatctaaacattcttcctttcaccttcgacacttgccaacagatctttagtttttaacacagatcctacaagttccacacatccttgatatccgaccacaccactacaaaacttttcacactcaaagcatgtttaatatacatctacactaccgtccatgttttactaaactaaaagtcaatcttgcataatcacctcatgtcttcattatataaccc

SEQ ID NO: 69889 - DNA, 256 bp, Glycine max
tattttatctcccctttcaaacccaaactccctaagctattctaagaacacttatcaaacattaaaggaacaaaatacaaaaccacacctaatagaacccaatccaaacattctcataaaaaaaaaggccccaccaccaagactttgaaacccacccgaaaaataaaccgatctaaagaacctaacaaaccaaaaacacctccaaatacaaccttccgtttcatgtaaacataatataatgatatctctaccaatc

SEQ ID NO: 69890 - DNA, 466 bp, Glycine max
tgaaagtgcaacacagaacaaatgcctcacctattttcatcggacttctattaccttatccagctccacttcataaccaaaatacctcgaaccctctctctaatctactcctaaatccgtaaccacaaaacataatcacacaaattaaattattccaaatatcccatcacaaactactaactaaattacccatatcatttcacttgcacttatcctatccatatcagattcacttatcctttccatatctactcattattactatcctgctcatattaatgtccaccctattcataatcactactaccctatccataatgcttaatactgttatcattacttttactatatccatacatacaacttatgtttcaaaaagtactactataacactaacaaaactttttctgcacaaactcaatataatactcaccattaataccattcaattctacttaaatattac

SEQ ID NO: 69891 - DNA, 324 bp, Glycine max
cacaggcttactgccactctttcaaatgacttttacgtgagccattcagtacttacaaacatgacgcagatagaggatacacgtgaccttaggctctcttatatccatctattcacacacttacactatataacacatcactatacaatgtacatcactcattacactaactcaatccttagactatgcaaattgtcatccatggcacacattgcttcatctgctatctgcagacttatactatgcccgcatgcataatgttattgcatcatctgcacacccttcctctgcttcaccaacacccacaaactatcatctatgtac

SEQ ID NO: 69892 - DNA, 315 bp, Glycine max
cccaggcttactgccactctttcaaatgacttataccttatccattgcctacttacaaacaggaggcttagtgacgttacaagggaccttaggctctcttatatccatccattcacacacttcctctatataacacatcactatacattttacatcactcattacactaactcaatcctcaatctatccaaattctacatccattgatgtcatcttcatgcatctgcttcctcctaacttatactattcccccatgcttaatcttattcccttatctccacaccctccctttccttcaccatcaccctcaaacta

SEQ ID NO: 69893 - DNA, 154 bp, Glycine max
tttcaaatgacttttaccttatccatttcctacttacatacaggaccatgtttattataaaagtgaccatcagccttctcttatatccatccacccacacactaccactatataacacaacactaaacaattaacattactcattacactaact

SEQ ID NO: 69894 - DNA, 364 bp, Glycine max
  unsure (1)..(364): unsure at all n locations
gaccgcacgcgtacgcaacggagaagtactcattgaacaaaaaaattatggagcaatctatgcaatggcaacttatgagcacatttaaaantggacgcgtcgcactataccagcatgtcccgtcaacggtacaagaaaatttataccgttgaaagctccttgattgcggcaccattgacctaaaccataagttacgtgattcgataattgcatctaatcatcaatcatcatttaattaatgcaaaattctcgaatcatttgtaaccatgttagcgcttgctctaactttctttacacccgccgctaatccctttcgatttccaccccgcgcgttctgtccccgtatgctcaaaatcaataactc

SEQ ID NO: 69895 - DNA, 259 bp, Glycine max
aaaaaataattgagcaatctatactatggcaactttggcgcacattaaatactggacgcccctcactataacatcatttcccctctaccatacaagaaaatttttaccctttaatgctcctttgtttcagcgccctttaccccatccatatgttacctgattctataattgcatctaatcatcaatcatcaattaattaatgcaaaattctctaatcatatttaaccatttttgttcttactctaacttccttttcacc

SEQ ID NO: 69896 - DNA, 270 bp, Glycine max
cacaggctgactggacctctctcaactgccctttaccttagccattcactactcatggccggagccatcatgatgtcaaccgggaccataggctctcttatgtcattctactctgagcactactcgatatcatacgtcactatacattgaagatctcgcatgtacattgcatattaactatgaaaaaggctgattgatataacttgatcacattgcataatatggcaactgctgactaattcaatgtctgaatgcataatgcgatgggat

SEQ ID NO: 69897 - DNA, 299 bp, Glycine max
ctacccacgccgacccacacgtgcgcaaaagccatagcattattattcaatggtagcaagatgccaagctacaaatggaagaactggctaatcttaaaatactttacgaacattctgacatccctgcaacaatacatattgtcctaacttatttatctcaacgctctttatcatgtccatacttcttacaaagctgatgactgctaatcaacaatgaaaccacctatttctcaacgcgaccatgattccatttggaactcacactagttacctatgcacattacacctctcgacattat

SEQ ID NO: 69898 - DNA, 405 bp, Glycine max
  unsure (1)..(405): unsure at all n locations
ttcaagaacaatttattgcacaaatattgactttaaccttactcaanccnatatcaaacacggctttttatcaatttctaaacaccctcaacactttaaacttctattatattaccatcattcaactctaattgcttttatttaattcacactttctcacatttcaattacatctctaatctgtattataatcattctgcgttcacttcccataattctaattccatccaatacaccacttctatcacatacttcctcccctactatgcactgaatcaactttccatgtttcttatattaattactccttacatatatttacatatatatatatacatataaacaactcttttctaattaacattttccatctacttcatacttttatcctcatatcttacaata

SEQ ID NO: 69899 - DNA, 249 bp, Glycine max
ttcataaatcttgtataatttgaactattttcaattcacttgccccccttttacaactttatgacttttaaaaccctgttgttacccaacttaatcttctttcaacacattcctctttttccaactttcttaatatctaataaaccctcacctaatctcctttccaacaatttttcattcttaatttctaattgtacactccctttaacctttcatttatcccctctatatttgtttttactctcaatt

SEQ ID NO: 69900 - DNA, 230 bp, Glycine max
aaaacttggtacattggttttaaacctctacactatactcttctactttctacaataaattaattaatctctcaattatttaatcttttaagacattatttacattccaacccttctctatctcataatatatatcataccattctaatttatacattttatcatcaactcaacacccctttataaaacatttttccttcataaagttatcaaatttactccaactcatc

SEQ ID NO: 69901 - DNA, 72 bp, Glycine max
cccactcctactaaatcaaatacattgctactgctgtactcactacagatctatagtcttctaaccctccat

SEQ ID NO: 69902 - DNA, 134 bp, Glycine max
cacggctctgctccttaccactttcactgcttaaatttcacagaaaactctgggaacatgtgtcatttatcacaaacgctccttacagcctgatgcagcttctactcgcacctccttcctatacaatagaaatt

SEQ ID NO: 69903 - DNA, 164 bp, Glycine max
cctacgcatcctcaaagctcacataaacttttatgcgactacatacctctcctatcctgtcgcctatattgaatttactttcattcattatacaaccttgtaaccgataactcctaatcaaatccaaaaatcatctcatttcatcacatacccttttctccatc

SEQ ID NO: 69904 - DNA, 315 bp, Glycine max
ctcggcgctgctccgtaccattttcactgcttaaatttaagagaaaactcggcaacatgcggaattatcaaaacctccttacaaacgatcagcttctctcacactccttccgttacaatgaaatctataatgtaatcctgtactaaatcgatctcaaatccgttcctaattaagcatccaattactatcattgctacaacactcttcataaccttgataaacatcatttagtaaatcacacaccctttaattctttccacaaaacttacacatttacacttcattatcacaccaattactcctaaaaaacatatt

SEQ ID NO: 69905 - DNA, 76 bp, Glycine max
gctactacatgatccaggcttacatgcacttgtatgcgactacgtacctctcgtatactgtgagctaagttcaatt

SEQ ID NO: 69906 - DNA, 140 bp, Glycine max
gaaaaaaaaaaaagcctttaactttttttctttggcatgattggaatcttgattggaaaaggttcaaattgaggtgtttaacccatcaattcaattttaagccgtgccttcttcaaaaaaaaataaaaaagaaaaataat

SEQ ID NO: 69907 - DNA, 174 bp, Glycine max
gacccactcgtacggcttgctcctcttactatcctttcctttcatttcatttattcatatgatacgggttcattggaacctttttataccctaatcgtcttcttcacaccgtcatataacaaaattattttctacttattcatcatctatcaccataacaatcctttcatcata

SEQ ID NO: 69908 - DNA, 214 bp, Glycine max
gacccactcttacgcttacgcattctttcactattcctacacctttcctgctttaacaaactcctaattctcagtttctttggataaattaattgcatacactgactcttataaactttaaattaacttaccatctacaacaaaatattttatccaatatttatactaaaaaatctaattaatcatcatacttcaaattataaaactccctttt

SEQ ID NO: 69909 - DNA, 202 bp, Glycine max
  unsure (1)..(202): unsure at all n locations
tcctagggtttttccttcaaccgtgggaaacggctcccaaaccgcctagtacaggtctgattanaagactgaacagagcctcacaacgtcaccaacaaggaattgcccccacgcccctcaaatcgtaaggggaaaacaaccattagggtgcactttgtaaatatcctcataagacaggctgcaaaaaatgcaccctatgaaa

SEQ ID NO: 69910 - DNA, 51 bp, Glycine max
tttttactataaatataaataaaggtttccctatttgtatcatttggaata

SEQ ID NO: 69911 - DNA, 267 bp, Glycine max
  unsure (1)..(267): unsure at all n locations
tctgcgaactgcgattcncaataggctgttttaatttgtattgtcgtcggacaannanacacctaccgacaacaacaacaaaccaggtggagcgttatccaaacccgttcaaaccctcaaaatgggttttggtttgggcctttttttccggggggcgtggattttcgtcgccagaaggttatggcaagacccaaaaaatcgcaatctactcgctagtcttctgaaaaagaattcagctcagaggcctaatgttcttacagtggaaga

SEQ ID NO: 69912 - DNA, 338 bp, Glycine max
aacaattactaacttcttttctgctatcatcttgtcactctttgccatttccatactttaaacatttttaattgctgctaattaacaatttatccacttttatgacaacaacatcaaatattttaatgtaattgtctatatttaccatatcccatcacattccctctaatagatttatccttacccaatacctcattcccttcatgtttttttttcagaaattctactttacatcccttttttttccccccctttattattttcataaaacctttttccctttctactactactttataacaattaattatgacccaacttccctttatcttaacttt

SEQ ID NO: 69913 - DNA, 253 bp, Glycine max
ttccccaattataacccatccaattcacccaatctcacttcattcttaatttacaattctattattactcacattattataaaactctataatccaccatcaaaacttcacaatattaaaacatattaacctattacaattattcatacccctccaatcactattaatcacattatttctttattaaaaactccccctgacctcccaacattcaacactctattatctcatctacttaatttactaacctaaa

SEQ ID NO: 69914 - DNA, 175 bp, Glycine max
  unsure (1)..(175): unsure at all n locations
cctcacantttcattacattatatctttttttccaacttttcccttatattactcatcaccaatattacatttcttacatcatacccaataaacacttttaaaacaacatatatcataacctctctctaatctctcaattacaatatctcctttnattcattcacacacatcctc

SEQ ID NO: 69915 - DNA, 213 bp, Glycine max
  unsure (1)..(213): unsure at all n locations
ctcttacanctcccatgaatgtggtcacaccggaaatgttgacattcatgcaagaactacgaaaggttgttacggttgcagttgttggggagttctgaccttataaaagatatctggtatttttctgacagcacagattaccaattgttgtattgatttacgtaatatttcttgaataaatggttcttggttggcctcacaatggtaaacgaa

SEQ ID NO: 69916 - DNA, 350 bp, Glycine max
cgggacgaacgacgcgtgcaagtgcgagagtgaataaatggcgccaggcttggcattggatttggaggaacctccgcggcggcgcctgattcgccaaaggacctcgaaccctctttcttttctcctccgaaattcgtaacctcgaaaagttatcgtcagaggaagcttctgcgcagattccggcgccgatttcgaccggaactaaagtggcgccttcacctgcgctgaagtatgcggcactcgcgtcgttcagttgggaccaggatagtgacaaagttaagatatatgtgttaatggagggaatcgatgagaataaggttgaatccgagtttaagtcgatgtcattcgat

SEQ ID NO: 69917 - DNA, 485 bp, Glycine max
cggtccggaaccccccgacgaccacgcgtgcggtgtggtgtaactgcatgctctttgcctttgttgacggagtctgccattaaatttaccgtcggcctctaatcaaatacacaacactgtatgcacttcattcatgcctttgaaagcacaagctcggcagcattgcggcactgtgagcctctggaattggagcaacacttgaggcttattcatgcaaaaagtctgcaatgaagccaagtctcacgcttatccatgctaggatgcatgctcaggctctaactttaccagtgctatccggcgcagctgcttatcattattatgagaaacgtgatgttcagccaataccagccgcagattatattattcctgctcccaatgtcacccaggtggtagaacatgaacttcaatggcctttctaaaaattaaaaataaaactgtaggggtcatgttattaagattaggagatattcctatcatcgagtttt

SEQ ID NO: 69918 - DNA, 414 bp, Glycine max
  unsure (1)..(414): unsure at all n locations
ctcatctcaagactttngtctacttctagataaaactaaaaggatcgcggtttttcaacctcgggccgccccctccaannggggaagcaactgcgaatagcaagaaggagagtccttctttgccgtcgggggttcaaggattgggcatgggtttacccgatttgagaacgaagaaaaaggggaaacagaaggcttccaaagacagccacgtgtcggaggcgctcaacaagctcagggagcagaccaaagaggctgtgaaggggctggagtctatatccccacccactgccgatgatttaggtaaagatgccttgatggaagattgggtcaaacaatttgaacagcttgctggctctcaagacatggaatctattgtggagaccatgatgcatcaacttctggccaaggagattc

SEQ ID NO: 69919 - DNA, 238 bp, Glycine max
caccaaatcatctgatgcctgtcctcagacgccttgcactcgaaccaggacccagacacgcataggttgctcttgcgaaacgatgcacgcatatactcaacttggtgcatggtcattcggagaaatcactgaccaaggctcaatgttgactaccgagaagattagtgcgtgacaccttgcaggaacaatcggcttctgtctcaaactgatgtgggaactggatgccgacaacaactgc

SEQ ID NO: 69920 - DNA, 323 bp, Glycine max
  unsure (1)..(323): unsure at all n locations
acccacccccacgcaangncctactatatcacnaaaaaatacattcttctanccaanctncatctaaccgctccgttatatattaaaaagctccctccctacaacantnnnccatataaagaaaaatcattttaaatttattctaaaaaaaaaaaaaaaagtccaaccactctagaatatccaaacttacttacacatccatacaacatcataactattctatattcaaacactaaattcaattcacttgccctcaatttacaaccatatcactccaaaaaccctggcaatacccaacttaatttacttccacccacatcccc

SEQ ID NO: 69921 - DNA, 201 bp, Glycine max
catataacaaaataacattttacattgcctttaacaaacaccaaaacaagccgccgatcttacagatctatacttacgcccacgatcataccacactatacctcatctatcattgcacctaacatcaattcaatgaccgtcttaacacaactacaaaacttggaacaccctttcattacacaacttaatcacctctctata

SEQ ID NO: 69922 - DNA, 411 bp, Glycine max
  unsure (1)..(411): unsure at all n locations
aaaaaaaaaaaaaaaaaaattttgtttttttttttanaaaaactcctccacaaaaaaaaanannannaaaaaaaaaaaaacaaaaanaaaacncnaaaaacaaaaaaaaaaaaaaacacactcaacaaaaaaaatttttttttttattatttaataataaaatttaaattatttttttttttttatttatttttttatcttttatttatttttttattttttcatatttttattatactcttttatttatatatttattattttatttttttattaatttcttttttcttttttcatttattttatatttattttatatttttaataatattttatttatttttttttttttttttatttatataattttaatttatattttttttattctttattttaatatttttatta

SEQ ID NO: 69923 - DNA, 157 bp, Glycine max
  unsure (1)..(157): unsure at all n locations
aaaaaccgggccgaccgcacgcgtacgcaatgccctactatattacngaaagatacattgtggagcgaagctgcatctttggggttggcttgaataaacaaagctagtgtactacaacttttttccatataaagaaagagcattttaaattgttttt

SEQ ID NO: 69924 - DNA, 306 bp, Glycine max
aattaattaaaactgaatctaaattaattgtttatcttatcaatttatgatctaatttccaattttatattttttatattattctatatatttttttttaaatttttttcatttattaatttatttcttttttttcattaccatatttcattattttccacccttattttttttctcctttttttttattaatttttatcatatatatatctttcttttctttaatttttctattttttttttttttattttattaatttatttacttttattatctaatttttttttttcttttttattttattt

SEQ ID NO: 69925 - DNA, 400 bp, Glycine max
  unsure (1)..(400): unsure at all n locations
aaaaaaaaaaaaaaaatttattataaaaaacaaaaaaataaaaatttagtttttattttnaaaagttctcccaaaaaaanaaaaaaaaaaaaaaaaattttttttattatttttattttatttttattattttttttaaaataattttttttttattttattatttttaaaatattttttatttattttatacttttttttaaatttttttttttaatttttttatattttataatttatttttttttaaattttttttttttttttttttttttatttttttttaaatttatcacctatataatttttttattattttttttaattttataatttttttaatttttttttattattttatttttttttaaatatatttatttatttttatttttcatta

SEQ ID NO: 69926 - DNA, 291 bp, Glycine max
cccacgcgtccgcccacgcgtccgctccagagagaagaagaaacttaatcgatcatgagttggcttcactaatacatcatggcagacgagacccagaacaagtatgagagctctgaggttgaggtccaggatcgtggtgtttttgactttctcggtaagaaaaaggatgaagaagacaagcctcatcctcaggaggaggtcatcgccaccgagtttcaaaaagtcactgtctcagaccaaggagagaacaagcacagcctcttagaaaagcttcaccgatctgacagcagc

SEQ ID NO: 69927 - DNA, 363 bp, Glycine max
  unsure (1)..(363): unsure at all n locations
aaaagaaagaaaaaaaaaaaaattattaaaaaaaaaaaaaaaaattagcttttttaaaaagccccccaaaaaaaaaaaaaaaaaaaaanaaaaaaacaaaacaaaaaaaaaacaacccccaaaaacaattttttcctagcaaaataaattcttcatttttttttttttttttttttttttataaatcttatttttttaattttattttttatttttttatttttttttattttttattctaattactttattttattttttttttttttaattttttttttttttttttatttatattattttttttaaattttatttttttttttttataatataaaatcattttttttttattatattttt

SEQ ID NO: 69928 - DNA, 460 bp, Glycine max
  unsure (1)..(460): unsure at all n locations
aaaaaaaaaaaaaaaaaattttattanaaaaaaaaaaaaaaaaaaaaaaaatttagttttttaattttnanaaaagcccccccccaaaaaaaaaaaaaaaaaaanaannnnnaaaaaaaaaaaacaacaancacaacaaaanaattaaggacaccgccccccttttttttttttaaaaaaacaaaaaataaatccaaatattatttttttttttttataaaattaaataaaaaaaaaaataaattttttaaataaaacaaaagataattttaatatattaaatactataacaaaatttaattttttttattattttttttttatacacttttccaaaaaaaaaaataaaatatcttttttaaaatatataaataattaaatatttattatttttaaatttttaattttttttttaattttttctttttttatattttttattttattatttttttttttt

SEQ ID NO: 69929 - DNA, 207 bp, Glycine max
aacaacaccggagaacatgatgattgactccgacgcccacaggaaggaccaagacgagccggacgccatacagaggggtgccgctgccacggatgaggtcaagcgcgcccacagcgtatcattgctgcgcgcgagaaagacgatatgaggctgaacacccctaacccgctgctctcgagggcccacatgaccatcactgaaacgacc

SEQ ID NO: 69930 - DNA, 423 bp, Glycine max
  unsure (1)..(423): unsure at all n locations
gaaaaagaagaaaaaaaaaaaaaaatttatttaanncaaanccaaanacaatattgttgtttttttttaaaatgtttctccccaaaaaaacaaaatnaagaaaaattgtaatggtacaaagtttttttccaataatgtttatctgtcttgctttttagaatattttttttcttttaattaattttacatatttaattaattttttattttatatttattactaattgaaatgccatttattcttttttttaaatatataaactattcttttacaaccccccatctataaacccatttattcttttttatttctttttatttcacacctattttatatttctattttcatatattttactttattatttttatttatatttttttttttatatttattctttttatatttattttatttaatat

SEQ ID NO: 69931 - DNA, 231 bp, Glycine max
ccatctcaactccttctaatgtccaaagcacattgaaaatcatgatatgctaacacaagctttcactcatctattattgactacatccaatacaaatcaacatttcaacgcatttcagactcacccaaatcacctttaacttactaaactattttcaacctctatacaaaaaaatcctgtactaaatttcccatctaacctttacaaaccaccaccaatatcctcaactta

SEQ ID NO: 69932 - DNA, 102 bp, Glycine max
aaaaaaaaaaaaaaaaaaaaaaaatatttaattttaaaaaacaaaaaaaaaaaaaaaaaaaatcgcaccgtttttatattaaaaaaaaccccccccccacac

SEQ ID NO: 69933 - DNA, 412 bp, Glycine max
  unsure (1)..(412): unsure at all n locations
aaaggaaaaaaaanaaaaaaaaaaaaaatttaattaaaaaaaaaaaaaaaaaaaaaaacccgtccgcgttaataaaaaaaaagccccccccaaaaaaaaaaaaaaaanttttttttggtttggaaaaaaaaaaaaaaaaaaaaaaaaaaaaaaaaaaaaaaaaggccccccctttaaaaaaaccaaaattaaccaccccctccttccaaaaaaaaaactttttaatagggcccccaaaaaaaaaaaccccccccccgtttaaaaaccccggaactggaaaaaaccccgggttcccccaaataaaaccccttacaaaaaacccccttttcccccagtgggaaaaaaaaaaaaaacccccccccaaacccctttccaaaaaatttccccccctaaatggcaaatggcccccccc

SEQ ID NO: 69934 - DNA, 269 bp, Glycine max
  unsure (1)..(269): unsure at all n locations
catatgaatgtggccctgctcaaacaangcanagaaaagatggtctctgggatcaaccatatcaaatccttcgcatggccaaaggacattgaaaaccaagacatactaaaacacccgctcactcatccaatatgaatggcttacaaaaggaaggatgacgtactcgccaaaaatactcacacatactaccatgatggtactgcataacaatgccctatcatttgtaagattgctggaaatgctatgacacctaacccacaaacaacacc

SEQ ID NO: 69935 - DNA, 80 bp, Glycine max
aaaaaaaaaaaaaaaaaatttaattaaaaaaaaaaaaaaaaaaaaaaatctagtcttttatattaaaaaacgcccccccc

SEQ ID NO: 69936 - DNA, 507 bp, Glycine max
  unsure (1)..(507): unsure at all n locations
aaaaaaaanaaaaaaatttanattaacaaaaaaaaaaaaaaaaaaaaaaattcttagtttttgtattttaaaaaaaaccctcccaccacaaaaaaaaaaaaaannaaaaaanaanatatttatacaattttattaanataaaaaattattaatattatatttatattattttttaattttttttttttttatatatttttaaataatttatttatttttttttattttatattataatttttttttttttaattaattttattttttttttataaatattttatattaatatttttttttttattttaataattttaatttattttatatttaaattatatttaatttatttctatattattttttctcatattattttttttttatattatatttaataattttatttttaataatttcattttattttattattaaatttattatttaaatttttttaattattatattttataattatttatttatatattaaatttttttatt

SEQ ID NO: 69937 - DNA, 324 bp, Glycine max
  unsure (1)..(324): unsure at all n locations
caaaaccnaaaagaagattttcgttgaaatccccaaaatcnaaaagaggcacggtttaacgctaaaatggctctaaccaatggcaaaacgaagagggatagagaaatcgccaaagaggagaacaagaagaagactaagaaacccaagctcagcaatggcacttcaaaacagcgagacgagggatccaaaaagggagtagcagaaggaaaaggagaagaggggaaaatgaacgtgtttccgatgaatcgcatcaaaacgatgattaaaggcgaagatcccgatatgcgtgtttctcaaggaagcattgttgggcatcaacaacgc

SEQ ID NO: 69938 - DNA, 302 bp, Glycine max
  unsure (1)..(302): unsure at all n locations
gggggggggaagganaaaaaaaaaaaaaaaaaaacaattaatttataaaaaaaaaaaaaaataaaactggatggggtttatttanaaangcgcncccccacaaaaccaccaacataatacaatncctatcctcttcttccttaacatattttccatntccaaactacaattataatttcttcatacaaaccctattcacaactaattttcctatttaccattcattttcctccatattatccctttaaaccacccaattttccattcaacacaaactttttccacccaaatataaatatcaa

SEQ ID NO: 69939 - DNA, 361 bp, Glycine max
  unsure (1)..(361): unsure at all n locations
aaaaaaaaaaaaaaaaaaattaatttttaanaaaaaaaaaaaaaaaaatctagcttttttttttaaaagggggccgcccaaaaaaaannaaaaaaanaaattccaatcctttttttttttaatatttttttcattgtcaatgtagaatttttgtttttttttattatccttatttcaaactaaaaataatttttttaccttttatttcgctatttaatatttctttttaatctcaatctttactttctttttattacataactttttccactctttttatttaaattaattgaaaaaactttttcctttgtttatttttaagaattttttctactcccctcttcttactaatttttatatt

SEQ ID NO: 69940 - DNA, 449 bp, Glycine max
  unsure (1)..(449): unsure at all n locations
aaaaagaangaaaaaaaaaaaaaaaaattttataataaaaaaaaaaaaaaaaaaatttagtctttattttnaaaacggcccccccaaaaaaaaaannannannnaanaaaacacaacaaaacaaaccacaacaaaaaaaaaaaaacaacaacaccaaaaattttttataaanaaaccaaaaaaataaaaaacatttttttccttatttttatttaattattttttatacatacttttttttaattattctatttttttactttttttttatttttttaatttaattttattttttttaaaaatatattattttttttatatttttttttttttattttttattatttatatatatatcacttttattttttcatttactatttttttaatatttatttatctttttattattattttttttatttttttatttttatttttatttttta

SEQ ID NO: 69941 - DNA, 352 bp, Glycine max
  unsure (1)..(352): unsure at all n locations
aaaaactgaanaaaaaaaaaaaacacacaaaaaattaatttataaaaaaaaaaaaaaaaaaaattctatctttttctttttaatatcgccccgcgcaaccacaaaannaanaacnattatcaacacaattttcctaatgccgcatattaatcattttacccgttactcaaacaatcttttttaaatattttctcaaaaacacacataacttttctatcctcatataacattttaattttcttttaactaccactttctttttttaatttatttacctacttcttcttttatattaatatctacttttccaccttccttttaaactaaacatttttatattctcttattcttc

SEQ ID NO: 69942 - DNA, 321 bp, Glycine max
gccacgctcgccaccgtcgcccttcttctttctaaatctaattgcggcggatatcacaccagacccgcatgcacctccaccatgggccagcagccgccgcaacagtaccagcagcctccgccgcagcagcagcaaccctacgtcatgatgccgccgcaagcccaggccccgcaagccatgtgggcccccttcgcccagccttcgcctcagcagcagcccgccagcgccgacgaggtccgaaccctctggatcggggatctgcagtactggatggacgagaactatctctatacctgctttgctcacaccggcgaagttaca

SEQ ID NO: 69943 - DNA, 350 bp, Glycine max
  unsure (1)..(350): unsure at all n locations
tcgcactatctaaccctngcggcttgttttcttttaacaagaggagcgccaaaacccannccctcaccaatcccaacctcgattgtgtttcggcgaagaagacgaagtagcgcaaggcttcatatttataacaagacgccatgccccccgccgcttacaacaactattggtacaacgaaaccagcttctaccttattcaacccgaacttgctttcagagaatacgactacaaaaattataagaaaaagatgaaaaaggttgttaactccgaataaaaggaacagcctttggtcacggatgctaatggagaaaaaaaagaggatcctaacgcgctttacaactttaggatt

SEQ ID NO: 69944 - DNA, 159 bp, Glycine max
  unsure (1)..(159): unsure at all n locations
cccanaacaagtatgagaactctcaagttcagctccaggatcgtggtgtttttgactttctcactaagaaaaacgattaaaaagacaaacctcatcctcagcaggaggtcatccccacctaatttcaaaaagtcactgtctcagaccaatgataaaaca

SEQ ID NO: 69945 - DNA, 248 bp, Glycine max
  unsure (1)..(248): unsure at all n locations
aaaatcgccccacaacaaaaatttacattcataangtggttcatcaaaccaatgtattattccccacaataactgtcatcaacaattaatcatcatcataattgtcttaaaataaaatcttctttttctttaaagatacactccacctttaaactattcatttaaagacaatccaaattgtgacattctcctctcggtggtgtaaatgtttatcacactattcttacacactaaaaatcccctgttct

SEQ ID NO: 69946 - DNA, 241 bp, Glycine max
  unsure (1)..(241): unsure at all n locations
aaaaggggtttgacgatcataangngtgttttgcaacaatggctaagttctttgctgctatgatcttggcactctttgccatttccatacttcaaacagaggtaatggctgctaatgaacaaagaggccacttgtttgacaacaagagcaaatatggaagtggaagtgtcaagagttaccaatgcccatcacaatgctcgaggagatgtagtcagacccaataccacaagccctgcatgtt

SEQ ID NO: 69947 - DNA, 330 bp, Glycine max
  unsure (1)..(330): unsure at all n locations
aaaaaaaaaaaaaaaaaaatttaattttaaaaaaaaaaaaaaaaaaaaatttgatgttttttttttaaaaacctccgcccaaaaaaaaaaaaannnnaaaaaaactaaaccaaacaaacctattatttactattataatttttttatactttttatttttttttttatttacttaaaataaaaaattatttttttttttatattaaatttatctttttaattatttttttaattttacaattaaattattaacatttatttttttttttatttttatattaatatttattatttaattttttatacttttaatttttatttttttttttt

SEQ ID NO: 69948 - DNA, 236 bp, Glycine max
  unsure (1)..(236): unsure at all n locations
aaagaaaaccaaatttnttaatctatcacactgatatacnacgcggaggggtggtatataaatatggccgcgccaccaacaatacaaataatgacgtggggcatgaaacctatgcattataccccaggataactctcattcacattgaatcccaagcataattgaacacccactaaatctaccatttttacgaacatacactacaggggtaaactatacatttaaaaacaatccaa

SEQ ID NO: 69949 - DNA, 52 bp, Glycine max
aaaaaggaagaaaaaaaaaaaaaaaaattttttaaaaaaaaaaaaaaaaaaa

SEQ ID NO: 69950 - DNA, 220 bp, Glycine max
gcgtccgtccactcgtccgattgaatatccatggtattcttagttcttttatccattaaaaaactggagattagtatttttaagaagaactatagtagttgaaagatatcttttgcaaatatgcatatttaactgaggttgttataacttgatccttcctttaactgatttcatctcagccttaatcttaacctattagcctcattcattcgatatatta

SEQ ID NO: 69951 - DNA, 240 bp, Glycine max
tagtcattgaaagatatcttctgcaaatatgcatatttaactgacgttgttataacttgtaccttccctcaaaaaaaaaaacactataacgaaaaagaacctattatcctccttcattgtatatattacatctataatgattaaattctaccgtttcacaaaatacaaaaataatcaaaataaaaatcatcattcttacatctctaatattcttaacagattcaattagttaaattttat

SEQ ID NO: 69952 - DNA, 307 bp, Glycine max
cccccccaccccccaccccccccccccccccccccccacccccaccccccccccccccccccccccccccccccccccccccccccccccccccccccccccccccccccccccccccccccccccccccccccccccccccccccccccccccctccccccccccccccccccccccccccccccccccccccccccccccccccccccccccccccccccccccccccccccccccccccctccccccccccccccctccccccccccccccccccccccccccccccaccctcctccccctccc

SEQ ID NO: 69953 - DNA, 241 bp, Glycine max
  unsure (1)..(241): unsure at all n locations
cccactcgaccactcgaatctccatacacaatttcacacattattcacancactaacaaacacgggaccaaggagaaccatcaaatgccccataacccacatcctaacaataacacaccctactacaataattccagacccaaaacttaacatcaatcaacaaacatacaaaataacaatcacacaccaaccaaacacctcaaaacatgcatcatcaaaacaacaccaccacccaaaacaa

SEQ ID NO: 69954 - DNA, 404 bp, Glycine max
aatactcgggccaacccacgcatccatccgctcttccgcacacatatgcatactttttacatttatacatttcccaatatggaacccgtacattcactaacgtctacgctctctatctatagcacacaatatggttaacatttatccagaacaacctaactttataaatgaaagagcaagtaaatcttcatcatcaacaaatacattacgagccacaactcatacaagccaaagcaaccacatagagttcttagaccaactcaattgcataaactcatattacatggctatcaccctactctgcacgctccttaccctactaataatctcaactaagatccaatagtgctaatagcaaattcatcgctaccatcatcttcattttcatactcatcatcatactc

SEQ ID NO: 69955 - DNA, 117 bp, Glycine max
tcggaaaaaaaaaaaagccttttactttttttcttttgcatgatttgaatcttgattgggaaagcttcgaattggggtgttttacccatcaattcaattttaagccgtgccttcttc

SEQ ID NO: 69956 - DNA, 267 bp, Glycine max
tttcaattaatattctcccttttcttcatctcatataatcaagatcttgttaatttaaaatgcccatcacaaacatctccttcataaaacctcaataatctactcacccctacacttttataacttctttttctcatttcatctcaaccttcatctttctcttctcctcctcatactccttcatctcctacaacaatctcacccacaacttctctttcaccccttccttcctcatctcctcctccatctcccattcattctccctct

SEQ ID NO: 69957 - DNA, 320 bp, Glycine max
  unsure (1)..(320): unsure at all n locations
tttcggctccctctcctctctttactncttttcaaacaatgtcacataccttgcattctgtcaatttcaaaaatccttgctcctgaatatccaattgcacttatctcccattttcacgttttcttttaataactccttctccatatatctactattatctatgtcatcacacaattcatttccccattcaactcttacgactaaataattactataacctttcatcattcttatatgtaccaaatatcatcccatacttctacacacatactaaacacttatccttccaaatcctaaatcaaaactaccattgccaacac

SEQ ID NO: 69958 - DNA, 249 bp, Glycine max
tcgcgcacgcgtccgtcaagcattgcatctctcttgatttgtagtttgttttgtgcttggtataaatgttctgccaaatcaagaggggttttaagatcatagtgtgtgttttgcaacaatggctaagttctttgctgctatgatcttggcactctttgccatttccatacttcaaacagtggtaatggctgctaatgaacaaggaggccacttgtatgacaacaagagcaaatatggaagtggaagtgt

SEQ ID NO: 69959 - DNA, 151 bp, Glycine max
acataaactaacaatcacactctactacacattataatcataaacaacatcaccacctaggcatatcacattatcgctttactcataaactacccatatcaactaaataccacataattcaaaccttataacaaaaaccaaatcctaatcc

SEQ ID NO: 69960 - DNA, 314 bp, Glycine max
tcccggactccacccacgcgttcgtccgaacatatcagcgatctttcggcctttataaacaatcaccataatcaggaacactgtccaaataacaaacccatcacaatcatactctaccataaaccatattatgcgactcatcatcacacccttaaatcgtacatgactgaactcctctaaacactcattttccactactaccactcattctccaatattacataccacaagctcaccaacaacagcaatttcaatcctaaacccctaatattcaattacatcattcacacatacactaacaacatccttaccat

SEQ ID NO: 69961 - DNA, 211 bp, Glycine max
tcgggggttgctgtaatcactgccccgattttggttcacgagttgatgaagctcgaagggggcattgatgaagatcctagcgacgctcatgctgacatgactaatgcggaggacgcagatacaaatgcagaggttaacaagatgaaagatttgaactaaaggtgacttaataatctgtatcgaggtaagaaacaggactaagctaaacatg

SEQ ID NO: 69962 - DNA, 166 bp, Glycine max
cataaacacaaaaactcgagatttaaaaaaacatttgaatctatttcacacttattaaaacctcatccttttaccattctgggtgctataccttccttctaaaaacaactccaacttcacacttaaattctaacacaccttttaattttcccacctttctaaataa

SEQ ID NO: 69963 - DNA, 266 bp, Glycine max
tccacccactcgtccactccatgctattcttttatctacaaactctcatccttattttatatttactctacaccaaaatggtggattttttaatcatacaatttccccaactcaaccctatattctttcataattataacacaaaacatctatctttcataatcatcaaaaccatataacatctttttccacaaactccaaatctttttatccaattatcaaacaaaaccctattatatatataaatcaataataaaactacttat

SEQ ID NO: 69964 - DNA, 199 bp, Glycine max
cacccacgcctccacttctccttctcaatcttgtaattctatttcctccaccataatcctacacaaacttaaatgacgtcctttttaaaacaatcctctcaccctccccattcacctcaacttctataatctcaccccaatcaactactattcctattcacttttccttatattctaccattctttactttcaaattca

SEQ ID NO: 69965 - DNA, 399 bp, Glycine max
  unsure (1)..(399): unsure at all n locations
tatttcttcctatctctgtctcattaccccttcattgagtccactttactcacgaatcttctaaacttcaacaacaccctccaaccatatttaatgatgatttttcatatntacctcccattttatttatataaaatataattttatatataattttttttttcatatatcctctcctatatttaaatacatactaccccaattcctctatttttaaaatctcttttttcttaaatatattaaaatcacctaaatttaatttttctttatatcttttcattccatacctatcacactcctcaatttttccccattccacccattttttttttcacaataaacccaaatcttaatattattccaaactatctttattatctccatattatatacaaattt

SEQ ID NO: 69966 - DNA, 335 bp, Glycine max
  unsure (1)..(335): unsure at all n locations
tattacttcctatctctttcgataaccccttcatataatccacttttctcaccgatctattattcttcaacaacaccctccaaccacanttaataaggatttttcatatttaccacctacattatttatataaaatttaattttatatataatttattttttcaaataaaccctcctatttttaaatacactctaccccaattcctctattattaaaatctcttntttcttaattatattaaaatcacccaaatttaatatatctatttntcttttctttccattcccatcacactcctcaatttttccccatttcaccacttttttttttcaca

SEQ ID NO: 69967 - DNA, 106 bp, Glycine max
  unsure (1)..(106): unsure at all n locations
atgataaattttgtcaaaattccaatanttanctataggtaaaaattctatatacaaagttccaacattaaaaacttaacaactaacccattatnttatacacttt

SEQ ID NO: 69968 - DNA, 180 bp, Glycine max
aaaaatgtaattttcagcactgtccaggaaatttaaggattgtaattctttatgcctcattttagtattaaaaaaaaaaaaaaaaaaaaaaaaaaaaaaaaaaaaaaaaaaaaaaaaaaaaaaaaaaaattaaaaaaaaaaataaaaaataaaaaaaaaaaaaaaaaaagcctcccattt

SEQ ID NO: 69969 - DNA, 213 bp, Glycine max
aaaaaaaacaacaaccccaaaccaccaaaaaaaaaacaaaaaaaaaaaaaaaaaaaaacacaacacacactaaaaaaaccaaacaaaaaatacacatacatcccaccacaaaacaccacaaaaaacacacacaaaatcaaaacaacaaaccaccaaaaacaacaaccaaaaaacaaaaacccaaacaaaacccaacaaaaacaccaaacaaaa

SEQ ID NO: 69970 - DNA, 197 bp, Glycine max
  unsure (1)..(197): unsure at all n locations
tctaaaaatatactcatatactcatctcaaatacctcacatacttgacgctaatttctaaaacccntacactcttaccaaaacattcatcttaatctccaaactctctctcaacatctcccccacattattataacattctacacctacacccaatccaacatattcattaacttccaataaataaccacctatatc

SEQ ID NO: 69971 - DNA, 449 bp, Glycine max
  unsure (1)..(449): unsure at all n locations
tcacccactctcctaattctatatgaataaattcgcatattttcattgtattttaggatcttcacccgccacattatcacaaagacctccaaccctctctcttctctcctcctaaattctaacctcnaaagttatcttcatataatcttctctcatattcctnctcctatttctaccctaactaaatnttctccttcaccttctcttaantattctncactctcntctttcatttnttaccattatatttacaaatttaatatatatntnnttaattatttaatctataataataatgtttaatcccaatttaaatctatntcattctattttaaattccattattttcaatttaataactacccattttcaatatcaaaatttcacaattaaataataccatataatatccaatttnttntcaatcctaaaaattcaatcatcacatt

SEQ ID NO: 69972 - DNA, 281 bp, Glycine max
tctcctcccaaattcataacctctaaacactatcatcctatcaacctttttcacaaattccaccacctatttctaccttaactaaacttacaccttcacctactcttaattattcaccactcccctctctcaattttcaccaccatacttacatatttaacatatacatcttaatcctaataatccataataataaaattcaatccaactataatatacatttcattccattttaaaatccatcattttcaacacaataactacctaatttcaatatcaaa

SEQ ID NO: 69973 - DNA, 215 bp, Glycine max
  unsure (1)..(215): unsure at all n locations
cccacgcgtccgcgatgagtggcttcgttagatactactcgtggtctttttttgcttgatntgtttgcttctgtacccaaaatatatagtaataaataataataataaagtactacgtantttctaaactgacattgctaatcatcatttataaatgttgtccctaataacctttaagttttagcataatttaaaatataattaataatatggtt

SEQ ID NO: 69974 - DNA, 84 bp, Glycine max
aaaaccaaactcaacacaaaacacccgcacttttaaaaacaatctacccccacaaccctaccaacaccacactcaatctaaatt

SEQ ID NO: 69975 - DNA, 227 bp, Glycine max
aaaacctccccctccaatcctcaatcaacttctaatatcaataaatataatccttctttaccttctattcttcaaatattacacattactttaccccattttataaccaataaaaaactcaaacctaaaaccttcaaacacatccacttatcataatctctcaacaaactcaattaacataccaaaaattcttttaaatatctttaatctatatccccacccacttc

SEQ ID NO: 69976 - DNA, 450 bp, Glycine max
acaaacgtgaaagccttatcatacagagttatcttgattccaacataaaatttcaacaactctagactgttattaataaacgcatacgttctaacatcacgctcgtgaaaaatatccctactaacaaacttaaaatcaatgaactttataaagtcaagaatcctttacaatctcctgtttgctttcacaccaatcaccacatctattgcttcactcatcaattatcccttacagaacttttactattcaactatccaagctacacctcttgtcattaacattcaacctcatatccacaagttcaaccacatactttcaacttatactacaatgcctgtactgaaactgtcacttatcacaactactaatcaccattaaactagagagcttaatccactctataaaaccatagatactatttccaaacaaaaccccctatttgaatatttt

SEQ ID NO: 69977 - DNA, 384 bp, Glycine max
  unsure (1)..(384): unsure at all n locations
attcctcatcctttactttccatatcaaagaaaagatcatcgacgtcatatcaaanatacaacatcccaccacttcaatcatctatttcaaancacaatctctccatcattatctcactcttcacctcataaattatatcaacacttttaatcttattcatacaaaaantctccaatcaatccaattctcaaccttatccatnnctatatncatnctctaactctaactttancanttctatctctttcaactacttatcattattatnataaactttatattcatccaaaaccaaaaccatattatattattccttctcccaatttcacccacatttttcaatattaacttcaatttcctttctaaaaaataaaaaataaaac

SEQ ID NO: 69978 - DNA, 459 bp, Glycine max
ccagcgcgtcctcccacacaagcgcccatccttctaatatctcatctttacttgccatatcaaacataatagcattaagctcaaatcaaaaatacaacatgcaggcacttcaatcatcaatttcaaagcacaatctcgccaacattggcgcactctcagcctctagaattcaatcaacacttttaccttattcatgcaaaaaatctccaatcaaacccagtctcacacttatccatgctatgatgcatgctcaagctctaactttaccaatgctatccggttcaactacttatcattattatgacaaactttatattcatccaaaaccacacgcaaattatattattcctactcccaatgtcacccaaatagttcaatatgaaccttcatgtcctttctaaaaattaaaaataaaactgtaagggtcatgttattaagattatgacatattcctatcat

SEQ ID NO: 69979 - DNA, 346 bp, Glycine max
  unsure (1)..(346): unsure at all n locations
atgctgatttttttgatcatccattaaaagcttgnaaagcccattgcaactctagggannttgtcactattaanatcgccctttcacatccctttaaaagattatatgtagctatatctcatactaactatggtttaattacactattatcaacatataatgtctcttttcttcaaatattcaaatatagtgatactaaacctcaaaaaatttattatttatcaccattgaaagtaacattcatatttaaacttgttgacatgctctaacacttaaacaactacatttttaattccacacttcacatagttctaagaaactatcaaagaaatatattctattacat

SEQ ID NO: 69980 - DNA, 385 bp, Glycine max
  unsure (1)..(385): unsure at all n locations
tcatcgctaactcgttcatatcaaatatagttttancctttttgctaaaaccctctagatagtatatttttaataataacaaaccataccccaaatcacatttttaccattttattccttatcccaacatcattatttactatctttctattaataataatgtcgttaattaatttcctttctatatccatcttatttactttaaacaatgaaaacttttctaaatattccctacaatcttctcctatttctttcaacaagtacatttcctaattttcttgaaataattcttttcacttttaaatcatatttcacccattccatatttctaatatcaacaaaattcttttatattattttaataatattttttttacttttaatt

SEQ ID NO: 69981 - DNA, 196 bp, Glycine max
caacgctaacgcgtgcatatcacatagagtttcaccctttttgccaatacccccgagccagaatcttgtgattattaacaaaccatacctcaagtcacgattttgctcatcttttcctgatcccaacatcaggatttactatcttgctttcaataatacatgtgtcgatcaatttcctttctctgtacatctggtt

SEQ ID NO: 69982 - DNA, 114 bp, Glycine max
gaaaaaaaaaaaagccttttactttttttcttttgcatgatttgaatcttgaggggaaaagcttcgaattgaggtgttttacccatcaattcaattttaagccgtgccttcttc

SEQ ID NO: 69983 - DNA, 337 bp, Glycine max
cacgcggccaactcggtctaactacatactctttcccacttttgacgaagtacccctatacagggtcgacgtgcccatatcaaactacaccctcattctagggtcttctcaactagtgctcctccactattcattaatgaactaaaaggttaaaataataatatttacatcatatgaccttatcaaaaccaaccatgtagaacgcacttttataccttccaataaaaaacctcagaaccttaatccgtatgctctcaacactttttaacacttaccttcattaaatacttctcatcacattattatcattgtacaacaaatgccctaccttatgacc

SEQ ID NO: 69984 - DNA, 278 bp, Glycine max
attacaacaaaatatttcaaatacactcgactacttttaaaaccgaaataccccacatactcacactcatcttcaaaacccctcttaaaaaactcctcatcatcctccctctaaaatctacaatcactcttcaacttccctctcccatcttccacctttcactaccacattcatctttcatctcccttctatcctctacatcatttccaatctccatctactcaccctctaaccccccataatcaaccacacccaccaaatcctcatttccaaacaca

SEQ ID NO: 69985 - DNA, 317 bp, Glycine max
  unsure (1)..(317): unsure at all n locations
cctgtctcatctacccataatcttgnatattcactactcataaaaatatcgaaacatttttacaaccttcaccccccncctaacttatgtcattctactttttacactactttttctcatcattaaatatatattaatgttctttttttcatttcatattaactattaaaaacttttatttatataactttatcacatttcatattatttcaactaatctttaattcattttctcattttatatatccatcttatctacacattaatctccttctaccttttacccaaaatatattactcattcaaatattcaaact

SEQ ID NO: 69986 - DNA, 338 bp, Glycine max
agacggcagagcggacatctaccgtatactttcactctttcttccactgccacacagccagatccatgggcttcccaaccaaccacacctctacggaccatcccctaaacttcctcatctaccgtcgatcagactgtataggcgacctactacactccctctgccaatcccacagcatttccttccattactgctcaggccgcctagagaaccggacctacctcaaaaccaacatacccctcctcatgccctcaacacatcttaaacgccctctgcatcacatgcctacccaacgccgactggttccagtcccacaaattcttgaccatccgaaccaa

SEQ ID NO: 69987 - DNA, 277 bp, Glycine max
  unsure (1)..(277): unsure at all n locations
gacccacccgtccgngacggcanancggacatctancatatnctttcactctttctttcactaccacananccagatccatgggcattctaaccaaccccacctcttcaacccatcccctaaacttcctcatctactgcctcacagacttaattggctacctcctcttctccctctgccatacccaatgcatctccttccattactgctcattccatctctaaaaccgagcctacctcgaaacctacatagccctcctcaaaccctcccacatcttc

SEQ ID NO: 69988 - DNA, 221 bp, Glycine max
  unsure (1)..(221): unsure at all n locations
ttaatgctttcctcctttacctctctaaactttattnattttatnnnnatttcanctattcaggtcttttaaaaaactttntaaggaccagcaaaccttcaattttcaaaattttcatattttttattcccatatctccattttttacaattcaacttttccttaatttaaatttacttcctcaaaattttttttatactttaattaccttattcattcct

SEQ ID NO: 69989 - DNA, 410 bp, Glycine max
ttacctctctaaactttattaattctatgtatattacaactattcaggccttaagaaccttttaaaatgaccagcaaaccttcaatacccaaaatttcaatatatcaatgccaaccatctccatctctcacaactcaacaattcatcattgcaacactactactatacaacttcataactctcaattaactcatacattcatacatacctcaaatctacaaaattattccatactcaactctaactaatatgcatcatatctacatactacacatctacacaattcatatattaccaacttcactatacaaatataccacctacaatgatctaatttcaatccttcaaaacttcacaaatcaaacctgaaaacctcaaaccttcaaccatcttatctttctaaatcaatc

SEQ ID NO: 69990 - DNA, 64 bp, Glycine max
tccaagcgaatttacgcgtttttgctacgacatagctctcctgtagagttagcaaaattcaata

SEQ ID NO: 69991 - DNA, 359 bp, Glycine max
cttccggacaatttttagttctgtttatataaaacaagcactaggtagaatcagaagatatctacgaccacattcgtgaaaatatacaataggtgcaaaacaacacacaaagtacaccatatctatcacataaatattgacaattctgatcatagtcatatccattgatctacacaccaacactagccacattcttccattctaaatggacgaaaataattgatcacttcaacatgatccctattataacatcttcaaaaacaaatatcacaaaaactcctccctattaatatatccaaacttacgaacacgatcatacaaactcatagctcttctataacataacctaactacaattc

SEQ ID NO: 69992 - DNA, 399 bp, Glycine max
atataccgacaggggaacaccgcacactttccaaaacgcatccacctctccacatgtaaaaccctgcctttacccaccttcaacgcccagcagctcacccacctgtcaccaacagacacaattgccaataccaccacaccaatcacccttcccacactgttcacatccctaacggcgaaattaacgctcactctacctgcccttacagcgccgaacgtgtcgatctcacgctcaacgtaccctctacacatcacatccaacaatctcccgacactaccactgacaaccctcacttctcgcctcacaaatccgctttccacaaatacctctaaaccaacaactctccttatcattcaactgtagatctttacatacattttacccactaaaactacttta

SEQ ID NO: 69993 - DNA, 254 bp, Glycine max
attcatacaatttttatctactttatatataattcaaacactatgaatattttgaaaatattttagaccctataaatcaaaatacaatataaatacaaaataacacataaatatcaccatatctatattatattattaaacttactcatcatatttatatccatatatatacaatccaatctaaccttatatacttaatcataatattatacaataattaacttctttaacataatacctattttaacattatc

SEQ ID NO: 69994 - DNA, 344 bp, Glycine max
  unsure (1)..(344): unsure at all n locations
ctctctctctctctgtattactatttttaancaatgaccaaaaccagggcatttagacaactttttatactcatatctaccattaatatgtttactgtataacttgaacttcaaactcttccaccctcttacccttaccatcacccttttcactctttcacaccatcacctcttcacccaccatcaaattctcctcacccacaccaccaccaccaccaccaccaccctccatcaccatcacctattccttcaccttctcaccacaattaccctactaccccttcccctactaatccttctactcaccaccatcaccatcaccctccttctccttttaatccacc

SEQ ID NO: 69995 - DNA, 354 bp, Glycine max
cttctcttaagctttcttagaaccttttaaatattttttctctcaatccaactcaatccattttatccattcagccattatttaatgataacttgatgtctaaatgatactttctaattacatatttacatatagaaattcaaaatttacaactattcatataattgcatctctagaactgaaatactaaaaaatgattcaaaacctactcattctacttcacaatgttctaatcataaaaactctcttataatcagatactaaaatctcaaattcccaatatactaataatctttcaatattattaaaaatatgccctatgttttatggtgtggccacaccctttttaaaaat

SEQ ID NO: 69996 - DNA, 168 bp, Glycine max
aaggggaaaacaagcaagagggccactatgagaggaacctcataagagaggtaaccgattatgcaccctatgaaaagcgtataaccgaattgctaaaagatgaaaaggataagagggcactgaaggatgcaaagagaaagctcgcaacacacaaacgcgcaaagaaaa

SEQ ID NO: 69997 - DNA, 164 bp, Glycine max
taaaacccccaaccccctcccatctctcctcccaaattcctaacctccaaaaattatcctcacataaaacctcttctcacattcccactcccatttctaccccaactaaactcacacctttacctgcgctcaaatattccccactctcctcaatcaattttcac

SEQ ID NO: 69998 - DNA, 188 bp, Glycine max
cccacgcttttatctccctcttttctcttcttttctgttcaaacaatttctcagacattttagacattcttaagcaaaaatcttccctccaaaattacataattcaaatatctcccatattcaagtatttcttgaacaactgcttctttatattcctactcttctctaagtcattacaaaattcattc

SEQ ID NO: 69999 - DNA, 131 bp, Glycine max
aatcaaattaaactcctacaacattggctcttacattaattgccaatccaaatccactgaatcttctgtcacttctgttaatccttctaacaatcataacatatctcaagttactgaaaccactttccaac

SEQ ID NO: 70000 - DNA, 396 bp, Glycine max
  unsure (1)..(396): unsure at all n locations
gacgcacgcgtccgcaacagagtaatatgcttaagctcagggtctgaacccaagagcaagttctatagactgagcatatgtttaactgttnnatgactngtcatcttcccttcatattaaatcattttaataagtatcattatatttctgttctcttattctcatctacatatatgttaatggttcatacacttattcataaatatctacttatatcatatcttacaataaaacatgattaatgattatcagactaaattgcaaaagatataaatcatattgatgtccttacaaagaggtatcaatgctggttgcagccttaattattccaaatcatttaaaatagcagcagctaacagggcacgtgcaataattatactttcaacaaaaagagat

SEQ ID NO: 70001 - DNA, 297 bp, Glycine max
aaaaaaaaaaaaaaatacaaaataaaaataataataaaaaaaaaaaaaaataaataaaaaaaataataaaaaaaaaaattaataaatatataaaaaaaaaaaaaaaaaaaaaataaaaaaaaaaaaaaaaaaaacaaaaaaaaaaaaaaaaaaaaaaaaaccacaaaatacaattaataaaaaaataataaaaacaaataaaataaaaaaaaaaattaaaaatacaaaaaaaaaaattaaacaaaaaaaaaaaaatataatacaaaaaaaaaaaaaacaatataattataatattac

SEQ ID NO: 70002 - DNA, 440 bp, Glycine max
  unsure (1)..(440): unsure at all n locations
aaacacccttgtcgaccacaccaaaattaaaaacataaaaaagcataaaagcacaaaaagacgtaaaaaagggaaaataaaacattttgaagtcatatttgcacacttgattaaaggctgtcgtcccttgtgacggatgcgtggggtgctaataccttccctgtgcgtaaaaacaactcccgaactattcacacttaaagttcgtagaccacaccttttcaattttcccgacgctttcctcaaataaaagttggtggcgactccgcgcattttcctttcatggaagacgcacttgtgagttccgcatcgcccttcccgtcaaaagggtangtttccgacaagggttaacccttttttggccccccctttttttcccccccggggcccccccccggaaaaaaaaaaggggggggttttttaaaaagggggtttttttttcc

SEQ ID NO: 70003 - DNA, 247 bp, Glycine max
tcgaccactcgtccggtcaggcttcatagctaatatatgttcttacttttacatctcagtatatgttcacatgctacagaagttttgcaaaatccaatacactgttagattaacatgcatcttaattgccaactacttctccttaatctgtaccagtttgatataacaatctaccacaagaatcaatccaatatgttaaataatgtccataatcaatccaaatctatcatttttccattataactct

SEQ ID NO: 70004 - DNA, 363 bp, Glycine max
  unsure (1)..(363): unsure at all n locations
aaaaaaaaaaccggccacgcggacggcagganaaaaataaanatnaaaaatttctttttccagcacccaacccacncncctgccctgctttttttacatcaanncccctcccccacacannncaaaannnaatacactcccaaactcacacccatccaaagcacccaacctcactacatacattaataacaaatcttaaacaactcacattaccatatangaccataaacccctatcaaaacttcacaaaacacaaacatttaanccataaacaattattcaaacccctccaataaataaaattntcaatatnncacatatcaaaactcccaaagttctccaaacatttaacactatattacc

SEQ ID NO: 70005 - DNA, 176 bp, Glycine max
  unsure (1)..(176): unsure at all n locations
gaaaaaaaaaaanaaacacttttaactttttttctttttgcattgaatttgaaatacttgaattggaaaaagcgttcgggtttttttgttgttttaacccatcaaattcaaattttaaagccgtgctcttctttcnnnaaaaaaaaanaaaaaaaaaaaaaaaaaaaaaanaaaaa

SEQ ID NO: 70006 - DNA, 360 bp, Glycine max
caggaatcccacgccacttgcaattccatctctgtgtttgattctctgcttcgtcctgtctgtcctcttccgaatcgttaatcgctcgatcgatccatctcccgcttccaatgacaacccctaccgacaacaataacaaccctgcacaggaaacccctaccaaacccttaaacccaaccaaaccaaatccaatccttgccaccgagaacaaccccgccgccaacactaaggactccaacgccaaactttccctcccgcccaatcttgaaaccacccctccctttctcctttttcaaaaaaaattcccctcccccaaccgattcggcatttccgtccaattttccaaaaaaaaaaacccca

SEQ ID NO: 70007 - DNA, 292 bp, Glycine max
  unsure (1)..(292): unsure at all n locations
aaacacccttntcaaccacaccaaaattaaaaacataaaaaagcataaaaacacacccgcccgtatattttttaaaataaaacatccccaccccatatttncacacttnattaaacactatcgtcccttctcacgaatgcgttacattctaataccttccctgtacgtaaaaacaactcccaaactattcacacttaaacttcataaaccacaccttttcaattttccccacactttcctcaaataaaaattacttactactccacacattttcctttcatcaagacacact

SEQ ID NO: 70008 - DNA, 287 bp, Glycine max
  unsure (1)..(287): unsure at all n locations
cccacgcggccgcccacgcataacaaaaccattacatatttttttatataaaanaaaaatataaaaacccctgctcttttctttctaaaaanccccccccccaccancatanactnttacancaacaataactaanttctaccctactattatcttatcactctttaccatctacatacttcaaacattcnaaatatcttctaatcaacacttattccacttttataacaacaatatcaaacatttaacacaaaatatcaatacttaccaattcccattacaattct

SEQ ID NO: 70009 - DNA, 330 bp, Glycine max
  unsure (1)..(330): unsure at all n locations
aaaaaaccaaccgacccacgcggacgcattctcctctctaaattcctcttattctattttttanacaatattaatatatcatggttccgtttttttattaaccaangacaacctccccttatctataattttcattnttaacaacattatccttcttttcaattcaacattttccaaaactgctantcctccctctctnaacccaactccatcaccaacccctacaccatacttcattaacctcacttanttactcactctnntctctccctttcacaaccttcctttatacctttaatccactaaaattatttacactttccaaaacca

SEQ ID NO: 70010 - DNA, 345 bp, Glycine max
  unsure (1)..(345): unsure at all n locations
aaaaaaaaaaaaaaattttattttaaaaaaaaaaanaaaannnnnnncctttccgacctctgttataaaaaaaanancccccncccccacacccaaaaaaaaanaaanaaaaaaaaaaaaaancaaaaaaaaaaaaaaacaaaaaaaaataaaaaaacncaacaacaaaaaaaaaaatttaaaaaaaacaaaaacaaaataaaaaaaaaaataaaataaaaaatacaaaaaaaaaaaaaattaaaaaataacaacatttaaaataaaaatcaaaacataaaataaaattaatcacaaaataaaaacaaaaaataataaaaataatcaaccaaacatattaatctt

SEQ ID NO: 70011 - DNA, 131 bp, Glycine max
cccacgcgtccggtaggattaattgatgtatagaagaatcaattgctcacttatgaaaggtgtatgaggagactttggcacaatccaaccaaccaaccacaaagtggatattttgactctttttttccctt

SEQ ID NO: 70012 - DNA, 116 bp, Glycine max
  unsure (1)..(116): unsure at all n locations
aaaaattaaaaaaattttattaataaaaaaaaaaaaaaaaacccgtctttgttgttaaatnncccncccccaaccaaccaaccacaaaannnatatttttactctttttttccctt

SEQ ID NO: 70013 - DNA, 84 bp, Glycine max
  unsure (1)..(84): unsure at all n locations
aaaaaaaaaaaaaaaaaattatttaaaaaaaaaaaaaaaancnnncccttactttcttgaaaaaaaaaaannccccccccaacc

SEQ ID NO: 70014 - DNA, 114 bp, Glycine max
aaaaaaaaaaaaataaaaaataaaaaataaaaaaaaaaaatcacaaacaaaaaaaaaaaaacaaaatattaaatactaaataaaattataaaaaatataaaatacaaaaaaaaa

SEQ ID NO: 70015 - DNA, 115 bp, Glycine max
acccacgctccgcccacgctccgtagattaattattattaaaatcaagctactataaagtgttgagaacttgcacatcaccaacaacacaatgatatttgactcttttttccctt

SEQ ID NO: 70016 - DNA, 459 bp, Glycine max
  unsure (1)..(459): unsure at all n locations
aaaaaaaaaaaaaaaaaaattttttaaaaaaaaaaaaaaanncaccnttcgttaattntaaaaaaaaancccccccacacacaaananaaaanaaaaaaaaaaataaaaaacaataaaaaaanaaaaaaaaaaaaaaaaaaaaaaaaaaactaaaaatatccaataaaaaaatcaaaaaaaaacaatataacaaaaaaaaaattcaatataaatcacaaaaaaaaatttataaaaaaaaaaaaaaaaacaaataaaaaaataaaaaaattcaaaaaaataaataatccaatctanaaaaaacaaataataaatacaaattccaacaaaataaacaaaataaaaatatcaaaaaatcaaaatatcacacccctttaataaaaaataacacaaaaaaaaatctaaatataataaaaaaaataaaaaataaaaaaaaaaaaaaaacaataataaaataaaaa

SEQ ID NO: 70017 - DNA, 408 bp, Glycine max
  unsure (1)..(408): unsure at all n locations
aaaaaaaacccacgcggccgcgaccccnccgncacccccttccttcaagatctcctttccaagatcctacgccaccaccacctgcctgcttttctataccaaccccaacccccaccacaccatcaaaattctccccttcaagttcttaacccttgangcctttctgtaatccccttttatcttcttgtaaaactatgctaaaactttttatcaggaagctcatcctcccttttacaaactcaccttcaaatcaatactctcaatttttaactctttcttcaaattaataacccattagtctccatcactttcccttttcataaattcatggactaattttaacaccttctctactaccacgatgattttgcttaaatttatctctcttaaaaactaccctaacaaaat

SEQ ID NO: 70018 - DNA, 87 bp, Glycine max
  unsure (1)..(87): unsure at all n locations
aaaaaaaaaaaaaaaaaaattttttttaaaaaaaaaaaaaaaaaaaccctcctgcaaatttttaaaaaaannnnnccccccccaacc

SEQ ID NO: 70019 - DNA, 119 bp, Glycine max
  unsure (1)..(119): unsure at all n locations
ccgcccacgcatccgcccancntccnaatttctttttcacacttnccatatcaaanancgggggcggtttcttttanancaaanatacaacatnnacncacttcaatcatttttttcaa

SEQ ID NO: 70020 - DNA, 341 bp, Glycine max
  unsure (1)..(341): unsure at all n locations
aaaagaaaaaaaaaaaaattataaaaaaaaaaaaaaaaacnnaaaactttcgtnnnntgnnaaaaaaaanncccccccccccacaaaacaanaaaaaaaaaaaaaaaaaaaaaaaanaaaaatacaaaaaaacaaaatncaaaaaacaaataacaaaaactaacacaaaaaaaaaaacaaaaaaaataaaaaaaaaacaaaaaaaaaaaaaaaaaaaaaataaataaaaaaaaaaaaaaaaaaaaaaaacaaaaaacaaaaaaaacaaaaaaaaaaaaaaaaaattaaaataaaaaacaaaaaacacaatacaaaaaaaaaaaaaaaacaaccccaacctc

SEQ ID NO: 70021 - DNA, 260 bp, Glycine max
  unsure (1)..(260): unsure at all n locations
ccggcccgacccacgcgnccgcccacgcgnccgccanaaccgaggagaagaaaaacgccgaaanccccaaaagcgaaaagaagaaaaccaaaagcgcngaaaccccnccaaccganggcaaaacgaagagggagagagaaancgccaaagaggagaacaagaagaagacgaagaaacccaagcncagcaanggcaccccaaaacagcgagacgagggaaccaaaaagggagcagcagaaggaaaaggagaagaggggaaa

SEQ ID NO: 70022 - DNA, 194 bp, Glycine max
aaaaataaaaaaaaaaaaaaaaaaaaaaaaaaaaaaaaaaaaaacaaaaaaaaaaaaacaaaaaaaaaaaaaaaaaaaaaaaaaaaaaaaacaaaataaaaaaaaaaaaaaaaaaaaaaaaataacaaaaaaaaaaaaaaaaaaaaaaaaaacaaaaaaaaaaaacaaaaataaaaataaaaaaaaaaaaaaaa

SEQ ID NO: 70023 - DNA, 359 bp, Glycine max
aaataaaaaaaaaaaataaacaaataataaaatcaaaaaaaaaaatataaaataattaaaagaaaaaataaaaaaataaaaaattaaataaataaaaaaaaacaaacaaaaaaaaacatataaaaaaaataaaaaaaataaaatatataaaaaaaaaaaaaataaaaaaataaaaataaaaaaataaaaaaaaaaaataaaaaaaataaataaaaaaataaaaaaaacataaaaaaaaaataaataaaaaaaaaaaataaaaaaataaaataataaaaaaaaataactaaaaaaaaaaatattaaaataaaaaaataataaacaaatataaaaataaataaaaaaaattaaaaaataaa

SEQ ID NO: 70024 - DNA, 268 bp, Glycine max
ttatcttttcatattcaacttttccattttcccacaacattaagtatttatagcatagattcaatataaaatcaaacatcccccatcctcacaatatcacacttattcttcaatttctactcctcctatattactacaaaaactaccaaccattccaacaatacattaataattactacatcaaaaacatctattcttacaattatatttattacaatataaaaacccacacaaattttcttttcttaaaccatcatcttttatcaaa

SEQ ID NO: 70025 - DNA, 333 bp, Glycine max
aaaaaaataaaaaaaaaaaaaaaaaaaaaaaaaaaaataaaaaaaaaaaaaaaaaataaaaaataaaaaataaaaaaaaaaaaaaaaaataaaaaaataaaataaaaaaaaaaaaaaaaaaaaataaaaaaaataaaaaaaaaaaaaaaaataaaaaaaaaataaaaaaaaaaaaaaataaaaaaaaaaaaaataaaaaaaaaaaataaataaaaaacataaaataaaaaaaataaaaaaaaaaaaaaaataaataaataaaaaaaaaaataaaaaaaaaaaaaaaaaaaaaaaaaaaaaaaaataaaaaaaaaaaaaaataaaaaaaataaa

SEQ ID NO: 70026 - DNA, 215 bp, Glycine max
catccgcactgggtcctggcctacatccacaatggttcgcattcccacggaaaatggcagagaggaacgcatggaagagatcatcagggaccatatggaccccatttcaaagcaagcgatggggatctggaaggatcattgagctagtgccaagcgacaagtcgcagacgcagaaagagcttaacttaagaaaagggatggtctcatcagaaaca

SEQ ID NO: 70027 - DNA, 345 bp, Glycine max
  unsure (1)..(345): unsure at all n locations
aaaaaaaaaaaaaaaanaaaaaaaaaaaaaaaaaaaaaaaaaaaaannaaaaaaaaaaaaaaaanaaaaaaaaaaaaaaaaaaaaaaaaaaaaaaaaataaaaanaaaaaaaaaaaaaaaaaaaaaaaaaaaaaaaaaaaaaaaaaaaaaaaaaaaaaaaaaaaaaaaaaaaaaaaaaaaaaaaaaaaaaaaaaaaaaaaaaaaaagagaaaaaaaaaagaaaaaaaaaaaaaaaaaaaaaaaaaaaaaaaaaataagaaaaaaaaaaaaagaaaaaaaaaaaaaaaaaaaaaagaagaaaaaaaaaaaaaaaaagaaaaaaagaaacaaaaaaaaaaaaaaaaa

SEQ ID NO: 70028 - DNA, 65 bp, Glycine max
  unsure (1)..(65): unsure at all n locations
aaaataaaaaaaattaaattaaaaaaaaaaaaaaattgtacgttgattaaaaaggcccnccaacc

SEQ ID NO: 70029 - DNA, 367 bp, Glycine max
taaataaaaaaaataaaaaaaaaaataaaaaacaaaaaaaaaaaaaaactaaaaaaaaaaaatattaatctcaacacaaaaacaaatcataaataaaaataaaataaataaaaaaaatatatcttaaataaaaaaagtaaataaaataaaaaaaacaaacaaaaataaatatataaaaatatataaaaaaataaaataatattatattataatcattatatttaaaaatcaaaaaaaaaaatataaaattaattaaaataaaaacaacaaaaaaaaacaaattaaaaaataaaaaaaaaaaaaataataaaaaataaaaaaatcaaacattaaaaataaaaataaaaaaaaaaatcaattactatat

SEQ ID NO: 70030 - DNA, 55 bp, Glycine max
aaaaaaaaattaaaaaaaaaaaatttaaatttaaaaaaaaaaaaaaaaaaaaaaa

SEQ ID NO: 70031 - DNA, 293 bp, Glycine max
atcataacacctttactccacaagagattttcttcgtaactcatacaacacctccgatctttgacagattcatttagagtttacagatagagcagctctattctcaccagagttgtcattcatattattcagacaagactaacaatacactaccattttacagtgtattgcatgaccaaaactatttgttacaacttggtacaattctaatcttgtaccaagaatttattaacctttctgctttgctgatttaaattattgcacattttgtgtggggtctactctgcatatct

SEQ ID NO: 70032 - DNA, 93 bp, Glycine max
  unsure (1)..(93): unsure at all n locations
aaaataaattaaaaattaaattaaaaaaaaaaaaaaaaaacactcttgcctttatataaaaaaaagggccgcccaaacaaaaaaaanananaa

SEQ ID NO: 70033 - DNA, 249 bp, Glycine max
  unsure (1)..(249): unsure at all n locations
aaattaaattaaaaaaaaaaaaaaaaaaacctagctttaataaaaaaggccgcaaacaaaaannnaaaaaaaaaaaaaaaaaaaaaaaaaaaaaaaaaaaaaaaaaaaaaaaanaaaaaaaaaaaaaaaaaaaaaaaaaaaaaaaaaaaaaaaaaaaaaaaaaaaaaaaaaaaaaaaaaaaaaaaaaaaaaaaaaaaaaaaaaaaaaaaaaanaaaaaaaaaaaanaaaaaaaaaaaaagagaagagag

SEQ ID NO: 70034 - DNA, 324 bp, Glycine max
  unsure (1)..(324): unsure at all n locations
atcctnnncaataantnaagactccctaaaaaagtattttcaattttctagtgaaaactgcatacaaaagttattgtcaacttcttacacaaacaaaagaaatgtcaattattgattgaaaatgctcactctttacaattgaatttaaatattaaaactctattcaggctcactccacacgtttcgcaacccttttgttcttagaactttctctccccaacatttcataacaatggccaatgccatttattctgcaaaacaattagacttttatctttttcaaaccacgtacataaaaaaactttaaatacaacctcaacataa

SEQ ID NO: 70035 - DNA, 295 bp, Glycine max
  unsure (1)..(295): unsure at all n locations
aaaaannaaaaaaaaaaaannaaaaaacanaaaaaaaanaaaaaaaaanaaaaaaaacaaaaaaaaaaaaaaaaaaaaaaaaaaaaaaaaaaaaaaaaaaaaanaaaaaaaaaanaaaaaaaaaaaaaaaaaaaaaacaaaaaaaaaacaaacaaaacaaaaaaaaaaaaaaaaaaaaaaaaaacaaaaaaaaaaaaacaaaaaaagaaaagaggaaaaaaaaaaaaaaaaaaaaaaaacaaaaacaaaaaaaaaaaaaaaaancaaaaaaaaacaaaacaaaacaaaaaaaaaa

SEQ ID NO: 70036 - DNA, 326 bp, Glycine max
  unsure (1)..(326): unsure at all n locations
attccaaaaatactgtctccaaaattcggtcatggcgcgattaatgtaaaggacagtagtatttnttattctttcggggacgccaccaatgggaaaagccctaaaaaaaaatggaattcctctaagaagtatgataggacttgcacatgcttttaaatcaccttcttctatgacccaattaaatttgatgtttcaaaattgaaaattttagccttttttgactctttttactattctgtgttgctctcttcacaataattttaccgcatccattacttacatgatattctttttcattgtttcaaagaacaacaaaaatttttttt

SEQ ID NO: 70037 - DNA, 272 bp, Glycine max
  unsure (1)..(272): unsure at all n locations
aaaaaaaaaaaaattgactgttttatttaacaaacccttccaacaaaattttgntcttgnaacctcctcaacccactggaggtcgtgatctgtaaatttttagttaattatacaacaaattttttaaaaaaaaattattttctcttctgagctccttcttatttatcgactaatccaccttcaattattttccaagatttcaataaaatcttttcttccgtgttatctcttttacttaattccaaattttgtaagtataatacttggctatg

SEQ ID NO: 70038 - DNA, 334 bp, Glycine max
  unsure (1)..(334): unsure at all n locations
aaaaaaaaaaaaaaattaaattaaaaaaaacaaaaaaaacacgaatcgttnatttaaaaanggacgcccaccccaaaaaaaanaaaaaaaaaaaaaanaaaaaacaaaaaaaaaaaaaaaaaaancaaaaaaaaaaaacaaaaacaaaaaacaaaaaaaaaaaaaaaaaaaaaaaaaaaaaacaaaaaaaaacaaataaaaaaaaacacaaaaaaaaaacaaaaaaaacacaaaaaaaaaaaaaaaaacaaaaaaaaaaaaaaacaaaaaacaaaaaacacaacagagaacaaaaaaaaaaacaaaaacaaaaaaacaaaaaaaacaaaacaaa

SEQ ID NO: 70039 - DNA, 211 bp, Glycine max
agaaaataaataattttatatcctacatttttttttttattatttatatttttttttttaattatataataaaataactcttttttttttaaaaaaattattatttttttttaaatattatttattatttatatttttatttttatattttttttaatataattattttttttatataattaatttatttatattaaaaaattttttttat

SEQ ID NO: 70040 - DNA, 94 bp, Glycine max
  unsure (1)..(94): unsure at all n locations
aaaaaaataaaaaaaaaattttattaaaaaaaaaaaaaaaaaaaaaacgattcgtttaatttaaagaaggccgggcaaacaaaaaanannaana

SEQ ID NO: 70041 - DNA, 262 bp, Glycine max
  unsure (1)..(262): unsure at all n locations
gaaaagaaaaaaaaaaaaaaataaataaaaaaaaaaaaaaaaccgatcgttaatnaaaagggcagcccaccaaaanaaaaaaaaaaaaaaaaaaaaaaaaaaaaaaaaaaaaaaanaacaaaaaaaaaaaacaaaaaaaaacaaaaaaaaaaaaaaaaaaaaaaaaaaaaaaaaaaaacaaaaaaaaaaaaaaaaaaaaaaaaacaaacaaaaaaaaaacaaaaaaaacaaaaaaaaaaaacaaaaaaaaacaccacgaccc

SEQ ID NO: 70042 - DNA, 408 bp, Glycine max
  unsure (1)..(408): unsure at all n locations
aaaaaaaaaaaaaattaattaaaaaaaaaaaaaaaaacaccaagcttttattaaaaangcccnccccacccaaanaanaanaaannnnnnaaaaanaaananagaaaagaaactgaaaaaaaaagaacaaaaaaaacaaaaaaaaaaaacaacagacaaaaacaaacacacaaacacccacgacccaaaaacaaaaaaaaaaggaaacgaaaaaaacaaccaaccaaataaaccaacaaaaaaacgcaacaaaaacaaaactgcaacaaaaaaaaaccaaaaaaaaaaaaacccccggaaacaacaataaaaaaaaaccattaaaaaaaaaattaaataaaaaaaatcaatccaaaaaaaaaaaaaataaaaaaaaaaatactttaaaaaaataaaaattaaccaact

SEQ ID NO: 70043 - DNA, 300 bp, Glycine max
  unsure (1)..(300): unsure at all n locations
aaaaacccgagccgacccacgcgaccgcccacacaaccatccacccaaacatcatgtataaaaaaacaacaaaaaaanatacgcacgctttcttataaaaacttgaccccccacccccacannaacatacntntnntaaattaatcatcaccaccttatcataccacaattaacttcccctttgagaacttattatcaataccctcatctttttctacaaaatatcattcttaagacacttacatatgacctagcaataatcatacccatatctgacacaccatataataaaaaaacaca

SEQ ID NO: 70044 - DNA, 56 bp, Glycine max
aaaaaaaaaaaataataaaaaaaaaaaaaaacagcttgataaaaaaagcgccaacc

SEQ ID NO: 70045 - DNA, 98 bp, Glycine max
  unsure (1)..(98): unsure at all n locations
aaaaaaaaaaaaanttaaattaaaaaaaaaaaaaaaaaaaaaaactccagccttttaaataaaaaagggcccccnccaacccaaaaaannnnnnaana

SEQ ID NO: 70046 - DNA, 415 bp, Glycine max
  unsure (1)..(415): unsure at all n locations
aaaaaaaaaaaaaaatttaaattaaaaaaaaaaaaaaaaaannnaaccctcttngtttntngaatttaaaaaagggccccgcccccaccccaaaaaannnnnaaaannaaaaaaaaaaaaaaannaaaaaaaaaaaaaacaaaaaaaaaaaggaaaacaaaaaaanaaaaaaaaaaagaaaaaaaaaaaaaggaaaaaaanaaaaaaaaaanaaaaaacacaaaaaaaaaaaaaccaacaaacaaaaaaangaaaaacaaaaaaacaaaaacagaaaacaaaaaaacacaaaacaaaaaaaacaaaaaaaaaaaaaaaaaaaaaaaggcacaaaaaacaaaaaaaacaaacaaaaaaaaaaaaaaaaaaaaacaaaaaaaaaaaaaaaaaaaaaaaaaaaagaaaaaccaacacc

SEQ ID NO: 70047 - DNA, 209 bp, Glycine max
  unsure (1)..(209): unsure at all n locations
ttacactttnaatacctcaattnccntaactttacttatcaccatctattattttatntatcaaacttaaaattaaacttttttttttattctatcaattactattanacttttcattaactncctantttctattcactcaactccactttttntattcaaaataaactccttaaatttaatttttaaatcactcttttaattttaat

SEQ ID NO: 70048 - DNA, 77 bp, Glycine max
aaaaaaaaaaaaaaaatttattaaaaaaaaaaaaaaaaaaaaaaccagccttttatttaaaaagggcccgcccaccc

SEQ ID NO: 70049 - DNA, 348 bp, Glycine max
acacacaccccttctttaatttgtttaaaatatctgtgaataaaaaagctttgaaatattggatgcaaggactgtataaaatgaaagcttctgttcttacacttttaatacctcaagtccttactgtacttaacaccatcagaggttgaaggccaaactcatattaatctttttgtttatctatcaattactatttactttcatgaaatcctatttgtattactaaaactcacttttttattcaaataaactccttaatttaatttttagatgacttctttaattttaattttttgaaactttgtcggtgtgatttttcttcataaattcattttattgttttcaaaa

SEQ ID NO: 70050 - DNA, 416 bp, Glycine max
  unsure (1)..(416): unsure at all n locations
gggccgacccacgcgtcctcccactcttcctcccactcttttttttttttttcaataacaaacanctctnaagacttatgttaattcttatttaaccccccccccccatctttactntacttttacaaatcccataaaaatcttcacaccctaaattttcacattcatccaataactactaaatgttttaacaactaaattttttaaatcttcttaccttataaacatatcataacaacttttcatcacaattaccaattattattattacctattttctaataatcatcttttacctcacaaataattaaatctcattataacttatatcttaaattcattcctattttaaaaaaatctcaattattttattaactttacacttcattatatttcttattttaacatccccatta

SEQ ID NO: 70051 - DNA, 251 bp, Glycine max
  unsure (1)..(251): unsure at all n locations
aaaaaccctnnaaccagactaaatttacttttcaaaaaaacaacccacntcccacctattacaaactttttaaataacatatacattaccaacatataaattatcatcccatacaaaaaacaatttcctaacaataataaaatacatatataatcttaactaccctaaaaaaacaacaacttattacaacctaaattctacataccaatacccaacattttataaattttacaaaccaccttcacaaaata

SEQ ID NO: 70052 - DNA, 153 bp, Glycine max
taatttaaaaaaaaccaaacccccccaattcatattttcacacttaattaaaaactttcatcccttgttacaaatgcttaatttgctaataccttccctattcataaaaacaacttcctaactatacacacttaaaattcttaaaccacacct

SEQ ID NO: 70053 - DNA, 51 bp, Glycine max
cgacgttctcgatagcacctggaaccaaccctttccttcaatttttggccc

SEQ ID NO: 70054 - DNA, 322 bp, Glycine max
  unsure (1)..(322): unsure at all n locations
ccctttttattttttccttccactgcccttcacatgaaaagttttctttataaaaaacccttccaataccatantntntnttttncaacaatttctcaattctttgctcctattatcttgncactcttntccatttccatacttcaaacacttgtaatttcttctaatgatacaacaccccacttatattacatcaatatcaaacttcataatcctattttcaacatttaccaattcccatcacaattctctacgaaattttaccaaacccaataccacaaacccttcatttttttcttccataaatacttacttacattcc

SEQ ID NO: 70055 - DNA, 440 bp, Glycine max
  unsure (1)..(440): unsure at all n locations
gcaaatacttttaatcctcttatatcttactcaaacctgngacatccactatagatacagtatcattatcactttacaaccccccccccccatcaccttatccatcaataaattaaattctccaatctttcttcaattatcttaaacttttaaatctattctcataaataccaatctctttactttcataattaaaccctcatccctttatcctttttctccatttcttttctttttcaatatattatatttttccatttacttctaccatttccttcacctaaactaatatncattatattcccattaatttctaatccatcttaaatcatctttccaaaaattaaatcaaaaatacttcctcaaattttctttccttcaaattttccaacttactatataaatccccncccccaataaattttaattccattaaccca

SEQ ID NO: 70056 - DNA, 344 bp, Glycine max
  unsure (1)..(344): unsure at all n locations
tcccactcattttttttctttactttctacttcactttcacagaacaatgtttaattttttataaattcaacccccacccctcatctctcancaatatcttcctcaatctctactgaataatatgaactccttctaccttactcttataactttccttactcttacataattaaaatatcctatctctcccaaaaatccttccagtccttctttatcaaaacctacacctaatatacccccatatacaccactaataaacctctctaacacatatttcttataaaaattaaaaaatcaaatcataaaacttattatcttattctacttccatcaacttctcaaa

SEQ ID NO: 70057 - DNA, 449 bp, Glycine max
cacgcgtccgcaaccatttccgactcatctcaagaccttgtccaacttttcgatagtgctttatatcattgtcagtgtttcatcttcaatcctccccctccaaccccctaatctactacaaataacaccaaacatactccttctttgacgtccgccgttcacaaatctagcatacctttacccaatttgaaaacaaagaaaaatgctaaacagacagcttccaaagacagccacttctcggatgcactcaacaatctcatatagcaaaccatacaagctattaaagctctggagtctatatccccacccacttccgatgatttatataaggataccttgattgaatattcaatcaaacaatctgaccatctttctctctctcaggacatggaatctattgtgtagaccatgatacatcaacttctttccaatgatattcttcattaacc

SEQ ID NO: 70058 - DNA, 119 bp, Glycine max
  unsure (1)..(119): unsure at all n locations
ataacccttataaaattcttcaataatatnttaaaaaagaaaaatattaatattcaacatttccctatcccccttaatcccttttttacaacatttaaccctccttttttttctcaccc

SEQ ID NO: 70059 - DNA, 357 bp, Glycine max
  unsure (1)..(357): unsure at all n locations
ccctcttattatttncatttaatatctctccttctttaaatcttcctcccaattataacttaattttttatctattcctaataaacacatttcttcaaaacaattaccttaaatccccaacctttctcaaaatcttcaccactattttctatttaattttccaaaattttttcattcatcatacattatactatttcaacttaattacctatattaacttataaatacttttttaaaaatatattttattcaacacaacatatatttcttatttatcaatacacatccttctaaataaataaacatttaacaaaacatatttttcttaacaatttcaattacatattataccattat

SEQ ID NO: 70060 - DNA, 110 bp, Glycine max
  unsure (1)..(110): unsure at all n locations
cgcgtgcgggcggctctgtggcggacgcgccggcggttgttgatgtatgaagacggagttcgacctggtgatcgatgaggtgcctagcaacgctcgactcncggcgatta

SEQ ID NO: 70061 - DNA, 129 bp, Glycine max
aaaaatataaaaaaataaaattaaaaaacaatccacaaaaaaaaaatcaaacaaaacataaaaaaaaaatatataaaaaataaaaaaaaaaaaaacaaaaaataaaaaaaaaaaataaaaacatcaatt

SEQ ID NO: 70062 - DNA, 260 bp, Glycine max
aaaaaaaaaaaaaaaaaaaaaaacaaaaaaaaaaaaaaaaaaaaaaaaaaaaaaaaaaaaaaaaaaaaaaaaaaaaaaaacaaaaaaaaaaataaaaaaaaaaaaaaaacaaaaaaacaaaaaaaaaataaaaaaaaaaaaaaaaaaaaaataaaaacaaataaataaaaaaaataaaaaaaaaaaaaaaaataaaaaataaaaaaaaaaataaaaaaaaaaaaaataaaaaaaaaaaaaaaaaaaaaaacaaaaaaaaa

SEQ ID NO: 70063 - DNA, 310 bp, Glycine max
aaaataaaaaaaaaaaaaaaaaaaaaaaaaaaaaaaaaaaaaaaacaaacaaaaaaaaaaaaacaataaaaaaaaaaaaaaaaaaaaaaaataataaaaaaaaacaaaaatataaaaataataaaaaaaaataaaaaaaaattaaaaaaaaaataaaaataaaaaaaataaaaaaatcaaaataaaaaaataaaaaaaaaaacaaaaaacaaaaaaataaaaaattaaataaaaaaaaaaaaaaaaaaaataaaaaataaaaaacaaaaaaaaccaaaaaaaaaaaaaaaaaaaaaaataaataaaaaaa

SEQ ID NO: 70064 - DNA, 81 bp, Glycine max
  unsure (1)..(81): unsure at all n locations
agccttccgnnaaaaaaaaaaaaaaaaaaaaaaaaaaattatttaaaaaaaaaaaaaaaaaaaaaaaaangggagattttt

SEQ ID NO: 70065 - DNA, 214 bp, Glycine max
  unsure (1)..(214): unsure at all n locations
gttttaaatataaaaatcattagcatttaatttgttaattccggtgaagctnctccgggaggctttttttcacatntttactgtcccacctcaacaactgaaaactctacaaaagaatcattatctaatgccatgacaactctaactgtcaactctaaagcatcacctacacttccaaggattgcaaaacatctcaactttatcatttttttat

SEQ ID NO: 70066 - DNA, 343 bp, Glycine max
  unsure (1)..(343): unsure at all n locations
caaaccgaccacgcgtccgggcggctctttatctcattcttcaaccctttagtaacataacaccaaaatccacnaagtcggctttttttaacaaatcaacactcccccaccacacataaatactgtcaaaaccaacacgaaacaatctaataatgaagcaaaaaaaattatataatcgatttcctacaattgctttatagatattttaaaaactttattactttacatacttaatcaattctaagcatcactttccaattttataaacgctaaaacatctgtatacatcatcatatattccaagctttaatttactgcggtttaaaataatatcaccaataca

SEQ ID NO: 70067 - DNA, 102 bp, Glycine max
  unsure (1)..(102): unsure at all n locations
atctcctcgaacncaaacatnngcgcgtgtattataaatgctagaggcccccccaaaaccatttgggatgaaggtcatgattgcacttgctgaaaatggtat

SEQ ID NO: 70068 - DNA, 280 bp, Glycine max
  unsure (1)..(280): unsure at all n locations
acgtgccatatcaaanaacccgcngatttataaaagatcaagggcgcaccacccangcacttcaatcatgggtttcaaagcacaagctcgccagcattggggcactctgggcctctggaattggagcaacacttgtggcttattcatgcaaaaagtctccaatgaagccaagtctcaggcttatccatgctaggatgcatgctcaagctctaactttagcagtgctaaccagtgcaactgctaatcaatattatgaaaaacatgatgttcagccaaaacc

SEQ ID NO: 70069 - DNA, 324 bp, Glycine max
aaaaaaataaaaaataaaaaaaatataaataaacaaaaaaaaaataaaattaatcaatccataaaaaaaaaaaataaaaaactttttaaaaaaaataaaaaataaaaaaaaaaaataaaaaaaatacaaaataaaaaaactaataataaaaaaaataaaaataaaataatctaaaaaaaataataaaaaaaaaaaaaaaaaaaaaaaaaaaataaaataaaataaaaaaaaaaaaaaaaaaaaatcaaaaataaaaaaaaaaaaataaaaaaaaataatatataaaaaaatataaaaataaaaataaataaataatcataatat

SEQ ID NO: 70070 - DNA, 97 bp, Glycine max
ccatccaaataaaccaaaattcattctttaaattacacataatcactatattataacatccaaacttccaaattaaacaacttctaatcataccata

SEQ ID NO: 70071 - DNA, 327 bp, Glycine max
aaaaataataaaaaaaaaataaaaacaaaaaaacacacacaaaataaaaaaataataaaaaaaaaaaaacaaaaaaaaaaaaaaaaaaaaaatcacaaaaaaataaatacaaacaaaaaaaataaaaaataataaaaaaaaaaaaaaaaaaacaaaaaaaacaaaaaaaaaaataaaaaaaactaataccaatcaaaaaaaaaaaaaataaatcatcttaaaaaaatcaaaaaatataaacatcatataaaaaaaaacattaaaaaaaattaaaaaaacatttttaaaaaacataaaaaaaaataacaaaaaaaaaataattatata

SEQ ID NO: 70072 - DNA, 262 bp, Glycine max
aaaaccccgccgacccacacgtccggctatacaacatacatactaacgtacgctcacatccaacttaatatctcttcaatcccgtcacttataaaaaatacactcccccccccctaacaacacattcacttgaaaaaccctgtccttacccaacataatcaccatgcagcacatacaacttacgacaactatcaatataacaaatagaccaacacccatcacccttccaaacatatcctcatcccaaatgaccaatgaaaca

SEQ ID NO: 70073 - DNA, 401 bp, Glycine max
tcaactaccctttaccttgactattcactactcatggccattacaatcattttggaaactcttaacattggctatcttatgccattctacatttagcactactttttctcatcagtaaacatagattgatgctcttgttgtcattgcatattaactatgaaaaacgttgattgatataacttgatcacattgcatattaaaacaactgatgtttaattcattgactgattttatattactatggcatcttcatattgttctccttcttcctgtttcccaaattattctactcattcaactattcaactaatgttttatatcatctttcaaatatttacatcaaaaattcttcacaaacttataattaaaacatctatctcattttaatactttataaaaat

SEQ ID NO: 70074 - DNA, 173 bp, Glycine max
ttcactactcataaccattcgaatcatttagacaattttcaaaattggccatcctaacccaatctactttttacactacttgatctcatcaataaacatatattcaagttcttgctatcacttcatattaactatcaaaaatgatcatttatataactctatcacatttcata

SEQ ID NO: 70075 - DNA, 254 bp, Glycine max
ccacctcgaatgcaataaaagccagacttgcatgattgagacttccccgccacatgcaagacctgacccttttttctctcaaatctacctaaagtatcgcaaaactttgccaatcgcccatttcacgactaatgcccttactcctaatatcgcactcctgtattggaccgatggacagtaatattggtaatggagaatcataaataagtaatcatttaatcagcattcagtagtccatatcaaggaaactccga

SEQ ID NO: 70076 - DNA, 176 bp, Glycine max
acgagaaaatgtaattttcagcactgtccaggaaatttaaagattgtaattctttatgcctcattttattattaaaaaaaaaaaaaaaaaaaaaaaaaaaaaaaataaaaaaacaaaaaaaaaaaaaatataaatatacaaaaaatatatattaaaaaaacatagcatactatttt

SEQ ID NO: 70077 - DNA, 164 bp, Glycine max
aaaaaaattaaaaaaaaaaatttaaaaaaataaaaaaaaaaaaaaaaaaaaaaaaaaaattggaaaaattaaaaaaaccaaggccaccccccctaaagaacccaaccttacttacccttccatccaacctcatacctcttctatagtgccacctaaattcaatt

SEQ ID NO: 70078 - DNA, 266 bp, Glycine max
ccacgctttcacacaaaccttctctccctctatccccattctcttttctaactctttttttgaacctttctaaatcacctccttaatctcatcaccaccaccatcatcatcatcatcttctccaatctctataaccttcaatcactcaaaaccttaccattaaaccaaattaatttacccatttattaaaacaattctccctaaaaaaaaatcaaaaacttcaactttttcttaaccaatctcacaacatttttcaaccttttttc

SEQ ID NO: 70079 - DNA, 354 bp, Glycine max
aaaaaacaaaaacaaaaaaaaaaaaaataaacaaacaaaactaaaaacaaaaaaaaaaaaaaaaaaaaaaaaaaaaaaaaaaaaaaaataacaaaacaaaaaaaaaaaaaaataaaaaaaaaatataaaaaaaaaacaaaaaaaataaaaaaaaaaaaaataaaaacaaaaaaaaaacaaaaaaaaaaataaacaaaaaaacaaaataacaaaaaaaacaaaacaaatacaaacaaactaaataataaacaaaaaaaaaaataataacaaacaaacaaaaaaattaataaaataaaataaaataataaaaaaaacataattaaaacataaaataaaaaaaaaaaaaaaaaaaaa

SEQ ID NO: 70080 - DNA, 173 bp, Glycine max
aaaaaaaaaaaaaaaaaaaaattaaaaaaaaaattaaaaaaaaacaaacaaaaaagagaattcgaggaaaattacacaaacatacaaagaaaatacaactaaaataaagacaccaaaaaacaaaacaatggccgccttttaacaaaaaaaaaaactaaaaaaacacaaacaaa

SEQ ID NO: 70081 - DNA, 280 bp, Glycine max
ttcaaacatctcaacttctatcttctgtaaatatcacgaatcacaatacatgttaataaataccagaacacaacactctcacttcaacactcaacaccttcactatctaccgtttccacatctcacatacaactcaataaatgaattgaaaaactcgattctacagcttacaacataggaactcaaagaacgaatcgatttctcgaagccgctctcaaaatgtcgtcgtgcactccttcactttctttccccttacgtcctcattatcacttctgtcaat

SEQ ID NO: 70082 - DNA, 292 bp, Glycine max
caccggttaaatcactgatactcttcttgttttacattcatttcacaaactaattatctagagatgtttttggaatccatattatcacaaatttaccacaccttcaatgcataatacagccaaaatctataccatacatagacaatctgtcaagcatcttatgtctttacctcaatttactaatactgtaacatcattatcttcgatatatctccatcatcctaagaataatagacttctaactctcataatttaaaataaccaaatatatcaatagaacctgtcttataac

SEQ ID NO: 70083 - DNA, 349 bp, Glycine max
  unsure (1)..(349): unsure at all n locations
cttttctactttgagtcttcttgatccttctttttctccttgaactcaaacatggcagatgaggtggttctgctagatttctggccaagtccatttgggatgagggtcaggattgcacttgctgaaaagggtatcaaatatgagtacaaagaagaggacttgaggaacaagagtcctcttctcctccaaatgaacccggttcacaagaagattccggttctcatccacaatggcaaacccatttgtgaatccctcattgctgttcagtacattgaggaggtttggaatgacagaaatcccttgttgccttctgacccttaccagagagctcangctagattctgggctg

SEQ ID NO: 70084 - DNA, 211 bp, Glycine max
tcttctcattttaaatttatagcttatattcccaatctataccgaagaaacccgggaagtttcaaaactcacacgacccatccactcacaagccattttaacaatattctggacacacatactcaactattgagcaactaaattttatgcaataacatgataatcatttagagattacccaaactaaattctgaaattaacataaaataca

SEQ ID NO: 70085 - DNA, 70 bp, Glycine max
aaataaaaaaaaaaaatttaaaaaaaaaatttaaattacaaaaaaaaaaaaaaaaatattggggatgatt

SEQ ID NO: 70086 - DNA, 225 bp, Glycine max
actaacaatttctgaattttctataaaatttacttatatactatcttctactaacacaatttccaatacttttctcttaatttttttttcttaatttaactacaagtcatttttctccacaatttccctttcatcaacttcttctccccttttattcatatcttaatcactatcttttcatttatatttcaacttttctatctttacttttttatactttaactt

SEQ ID NO: 70087 - DNA, 303 bp, Glycine max
tcctataactataacttcaacacttcattttacaaccgatgctgaagatgctacggctgggtcatttgaaaagtgacaatgactctctcaccctaatggaacaatatacccatcaccacacttacttacactctaacattaaccttatacaagataatgataaacatcttcagaaaacccaaacaataattgaaaatatgcatcttcacaatatacacattgcacctaaacaatctaggtacaacaacaccacctttattaatcgtactcatcacaaattcaacaattctatactcttttaaa

SEQ ID NO: 70088 - DNA, 267 bp, Glycine max
caatttgaacaatattctttactgacattttcaattatagtgtaaattaattttattcaatatgattataatccattatatattaccctaactaaatttaaaaatttgcttaaaatacatttatattttacacaacatcttactaaaaattcttacaatataatatttaaacttctacataaagaattttaaacttcactaacttttcaaactgaaaatatatttttaaaactataatagtttaattatcttctactaactacaata

SEQ ID NO: 70089 - DNA, 461 bp, Glycine max
  unsure (1)..(461): unsure at all n locations
aaaaaaaaaaaaaattanatataaaaaaaaaaaaaaaaaaaaaaaggaaacgataaaaatttcaaaaaaagcaaaccaaaacccaacaaaaaataaaaaaaataacaaaaaaaaaaaaaaaaaaataataaaaaaaaaaaaaaaaaaaaaaaaataaaaaataaaaaaaaaataaaaaaataaaaaaaaaaaaaaaaaaaaaaaaaaataaaaaaaaaataaaaaaaaataaaataaaaaaaaaaaaaaaaaaaataaaaaaaaaaaaaaaaaaataaaaaaaaaatatataaaaaaaaaaaaacaaaaaaataaaaaaaaaaataaaaaaaaaaaaaaataaaaaaaaaacataaaaaaaataaaacacaaaaaaaaaaaaaaacaaaaaataaaaaaaaaaaaatatataaaaaataataaaaaaaataaaataaaatatataaataataaaataaaaa

SEQ ID NO: 70090 - DNA, 346 bp, Glycine max
aaaaaaaaatacaaaaaacaaaaaaaaaaaaataaaaaaaagacaaaaaataaaaaaaaaaataaaaaacaaataaataaaaaaaaaaaaaaataaaaacaaaaaaatcataacaaaaaaaaaaaaaaacaaaacaaaaaaaaaaaaaataaaaaaaaaaaaaaaatcaaaaaataaaaaataaaataaaaataacaataaaaaaaaaaaatattaataaaaataaacaaaaaaaaaaaaaaaaaaaaaaaaaaaaataaaaaatacaaaaaaaaaaaaaaaataaaaaaaaaaaaaaaaaaaaaaaaaaaaaaaatataaacaaaaaaaaaaaaaaaaaaaaaaa

SEQ ID NO: 70091 - DNA, 371 bp, Glycine max
aaaaaaataaaaaaaaaaaaaaaaaaaaaaaaaaaaaaaaaataaaaaaaaaaaaaaaatataaaataaaaaaaaaataaaaataaaaaaaaaaaaaaaaaaaaataataaaaaaaatataaataaaaaaaaaataaaaaaaaaaaaaaaaaaaaaaaaaacaaaaaaaaaaaaataaaaaataaaaaaaaaaaaaaataaaaataaaaaaaaaataaataaaaaaaaaaaaaaaaaaaaaaaaaaataaaaaaaaaaaaaaaaaaataaaaaataaaataaataaaaaaataaaaaaaaaaataaaaaaaaaaaaataataaataaaaaaaaaaaaataaaaaaaaaaaaaaaaaaaataaaaaaaaaaa

SEQ ID NO: 70092 - DNA, 350 bp, Glycine max
cttttctactttgagtcttcttgatccttctttttctccttgaactcaaacatggcagatgaggtggttctgctagatttctggccaagtccatttgggatgagggtcaggattgcacttgctgaaaagggtatcaaatatgagtacaaagaagaggacttgaggaacaagagtcctcttctcctccaaatgaacccggttcacaagaagattccggttctcatccacaatggcaaacccatttgtgaatccctcattgctgttcagtacattgaggaggtttggaatgacagaaatcccttgttgccttctgacccttaccagagagctcaggctagattcttggctga

SEQ ID NO: 70093 - DNA, 62 bp, Glycine max
tctctttgctacttttaatcttcttgatcctttttattttcctttaactcaaacatttcata

SEQ ID NO: 70094 - DNA, 390 bp, Glycine max
  unsure (1)..(390): unsure at all n locations
cacgtactcggtctctgaattcctcgtggtcgactccacgtcgttccgtcccacgtcgtctcgtatttaaattctataannttggtgcctantgttatactcnnaatcttaagttctcgtaaattggtcaatgtgtaaaattatctggtgaaaactaagttgccataagccatgaaggtttggttgaagtnnctttttttattagtnntttttttacttctacttcnntagagctcattctaagtttcnntcttcgagggtcctaagctttgcttctaaatgtccttttcaattgcttttaattgtttgaatannatccttgaannaaattgtcttgttataaactttccattggtttaagctttcattttcattttttttttaggtctt

SEQ ID NO: 70095 - DNA, 131 bp, Glycine max
acgcgtactcacactcttactatacctttcacatctactctctatcttattcatacactactcataaccggttcagttaaatttacaaccaacactatccactcacttatatcattctactttcttcacta

SEQ ID NO: 70096 - DNA, 354 bp, Glycine max
ccttactttacactagattaaaacctggtcagggcatatttccttacagtgaaactgcacaaaagacctaacaaatctcagcggttcccattgtatgttcatgtgtagatctcaatggattgatacttttatggaatatgctaacacacctgaaaagattcaaaaatctaacctgatcacccaaccaaccttagttaggaatctaccaagtcatcatgaattgacggtaacaacgcttgcaaaggctaatatcatgatgctatttaaatatcaataatgtaacccttcttgatgttggacttcctaaatatttggttggttaaaatttttaatttatactgtaatactatttta

SEQ ID NO: 70097 - DNA, 273 bp, Glycine max
acgatcgaaaactcaaacactttatcaaacactttcaatatgatgcttaaaccctgacttatcggagaggtttattctatagatgcacatgcccaccaacctcctactgactacgctcattcagatgctgcaaatactaatatctaagaagctgattaaaacttacttaatcacatgctaccacattagaaacaatgaaagggaaaaacatgacaacctactaagtgatataaaaaattagaatcatcctaaacaatataccgaaagatatta

SEQ ID NO: 70098 - DNA, 428 bp, Glycine max
aaaaaaagaaaaaaaaaaaaaaaggaaaagaaaaaaaaaaaaaagaagaggaaacccacacaaaaaaataaaaaaaaaaaaaaacaacaaaaaacaaaacaaaacaaaaaaaaataaaaaaaaaaaaacaaaaaaaaaaaaaaaaaaaaaaaacaaaaaaaaaaaaaaaaaacaaacaaaaaaaaaaaaacaaaaaaaaaaaacaaaaaacaaaaaaaaaaacacaaaaaaaaaaaacaaaaaaataaaaaaaaaccaaaaaaaaaaaaaaagataaaaaaaaaaaaaaaagaaacaaaaaaaaaacaaaaaacaaaaaataaaaacaaaaaaaaacaaaaaaaaaaaaaaaaaaaaaaaacaaaaaagaaacaaaaaacaaaaaaaaaaaaaaaaaaaaaaaaaaaaaaaaaaaaaagaaaaaaaaa

SEQ ID NO: 70099 - DNA, 453 bp, Glycine max
aaaaaaaaaaaaaaattaatttaaaaaaaaaaaaaaaaaaaaaagaaacgaaaaatattaaaagagggaaaacaaaccacaataaaaaaaaaaaaaaataaaaaaaaaataaaaaaaatataaaaaaaaaaaataaaaaaaaatataataaaaaaaaaaaaataatataaaaaaaataaaataaaaaaaaaaacaaataaaaaaaaaaaaaaaaaaaaaaaaataaaaaaaaaaaaaataaaaaaaaaaaataaaaaaaaaaaaaaaaaaaaaaataataaaaaaaaaataaaaaaaaaaaataaataaaataataataataaaaaaaaataaaaaaaaaaaaacaaaaaaaataaaaaaaaaaataaaataaaatacaaaaataataaataaataaaaaaaaaaataaaaaataaaaataaaaataaaaataaaaaaaataataaaaatata

SEQ ID NO: 70100 - DNA, 105 bp, Glycine max
aaaaaaaaaaaaaagaaacgaaaaattaaaaaagaggataaaccaacccaaaaataaaaaaaaaaaataaaaaaataatatcaaataaaaaaaaaaatatataat

SEQ ID NO: 70101 - DNA, 63 bp, Glycine max
cggacgcgtgggtttcttgcagccaacggttacattttaacttaaaattatttcgtggggtgc

SEQ ID NO: 70102 - DNA, 195 bp, Glycine max
aaaacccggcccgaccgacgcgtccgaggagcaggaactcacttttttcgcagctgtcttttgggggctttcattttcttggggtggcaagatgtaccccttggaggaaaaaattccccagggttagggtgctgtgcccactggatttgggggatcaggtggaccggccttggttggtcttaaaaatccccacca

SEQ ID NO: 70103 - DNA, 60 bp, Glycine max
ggtttggaaaacccggcccgacgcacgcgaccgttggtttttttttttcggatttcttgc

SEQ ID NO: 70104 - DNA, 140 bp, Glycine max
aacccggcccggcccacaccgcgcgggagctttggatatctatagcgaaagcgtgtcaccaccaaaaaccgaactggtcccgagtgttttttttactctttcaaccatcgaaattcaaaacccttccgaccccacactta

SEQ ID NO: 70105 - DNA, 141 bp, Glycine max
gaaaacccggcccgaccgacgcgtccaatggatcttggttattttttataaaggggttgccaggcctttatttggaatttacccggggaagtttgttccagcaaaaccccccccaaacaaagtgtacatttataaaggggg

SEQ ID NO: 70106 - DNA, 113 bp, Glycine max
gtccgttgcctaaaaccttaaacaccttttttttttttccctccgctcggggctctccctggggtaattgcacatgggcggacacagaccctttggtttccaaggttgaaaca

SEQ ID NO: 70107 - DNA, 272 bp, Glycine max
  unsure (1)..(272): unsure at all n locations
gcgtacgagagaatgtaatttcaacccctgcccagaatttttaaggatggnaatctttatgccttagttttttttttaaaaaaaaaaaccccaaaaaaaaaaaaaaaaaaaaaaaaaaaaaaaaaaaaaaaaaaaaaaaaaaaaaaaaaaaaaaaaaaaaaaaaaaaaaaaaaaaaaaaaaaaaaangggggggcggccgttttaaaggatccaagtttactaaccggggcttgcaaagtaaaaatttttttttagggcccccaaaattaaa

SEQ ID NO: 70108 - DNA, 115 bp, Glycine max
ctctctacatatatttttttttttattgttatatttttttttcttttttttttttaattttttttttttttatatttttattttttttatattatttgtgttttttttttttttt

SEQ ID NO: 70109 - DNA, 62 bp, Glycine max
  unsure (1)..(62): unsure at all n locations
gcgtccgccggcgcttccgcccacgcgtccgcccactcgtccgcggacgcgnggggttctat

SEQ ID NO: 70110 - DNA, 110 bp, Glycine max
gcttttcctaaagctccttttggtcttctttgggggggcattccacaattccaaaaaagaggccaatggggtggatgatgccaaaatttccgggggaagcttttgggggg

SEQ ID NO: 70111 - DNA, 334 bp, Glycine max
cccttttgttgtttttcctctagacaacgagcattggacacaatgaacacttataagtatgtatgagcattttattaatgttttgcctacagtatacactgacttgagtgaacatactatccagtcaaaccatttctctgtgacagaacacttcatgacttgagacttgtatcatctgcattcccttcccagtgttttctttttctataacctctctccaattaatgttacttttacataataaaatgtctcattcttacatttttttactaatttttgatccatatttttaagtattttaaccgtttctttaatactaaattcattcatctat

SEQ ID NO: 70112 - DNA, 242 bp, Glycine max
acaaaccctctctccctttaccacccttttctcaatctctctctaatggtacctttgtaaaactctcaccgactcaatatcaacaccaccaccatcatcatcattatctattccaatctctataaccttcaatcactcaaaaccttaccattaaaccaaatgaatttacccatttctaacaacaattcttcctaataaaaacttcaaattcttcaaccttttcttaaccaatctcacaacat

SEQ ID NO: 70113 - DNA, 388 bp, Glycine max
  unsure (1)..(388): unsure at all n locations
atatccatngtttttttacattttttatccattaaaaaactatgcattattagaactattaaaagctatactagttcaaatatatcttttacaaatatacatatttaacttatattattataacttattccttccctcaaaaaaaaaatattaccatataataataacctattatcctccttcatttaatatattacatctataattaataaattctaccctttcacataatataaaaataatcaaaatcaaatacatcaatctcacatctctaattattataacaaaattcaaacaccaaattttatccaaaatatcaatatatctcacaatatctaccttatatttacaaaaattcccaccttattcaattccataatccttttta

SEQ ID NO: 70114 - DNA, 432 bp, Glycine max
cctatatctatatttacaacattttatactactactgatattggggctactacgactgtttctactgccacagagtcaatcactcgcttaccataatgggtatgtatagccatgaccccacttcctttcactcttacattgcccttctacaatagaggtttatacatcttcagatagtaaaagaaatgacgtatgataggaaacttcacaagatgctcaatgaacctaaacaatacacttccaacaccaacacctttaataatcctacttatcacaattccaacaattctatcctctctcacccttaaattattattccatcaaagtcaccacccacagttactctctctatatcaccaacattttaacataagcaaacaggactaataaaagtgcttaaaccacctgtatcaatgaaactatcacattcac

SEQ ID NO: 70115 - DNA, 366 bp, Glycine max
  unsure (1)..(366): unsure at all n locations
gctagaatcaggcanaatcagaactcttctaaaagaacacatgcccatctcaaggaacttgctacttgcactttttacattatccaccctcctccatggctcatcatcccaaaccagacacatcatccttaataccacagtctggatcatccctactaactacacttccacctacaccgcctgatctaccaacaaaacctataccgttaactacactctctttttcaacatcgtcaactaccaacacaacttatccaaagtaactaaatcctcctatctacaccttcaaccacctaaacacccttttcacccttacctactatccatcaaccttgaccctgaaccaaacactgtaacaatactaca

SEQ ID NO: 70116 - DNA, 274 bp, Glycine max
gacccaggcatccgcccaggcttccgtacaattttgagttctgtagatataaaccaaacactatgtagaatcgcgggatattctggaccatatttgtgaaaaatgaacagaagtgccaaatctcccaaaaagtgcaccatagctatgggaaaatatttgagattcttaacataatgatatccatttaattacaagccaatctatccggatttcgggattcttaatgtaagacaataaatgatttctttaaacataatcctatttgtacaatttt

SEQ ID NO: 70117 - DNA, 409 bp, Glycine max
tcgacccacgctccgaaaaatgtaattttcagcactgtccaagataattaaagaatggaaattcttaatccctagtttaattagaaaaaaaaaaaaaaaaaaaaaaaaaaaaaaaaaaaaaaaaaaaaaaaaaaaaaaaaaaaaaaaaaaaaaaaaaaaaaaaaaaaaaaaaaaaaataaaaaaaaaaaaaaaaaaaaaaaaaaaaaaaaaaaaaaaaaaaaaaaaaaaaaaaaaaaaaaaggggggccctttaaaaaaaacaaaatttaaaaaaacatgattttaaataaaaaaattttaataagggaacaaaaaaaaaaaataaagggcccgtttaaaaaaaaagttaaatgaaaaaaaactctgattaaaaaaaaaaaaaccacttagaaaaaaaaaccttttttt

SEQ ID NO: 70118 - DNA, 159 bp, Glycine max
ataaatctcatatacctcagactatttggaaaaattaaaaaaacataaaaaccaaaaaaaaaaaaaaaaaaataataaaaaaaaaaaaaaaaaaaaaaaaaaaataaaaataataataacaaactaataaaaaaaactctacaaaaataaataaacaaa

SEQ ID NO: 70119 - DNA, 322 bp, Glycine max
cccacgcgtccgacaagcatttcatccctttttacttctatcatgtcttaagctttataggaaagttttcacaaatcaacagggcttctacgatcatattctatcccttccaacaatgcctaactaccttgctgctatgatcttgacactctttgccatttccatacttcaaacagacataatgcctgctaatcaacacacatgccacttgcatcacaacaaaacccaatattcaagctcaagtctcaatacttaccaatgcccatcacaatgctcaatgaaatatttccagacccaataccacaagccctgcatgcttttc

SEQ ID NO: 70120 - DNA, 155 bp, Glycine max
tcctatatctatatttacaacattttatactactactgttcctggtgcttctagaactatttcaacatccacgtatcaatcactcacttaccataataattattaataaccatgaccccacttactttcacacttccaattccctacaacaatat

SEQ ID NO: 70121 - DNA, 395 bp, Glycine max
cgacccactcataacaatgtccaacttcataccacgttctctcattctctacttatcactaataaatcaaatccgtcactttctgtatcttatctagaaatctcaattctattatataaaatccacatcaaagacaacaaaaaatacacaacaaacatatgactcaacattaccacatgcaatctacttttacactctaacaacaccgatatttgaaatacaaaccgattctacacagacaacaaagaactaaagaacgatcaactccaccaagcaccctcaaaatttcgactgcacacctacactaatatactctttctgctcattatacatatgacaatccaacaccttacgcactctaagaccctcaaacatcacattaatgcttacaacta

SEQ ID NO: 70122 - DNA, 261 bp, Glycine max
  unsure (1)..(261): unsure at all n locations
cccacgcgtccgcccacgcgtccgcgaaacgttcaaccgcacacaacacaacagcggcgtttgagcaattgaacaagcaaagaaggctccttgaacaggacaaaacaaaacaaactggtcttgttgtgttgagcctaattgctatcaatattcaatattttatactattncttattctaaatctnccagttatatggtttggatttgctaataactcccatcaaggcccaaaaatgggtaccatcgttgagcagatacaca

SEQ ID NO: 70123 - DNA, 407 bp, Glycine max
  unsure (1)..(407): unsure at all n locations
gcgccgagttttactcccactcctccacccacgctttatcntatgtattcacttctataggccaggacatttatgtggtttacttctaccattacctaacctacttattgtactttaatcactacttgttcacatcagtaaaaataaattcccgtgctagttgtcattgcatattaactatgaaaaaggttgattgatataactttatcacattgcattgtacctcaacatatgcatacttcattctctcattccatattacaataatatacacaatattttctccttctgcctgtttcccaaattaatttactcattcaagtattcaactattttataagatcaaatttcaagtattttgttcaagtttctttaaaaaggtgtaattcaaactctcatatcatttc

SEQ ID NO: 70124 - DNA, 305 bp, Glycine max
  unsure (1)..(305): unsure at all n locations
aacctcaccccatcctacntcttntntattaatcattaccttnttaccaaaacatcattaacaacccaantgaatttctctttaaaataatctcatctttctctctaaatcatctttcttataacacttccatcttcctataaatcctcatacttttttctaacacaccaaaaatcaaaaaaatacaaaaaattaataataaacattaaataatacatcacttaacaaaaaacttaaataaaactcaactaaacattcctaacatatattctcttaatataaaaaatattaattacttccttccc

SEQ ID NO: 70125 - DNA, 375 bp, Glycine max
  unsure (1)..(375): unsure at all n locations
ctctacatcctgctctcccaaattccactgctgttagaatcatctcaaattctcgtttgtatacacgtaaatcacttatctattagtaggattttaatgtatttcaaatatttgtataagtagaaatttctttctgtcatctggttttggttcaattatgtaggtggtttaacattcatagcttcatgaccaccaagttctcaaatactgtaaatagctgcaaaaaaatatatccaacaacaaaaataacaaaaataaattcgcattttacatcggttctaggnaaaaaaaatttaatataataaataattaattataaatttttttttattataatataattaatattattattttattattatttataataat

SEQ ID NO: 70126 - DNA, 386 bp, Glycine max
  unsure (1)..(386): unsure at all n locations
gctaaaatttttctcacttgttcatcncannatnnnnagagatgctagacaagtttttctaaaaccnntacattcctatataaacatgcatcttaatttccaattacttctcgtgaatctgtaccattttgttataacaatttactacaataagcaatcaaatattttgaagaatgttcaaaatcaatccaaatctatcatgttgccattagagctcttaaagaaactgctaataaggtttgcaccataaaaaatcatagttcttgaacatcataattatctacatcaaccaattgaagcatgttttaattgcttgtatcatattaagatgttccaatcaatcaatctttggcctaaaatcataataaaatattaaaattgacttc

SEQ ID NO: 70127 - DNA, 268 bp, Glycine max
aaaataaataaaaaaaataataaaaaaaaaaaaaaataaaaaaaataaaaattaaaaaaaaaaaaaaaaaaaaaaaaaaaaaaaaaaaaaaaaaaaaaaaaaaaataaaaaaaaaaaaaaaaaaaaaataaaaaaaaaaaaaaaaaaaaaaaaaaaaaaaaaaaaaaaaaaaaaaaaaaaaaaataaaaaaaaaaaaaaaaaaaattaaaaaaaaaaaaaaaaaaaatataaaaaaaaaaaaaaaaaaaaaaaaaaaaaataaaaaaa

SEQ ID NO: 70128 - DNA, 319 bp, Glycine max
acttaaaaaacaacaccctcttctttacaatttatccactatacaccctcttattattatcattctctatttcaccatcaacacttcttccttcaaaacatgtctcacacattattacttattcattctatcttttttcccattttctactactattcttataaaatcacttaataaatcatatttcataatttacatttaattcatatttttcttccattctttctcttaaggatgagaaggcattgctcaaaacataatccaacaatttggtttatttcactttcttaacttttttccttaacatgctaacaaaaac

SEQ ID NO: 70129 - DNA, 132 bp, Glycine max
  unsure (1)..(132): unsure at all n locations
gccacgcgtncgggangattaattgatgtatttaagaatttattgctcacttataaaaggtgtatgaggagactttttcacaatccaaccaaccaaccacaaagtggatattttggactctttttttccctt

SEQ ID NO: 70130 - DNA, 450 bp, Glycine max
atcacccaacaggaaaaaagaaatccgagttttaggaccttgtccccaccccaaagatccaggggagagtgggcgttccattgcctgattctaacttacgtggtcgcagctgaggctgccgtggccattctgctaacccttcccacgcccaaactcctaagggaccgtttcgcctctctcgtttccctcattcttcaacccgcgcttttcattgtcccctttgcggggttccaactccttgatatatactggaaaaatgagcatcggttgatgtgtacctctgaagtttgtactgctgcggagagagatcgatatgagaaatctatatacaaagctcagaggaatgtaatacttgtgtgtacagcatgtcttctctactggtctatcagccgcatttgcaagtatcagaaagaaatccagagtctggaggaagggagaaagagatcaagt

SEQ ID NO: 70131 - DNA, 267 bp, Glycine max
cccccccccccccccccccccccccccccccccgccaccacccccccccccccccccccccccccccccccccccccccccaccccccccccccccccccccccccccccccacccccccccccccccccccccccccccccaccccccccccggcccccccccccccccccccccccccccccccccccccccccccccccccccccccccccccccccacccccccccccccccccccccccccccccccccccccccccccccc

SEQ ID NO: 70132 - DNA, 269 bp, Glycine max
  unsure (1)..(269): unsure at all n locations
ttttacacaccnnctnattnaaaaaaagatgttttttatacatgacgcgcacccctcaacaaattcattttccttcaaatcttttctttagaaatacaatcaacacaagttcaaatatgtatctaatcttccttcccctccacatttaccaatttattacttttaataacatttattcactgtaaatttcttaatatataaaattcattcgaaaaaatataaaacttttttaaantatctactcttattaaaccttttatcttttaaat

SEQ ID NO: 70133 - DNA, 300 bp, Glycine max
  unsure (1)..(300): unsure at all n locations
cccccccccccccaaannnnnnnnannnnannanaaaaaanccccccccccacccncccccccaccccccccccccccccccccnacacccccacccccccccccccccacccccccccncccccccccccccacaacaccccccccccccccccccccacacccccccaccaccccacccccaaccccccnccccacccccccccccaaccccccccccccccccnccccccacacccccccacccccccaaccccccccccccaaccccaccccaccccccaccccccccccgccccc

SEQ ID NO: 70134 - DNA, 261 bp, Glycine max
  unsure (1)..(261): unsure at all n locations
ttttcaacaatttctaatttctttnctcctataatcttatcactcttttccatttccatacttcaaacanttttaatnnctcctaattaacaataattccacttttattacaacaatatcaaatatttaacttnaaatatcaatacttcccaatccccatcacaatcctctattatatttatccaaacccaataccacataccctccatatttttctttcaaaaattcttcaatacattcctttttattcccccaaattat

SEQ ID NO: 70135 - DNA, 124 bp, Glycine max
  unsure (1)..(124): unsure at all n locations
cctttactttttttcttttgcatgattngaatcttgattggaaaaacgacgattgtagaagtttacccatcaattcaattttaagccgtgccttcttcaaaaaaaaaataaataaaaaaataaa

SEQ ID NO: 70136 - DNA, 323 bp, Glycine max
  unsure (1)..(323): unsure at all n locations
ttcctntatattctctatcaaatacaaacatagaattctaatatcctattaccttgcactttcatatgaatctaccctactttatcatattcttgaacatcccaaacctattcaaactcattctcatcttagttctaactctcatacaacttactatcaaaaaaattatctctaacttgaagaccttatcctatatcacaacatttttgaaaataataatcctctaataactaaagattttcataattattcaaccccaaaaaatttttaataaacctaacaattctcaaccattgtaaaattcacttatacctttttccttt

SEQ ID NO: 70137 - DNA, 184 bp, Glycine max
  unsure (1)..(184): unsure at all n locations
cccccacccccctcacatctcactttcaaaacaatccatatntcccactctttaaaaaacctcataatactatataaccctttctcaccctatnaaaacacaataacttacatactnaanatacttaaatataatatcacacttaaaacttcaaatacaaaacacttaacacacacacactcaa

SEQ ID NO: 70138 - DNA, 118 bp, Glycine max
  unsure (1)..(118): unsure at all n locations
tctcnaatttttttttcctcttcatctccnancacacaccactcctctatagattaattatacaccacctgggcccccnccaatcntaaaanccttcnacatccaatcccttcctttc

SEQ ID NO: 70139 - DNA, 252 bp, Glycine max
  unsure (1)..(252): unsure at all n locations
tcgggcacgcggtnnaaatcaagttatatgtcttctggttgtagacaggaggggcacaatacggattatctagatcatgttcttagagaatccacatgcgccacgatatttgcgacatggttcaagngtgataagacagtgaaaatctgggccatagagatgggagtctgtcaaggcancttatgttctttaccctcatatttacggagtaggtgtaaacagccattttctntggtgttgggtctcccatca

SEQ ID NO: 70140 - DNA, 352 bp, Glycine max
aaaaaaaaaaaaaaaaaaaaaaaaaaaaattttaaaaaaaaaaaaaaaaaaaaaaaaaaaaagaaaattttaaaaaaaaaaaaaaccccaaaaaaaaaaaaaaaaaaaaaaaaaaaaaattttttttttttttaaaaaaaaaaaaaaaaaaaaaaaaaaaaaaaaaaaaaaaagccccccccctttaaaaaccccaaatttttccccccctttctaacaaattaaatttttttttttttcccccccaaaataaattcccccccccctttttaaaaaactttgtaattgaaaaacccctcttttccccaaattaaaaccctttaaaaaaaaccccctttccccaatttgtatt

SEQ ID NO: 70141 - DNA, 299 bp, Glycine max
  unsure (1)..(299): unsure at all n locations
ggccattnncatttttttcacaatcctactccaactccacacagactnnntcacaaagaacttttttacaaaaacacatccccccccctcanacaattcttcatcatatatccaatatatcaatcaacatctcctactttattcatttccccatatcaaattttcatacaactacaaactccactctcatatacattaaaataaattttattaactcccacatttattaaaaagagancgnacttatacccataataaaaatagttcactctcatatattcttattaaaataaacaaat

SEQ ID NO: 70142 - DNA, 341 bp, Glycine max
  unsure (1)..(341): unsure at all n locations
cccacgcgtccgctncttttttttttctcttttttttatttccttaaaccattgcccaaacgctgggcttaaatcctcctgttcctcctcnaacctgtaantaatgtttttcctgtaaaccttgaacttaaaactcttccaccctcttaccctcaccctcaccctgttcactcccccacaccagcacctcttcacccaccagcaaatgcttctaacccacaccaccaccaccaccaccaccacccttcagcaccagcacctgttccttcaccttctcaccacaattaccctcctacccctgcccctgctaagcctcctactcaccaccatcaccatcaccc

SEQ ID NO: 70143 - DNA, 250 bp, Glycine max
gccgtcggccaagccttccgttcaaaacggccggcgactgaccccgattggaggtccagggaagccaccgttgccgcaggttccagcattattatttttaataacaccagcgccgggggtggcagtacagtatagtaatgtaactggacatctcatccagcccatgtgatagggtctgcctgaaatgagtatgattattatatagtttcttttttttaacttgacctttattttagtgaaaggatcgaat

SEQ ID NO: 70144 - DNA, 435 bp, Glycine max
cccacgcgtccgcccacgcgtccgcccacgttttcgcttatatataacgacggcggtagtggtaagtatacacaaactgaactttataaaaagactcttttacctaattggctagttcacaccctttaagaaagttagttaatttagtttagtaacattaagttctttagtaatttgtattatttttccaaaattatccttcaaattattgggactcattatctttctctttctaattaatcacattctgcctaatcgattaatgtgtgttagccttgttcttcaatccttacaagagagagaattcattctatctttttaattcataacattattgtaaagtaattaagggtattttaaacaaaaaataattaatgcaaaagacaacttgaaaagagtcttataaaaagggataaataaaatgaaaaaagagtc

SEQ ID NO: 70145 - DNA, 399 bp, Glycine max
gaagggctctcctggcaggttgagagtacttatgccggtagattctaacgaagatgatgaggaaattgaggtggttggttatgtgaaattttctgagcgagtaactcagtcattgtctggagtttctatacgacctgcttcagatggtaagacagacttctacgaggttagtcacagacttgagagtggggtatacatgtgcgattgattttgtaatcatagttgattaataggggttgtactttttcattttttggtcatgagatttatggtttggttgtgtttatagcattcttggatatggatcatgtaccttgaactctggaattatctgaaaatctttgtttctctgttgttatggctgtgaatttacatcaatggattgtatttggtcttcac

SEQ ID NO: 70146 - DNA, 468 bp, Glycine max
  unsure (1)..(468): unsure at all n locations
ttttattaaaaaaaaaaattttatttttaaaaaaaaaaatnaaactctaactttctatttttaaaagcccncccccacaaaaaaaaaataaaaaaaaaatttttctttttttatttattttttttttttttttttttcttctatattaatttttttttttttttcttttattttatctacaaattttttttttatttttttattttttttttattatctttttatttatttttctttttatttattctttatttttttttttatctttttttttttttttttttcttttttaatctttttttcttttttttttttttttttatatattaattttatatattattcttttttttttttatttattttttatttatctatatttttttcttttcctctttctatttttatttttactttatatctttattttttttatttttatttatatcttttctattttctattttt

SEQ ID NO: 70147 - DNA, 79 bp, Glycine max
  unsure (1)..(79): unsure at all n locations
aaaaaaaaaaaaaaaaaatttaattaaaaaaaaaaaaaaannaaacnttttattttttttattnnaaaacgcccggccc

SEQ ID NO: 70148 - DNA, 448 bp, Glycine max
  unsure (1)..(448): unsure at all n locations
aaaaaaaaaaaaaatttananttttanaaaaaaaaaaaaaaaaaaatttgtaatgtcttatttnaaaagggcaacccgaaaaaaaaaaaaanaaaaaaaaaaaaaaaaaaaaaaaaaaaaaaaaaaaaaaaaaaaaaaaaaaaaaaaaaaaataannaaaaaaataaaaaaaaaaaaaaaaatttaataattatttttttttttaataatatttttttttttttttttaataaaaaaactaaaatttaaataaaatataaaaaaaattatttaatttattttttattatttttgggggggggtatttttatttttaaataaaattattttataaattttttatttatttttatatttttcataataatttatatttttatttatactaattttttttttttttatttataaaataataattttttaaatatattttttttatttatat

SEQ ID NO: 70149 - DNA, 76 bp, Glycine max
aaaaaaaaaaaaaaatttaaataaaaaaaaaaaaaaaaaacaacagctacggtagataaaaaaaccccccccccaa

SEQ ID NO: 70150 - DNA, 276 bp, Glycine max
  unsure (1)..(276): unsure at all n locations
ataaaaaaaaaaaaaaaaaattttatttaaaaaaaaaaaaaaaaatctacgttttttgattgaaaggggccccccaaaaaaaaanaaanaaaaaaaaaaaaaaaaaaaaaaaaaaaaaaaaaaaanaaaaaaaaaaaaaaaaatttttttttttttttaataaaataattataattttttttttatattttttttttatataattttttaattattatattaaaattttttattttatttaatttttttttttatttattttttttaataattttt

SEQ ID NO: 70151 - DNA, 342 bp, Glycine max
  unsure (1)..(342): unsure at all n locations
aaaaaaaaaaattaatttaaaaaaaaaaaaaaaaacttctgtctttaaaaaaaaaaacccgcccaaaaaaaaaaanaaaaaaaaaaaaaaaaaaaaaaaaaaaaaaaanaaacaaaaaataaacaaaaaaaaaaaaaaaacaaaaaaaaaaaaaaaaaaaaatttaaatttaaacaaattaacacaaaaattatacccataaaaaaataaaaaaaaaaaaaaaaactacaaaaaaaaaataaactaaaaaaaaaaaaaaaaatcacttcctgtaattaaaaaaaaaaacataaaaaaaacaatataaaacaaaaaacaaaaaaaataaataaaaatcacaaa

SEQ ID NO: 70152 - DNA, 313 bp, Glycine max
  unsure (1)..(313): unsure at all n locations
aattcattattgnccctacaatgtgattaaaaactntaattacacttttttnatttatnccatccattttttttatattaaaatctttacttcccatttttttttaataatatctaatattatcaatttttttatttacatgacccaagaaagactccttatgcttcattgangtgattgttcataangatgacaccaataaagaattgtttgaattggtctcaagggttttctgtttccaaaatcctatttttcaattcttaattatttttttaatttattttcttttcttaatttttttaattttttcttt

SEQ ID NO: 70153 - DNA, 169 bp, Glycine max
caatgtgattaagaactggaattacactttttttattgatgcaatccacattttttatacttaaatcctcaacttccaattttttcttttaatactatctattttaatcaatttccacatccacattacccaataaagactccttattcttcattgaactcatttttca

SEQ ID NO: 70154 - DNA, 274 bp, Glycine max
  unsure (1)..(274): unsure at all n locations
annaataatattaatatttttttttattttatattttttattttttttacttattatttttttttttatatattattttttttttattttttatttatttttataatttaaatttttttatttatctttttttttttttttatttattttctcttaatattttattttttttatttttatttttttttactcttctattttttttttttattatttttttttttttttttttttttttttattctatttttttttattttatttaaaaattttt

SEQ ID NO: 70155 - DNA, 284 bp, Glycine max
  unsure (1)..(284): unsure at all n locations
aaaaaaaaaaaaattttattaaaaaaaaaaaaaaaaaaaatctagtctttttattttaagggtccctgccccacaactgnccatcncttccgccaatgtcttcttcgaagagcgtttcttatgactgttgggaaaatcaatatttttaatttttttgtaataaatatttaacttctcttcttttttaatcattacttttattctttaaatcttcttcctttatatttttccacctaacccccaggattacagattctatgctatttcagctgaatactcctaat

SEQ ID NO: 70156 - DNA, 310 bp, Glycine max
atattatatttttaattattattttttatttttattattttttaattttttttttttttttttaattattttattttaatttaaatattttttttttttttattttatattttttatttttaatctattattatttttattttcaaatttttatttctttttttttattttattattatatattttataatttattattttattattttttttttttttattttttatttttattatattttttatttaattttatttttattattatatatattattttttttattatttatattatttttatttattt

SEQ ID NO: 70157 - DNA, 281 bp, Glycine max
  unsure (1)..(281): unsure at all n locations
aaaataaaaaaaaaaaaaaaaaatttaaaatttaaaaaaaaaaaaaaaaaaaattgtcactgctgattttnaaaggggcccgggaaaaaaaaaaaaaaaaaaaaaaaaaaaanaaaaaaaanaaanaaaaanaaaaaaaaaaaaaaaanaaaaaaaaaaacttttttttatttaatataattaatattataattaatttttttttattatttattatattaaattattaaatttttattataaaaataatatattataaattaaaatatatattaaataat

SEQ ID NO: 70158 - DNA, 307 bp, Glycine max
tattaattaaattttattttatattttttaatttttttattttttatttttttatatttttttaaattatatattttattttttttattattattatttatatattataattttattttttttattttttatttattaatattctttttacctatttttttttttattttattatattttatattttttataatttttttttttttttttattatttatattatttaaatttatttatttcttttaatttatttttatatttttttttttttatattatattttttttttttattattttttttttt

SEQ ID NO: 70159 - DNA, 407 bp, Glycine max
  unsure (1)..(407): unsure at all n locations
aataaaaaaaaaaaaaaaattataattaaaaaaaaaaaaaaaaaactcttgactcntaaattaaaggccccccaaaaaaaaaaaaannannaaaaaaaaaaaaaaaaaaaaaaaaaaaaaaaaaaaaaaagaaaaaaaaaaaactaaaaaaaaaaaaaaaaaaaaaaaaacacaanacaaaaaaaaacaaaaaaaaaaacacaaaacaaaaaacaaaaaaaaaacaaaaaacaacaaaaaaaataaacaaaaataaaaaaacaaaacacattctaatatatttttaatttattttatttaaaattatataatttataactaaaattaatttataataattttaattattatttaaatttaattttaatttttattaatattaaataattttttcttaaaaataaaat

SEQ ID NO: 70160 - DNA, 477 bp, Glycine max
  unsure (1)..(477): unsure at all n locations
agaaaaaaaaaaaaaaaaatttataatttaaaaaaaaaaaaaaaaaagctcgtaagggttgattatnanagggcccggccaganaaaaaaannaaaaaaaaaaaaaaaaaaaananaaaaaaaaaaaaaaaaaaataaaaanaaaaaaaaaaaaaaattattttaataatattaatatataataaaatatattatttattaatatttatatttataaaaaaatatatttattaataaataaaaatattataatataattaattatataaaatatataatatatatataatataaaataatattggggtggtgggggattatatatataattatattaataaaaaatataaaatatatataatatttatataatatatatatttattaaaaatttaaaaaaataaattataatattttttaataaaataattttataattatatttatataatatatttaataataaataaaatttta

SEQ ID NO: 70161 - DNA, 341 bp, Glycine max
  unsure (1)..(341): unsure at all n locations
aaaaaaaaaaaaaaattaaaaataaaaaaaaaaaaaaaaactcgcacctgtaaattaaaaaaggcccccccaannaaaaaaaaaaaaaaaaaaaaaaaaaaaaaaaanaaaaaaaaaaaaaaaaaaaacaaanaaaaaaaaacaacaccataaaaaaacaaaaaaaaaaaaaaaacacaacaacaacaaaaaaaaaaaaaacaacaaaaaaacaaaaaaaaaaaacancaaacacaacacaaaaaaaaaaaaaaaaaaaaaaaaacaaaaaaaagaggagtgggagcaacaaaaaaaaaaaaaaaaaacacaaaaaacaaaaaaaaaaaaaataataatat

SEQ ID NO: 70162 - DNA, 251 bp, Glycine max
ttataatattattatcttttatatatttttttttatttttttttttttatattttttttctattatctcttttttatattctttttttctattctttatttatttttataatatatattttttttattttaattatttattctatttttatttttttttatttttttttattttatattaatttttatattttttttttttaactatcttattttattattattttaatattttatttttattaatttttt

SEQ ID NO: 70163 - DNA, 85 bp, Glycine max
aaaaaaccccaaaaatttttttttataaaaaaaaaaaaaaaaaaaaagaaaccgttttcttttaaaaaacccccccgcccaccac

SEQ ID NO: 70164 - DNA, 72 bp, Glycine max
aaaaaaaaaaaaaaaaaaaattaaaaaaaaaaaaaaaaaaccgcaacgtaaattaaaaaaaccccgcccccc

SEQ ID NO: 70165 - DNA, 434 bp, Glycine max
acccacccgtccgaaaaaaaaaaagaaaaaaaaaaaaaaaattttaaaaatttaaaacaaaaaaaaaaaaaaaggaaaaaagaaaaaattaaaaaaaacaaaaacaaaaatattggttttaaaaaaaaaaaaaaaaaaaaaaaaaaaaaaaaaaaaaaaaaggcccccccccccaaacacccccaccttcccacccccaccctcccccctcaaacccccttcaaaaccccccccaaatccaatcccctcccccccctttaccccccttcacccctgaaaacccctttccttccccaacttaaccccctttcaaacaaaccccctttcccccccctccctaaaacccaaaacccccccccccaacccccttcccaacctattccccccccaaattcccaatggccccccccctttatcccccccttaaccccccc

SEQ ID NO: 70166 - DNA, 372 bp, Glycine max
aaggggcctggaataatccagacacgtaaattatagtgctgcaatggcttcaagtcaggtagtatgggatccaatttgggagcgggtggaagcccatttgtgtgcagggttcatattgccctcaagttgaagggagttcaatacaaatatgtcgaagaaaatttgaggaacaagagtgaactgctttttaaatccattttagttcacaagaaggttttagtgtttattcacaatgagaagcccatatcagagtctcttgtgattgttgaatacattgatgagacatggaagaacaaccccattttgccttctgatccttaccaaagagccttggctcgtttctggtccaaattcattgatgataagggtttt

SEQ ID NO: 70167 - DNA, 315 bp, Glycine max
aaccccatacttaatacgagtacttctactaattatttctgcctgactagcatcgacaaaatccttgaatacccaatttactacattgcgtaaagaggaaaaactcaagaaagagatggaacaatcaaccgccttcaatataccagctataactgatactgataataaaaattgttctctttcaaactaatcaccacttaatccatcctcaaacgaactcctaaacaatccatcttaatcctcaactcctcacaattaaaatgtaccttatttctatgataaaattcctcacataaagagcaaataaaacctctt

SEQ ID NO: 70168 - DNA, 383 bp, Glycine max
attatcatacccttcattagattttatacctacctccaataatcctgtcattgtttaatttaaaccaccactccactctaatctactactactataacacttaatccctctacacaaacacaattacacacactctaaacaaacacccaatcatcaatcttccaccacataaacttcataatttaaacataccacttaacacactatatcatcatcatttctaatataattacaaacctcctcaataatttcaataattttaccctatatctaataactactatcaacataattcccctaatacctcacattaatcatattaccccttacttaaacattcaattcaaatatattcccaaaaacactcataactcttcaaacca

SEQ ID NO: 70169 - DNA, 355 bp, Glycine max
cccactcgtcctaccacacatcctatcaaaaattgtaccttgtctaaaatctacgaaacataagaatttatgatcaattatatataacgttctgaacatctattaacacacttatacttactcccacatttataataaacatcattaataccaattcatatcacattatcacattcactctaattatacaatatcatctctatcctacatatcacaattaatattaccattctcaaagaccaattcaataacaatccatcttcttccagtcacattacttattatatacaacctataaacctatatattctaaactacgctaatctactcaactacacacataccattcatatac

SEQ ID NO: 70170 - DNA, 362 bp, Glycine max
  unsure (1)..(362): unsure at all n locations
ttcatatctatatctaaatcgtttcacctttaaaaaccaaactattcccatagctcttttttaatcttccaacaacctaaatccaaaaccctacctacaccacactcaatctaaattcttcattctcttctcatctattcttcataattctcatatctactctttcatttctcttctaacattcattctctctaattacacccaattcatcttaaacttcaactccatcatcttccaattccttcataatctcccttccaccaacaacaanttcacctacaatttctactcacacaccttcaattacctttactacaatttctacacatattttattatttcatattaatcaattttaatac

SEQ ID NO: 70171 - DNA, 114 bp, Glycine max
gaaaaaaaagaaagccttttactttttttcttttgtatgatttgaatcttgattggaaaagcttcggtttaaaatgatttacccatcaattcaattttaagccgtgccttcttc

SEQ ID NO: 70172 - DNA, 162 bp, Glycine max
ataattattcaaaaatctcttatatataacttcatatctcactgtacgatttatatctcttactacacctaattcactaaaaacttccctaccattacaactcattatcctcataaacttccatttttcaacatcaaattcacttacaacatcgaccaccac

SEQ ID NO: 70173 - DNA, 321 bp, Glycine max
  unsure (1)..(321): unsure at all n locations
ccatatcaaantatttaagcttcattttaaattcaaatatacaccatacaatcacttcaatcatctatttcaaatcacaatctcaccatcattcttacactctattcctctataattatatcaacacttatttcttattcattcataaacatctccaataaatccatttctcatacttatccattctattattcattctcattctctatctttaacataactattcaattcatctacttatcattattattataaactttatttttattcaaatccttattcatattatattattacctctcccaatttcacccaaatatt

SEQ ID NO: 70174 - DNA, 123 bp, Glycine max
atcaaaccactgcctccatctacagccaatcaacttctcaccaaaaaattaagtcacatacatcctcccatctgcctaccgcatccggtctctcctacataaccatcatacatatacactaca

SEQ ID NO: 70175 - DNA, 165 bp, Glycine max
acccaccaaccccttatcattcactcccacctatcttcaactctaaacccaatatacccacttaccaccatcacataccctattatccaaatttaccaatctctttcaattcattaaaacatcacccttcccaaaactattcactactaccatcatcttaatcta

SEQ ID NO: 70176 - DNA, 266 bp, Glycine max
acattatccatccgaatcgtgttaaattaaccaacccaccaaaccccaatcattcactcccacctatctacaactctaaacccaatatacccacttaccacatccctttacactataatccaaactacactctcattttcattcctataatcatcaccctttccaatcatattcactactaccaatatcttaatctaatccctaaccacacctaaaccaaaccatcatcataattcataaccttttatataatctcccaaaattaa

SEQ ID NO: 70177 - DNA, 292 bp, Glycine max
tcccaacactttctctaacattatccatatagatgctgaaccttatacttacgattcagttaaatttctaagaagcacatcctaacataccttctctttaagacacttatacatatacttattatatcaatatataataatttcattaaatctaacttaattacctgttacttttttaaaaacaattattttataaacaatctatatactattttttattttatttgaattttctaaattttataactttatctacttaattaccatatttaataatatctttattataaaa

SEQ ID NO: 70178 - DNA, 268 bp, Glycine max
aaaaaaaaaaaaaaaaaaaaaaaaaaaaaaaaaaaaaaaacaaaaaataaaaaaaaaaaaaaaaaaaaaaaaaaaaaaaaaaaaaaaaaaaaaaaaaaaaaaaaaaaaaaaaaaaaaaaaaaaaaaaaaaaaaaaaaataaaaaaaaaaaaaaaaaaaaaaaaaaaacaaaaaaaaaaaaaaaaaaaaaaaaaaaaaaaaaacaaaaaaaaaaaaaaaaaaaaaaaaaaaaacaaaaaaaaaaaaaaaataaaaaaaaaaaaaaaaaa

SEQ ID NO: 70179 - DNA, 166 bp, Glycine max
acagccaacactacagactctaatctcttttcaccacaccgttcatgcttgataggctaggttaactttatacatgcgctaggaactttattacttcacatacttcgctaccactgctctctactcatcattttcatatactgtatcccattgtacccattcttac

SEQ ID NO: 70180 - DNA, 273 bp, Glycine max
aaacagaatgatgacagtgcttacgcgctatatccattctacgccttccatttccaagatcaagtcagtgtcaattcgcgggagagatctcttctcttcaaatgtctgctctaaagttgaagaagcacttaatgtgcctccacccccaactgataaggttcttctgtctggaagcgatctgcttgttgtatcacactcttttatagaagccctagaacgtatcatctctgctcaaaatccttacaggcctggtaggtcattccttcatcattc

SEQ ID NO: 70181 - DNA, 205 bp, Glycine max
ccacgcatcctctctattcttcaatttaactttacgtctcacatctctctatctctctctctgatgtaataacaaagctctctctgctatttatgatcactctctgacactcttctgacaccaaatcaaatactaccatctctaccccttcttctctgattgtaaagattcttatcttcttagattattattttccatccaatca

SEQ ID NO: 70182 - DNA, 404 bp, Glycine max
aactacggttcaatagctgagatctacacctatatctacctgacaccaagatttctcaaatagaggcatggcataaatactgtcattacaccaatcctcacattttcttgagcaatcatctggataaaactctctctcattaccaggataagcccaacacttgatttgatagctttctcccctctgatttgtcctccatcatctcccctactactttcgtacttacgtaccgatctattaaggatctctatctctatctaccctatcggcccaccaatatctatcaaagtataattagctttcaattggaaaaaccgacttggaacaagtgttacatgcttttcgctagaaatcttaaccttatattgggttacactacttattattgggaatggacaacccta

SEQ ID NO: 70183 - DNA, 375 bp, Glycine max
tcttgataagaaattagaaaatcgtgatatcctaatttcttatcaagatgttagctaacgacgggacaggtgctaatgaaaagtactcatagagaactgatattggctcacttgattcaaggctgacagacattgtgacggatgcgtggggtgctcctacctttactgtgcgttaaaacatctcccgagctattcacacttaaagttcgtagaccacaccttttcaattgtcccgacgctttcctcaaataaaagttggtggcgactccccgcattttcctttcatggaatacgcacttgtgagtcccgcatcgccctcccgacaaagggtaggttgctacagtcctggccttccagcctaaggttaggttcctt

SEQ ID NO: 70184 - DNA, 239 bp, Glycine max
ctacagtcacttatcccactatagatttaaattctcagaaagcataaaaccccaatgggacagaggcatttcaacatttggcatgtccacaactacttactacacctaatataacatatgatgacttgttaattatgccagatgttgacaatatttccaatgctcacactatcaactctctaactgttctcacaccacgtacctacactacttcatcttcatcttaataactatctata

SEQ ID NO: 70185 - DNA, 306 bp, Glycine max
attaccgtttcgacccactcgtccataaacacccttaaaaaccacaataaaattaaattcacaaaaaaacatcaaatctcaatgggacatgttaattttaaaagtaagtcactaccataacatattcatacactttaataattacttccttcccttttcacttattcttaaactactaatacctttcctatgcataaactcaactccctaactattccaacttcattcacatataccactcctatttacatctcacaaactcttctctcatcatacaaaacccttctaactactacatctttcttt

SEQ ID NO: 70186 - DNA, 218 bp, Glycine max
cgtccgcgcacgcgtgctctgagaaaccctccactctttattccaaactctcctcctacccaaaatagagtcaaggtcatcatcttcttcagcttcctctattcttttccttgcatcaattgtatctgcttatttctattcatcataagcacctgtttccaaatgatctttttacgacaatcttctcctaatgtactcctgatgaccaatttactacc

SEQ ID NO: 70187 - DNA, 70 bp, Glycine max
agaaaatgtaattttcagcactgtccaggaaatttaaggattgtaattctttatgcctcattgtattatt

SEQ ID NO: 70188 - DNA, 420 bp, Glycine max
  unsure (1)..(420): unsure at all n locations
acttacgcataagcttataaaccctncactctttagtcttaactctcctcctacccaaaatacagacaagttcatcatcaacttcaacttcctctattcttttcctatcatcaattctaactccttatttctattcatcataatcatctgtctccaaaagatcttattattacaatttcatcataatttaatcttaataccattttactacctctaaaaatccacatatctagtatctcttactatacaaatacacattattttgatttcaaaccaaacaactcttcaaattttcctccttcattattaatcttaaatttctaacactttactcttcttctttttttacaacttatttatatttcctcaaaaaattattcccctaccaaaaataaattaactttaattttaatttttttt

SEQ ID NO: 70189 - DNA, 322 bp, Glycine max
atttggggctgcaagaattcacagctttgccttatatatcatattattgtaatttggggtcctgaacatatattcactactgtcctcaactgtttattccctcgtctgttcatccttcattagttaattgctctatgattgtgatcacagtacatcatatcgaggcttctaattccatattgcatctcatgactgacatttttcatcttgctaattcctcttttgtagatcaatttataccaataatacatattctaataattcctcaaaataccagcatcaccataatttatcaagcttcatcaacagttgcactcactaa

SEQ ID NO: 70190 - DNA, 362 bp, Glycine max
  unsure (1)..(362): unsure at all n locations
taattcacatctttgcttttatatancaaataattaaaaattggggaacgttaaatttataaactaccttgcccaactctttattccctctacttttttccttcattacttcattactctatgattttaatcacatttcatcatattattacttctaattccatatttcattacttaacttacattttccatcttacaaattcctcttttttatatcaatttataccaataatatataatttaataattacccaaattaccaacatcaccataattttcttttcttcaattaactattacactttctaaatcctcaatatatcttaatattatacatttctttcatctacttttattcatat

SEQ ID NO: 70191 - DNA, 436 bp, Glycine max
gcgtccgatccaagaggaagaagaggaagaagaagaaggttttgtggttcggaggaccagtgttcgtaacgtcgggggggtgaataagcttggggatgattctgacagggttgccctggacaacgatgagtcccatacagcgtgctcgatgagacgactcgtggtcagaaattggttaagactggtgaacttgcgaacaatacggtggttgaagtacctgaaaaatcatacaccacaggaaagaagagtgcaagctaatccgaacagagccctggggatagaacttgtttcagattggctgaacctgcgtccaatcaaacgtcttgtgaatagaattttgatctaattgcgcatttccttttcctttcattaatggccaattatccattctttgtatatttcaagaattacggtttgttcaacaattgggattttg

SEQ ID NO: 70192 - DNA, 454 bp, Glycine max
cactcttgcgctcaacaatcaacaatatctttcttactacttttttttttttcagaacaccacttttaaatacgtctcgttcaagtttaaacttctccatcatttttacacattcttaatacataacattcattccaattctcattaaacctataatactatttcctctctcaaactatttatacatctttaactttctaacaaaacctcatatcacacttctaatatactcaacaccacaatcattatgagttcaattgcaacctacaatatccctatcgttacaacttattccatatttactaaacttttctccaatcatacctcttctaatttcattttttataaaatttacattttcctttttcttttattatttttcaattttacattctttttatttttttaaaatttatgtttttttaacaattcgtatttttcatttatttattca

SEQ ID NO: 70193 - DNA, 276 bp, Glycine max
cccacgcgtccggtgatttcagtgagtgatcggcgttcacttgatctcatcataatcgtcagggtcagttgaagaagatgccgatcagaaacatcgccgtcggaaggcctgaagaggcgactcaccccgacacgttgaaggcggctttggctgagttcatctcaaccttcatcttcgtgttcgccggctcaggctccggcatcgcctacaacaagctcaccgacaacggcgctgccacccctgccggcctcatcttcgacttcatcgcccatgcat

SEQ ID NO: 70194 - DNA, 85 bp, Glycine max
tcgtctcgttcttggactttctctggatctctgtgttttttgagatcgagtgtatgtaatttacccgattggtttttcaggatga

SEQ ID NO: 70195 - DNA, 311 bp, Glycine max
acaccatctacttaaatcccatatcaacttcaaattaccatacacaccctcaaatctaacttaattaaatacaaatatatctcaataaaattttacacaacaaaacattcactacttcttaaatccaacccactccacaaaaaacttccacttcaatattcacaatcataaacccatatcataatctctcataatcactaaatacattaaacaaacattcaacatcaaccccatcaaaccttcttatccacaccaaataacctattctattaatttatccaaattcattaattataatctctctaatcttc

SEQ ID NO: 70196 - DNA, 452 bp, Glycine max
gggcaagtttatataatgttttctttgttgcatggaatattcatgactggatgcttcagaagggtttaggtgggtcaatgtttccagtggcttgaccccgtacgtttggtttgaccattgatatgatttggaagagtaggaatcacactgttttcagaaaccaaacatggagcatagaggagagcattgcaagaattcagcgcatggagctttttgcttgtaacttgggtcgtagttcagttcttcaagctggattatgggccatttttcatggcattcaactagccagggagcgtgttctcttcaaactggagtttcaatcagactctagagaagcaatagatttggtgaacgaaggctgggatgattctaatgaagcctttccaatggttaaggctatcaaggaggctattctaccgtatctgcaggtgatctttaagcacattctaaga

SEQ ID NO: 70197 - DNA, 262 bp, Glycine max
tctattattcaaaccatatttcatatttacaccaaattttttttaccaaaatttaccatatcacaattcacaaaccccatataatataaatctaaataaatcctccaaaacttcattttttacaaatacactttaaacacaactcaattatcttacatttatccttcaaagacatattcagtactatataaacctctcttcttatatttatatcaaaatatcttttttaaaaaagacaccaactttttcatcgatcataaca

SEQ ID NO: 70198 - DNA, 405 bp, Glycine max
cccgcgcgccgcccacgcgtccgcccgatttatcttatatatcgaatcatcctcaatatagcctggatttagtgtcaataacgcactgctaaatttctacgactctcaaatatcctctttcctcttttagtccaaccacatgtcatatttgcaccaaatttgttctaccaagattcgtaagatcacatttcacatgccccacataagaaaaacgttattaaattcttgaaagcttcatttttgacaaatacagttgaagctaaattcaattacgtaatatggatccttcacggacaaatgcagggctatatataaccttacttgtgatgttgctacaaaagttgctctgtgaaaaaagacaaaggctcgttcagcgatcatctcattgcagattttgcattcaca

SEQ ID NO: 70199 - DNA, 88 bp, Glycine max
acgcactcgtccggctgtacatgatccaaacttttttacgctttcatacgacttcatacctcttgtatacttgcacctaatttcaatt

SEQ ID NO: 70200 - DNA, 376 bp, Glycine max
  unsure (1)..(376): unsure at all n locations
cgacgcacgcgtccgcgggctcttgggtttcaactctctctgtctacattttccatttgcaccaaattctcttcgcgaggggtgttttggatttcaggcttttcgactattaacctgggctacctaaacantgtttgggaaatcagggctctgaataggaaacccgcggctgaagaagccacgaagatgttggaaaagatcgccaaacaggtccaacccatcattctcaaacacaaatggaggatcaaacttctctctgaaatgtgcccaagcaatccacgtcttcttgggttgaaatgtttaactggtatacatgtgaaattgctgctactgaaaccgaacagtgatttggacttctacccgtttgatcaggttc

SEQ ID NO: 70201 - DNA, 226 bp, Glycine max
actaaaaggactattttttaatatgtaaatcatattaaagtataaaaaaaaatcatgaacaactcaatcttatgccttacaattattttcttatttccttaacccttgtactcgtttcacttgttagcatttgccttcattttatatgtatcattatattattataattgaaaaaaattagggcctactttttgacttcattttattcattctattacttttcatc

SEQ ID NO: 70202 - DNA, 463 bp, Glycine max
cctcccacactttctggggttattgaggagaatgttacctgagtccaatagttacttttaaaaggctcacagccaattgaactataaccctactgaccaggcttcattcccctcaaaaatacttccttcatttcactatacttcaaacttcaaaccacaagatcatatgtgtatctacttacctatctagcttctctctttattttgaatgatctctctacacacacatcatgtatgtgtttcataacttgatatctttccttgcaaattttcaattcatagaaatgctgtctgtctctatatcatgcatcaacaatatactacttatatcagttaaagtctccaattcaaatttcccctcttaacacacacacataataaatgattctctgaccatgcttcattccccccacccaacctttgttttctattcctttcaatttctatctcttcattttcaaat

SEQ ID NO: 70203 - DNA, 295 bp, Glycine max
ttttttttttttttttatttttttttttctttattttttttattacttttttttttttatttttttcttttttttttttttaattttttttttttttttttttttttttttttttttttttttttttttttttttatttttttttttttttttttttttttttttttttttttcttttttttttttttttttttttttttttttttttctttttttttttttttctttttatttttttttttttttttttttttttttttttttttatttatttttttttttttttttttttttt

SEQ ID NO: 70204 - DNA, 338 bp, Glycine max
cccaacactttctataacatgattcacaggatgctcaagcttgaactttagaaaatttaaaatgcccttgaaccatatcctaacatacctcctcttaatgactctaattcatattcttaagatatcaagattgaataagttaattaaatctgacttaatttcctgttacatttttaaaaacaatgattgtataaacagtctttttactatattttatgtttttttaattttctaaattatgtaacattagctagttaattaccaaatgtattatttttctttatgataaaaaaaaaaaaaaaatgactttcactctacattatccaatcttacttact

SEQ ID NO: 70205 - DNA, 239 bp, Glycine max
cgatcattggttattattttaaccggggaaaacatgatcaacttgtaaggtctagtctatgaggagactactttattggtaatgtgtatgtcggattaagtggattcgagtgaaatgttgatcaggggagtcatttcgacatattttctggaatataactcttggattataagtttttaaaaaaaaactttaaagcttgaatgtattggtttgatcacgtttaatgatgggaagaactt

SEQ ID NO: 70206 - DNA, 80 bp, Glycine max
aaaaaaaaaaaaaaaaaaaaaaaaaaaaaaatttaaaaaaaataaaaaaaaaaaaaaaaaaaagaaaaaaaaaggaaaaa

SEQ ID NO: 70207 - DNA, 263 bp, Glycine max
ctgatgaactatgttttcatttcaataacaagtgtcactgtttatgaaaggatttatacctaatcagagggctcattaagatcatagtgtgtgttttgcaacaatggctaagttctttgctgctatgatcttggcactctttgccatttccatacttcaaacagtggtaatggctgctaatgaacaaggaggccacttgtatgacaacaagagcaaatatggaagtggaagtgtcaagagttaccaatgcccatcacaatgct

SEQ ID NO: 70208 - DNA, 152 bp, Glycine max
aaaccactttacaccctcttattattatcattccccattacaccatcaacacttcttccttcaaaacatttctctcacaatattactttttcattcccacctttttcccatttttaactaatttcctaataaaatcctttaaataatcaaat

SEQ ID NO: 70209 - DNA, 161 bp, Glycine max
tatttcagtgagttattcttgttcacttgatctcatcataatcgtcggcttctatttaataatatgccgatcataaacatctccctcctaaagccttaataatctactcacccctacacctttaaatcttctttcgcttatttcatcttaacctttatctt

SEQ ID NO: 70210 - DNA, 301 bp, Glycine max
ccaaaccaatccaccccttctttaaaactctttttttctctcccttcctctcatctctcccataccctaatcctatcctcttcattcctcttttctccatctacaccttccctttctctccaacctcctcaaccctaataaacctaatctatcttatataatattctatctcttatattttatccaaactaaactattccttctcactcttatctttatcgacatatctatcaacttatttatctcaatcctctttcttaatcttaaattaattctcctttctatcaatctattactattc

SEQ ID NO: 70211 - DNA, 317 bp, Glycine max
  unsure (1)..(317): unsure at all n locations
aatcaattgctcacttattaaaagtgtatgatttttaaatttacacaatccaaccaaccaaccacatattttatattnttactctttttttcccttaaaaaaaaaaataaaataaaaaaaaaatataatattaatttatttaaaaaaatgttcttctctctatattatccaaactttcttactcgttcattccacttcatatctcttctattatttcacctaaattcaatttcactttcctattttttacaacatctttacttttaaaacccttttattacccaatttaatcccctttcattaaaatcccctttttt

SEQ ID NO: 70212 - DNA, 351 bp, Glycine max
  unsure (1)..(351): unsure at all n locations
ttttctccttttttncaaacacccccncaagacgctttaagcaaaattataaaccaccacctccacccatttnnaaagcttctccctttctcctccactttcacccaacaaaaaaatgatattcaacttcaagcttacaacaatcctttcatcaccacttcatacataacatacattttcacataccacacctctcatttccaatgaaaacattatgatattaaagtaacagactctaatacccttctcttntttgacacacccatcacccattatcaaaccacaaaccctaataaaaatccatttacctacaataaaacttataacaataattaatcaaccaatctattc

SEQ ID NO: 70213 - DNA, 227 bp, Glycine max
  unsure (1)..(227): unsure at all n locations
tttctcccactcatccatcctacttactcactaactacatacctttctataatggcagtcttctatnaactttaagtctaactagacaataactatacgtcttctatactaatcatgacccatataccaataacttattaactccctcaaaaaattattcttttaattactctcatcttctactttatatgatcattcttactacacttccatgttcctaataataa

SEQ ID NO: 70214 - DNA, 177 bp, Glycine max
aactctccaatctccatgattaaagcttttatgccatttactaacctatcgctaaacgattctaaatactttatctaaaggtttcctaataaattcaacgaatttatttcaaaagactaatcttaatatgccaataatcaactctataaaacttttaccaaagttaccatttcttaa

SEQ ID NO: 70215 - DNA, 359 bp, Glycine max
cggtcgacccacctccggtgctgtctctgagggccatagtttgttccctttgaactttaatctccacccaaacggcattttcagtaaatttccttggaaaagaaagagcgaataggaaaatgcataatcacatgctgaagcagcagcagcatcagcaacaacaagctcttatgcatcaagctcttcttcaacaacagtctctctaccaccctttcctccttgctcctcctcatattgaaccatattcaagttgaaatttgccttctggttttgatccaagtacattcctcattttgtatttttttaacattcttacacattttaactgatcccttttttgcaataatttttcttttttt

SEQ ID NO: 70216 - DNA, 387 bp, Glycine max
cccacgcgttcgcccaatcctccgaccactttttccgcgtacccttggatgctatatgctgatacctttttatccttgagttctaatgaaacaagaacctaacttttgtggatgaatcaataacctgttatcaaaacctgaataaccggcccggttaatttctctttggagtaatcttatcttttgctgtataggatccttcttatgacactttcattttcctctgaattgtcatactgttgtcttacataccaaaaaataaaaaaagacataaaagtaataaaaaagaataaaatataaattaaatataaaaattaaataacttctatttaaatataattctttataaaaataaatcttttgaataaaataataaaatataaaaat

SEQ ID NO: 70217 - DNA, 281 bp, Glycine max
  unsure (1)..(281): unsure at all n locations
aacacgcctttctaccacaccaaaattaagcatcatttaaaatcataaaatcacacatcaactagccgatttnttaaataaaacattccccactcatattttcacactttattaacaactttcttcccttttaactcatacctcctcctctaataccttcccttttcataaaatcaactccccaactattcacacttaaacttactataccacaccttttcaattttcccaaccctttccttatataaaattttattaacacttctctcatattcctttca

SEQ ID NO: 70218 - DNA, 334 bp, Glycine max
tcggtctcggaatatcccgggctcgacgcgcacgcgtctcgctccgacgcgtctcgatccatttgtgtgtattatgttgtatactcggggaataacaatgtatcgagacttgtataggggtctattcttatgatggagtactacggtttatttggtaatgttgtattgtcgtgattatagtggattcgagtgtaaatgtgtgatcatggggatgtcaatttcgacattatttgtctggaatataatctcttggattataaagtttttaaaaataaaaaaaaaaatataaaaaaaaataaaataaaataaataaaaataaaaaaaaaataaaatt

SEQ ID NO: 70219 - DNA, 225 bp, Glycine max
  unsure (1)..(225): unsure at all n locations
aaacccccaacttctttctctgctcatcatctaccactctcgaggtggtttcaaaactatnctgtgcctattcatatttacacacttgcttaaagaacttccaccatattcacgtatccgtccacctcttataactcacatttccgtaaaatcaactctccacctatatatacttaaacttcatctaccacaatcattcaccattcacttccctaatctcaaata

SEQ ID NO: 70220 - DNA, 270 bp, Glycine max
cactcgtccgttcatgcattgcatccctttttatttttagtatgttttgggctttatagggaagttttgccaaatcattaggggttttaagatcatattgtgttgttttgcaacaatggctaatttctatgtttctatgatcttagcactttttgccatttccatactttaaacatatgttattactgcttaattaacaacttatgccacttgtataacaactatatctaatattgatatgtatatttcaatattttccaatgcccatca

SEQ ID NO: 70221 - DNA, 246 bp, Glycine max
tcccccgtcgagccactcgtacgagtttttttcacatgcctccgttgtcctttttataatccgcaatgtacgttagccatggaggttctcaatgaacatcaggcccggccaatccccctatgccaggccccgctccccagctcgcctgtgctcgccattccccacggcctcaatggcccttgaccgctccttcagcccggaccacctgaatgtctccccgtcccgcgtcctgcatcggtacccatc

SEQ ID NO: 70222 - DNA, 349 bp, Glycine max
cgcatgcctccgttgtcctatttataatccgcaatggaggtgagccgttgtggggacccgatgaacatcaggcccggccgggcccccgatgccaggccccgctccccagcgcgccggggctcgccgatccccacggcctcaatggcccggggccgctcccccagcccggcccaccggaatgtctccccgtcccgcgtcctgcagcggtacccatcccgtggccgtactccctgcctcagccccgtgcctgtccctctcagcccaccctactcggccgtcatcaccggcaccttcacggagtacaaaggcagccgctttggggagcccatcgagacgtacgttacgcgcg

SEQ ID NO: 70223 - DNA, 210 bp, Glycine max
gttctcccccatctcgcgtcgttagttcattgaactcacttcattgagtggatttggtacaagttgagttcagaatggattggccacattataaacaataaaacatagtccgtattatttttccttctcttaattaatctcacctatttttgtttttcatatattttctatcatataattttctattatctttttattatttctcttatt

SEQ ID NO: 70224 - DNA, 199 bp, Glycine max
gcgtccggtagatattacctgcacttggtatttttcttgctgcattcagctgctcattagggggcgggtagagtaaaagacgtatcctccttacacattgttgacaactatgactatcttccacctagactcattcgtgacaaaaattacgatctcttctgatgccttgctaagaattaccaaacttgagaaggaaaga

SEQ ID NO: 70225 - DNA, 51 bp, Glycine max
cagagtttgagtggacctgtctcagctaccctttaccttgggtattcacta

SEQ ID NO: 70226 - DNA, 215 bp, Glycine max
gtaatgtaggtgttccaagcttcaaggtaggtaataatgttaggtcccagtagaatttgggatggggtggaataccatggatcttatatcctattttcccccttcattttaataattgccaaaaaaaaaaaaaagggccggccgtctaaaggatccagcctaacctcccgtgccttccaagtcataacttttctattagggaacctaaatcaaat

SEQ ID NO: 70227 - DNA, 51 bp, Glycine max
aaaaaaggttcatagttgatatctccagcggaacgatgaagtttgaagatt

SEQ ID NO: 70228 - DNA, 53 bp, Glycine max
ctgagtcgcacgatacaatggacataatgcgtacagctgataggctcgtcatt

SEQ ID NO: 70229 - DNA, 388 bp, Glycine max
  unsure (1)..(388): unsure at all n locations
cccacacgttcataaatcatatcttcaccctatcttttaanttngaanatttcncanaccggtccgtttcaaaaatactntcctacaccactcttacatatatattctatcctttctctttttttccaaatcctttcattcctcctccttaatccaacactatnttacattactttctcccctctaatttttcctctatcatctccccttcttcttcctatcctccctttctctctattaannatctctatctctatctctcctatcttcccaccatcatctatcaanttataaatacttttcatattcaaatacttacttttaacaatttttacatcctttccactaaatatcttaacattatattnctttacactactcatttatt

SEQ ID NO: 70230 - DNA, 261 bp, Glycine max
  unsure (1)..(261): unsure at all n locations
ccacaccaattttattttcataaaaaancataaaancacaggacggtntgtttaaataaaataaaacattttcaactcatatttncacacttnattaaannctntcttcccttataacttattcattattttctaataccttcccttttcttaaaaacaactcccnaactattcacacttaaatttcttaaaccacaccttttcaattttcccnactctttcctcaaataaaattttatctctactccactcattttcctt

SEQ ID NO: 70231 - DNA, 229 bp, Glycine max
  unsure (1)..(229): unsure at all n locations
aaaaaaccggnccgacccacgcgaccgaaacacccttattaccacaccaatttttatatcataaaaaancataaaaccaccggctggctttataataataaaataccacatctctcattctatattttcacacttaatctatatcttactatcctttttacttattctcttatttctaataccaatcctttaccataaatacaacttccttactatccacacttaaatt

SEQ ID NO: 70232 - DNA, 58 bp, Glycine max
ggggggggccgctcatccggcaaaaacccctttttctatcctcagatgatcctctacc

SEQ ID NO: 70233 - DNA, 351 bp, Glycine max
cggacgcgtgggtttttcttcaaattcccgtgaagagacactcagaaagatgaggttatcgggtgaggcatgctttggtgtttgtgttaatcggggcgttgggaaacttgaaaagggcaaagggtttccgatttgtgatagacaaagacgagtggttctccatgatgtgaagtcgaggtgcactgtcatgctcttcgtgtataagctatctcctgcatacgcacaagtgcactctgtaagactctgcacaatcaattcgcagacgggagtgctttgtaaatcggtcaattgtacacagtctaagaacgcattgagcatgtgactttattacacacaaatacattaccctgt

SEQ ID NO: 70234 - DNA, 253 bp, Glycine max
gcggccgttggatctttattccactaaatagtttatgtttatataaaaccataccctatatgggctggttctttatataaactatccaccccaaacactttctatctcaacctataatttaattctatcatccacttctatatattttaataatccaacatacctcttctctaattaaaatactaccctctatccatacctcatatttaatatttttaactaaaaaaatcaatcaatctcattataaaaccct

SEQ ID NO: 70235 - DNA, 58 bp, Glycine max
  unsure (1)..(58): unsure at all n locations
accggaccggaaggcccgacccgcgcgtccggccacgcgtgccncaaaaccgaaaaga

SEQ ID NO: 70236 - DNA, 155 bp, Glycine max
  unsure (1)..(155): unsure at all n locations
caaaaccnaaaanaacattaactttttttttcccacaatcnaaaagaggaaaagcaaaatttcttaaatccctctaacccatatcaaaatcaaatttactgtaaatcttttcaaagaggataacaagaagaagactaagaagcccgagctcatct

SEQ ID NO: 70237 - DNA, 73 bp, Glycine max
gacccacccgtacccgccacgcctagcccaaaaccgaaaagaagataaactttgaaatccccaaaatcgaaaa

SEQ ID NO: 70238 - DNA, 272 bp, Glycine max
taccggccggaattcggtcaccacgcgtcgcggcgctgggcggacgcccgcggggttgaggagagacgagtcgacgtgtgacgggaggtgccacacgctcgaatccgtgataaggcgggaggcattacgaacctagcgctgaggagcgaaggattatcgaaggttgccgaaaaatcaagaaggattcaaggacaactgaaagcgaaaacactcaaaactgtccaggtacattgttaacactgttagctgcacaaatgtctgctcttcttttg

SEQ ID NO: 70239 - DNA, 122 bp, Glycine max
tcgggggccccgtggccggacccgtggccactaccgccgcagaagagaccgaaacgccgtcttggtcgtttccaaccacggattttggagaaaggaggaacccaccccaaccccgaccagga

SEQ ID NO: 70240 - DNA, 352 bp, Glycine max
  unsure (1)..(352): unsure at all n locations
aaaaaaaaaaaaaaaaaaaaaacgaaagggtttaaaaaaaaatntcaaaccaaaaaaaaaaaaaaaaaaaaaaaaaaaaaaaaaaaaaaaaaaaaaaacaaaaaaaaaaaaaaaaaaaaaaaaaaaaaaaaaaaaaaaaaaaaaaaaaaaaaaaaaaaaaaaaaaaaaaaaaaaaaaaaactaaaaaaaaaaaaaaaaaaaaataaaaaaaaaaaaaaaaaaaaaaaaaaaaaaaataaaaaaaaaaaaaaaaaaaaaaaaaaaaaaaaaaaaaaaaaaacaaaaaaaaaaaaataaaaaaaaaaaaaaaaaaaaaaaaaaaaaaaacaaaaaaaaaaaaaaaaaaaaaaaa

SEQ ID NO: 70241 - DNA, 215 bp, Glycine max
ctcacgcgtctgaatactcgagttctataaactacaccataacgctgtgcaagctagccacggggggcacgcaaagacaagccaggcgcagactctgttcacctcaacgtctatgaactcaccccaatcaacgtctatgcctatgggattggccgtggagaagaccattctgggggtgaaggacacgtgattgaaatagacgtattgaggcgcac

SEQ ID NO: 70242 - DNA, 327 bp, Glycine max
tctccacccaaaccaatccattattcattttaatcttcttatacatcccaataaaaacccaataaaaatatactctttataattatcttttttttctttattataccaatcaatctattctattaaaaaattaactaccttttttcaatttccaattttttctctcaatcaactacattttaaattttaattatcttcaacaccctctaaatttctcttaatatacaatcattactcaaattcaaattattctttcatattcaataaccaataacctttttcttcttcttattaatcatataatttccaacacaaacaccttctttt

SEQ ID NO: 70243 - DNA, 367 bp, Glycine max
  unsure (1)..(367): unsure at all n locations
aacaacacataaacanactttattccaaccccancaatctttaataatcgtcggctttatcaaaaaacaatccccaccccacacaaaccaacnnacaaaaccaacataaaatactttaatctcaacctaacaaatcaaatatacttaacatcctaccttctttttatatataatttaagaacatcatcacttcacacactccaaatctaccacacttaacttatctattttataaacataataaaatcatatacatttctattaccctcaacttcaactcacttcccctctaaatataccaactaacattcaatattacatatatcataataaaacatttaatgtatctcctcttttaaaatcaaaa

SEQ ID NO: 70244 - DNA, 460 bp, Glycine max
atcagattaatatatgttagtatagttttgaaaatataaatatggctatttaaaaattaagagataaatagataatgtatatattattttaaatttttaatatgattttttttcatgtatgataaatgtgctaaatatttaaaaactaaataaaaataaatacataactgaaaagaagtaattaattatgttgcgttaaacacataatataaaagataataaactaagaaagaatttatgtaatattttctcagatatttttggtattattttttgataaaagccaaagaagcaccgccacacttccaccaaagggatggatccaaagtttctgaggaaccaaaggtacgcgaggaagcataacaagaagagcggtgaaacagccacggaagaagagtaaagtgtcactctcaaatggggctattaggatttgatttgctattcaagtcccatatgtttt

SEQ ID NO: 70245 - DNA, 318 bp, Glycine max
accacgcagcaagaaaaatgaatatcgaacaggatgagcatggactcatcacatagaatcaggcggggacatgtctttgtacgggctgacactcactaacgaccgcgcacacgaagctgccatggccatgctgctaacactgcccacgcccaaactccgaagggaccagatcgactgtcatcgatgactaattcttcaacacgcgctattgattgtaccactagcggtgcaccaactgacatatatatactgaaaaaatgagcatcatgagaggactacacacaaagtctttactgccgcggagagagaccgatatga

SEQ ID NO: 70246 - DNA, 225 bp, Glycine max
ttccatattattattctccaaatttctctaaaaaaaaaatcctttaaaattaactcatttttttttctttccttcaacaatcacatctattttatatttatatttattcaaactttttttaccactttctaactttttttaaacccttacccttcacttattctccactatatataaccctaatcccaacaaccatacaatttttaaaaaataaaatactttttt

SEQ ID NO: 70247 - DNA, 177 bp, Glycine max
cttgaattttcttcatccttctctgttctcctagaacttgattacttgaacattccctatggcagatgaggtggttcttctggatttctggccaagtccatttgggatgagggtcaggattgcacttgctgaaaagggtatcgaatatgagtacaaagaagaggacttgaggaacaa

SEQ ID NO: 70248 - DNA, 279 bp, Glycine max
  unsure (1)..(279): unsure at all n locations
gcgagcccagcgccgtccgtgttgagatacccattccttnnngtagtttaatacctgtaatagtatgggtntnntgaagatgnnngcgttacgtgagtccgtggaggcctnnttcccttcaatgccctccttntnntggtctccnnntctgaggtgnnngcatccaaacgaataccannaaagaaaggaggcannnaatggangnntggatgaaatgccaananntatcccgnnngtggaagccttatgngaggnnngggttaccnnncaggtcaatgg

SEQ ID NO: 70249 - DNA, 74 bp, Glycine max
  unsure (1)..(74): unsure at all n locations
gaagacccacgnggncccgcangcggaacaaggccaaccccgaacacaccccgcaccaaaagaagaaccgcaag

SEQ ID NO: 70250 - DNA, 253 bp, Glycine max
gacttacatataaaataaatgaggaaaaaatgaataaaatacaaaataatttttaataataaaaataaataacgaattaaaaatccataaacaatctatatgattcacaatacttattcaaaatcaccctatacaagacaaattctgaaaaaaaaaatatcctcttatcagtatactatcatcaaactttttgaaagaaaaaaaacctttttccttttttttctactctcattaatcattttcctctctattt

SEQ ID NO: 70251 - DNA, 413 bp, Glycine max
  unsure (1)..(413): unsure at all n locations
ctttttttttataagtttttaaagttttttttgctcttcttttttaattcctcaaatttttggtgataaattttaattcttcattaattttttgttaacacttttagtcttattaaatttttttgtccatttttaatccttcatttatttttattattcaaaattagacttaaatataaaataaatgaggaaaaaatgaataaaatacaaaataattttgaataataaaaataaataaggaattaaaaatggataaaaaaattagagggaataaaaatactgataaaaaattagtgaagaaataaaaattgttaaaaaaattggaggactaaaaattagattctttgagattttggaaagacanaaaacttaatcctttttttctactctcatttatcaatttctctctattt

SEQ ID NO: 70252 - DNA, 225 bp, Glycine max
  unsure (1)..(225): unsure at all n locations
cgcgtccgntttttttttataannnnncaaagccttctcctcttttcncncncaangccccacagggcttgtaataaattttagggcgccatccccccccccttaacactnttataattattaaattcttttgtccatttttaatccttcatttatttctattattcaaaattagacttacatataaaatacatgacgaaaaaatgaatcaaatacaaaataatt

SEQ ID NO: 70253 - DNA, 408 bp, Glycine max
ctgctcttcttttttaattcctcaaattttggatgataaattttaattcttcattaattttttgttaacacttttagtcttattaaatttttttgtccatttttaatccttcatttatttttattattcaaaattagacttaaatataaaataaatgaggaaaaaatgaataaaatacaaaataattttgaataataaaaataaataaggaattaaaaatggataaaaaaattagagggaataaaaatactgataaaaaattagtgaagaaataaaaattgttaaaaaaattagaagactaaaaattagaatctttgagaattttgaaagacaaaaaacttaatcctttttttctactctcatttatcattttctctctatttaaaaaaattgtatggtatcttgaga

SEQ ID NO: 70254 - DNA, 164 bp, Glycine max
tccacgcgtacggtcacgccatcggtccaggtgtgagattgaacctaatcggaccttaactgcagtcagggaatccttcatggcagacgagccccatatcaggtatgatagctctgaggttgaggccaagaatcgtggtgtttttaactttctgggcaggaaaa

SEQ ID NO: 70255 - DNA, 328 bp, Glycine max
  unsure (1)..(328): unsure at all n locations
aaaaaaaaaaaaataaaaaaaaaaaaaaaaaaaaagaaaaaaaaaaaaaaaaaaaaaaaaaaaaaaaaaaaaaaaaaaaaaaaaaaaaataaaagaaaaaaaaaaaaaaaaaaaaaaaaaaaaaaaataaaaaaaaaaaaaaaaaaaaaaaaaaaaaaaaaaatatgaaaaaaaaaaaaaaaaataaaaaaaaaaaaaaantaaaaaaaaaaaaattaaaaaaaaaaaaaagaaaaaaaaaaaatattaaaaaaaaaaaaaaaataaagaaaaaaataaataaatataaaaaaaaaaaaaaaaaaaaaagaaaaaaaaaaaaaaaaaa

SEQ ID NO: 70256 - DNA, 217 bp, Glycine max
accggccggattcccggtcgccacgcgtcgttatcttattccctgataaactgagcatataatggaacccttatatatctgatcttatatatctataaagggtaaagatatccgatgtgaatctatttgtttagttttcaatcggtatgtatataggtgaataatccacatgcctttttgtgaagtaaaaaaactaccctcgatccatgccctcaaa

SEQ ID NO: 70257 - DNA, 309 bp, Glycine max
  unsure (1)..(309): unsure at all n locations
acccacgcgtcctnattgataatttatatgaacaattcttaacttatacttcnacaagatntnctatgttttcagataaatttattcnctcataaaaaactctataatattttaatcttaacatataatatttgttacttaataaaataaatatatactcatattcccatacatataatttatatattaacaaataatatcttttatttacttttccaaaaaaaaaaacaaatccattttttttttatataaaatactaattttaattttttattttctccaaataaataaactaaaatttcttttcat

SEQ ID NO: 70258 - DNA, 131 bp, Glycine max
cccacgcgtccggtaggattaattgatgtatagaagaatcaattgctcacttatgaaaggtttatgaggagactttggcacaatccaaccaaccaaccacaaagtggatattttgactctttttttccctt

SEQ ID NO: 70259 - DNA, 355 bp, Glycine max
gatttaccgagccgacccactcgtcctaaaactaattatatctataccttttccctttctccaccaaaaacctaacatttgcaatatcgaatcttcactcttccaacattcaaaacccttatccctacctacaccacactcaatcgaaaatcctcattctcttcttatacacccaacataaaactctgatctactcgtacgcgactcttttaacagatcacatttctttatacaccccatacaacttaaactttaacttcatagccttacaatgccttcataatcacccttccaccaacaacaagcttacctacaattcctactcacacacattcaattaccctactgacaattc

SEQ ID NO: 70260 - DNA, 242 bp, Glycine max
  unsure (1)..(242): unsure at all n locations
gcttaaaaaaaaaaaagccttctactttttttcctcttcatgatgngaatcttgaaggaaaaaggttcaaattttattattttacccatcaattcaattataatcctttccttcttcataaaaaaataaatatatataaaaataattaaaattaaaaattttcttccactctaaagaatccaattttacttacacttccatcctacttcatatcttttctataacataacctaaattcaatt

SEQ ID NO: 70261 - DNA, 217 bp, Glycine max
tactttctcattaaagagatttcactgggtcaaatgtgttattctcaacatacctattcaatttccttaaatacttaacttctcaccttttcatcatctctactatatataaatcacccatattcatattctatatttctattcttcacttttatatcataaaaacatccttttctaattcactatttatactattttaacaatatccaaaacaaat

SEQ ID NO: 70262 - DNA, 102 bp, Glycine max
ccgacccacacgtccaaaaaaaaaaaaaaaccccaaacttctaaaactcataacacaaaacaaaccacaaagaactaagcaaaaaaaacaataccccccccc

SEQ ID NO: 70263 - DNA, 208 bp, Glycine max
aagacgcataagtttcacagacaactaatgtctctacattttctttaaagagaactcaaggggagaacgtggcaaatctcaacaaacctattccatttccttaaaaactaatactaacacctttcctgaactgcactattgataaatcacccactatacacaatatatggcgtagcatgttcactttccatatcactctctgcttcct

SEQ ID NO: 70264 - DNA, 348 bp, Glycine max
aaacttttatatctataacttttcatgtctccaccaaaaacctaactgaggccatatgggtctatcacttttccaacaatccaaatccaaaaccctacctacaccacactcaatctaaattcttcattctcttctcatatatagctcataagcctattatctacccgatctcgacccgtacaacagtgattctctcacattacaccaaattcaccgtactacttaactccatctcctaccagtaccttcacaaactccctatcaccaacaacaatttcacctacaatttctactcacactccttcaattacctcttctacaatttctacacataatttcatgttgcat

SEQ ID NO: 70265 - DNA, 289 bp, Glycine max
gtccaaaaaaaaaaaaaaaaaaaaatttttaaaattttttaaaaaaaaaaaaaaaaaagggaaaaaagaaatattttaaaaaaaaataataaattaaatgggccgcccctttaaaaaaaccaaacttaactaacccttcattccaacgaaaaacctttttaatagttcaaccaaatttaaattaactgcccgtcttttaaaaacttcttaactggaaaaaccctgccttaaccaaactaaatccctttgaaaaaaatccccttttccccagttgccttaataccaaaaa

SEQ ID NO: 70266 - DNA, 196 bp, Glycine max
  unsure (1)..(196): unsure at all n locations
ctgactcgcaagattcactccaaattatgcttttcgcttttatattcctcatcacatcagaganacgtgggacatcatcntatttcctttattatttccttttgttgatacactgtatcacacacactaaacctgtgtgttcactgaggtataaagaaaatgattgaattgtaaacatcatgaattacctttttgg

SEQ ID NO: 70267 - DNA, 207 bp, Glycine max
ttaacctcctacaatcaaaaaactgttcaagtcttttcattgaatttaccaaaagttcaccggctccacatcatcaccaatacacctctaaccctctctcttctctcctacaaaattcttaacctcaaaattttatcgtaagagaaatcttcttctcatattccatctcccattttgaccgtaactaaattggcacctttaccttcc

SEQ ID NO: 70268 - DNA, 127 bp, Glycine max
attcattcctatagctatagctacaacatatcatactactactgttgttgatgctgctacggctgtagctgctaccacatatcaatcactagcttaccataatgggtatggatagccatgaccccac

SEQ ID NO: 70269 - DNA, 217 bp, Glycine max
tcccactcgtccgcccacgcgttctcaaaattttcaacaccaatctcacccatttcaaaaaagggccgttattattactattcttaaaatggccactctttttctttaccaattctttctcaaactcttgctcctaatttaagtctttcaactttcctttgctgctatgacactcaaccagcttgttcatgaccattcacatttacttcattaccac

SEQ ID NO: 70270 - DNA, 247 bp, Glycine max
cccacgcgtccgatcattggttattatttgttccggggaaaacatgatcaacttgtaacatgtagtctatgaggagactactttattggtaatgtgtatgtcggattaagtggattcgagtgaaatgttgatcaagggagtcatttcgacatattttctggaatataactcttggattataagtttttaaaaaaaaaaaaaaaaaaaattaaaaattataaaaataattataaaaataaaaatttat

SEQ ID NO: 70271 - DNA, 268 bp, Glycine max
ataaataatcacactcagcattcttgatctataaaatccaacatatactaaaacgatctaacattatcataactcactaccaaatgatattttccaacctaaagctatatatccatgtccactacagactactaaagattacagaacaccaatcaccatttgagaaacttaaaaaaatttaatataaagattaatcataattccaccagatgatactaggtcaccaaataaaagtctactatcatctcccacaacctaacactcacta

SEQ ID NO: 70272 - DNA, 337 bp, Glycine max
acagggactcactctattcgcatcgatactttcggtggctatcatatcctacaaatacctgggatgttctacatataggcatattgtacacatatatacgcactctgttcaaagctaatttgccgaatcactgatacatgcattgctaaatctataacatgccatcaatgcacctaccagacatttcacacatatatacataaactcacaccttcaaaatgatgtttacgctaacctaaaagctaaggttatccatattccctacatactaacgaaatgatacacgcacattcatgtcccgcatgtgagataacttgataaaaagtttagtacaaaa

SEQ ID NO: 70273 - DNA, 103 bp, Glycine max
ctcaatagttgcttcagtcatgtctttcacctattccataattggtctcgttcttggagttaccgagaattgcagaaacgggaactttcaagggtagcctcac

SEQ ID NO: 70274 - DNA, 336 bp, Glycine max
taacagccttccttaccacaccactattatttatttattaacgcatctaagctcttaaagacgcgggatttttaaaatcatgcactttcaagtcatatttccacactctattaacatctgtcttacctacataccattccctaacatactcatacctctcctcaacaattaaacaactgtaccctttttcacactataagtctctcgaccaaacctccataatgttctctccacattcctctaatccaagcttgtaacacatactattcattcacacaccccagagcactcacctggaatccctcatgctctttatgcttaaatctttgatatctc

SEQ ID NO: 70275 - DNA, 127 bp, Glycine max
ctcttctctcctcccaaatccctaacctcaaaaagtcatcaacacactaagcttcttcacaaataccagctccaatttctaccaaaacccaatatacaccttcacctgcacaaaaatatacaccact

SEQ ID NO: 70276 - DNA, 237 bp, Glycine max
caaaaaaatcaccaaatactactttatttatacttactgcatacattaaaaattggaaggctcatattgactctaaccacccatcaattcaatatcaacccatacctacttcaaaaaaaaaaaaaatcaactcaaaacaaatacatactcaaatatcatccactatctactaatcaatcttacttcatctccatatcaacatcataatcttacataatctcacctactaataatata

SEQ ID NO: 70277 - DNA, 349 bp, Glycine max
cccacgcttacacaaagaaaaaaaatccttttacttcttttctctttcataatttaaatctttattaaaaaagcaaaatttaaaaatgatttacccatcaattcaattaaaatcctatccttcttcaaaaaaaaaaaaaaaaaataaaataaaaaaaaaaaaaaaaattacaatcattataaataatccaaacttacaaacacttacattcaacataatacctattatataaatacacctaaaatcaattcactatcacactatttacaactactatacttataaaaccctttcattacccaactaaatctcctaccaacacatcccctattatacatctaactaaata

SEQ ID NO: 70278 - DNA, 461 bp, Glycine max
ccggccgacgcacgcgtacggttggtcccaaaccttctagtacagctgatttataggactgaacaaggctcacctcgtcgggctatatataattgactccacgcccctcacatctttaagtgaaaacacacaaacaatcacttagtcacaaacctcataagatacctaaccttcttttcaccctattaaaagcgtataactaagtcactgaactttccgaaatataatacatcactgaaacttgcaaacagaaaactcataacacacaaactctcatagaaaaatcgttagcaaatctccacacttctcacgaatatcatggctgctgttgcttatacacaaatcaaatatgccttatttactgtacatcaaattcactatataaacctttctatctatacactaactttcatattttctgcttcaaactcaaattattattacttacaatattattatta

SEQ ID NO: 70279 - DNA, 355 bp, Glycine max
ccgatcgctaaactaatatggatcgagaaatcgccccagaggagaacatgaacaagactaacaatccgcacctaagcaatggccctttaaaaccgcgactcaagggatcccttcacctactctcaaatatgcaacgctaacatcggacaatgaacaccatacaatgactgcatcagactatgttaaatcgaaggaatcgaatagcataatgctgaatacgcctttaagtccatgaccttcgatgttaagaaccatcatgttcaatggaagaactacccatgtgcaatatcaaaattgcaccatgagatagtgccagacaaatgcaacgttgcggacaatcctaaaatggcaatca

SEQ ID NO: 70280 - DNA, 402 bp, Glycine max
gccacgcgtcgccacgcgtcgggattaagctgttagaaccgatgtgcactacggggtctggagttctcgaaacgctttgatctacgctcgcttaaacccactgagaaaactcggatcgtcccctcgatcgtgtaaccgcgtcgcggccaacagggccaaacattaccctaaagttcgggaccacacctttcaattttccgactcttttctaatataaaattggtggcgacttcccgcatttttctttatggtagactcactttttagtcccgcattttccttccctcatatggtttgttgcgacagtactttgccttccttctaatggtatgttccttaattgaattatcctatttacttatgttaaacttatgctttaattaacttactaattaagccttt

SEQ ID NO: 70281 - DNA, 281 bp, Glycine max
cccacgcgtccgcccacgcgtccagaatattctgttgccttatgaacattttccattgttgattgcttttgcaggtcggattggtaaagatctggtgtagaatcccacagctgttggtgtggtttaaggtttcaagaagtgtcatgcttttgtcatgatcaaccgtgcagtgcttatatcatgcttcttttactgcttgattgatgtatgttggaatgttattttaagtatactattctttttattgaaggtaatttttactatgtttgggtcttgataaa

SEQ ID NO: 70282 - DNA, 319 bp, Glycine max
aaaaaaaaaaaaaaaaagaaaaaaaaaagaaaaaaaaaaaaaaaaaaaaaaaaaaaaaaaaaaaaaaaaaaaaaaaaaaaaaaaaaaaaaaaaaaaaaaaaaaaaaaaaaaaaaaaaaaaaaaaaaaaaaaaaaaaaaaaaaaaaaaaaaaaaaaaaaaaaaaaaaaaaaaaaaaagaaagaaaaaaaaaaaaaaaaaaaaaaaaaaaaaaaaaaaaaaaaaaaagaaaaaaaaaaaaagaaaaaaaagaaaaaaaaaaaaaaaaaaaaaaaaaaaaagaaaaaaaaagaaaaaaaaaaaaaaaaaagaaaaaaaaaaa

SEQ ID NO: 70283 - DNA, 223 bp, Glycine max
aaaaaaaaaaaaaaaaaaaaaaaaaaaaaaaaaaaaaaaaaaaaaaaaacaaaaaaaaaaaaaaaaaaaaaaaaaaaaaaaaaaaaaaaaaaaaaaaaaaaaaaaaaaaaaaaaaaaaaaaaaaaaaaaaaaaaaaaaaaaaaaaaaaaaaaaaaaaaaaaaaaaaaaaaaaaaaaaaaaaaaaaaacaaaaaaaaaaaaaaaaacaaaaaaaaaaaaaaaaa

SEQ ID NO: 70284 - DNA, 99 bp, Glycine max
ccttggtaccaacactgagcttaactgagcttcgcaaagatgaatcgggaaaagttaatgaagggggccggttcggttagaactggaagaaagggtact

SEQ ID NO: 70285 - DNA, 137 bp, Glycine max
atttcccaaccctaattgccaattggaccccccctttaaccgggcatttaaccccgccggtgttgtgggttcccgcaacgtgaccggttcactttgcaacgccctatcgcccgcttctttcgctttctttcctttct

SEQ ID NO: 70286 - DNA, 353 bp, Glycine max
aaaaaaaaaaaaaaaaaaaaagaaaaaaaaaaaaaaaaaaaaaaaaaaaaaaaaaaaaaaaaaaaaaaaaaaaaaaaaaaaaaaaaaaaaaaaaaaaaaaaaaaaaaaaaaaaaaaaaaaaaaaaaaaaaaaaaaaaaaaaaaaaaaaaaaaaaaaaaaaaaaaaaaaaaaaaaaaaaaaaaaaaaaaaaaaaaaaaaaaaaaaaaaaaaaaaaaaaaaaaaaaaaaaaaaaaaaaaaaaaaaaaaaaaaaaaaaaaaaaaaaaaaaaaaaaaaaaaaaaaaaaaaaaaaaaaaaaaaaaaaaaaaaaaaaaaaaaaaaaaaaaaaaaaaaaaaaaaaaaaaaaaaaaaaaaa

SEQ ID NO: 70287 - DNA, 152 bp, Glycine max
ttttctaatctgaggcagaattatgtcctggagttgatggttgggccatctctctgaaagcaatgatgagcatagttgtgggtatggggtttgcaatctggattttttactttttttttaacattttttttttttttcctacttttatcatg

SEQ ID NO: 70288 - DNA, 322 bp, Glycine max
tccctagaaacgcatgatatgctatataagccatccttaggagcaatatatccgacctcttcaatttattaccagaatgtatgtttcgtactacaccatagactcaatgacattcatatttcccaacaacgcattttaacctttgatagcatcatcaatcacatacagatcagaatatcattcaacaattgaagatcattagcatcatgcatattctatcatacaatgatatagctttcattccaacaaattttattctacaaacacctcaccaagatcaccaataaacctcacccttacttaactcaattataacttcatt

SEQ ID NO: 70289 - DNA, 306 bp, Glycine max
ccccagcgtcgaccctaacgcgtgcagagcaaagagactcacctggggcgaagacccggagggtatggcaattagacaacatcccaagtacggtttgcggggttctgatcccaagatcagattacgatgtgtttaaaaaaggtgtgatgaattcttttggtcattggtagtgggaaaggaaacgttttaggggcctgaagctgctcgattgttgcacagtcatggcaaattgctggaaggatctttcacttagagtagggtgcacccattcatgtcttagatcaacagatgctttctgtgccggac

SEQ ID NO: 70290 - DNA, 426 bp, Glycine max
  unsure (1)..(426): unsure at all n locations
cccacgcgtccgcacctttgttcactcttcttctcttgcggcttgggttttagcgcagcttcttctagatttaaggaagatgggtaaggaaaaggttcacatcagtattgttgtcattggccatgtcgactctgggaaatccactaccactggtcacctgatttacaagcttggaggcattgacaagcgtgttattgagaggtttgagaaggaagctgctgagatgaacaagaggtctttcaagtatgcctgggtgctggacaaacttaaggctgagcgtgaaagaggaatcaccattgatattgctttgtggaagtttgaaacaacaaagtattattgcacagttattgatgcgcctggacatagggatttcattaagaatatgattactgggacatnccaagctgactgtgcttgtcttatcat

SEQ ID NO: 70291 - DNA, 183 bp, Glycine max
gaaagacgtagcacgcgaccaacgcttcacggcacacacactaaccaaaaggagaggatcgacaaaccgataaccacgcattgcaacgcgcgctgatcggactacggagtgcaaacgctaatgatatctggatagtctggtaaccttacacctcccgacacgcaaccgacgaccctaaaaacc

SEQ ID NO: 70292 - DNA, 314 bp, Glycine max
gctatgcttacggtgaattcatgcaattattttccgtcagtagacttgatattaaaagcgcggggcaaatatgccaaactgacgatcgtcaccttaggcaaatgattgccagggtaggagactaacgcatactatatcaaccctggacatggtgactaacttgggatctgcatctggagcaacgccagataactctaatgagagtactactgcatgctgagaaatatctgttctagaaatgactgcattcgtaagagcggctaatgaatctatacatcaatcatcattaggtcatatttgcacaagccacacat

SEQ ID NO: 70293 - DNA, 84 bp, Glycine max
  unsure (1)..(84): unsure at all n locations
ggnnttncccggggnaacccacgcgtcgcgactcgtgcgtccattaccatgttgattgactaagagaagacaggatgacaagag

SEQ ID NO: 70294 - DNA, 208 bp, Glycine max
cccacgcgtccgcccactcgtgcgttcacatataccatcttgttatttatacaaacaatgaccaggatgatgaggggactacttacactaacatgtatgctctatacctatatcacactatataaagtgcagaattcactcagaaagctaccttcaatatttatcatcatgatcaaactatcttcaataacaaaattgtagtcataga

SEQ ID NO: 70295 - DNA, 189 bp, Glycine max
tgtttaatttatgcaatcagtattggaagtacacttgacattaaaaacccggtcattttttacaaactcaagagagtcacatacattattatgatttcaaagactcaagtttaatatattctagtatcatccatttacatagcttctaacttaacatcttaatccttatcaagttcaaacatctaaaat

SEQ ID NO: 70296 - DNA, 424 bp, Glycine max
gaggttttcgtctgatgatgttggtagttctagcaatcgagggcgagggcaagggcaatggtctcgaaattatgggaggaatggagcggatggtgatggcagaatgaggaagaatgggaatgggagaaggtttttgtccaataatgttgatcggtctagcggtggagaacagtcttctactttgaattatgggggggatggaatgaatggtgatggtagattgaggaggaatgggaatgggaggagggtctctatccttgacaagatggtcgccaccctgcacacgtttgctgctaccctggccgctgtggtggatactgtaagcatggctgcttgcattgcccagcattcaacggatgtttcagaagatgcttgcataacactgacgaagctattgcttctcatactcacgatgggactcact

SEQ ID NO: 70297 - DNA, 347 bp, Glycine max
  unsure (1)..(347): unsure at all n locations
ggtcttgaattcccggggnttcnccggntaacccacgcgtcgccacgcgtcggttcatattcacatagaagaacatgttctctcctaagcgagattgctgatagccatcttaggagcaatatatcgcctttaattattacaaaggtgtgcgtattaaccatagtctttgtattgtgttcaacacgcagttacctttgaagcatacatcacatggtgatcagatatattcacattgaagatcaggcatcagctagctacagcatgatatggtttcttccacaatttcatgctcaacactaccagatgaccataacctcaccttactcaactaatatacttatgtcacc

SEQ ID NO: 70298 - DNA, 311 bp, Glycine max
  unsure (1)..(311): unsure at all n locations
aagcacaaaaagactganaatgaaaataacatttgaagtcaattgcatattgttaagattgcgcactgtgacgatgctgggtgctaacctccctgtcgaaaaacactccgactatcacacttaagttcgaaccagactttttcaatttccgaccttcctaaataaagtggtgcgactcgccatttccttcatgaagaccacttggagtcccgatcgccttcctcaaaggtagttgcgcagtacttgcctttcgcgaaggtagttccttattgaataactaataacaaaagtaaactaagctaaaataactc

SEQ ID NO: 70299 - DNA, 148 bp, Glycine max
cgacgcacgcgtacggacacgcgtccgcccactcgtgcgactataatgggctcaactgaaaccatatggaccgtgggtgtcatattggcatcacgaggacactgcagcactcaaccgcctaaatctcatacaccagaccaatgaacaa

SEQ ID NO: 70300 - DNA, 373 bp, Glycine max
ctcaaaaaaagtcagaaaaataattgattatttataggggggcccactatttatagcgcattcatgcacatatattaatttctttgaatgcctagaccccatgtttttgtgccactgcacatgttggataaatgagattcgtcagtcaagtttgaacatgaagtacatctgtgtcgtttggctttctaaaaacacatgcccttcttgtacgccatcgtagctccaactactaataaccgatacacttatttaattcttactactaatttctccccctattattagtattatttattagtttataatttgtacattattccatttttttcacataactttcccataatttattctaaaataaaaacattttaaa

SEQ ID NO: 70301 - DNA, 153 bp, Glycine max
  unsure (1)..(153): unsure at all n locations
cccacgcgtccggaaaaaaaaaaaagccttttactttttttcttttgcatgatttgaatcttgattgngaaaagcttcgaattggggtgttttacccatcaattcaattttaagttgtgctttgttcaataaacaaagaaaataggtgaaaaa

SEQ ID NO: 70302 - DNA, 353 bp, Glycine max
  unsure (1)..(353): unsure at all n locations
cggtcttgaattcccgggggnttcccggnnaacccacgcgtcgattcgatgcgcaagaagaaaacccttctaccgttcaagagcaaatcttggagaccctactggtagaccatcactctcgaagcagagtcagatccataacatgtaaggccaaaattcagacaggaaggatcccaccagatcagcacggctcattttgtggcaagcagcttgaggatggacgtacccttgctgattatacatccaaaaggagtcactctccactggtcttcgtctcgggtgggatgcaaatctttgtaagaccttgcggnaaagacaatacccttgagtcgagagctcgacacattgcaacg

SEQ ID NO: 70303 - DNA, 355 bp, Glycine max
gacgctcctacagcgaagacccggcgcttgactcggcgttgaatgtggaggagcctcgccggctaccagcaccaggcaaagacctcgtaccgtctcgcgagcggcgggccgaatttgcaaaccacgcaaggggatcgccagcggaagcgactgcgcatactgcggagccgagtccgaccggagctaaagtggcgccgacaccacgcgaagaatgatccaggactcgcgtcaatcacatgggaccactagagagccatggagaagatatatgacctgatggtgggaatcgctgaggatgcagatgaatgcgagcctaagacgaggccaccagatgttcacacgcatgaccatcagg

SEQ ID NO: 70304 - DNA, 106 bp, Glycine max
cccacgcgtccgcgcggcactgctacggaccagatacactgcttatttgagcgagacaactctacatacatgcgggggcatcatgaccaccatacacgtgctgagc

SEQ ID NO: 70305 - DNA, 301 bp, Glycine max
  unsure (1)..(301): unsure at all n locations
ttcccggngnttccgggaaaaccccacctcattgtgctgcagaattcacagccgcttgattacaatgatgttttgtggcctaagtgtatcctctgcctaactgtattccctgttgtttccttatagtggattgtctatatggatccagtcacatagaggcttaattcaatgattcttgctgacatttatcttcaattcttgggnggacaattatccatagagataggaatattctcagggcacataccaaatttggtgttattacgagccttctaattcagtgatgtggatctatcactct

SEQ ID NO: 70306 - DNA, 410 bp, Glycine max
gaagaaagattcgaaacgaagaaagaatgcgttgtgaagaatggcggacgtagggacacgtggtcggtgtccacagcgtagaggagtggaacgaacatatgatgcagggagaagagtccacgaaattgcttgttaatcttatgcccttctattatgtctagccttgtaatcttgattcgcattactataagcgcactacggttttcgcattgggaaattccttcatcgcttcttgccttaatgaaccattgtgtgctatcaatggcaactatagattctattatgacatatattagttaatattgatgcatctggacggcgatgttgagtgcgatgctattgctatgctatggtgtgggatttttcaaaataatcgacgaagaatcatatgcttacgtccatgatggatg

SEQ ID NO: 70307 - DNA, 402 bp, Glycine max
gagagacacaaaactacctgaagtagtattcttgctactcttcaccttaattcttgcatctaaatttacgcaaggaattagaacagaagaatcggtatctcaatcccctcaaccccaaagagaaccaagtttggaggatggcaatgaggcatggaaaatgaggaattctaggagactaatgattggatccactgcaccaacttgtacgtacaatgaatgtagaggttgtaagtataaatgcagagctgagcaagtgcctgtagagggaaatgacccaattaatagcccataccactacagatgtgtttgtcatagatgatatatgatagtccataatgaattctatagcataatgtaacttttgagttctagtagacatgagtttatctcctgtaagtcact

SEQ ID NO: 70308 - DNA, 272 bp, Glycine max
ttcctttttttatacttttccttttccacttttcaattatctttgtgtgattgttcagtccttcaacctctatcctccccctccaagtggggaatctactgctaatagcaagaatgagtctccttcttttccgtcgggggcatcacctttgttcttggttttaccccattcctatttcactcttttatattattattttgctttccatttcatccaccttttcttatgcgctcaacaagctcatggagcacaccaaagaggcttttaagggg

SEQ ID NO: 70309 - DNA, 429 bp, Glycine max
cccacgcgtccgcccacgcgtccgctccagagagaagaagaaacttaatcgatcatcacttcacttcactaatacatcatggcagacgagacccagaacaagtatgagagctctgaggttgaggtccaggatcgtggtgtttttgactttctcggtaagaaaaaggatgaagaagacaagcctcatcctcaggaggaggtcatcgccaccgagtttcaaaaagtcactgtctcagaccaaggagagaacaagcacagcctcttagaaaagcttcaccgatctgacagcagctctagctcttcaagtgaggaggaaggagaagatggagagaaaaggaagaagaagaagaaggaaaagaaagggctgaaagagaagatcgaggagaaaatagagggtgatcatcatcatcacaaggatgaggacacaagt

SEQ ID NO: 70310 - DNA, 275 bp, Glycine max
caagttttctctttgagtcaagcgaggctgatagggagcatgcacataaattgatggatatatcatacattctaagtggaaagtaattttttattctttgtattgccttttactgatcataatctttttgatttagggagatgcgctatatgcaatggaacttgccctgtcgttggagaagctgacaaatgaaaagctgcttaacttgcacagttgtgccttaaagaactatgatgtgcaattggcagattttattgaaagcgagttttttattg

SEQ ID NO: 70311 - DNA, 125 bp, Glycine max
gaccacgctcactcgtcggcgtactctctatatgatccaagcttatgttttcgcgcgtgctacatcatagctcttgtagagggtcacctaaattcaatgcactagccatctgttacaacgtcatg

SEQ ID NO: 70312 - DNA, 302 bp, Glycine max
  unsure (1)..(302): unsure at all n locations
cttggctactttgagtcttcttgatttttttgtttctccttgaactcaaacatgggggatgaggtggttctgctagatttctggccaagtccatttgggatgagggtcaggattgcacttgctgaaaagggtatcaaatatgagtacaaagaagaggacttgaggaacaagagtcctcttctnctccaaatgaacccggttcacaagaagattccggttctcatccacaatggcaaacccatttgggaatccctcattgctggtcaatacatttgaggaggttggaatgacagaaattccct

SEQ ID NO: 70313 - DNA, 265 bp, Glycine max
gacccacgcgtccgctcgggtactctaaatcgtctggattcattttattctccttgcactctgacatggaacgtgaggtagttatgataatagtctgtccaagtccatttctgatgaggatcacgattgcactagctgcataacatatcaaatcttatgcccaagactactacttgatgaacaccagtaatcttatactgcacatgaaccttgttcactagaagattcactattctcatccacaatggcaaaaccatatgcgaat

SEQ ID NO: 70314 - DNA, 74 bp, Glycine max
ccgggcggaccgcacgcgtccgcccgggcattctgcctcactgtgattatcatatcactcatcaagcacaaacg

SEQ ID NO: 70315 - DNA, 127 bp, Glycine max
tcgcccactcctgctatcgttgatccttttttttaccggcgtgcatacgatcccgtcgagacagggtctctatgacgaaactaacttatctgacatgcgtatgacgaattaattgcattcaagcccc

SEQ ID NO: 70316 - DNA, 171 bp, Glycine max
cgcgtccctgctccgtaccagtttcactgcatatttttgagagaaaactctgcaaacattgtgggggatcatgacctccttacaagtgattaacttcttttcggacttcttcccgtaccaataaatttaaaattgaaattctttggaaatttaagggaaattggtttttta

SEQ ID NO: 70317 - DNA, 125 bp, Glycine max
cccacgcatcctatcacacatccattcacacttcccctcataaacaaaaccattgatataagtaacttacataaaccatctactcactattacattccatacatgatcatatcacacaatatcct

SEQ ID NO: 70318 - DNA, 159 bp, Glycine max
acacttctctcctccgtaccaacttcactgcatatcattttatagaaaactctctctacatcagattctatcatcacctccttacatctcatcaacttctctcttactccttcccttacactcaaattcacaatcatattctcttccaattttataatc

SEQ ID NO: 70319 - DNA, 204 bp, Glycine max
aaatacaaaacaaatcataaaagcaagatttttctaatcaacaatattgcatacaccatctatgttaaaaattataaaaaaaccatacaatataattaaaaactacaattacactcaatttattaattcacaccacaaatcatcaaaccaaatactacactaacaattttatctcttaatataaactaatttaaacaattacca

SEQ ID NO: 70320 - DNA, 186 bp, Glycine max
acccacgcgtccgaaaaaaaaaaaaaaaaaaaaaaaaatttattataaaaaaaaaaaaaaaaaaaaataaagaaagaattaattataaaaaaaaaaaaaaaaaaaaaaattttttttttaaaaaaaaaaaaaaaaaaacaaaaaaaaaaaaaaaaaaaaaaaaccctccctttaaaaaaacccaaa

SEQ ID NO: 70321 - DNA, 275 bp, Glycine max
gaatacccggcccgaccgacgcgtacgcgtggataactcatgccgaactgttgcagttgtcctgacagctcgaaaactcgtggatcaggataatcttctacagagcctgcgcttccataaatccacttcacaatcgctcccacatttatacgattttcgctatatgccactttctcgttaaatttcagattcccgctgtatatactttctacgtagatgacgtatagatcagataaggaaatcgtatgcagttagatcaacttatctaatataca

SEQ ID NO: 70322 - DNA, 212 bp, Glycine max
gctatctcctcttaccaacctttactgtctttccatttattcggtccatgcagatatctggaaaccgagctataacactaatctaatatcctaactcaccattaacattaatattgtcagaatcaacaacaaaggtcaccacatctatacgatccacatacacatactcatgcatgccaatgatactctcatctacaccacatctacattaa

SEQ ID NO: 70323 - DNA, 261 bp, Glycine max
cactaacgagtagcctcaattttccgatacttgcaccctcttaacgataagattaaacacacaaagggcccaccgaaatgaaaaccaaatcaaacccaacccaccttgtacgatctgccaccatgagttcatgtactcatttgacatcaagcaacactatgtatcacatgcagttcttcacactatgctccacataatcaatacctacactatttctctaacctatttaatatctatctgtataaaaacactctcacattc

SEQ ID NO: 70324 - DNA, 131 bp, Glycine max
gaccaacccattcaacaagctcatgctctaatgactcatttatatcgtacacaaacaactcactgtaaaggcaagatattttacacatactgtccatccattaaaacacttacaacaactctcacacatac

SEQ ID NO: 70325 - DNA, 98 bp, Glycine max
gacgcactcactcgtccgcgcccgctctaccacatccaacctctcgtacgcttacatgcaacgtcatagctctggtatagtgtcacctacattcaatt

SEQ ID NO: 70326 - DNA, 250 bp, Glycine max
ttcctaatatttctttgttaagaatcatctaatttcaaccccgtatccactattaacatatttaccaaattctacccaattacattttaatcttataaccttcttaacccactttatttccttatctgtaaatttttaattaattatacaacaaattctttaaaaataaattattttctcttctgaactactacttatttatccattaatccaacttcaattattttcttaatatttcaataatatctct

SEQ ID NO: 70327 - DNA, 169 bp, Glycine max
tcattatatattgactcattttactatacatcaaaaaatttcctaaatgagcaagatattttacaaaatcttttcatctattaaataacttccaattactcccacattttgagatcttctgcaatataccacttcctgtttcaatttcaaaatcacactatttatacaa

SEQ ID NO: 70328 - DNA, 195 bp, Glycine max
accagcgcatccgataatcgatggattcatttatactgacagcttgaaatgtgctgggggtgcaagatattccacatgtgctggggatctatgaactcactgccaattactcccacatttctagtttctatgctagaaggaacttgctgctctaatccatgatgctcactatctctacaaatgatgtctgcgaca

SEQ ID NO: 70329 - DNA, 171 bp, Glycine max
actcgtccgcccgcgcgtccgataaggcctgcgcttagttgataagcataactgggtgaggaagagaaggtgagattgaagaagatggcgtccagcggagcgttaccgttttggagggcgactgtgattacgtacataacatactctaacatatgcgcgaaatctctcaag

SEQ ID NO: 70330 - DNA, 143 bp, Glycine max
cccacacatactcattcacctaccttacatacccttctctctctcgcatgctcttgttagggctctctcatactccttctctcaaccaaaccaatccattattcatttgaatcttcttatacatcccaaaaaaacccattaaa

SEQ ID NO: 70331 - DNA, 165 bp, Glycine max
cgcgtccgcccgggcatcacacaatcactcaactaacgtacccaccctaatctctataatctagggtaagatatacattacacatgctctgtctctaaaccaaaccaattcaaataacaatcgaatattccgatacaaacaaaccaaacccaatacaataaaatt

SEQ ID NO: 70332 - DNA, 138 bp, Glycine max
acgcgtccgcccgcgcgtccgacaacacgtccattaatatagactctacgctaccgatgatcgagtcaagaagcatttgagagcggatcatgcacgcagcgaccactatgctatacagaaacagcgatagagataaaa

SEQ ID NO: 70333 - DNA, 141 bp, Glycine max
attgctgctgtttgcctattggtgtactttggggtctctaccctgctggatgcctgatctagcgatggccaaaaatcagatgaagagcagaaggaggcagacttagcagtttctgaattttctgaaaatggtgctgggata

SEQ ID NO: 70334 - DNA, 190 bp, Glycine max
cgcgtccgcccacgcatccgtcaagcattgcatccctctttatctgtagtttgttttgtgcttgatataggagatctgccaaatcaagatgggttttaagatcatagtgtgcgttttgcatcagtggctaatttctatgctgctatgatcttggcactcattgccatttacatacttcatacagtggtaa

SEQ ID NO: 70335 - DNA, 174 bp, Glycine max
cccacgcgtccgtcaagcattgcatacctctttatttgaagtgtgttgtgtgttttagatggatgatttgccgaatcatgaggtgatttaagatcatagtgtgtgttttgcaacaatggctaacatctctgctgctatgatcttggcactctttgccatttccatacttcaaac

SEQ ID NO: 70336 - DNA, 175 bp, Glycine max
  unsure (1)..(175): unsure at all n locations
tcgcccacgcgtccggaaaagggacgtaacttatttgttaatatgnaggcgtcataaactgaaggcaccgtcccttctaagagacactagtcagggtcaagtgatatatatgctgctcaaggcaaaaattgcttgaaatggagagaagattgattccaccggaatgagttttgaa

SEQ ID NO: 70337 - DNA, 171 bp, Glycine max
cccaggcgtccggaaaagggaagtaactgattttgttgatatgaagggcgtggtggtaaagggtggggcaccgtcctatgctgagaggacactaatgcagggtagaggtgagatatatgctgcgcagtgcataaattgcttgaaatggttagagattgactcacaggaaga

SEQ ID NO: 70338 - DNA, 87 bp, Glycine max
gcggtcgtatatcaccatctatagctttacggttcacactgttgctcgtcgctctatgacgctggatgagtttgaacaaggactttt

SEQ ID NO: 70339 - DNA, 194 bp, Glycine max
aaaaagcgttggcgaccacaccaaaactaattgcattgaaaagcatagaagtcgcatagagtggtgggacaggcaaaataaaacattttgaaatcatattggcacacttgagtaacggctgctgaccattgtgacggatgcatgttgtgcttataccttacttgcgacgaagaacaactgccgaactattcaca

SEQ ID NO: 70340 - DNA, 225 bp, Glycine max
  unsure (1)..(225): unsure at all n locations
aaacgcccttgtcgaccacacctaaatttatttcatatataagcattttttcacaatgtggggtgaaatatggataatagttcattttgaagtcatattttctcacttgattaaaggctgncgtcccttgtgacggatgcgttgtgtgctgataccttccctgtgcgtaaaaacatctttctatctattcatacttaaatgtcgtataccacaccgtgtcaattt

SEQ ID NO: 70341 - DNA, 219 bp, Glycine max
  unsure (1)..(219): unsure at all n locations
aaacaccctcgtcgaccacaccaaaattaatttcatataggagcatatgcgaacgaaangacgataaggtaggtagaaagcaacagctctgaattcatgttagcacacttgattaaaggctgtcggacactgtgacagatgcaatgggagcttatacctagcctgggcgtaaaaacaacgtaaaggctattcacatgtaaagattggagaccacacctt

SEQ ID NO: 70342 - DNA, 236 bp, Glycine max
aaacacccttgtcgaccacaccaaaattaataacatacaaaagcataaaagcacatatagacatagaaaagggaaaatcaaacattgtgaagtcatatttgcacactagattaacggctgccgcacattgtgacagatgcgatgtgagctaataccatccatgtgcgtaaaaacaactcccgaactattcacactgcaggcccgttgacaacgcgaatgtgattgaagacaacctt

SEQ ID NO: 70343 - DNA, 222 bp, Glycine max
aaacacccttgcataccacgccgagattgattgcatcagcgagcgtaagagcacctagggacggatgttagggtaacaagaacatcttgcaggcatgagagctcacctgtagcaaggctgttgcacggtgaacggaacggaatgctgctgaacgttgacggtgcgtatgaacatcatgcaagcgatggtcactacaagtgcgcaaaccacacctgttcaagt

SEQ ID NO: 70344 - DNA, 216 bp, Glycine max
atcgtatgtgccaggctctctgtgtacggttctaactctaccgctctgaatacgtgagctggctgataacgaactgtcattaaagagcatatggaagctcatgtagcgagcattgaacatcatatacatgatgcttgcatactatgcactgctactgcagataccatcactgacagatatacgctgtgcagattgctggggcgacaaggcattgca

SEQ ID NO: 70345 - DNA, 292 bp, Glycine max
atcactcgtgctattcaatctataatcggtttctattctataccaatcttagctgcgtattgttaattccaaattactgtaaaaacatcataccaaagccagacgttcgttgagtctatatttataaaatgtttcactctactctatcagccattataacattttctactacttctatcttacttctatgtgcttatcattgctacaagtgattaatattcattgttaaactttcttgataatactccattggtttagctttaatttcatcattttctagtctttgtttatt

SEQ ID NO: 70346 - DNA, 331 bp, Glycine max
atcactcgtgcgagtcattctatatttggtgttctatgttataccaatcttagctgcgtaaggtcaattgaaaattactgataaaacacgtgccagagccagacgttcgttgagtctatttttatagtatgtttcactctactctatagccattctaagattctcttctagttctatcttgcttctatgtgcttaacattgctataattgttgaataatccttgtaaaatttgcttgataaaactctattggtttagctatcatttcatcactgtttagtcattgggtattgattgtctttgtgtgtccttgtttgtgagttgtcacatat

SEQ ID NO: 70347 - DNA, 239 bp, Glycine max
acgggaattggtgctttcacaatgaagactgtcctattcctccttatggtatcagcgttaatccggatcgccgtcgcgcagcccaatgacttctccgacgcaaacctcaacgagttcaactcctccgtagccataatcataatcatattagtagtcgcgtttttcctcatggcctttttctccatctacgtgcgccactgcgctgattccccttccaacaccgtcaggcctttaacaac

SEQ ID NO: 70348 - DNA, 176 bp, Glycine max
atcgctcctgctatactatcgatgttcatcgtgtactataccctgatgtatacttgtctaggaattgccaagaatcagattaaacgcagaaggattctaatctggcattatatgaattgtctggaaatggccctcggatactatctgctgctatcacatatgcctgctctaccatc

SEQ ID NO: 70349 - DNA, 246 bp, Glycine max
ttttgattttctggatccgcgtttttgagattagtgtatgaatttaccgattggggttcaggtgaagttatcgatgaggcatgctctggtgtttgtgttaatcgtggcgatgtggaacttgcaaagggctgatggtatacgattagtgatagacatagacgagtgtttctcccatgatgtgaagtactaaggagacactgttcatgtctctttcattggtattaacgctgattttacctggcatta

SEQ ID NO: 70350 - DNA, 241 bp, Glycine max
cccacgcgtccggtgatttcagtgagtgatcggtgttcacttgatctcatcataatcgtcagcgtcaattgaagaagatgccgatcagaaacatcgccgtcggaaggcctgaagaggcgactcaccccgacacgttgaaggcggctttggctgagttcatctcaaccttcatcttcgtgttcgccggctcaggctccggcatcgcctacaacaagcttaccgacaacggcgctgccacccc

SEQ ID NO: 70351 - DNA, 233 bp, Glycine max
cggacgcgtggggtgtcctagaatgcaaggtgtagactcatcaaacttcaactccgggatccaggagtgagatgctgacaaaagtactaccgacttgcatgccgttcttgtaaccttcataacccactggaagtcgcgatcatgaaattgcaacggaatgatacaacacagacttgaacaagatatgatattctcttatgcgctggtgctatattgatcgacgaatccagctg

SEQ ID NO: 70352 - DNA, 116 bp, Glycine max
ctgacgcgttatctgagaaacccttcactcgtgagttcaaactctcctcttacccaaatgtgctgcatgtcaataaactggtaagcatgcctcgatcctacaccttgaaccattcg

SEQ ID NO: 70353 - DNA, 199 bp, Glycine max
accgctacgcactgtccttgaaattcatgcaaggttgatatttacgaaaagacaaccactaataggataaggagctgttagcagaatagtgtctaccttcaattgtgcattctcaattatcatactttcttgatcttgtatttctatgcattaaaaattagctatgcaagaatatatgaacttcacttactcactcaac

SEQ ID NO: 70354 - DNA, 266 bp, Glycine max
attagatgctgcaagaattcacagcccggccttatatatcagacgattgttaattggggggcgggacgtgtatccggtactgaggtcaactgtatacaccctcgtccgttcatgcttcattagtggcttgctccatgattgggatcccagggcaccataggaagccttccaattccatattgctatcctcggctgacatttttgatcttgcgcattcctctaaagggcatcaatttattccagtaagagatagtcgaataattcct

SEQ ID NO: 70355 - DNA, 91 bp, Glycine max
  unsure (1)..(91): unsure at all n locations
aagcctacgcggacgcgtgggctgagaaaccctccactcttgagtccaaactctcctnctacccaaaatggatgcaagggcatcatcttct

SEQ ID NO: 70356 - DNA, 278 bp, Glycine max
aacacgcgtccggcataactctgccgataactacaacgcggcctacccaagcacctatactcgtgggtcgtcgagcgtcgacctctactacctgggcttgggcttctactggaacctagcacttgctcgcgcgcatgctacttggctacgcctccatgctgctatatagacctaaatgcgggatcctcaccttacaactcggatacggctaaatcattggctgtcacgtgtataacatgagcggagatgcatggaatgaaggcggcatccatgccact

SEQ ID NO: 70357 - DNA, 55 bp, Glycine max
cccacgcttcctaacaaaccttctcacaccttatcatccacttcctcttttacct

SEQ ID NO: 70358 - DNA, 265 bp, Glycine max
tgagcgcatgggatagactggaggacaaggtttaagcttagcagaagacgaccggtattaccgggacttggttgaagcagcaccgtaccgtgtacaatggagccactatacactctgttatcataagcatgcccgaaggcaccatctacactggtatcttacaaacatggctcgcacaggattacatgttcgctcgtgcgcttgtgccaattgagtctagaatgctgatgcaaacatggaaggaatcagcttgcagaggtgacat

SEQ ID NO: 70359 - DNA, 291 bp, Glycine max
tcggccacgcgttcgtcaagcattgcatccctctttattcttattttgttttgtgctttatatcagggatcggccatatcaacaggtgttttaagatcatagatgcgtgttttgcaacaatggctaaagtctttgctagctattatcttgacactctttgccatttccatacttcaaacattggtaatggctgctaatgaacaaggatgccacttgtatgacaacaacagcaaatattgaagtggaagtgtcaagatttaccaatgcccatcacaatgctcgaggagatgt

SEQ ID NO: 70360 - DNA, 199 bp, Glycine max
ttaagatcatagtgtatgttttgcaacaatggctaaatgctttgctgctattatcttgacactctttgccatttccatacttcaaacagtggtaaaggctgctaattaacaaggatgccacttgtatgacatcaagagcaaatatggaattggaagtgtcaagatttaccaatgcccatcacaatgctcgaggagatgt

SEQ ID NO: 70361 - DNA, 201 bp, Glycine max
cgtccgtttaagtacattccttgttttttatactcaatgacatctatgaacattgcattactgatccggtacgtttccttcatactccttttgggctcctcttaatttacatccaccaatacaaaacaacactcaaatttaatctattataccaaatatcccttttcaatctattcatctttttacccatatcatctctta

SEQ ID NO: 70362 - DNA, 247 bp, Glycine max
gccacgcatgcgttccacgcttcaaggttggttataatgtgaggtccaagtacatatgatagggactcggactacaatgattctaatatactatcatcaccattcatatgaatctttgcataaaatcttagctaggtcgatcgctctacactatccaagcttacatactcgtacatgcgacatcatagctatattaatatagcagctaaattcaatacactggcaccaaatatacaacttcaagact

SEQ ID NO: 70363 - DNA, 192 bp, Glycine max
cccacgcgtccgtccacgcgttcggccctgtttttctgtccatagacttctcagagttgctacgcgtgatgatgcagcactcatgacccggcatggaacctgccaccatggtccaagagccatcggagcaggaccagcagactcctacgtatcagcgacgaccctacgtcatgatgctcgcagaagcccagg

SEQ ID NO: 70364 - DNA, 570 bp, Glycine max
  unsure (1)..(570): unsure at all n locations
ggcccaaaaaannttaaattaggaaaaaaaaaaaaaaaaattataaaattattaaanaaaaaaaaaataatgagaaattgtaaaaatataaaaaacataaaaaaatcataaaataaaattaaaataataaaaaatataaaaaataaaataataaaaaaaaatattatataataataaataataaaataaaaaataatataaaaataaaataaaataataaaataataaaataaaataaaaaaaatatattaaaaatataaattaataaaaatttatatataaaaaaacaattaaataaataaaaaactaaataaaaaaatattaaaaattattatataaaaaataaaataaaataaaataataatattctaaataataaaatattataataaaaataataaaataataaataataattaaaaataataaacatatataaattaataaacataaattataaaataaaaaattaataaaaaaataaaatatattataattaatacaaaaataaataaattattaaataataaaaaataaaaaattaatatataaataaataaatatattaat

SEQ ID NO: 70365 - DNA, 261 bp, Glycine max
ctccttccgttacaatgaaattgagaatggaatgctgtgggaagttgaggggaagtgggttgttaagggagcagttgatgttgacattggtgcaaacccttctgctgagggtggagaagatgagggagtcgatgacgcagctgttaaggttgttgacattgttgatacattcagacttcaagagcaacccgcttttgataagaaacagtttgttaccttcatgaagaggtttatcaagaatttgactcccaagctcgatgc

SEQ ID NO: 70366 - DNA, 58 bp, Glycine max
  unsure (1)..(58): unsure at all n locations
aaaaagaaaaaaaaaacaaaaaaaagangaattttttttttcttacaaaataaactat

SEQ ID NO: 70367 - DNA, 66 bp, Glycine max
cgcgggcgctagagaattatcatacccttcaagatgaatctttatctacgtccaatattcctatta

SEQ ID NO: 70368 - DNA, 186 bp, Glycine max
  unsure (1)..(186): unsure at all n locations
cccacgcgtccgatnttaactgtgtgtgtgtgacaaacgtgaaaaggacttttttttatgagggtgagttaactttgctatttattatctactatgccgctgaaaagctaaacctggcatacttaagtgcttatctgaattcccttggaacccaataccggcatggggcaaaatttggcactgggg

SEQ ID NO: 70369 - DNA, 244 bp, Glycine max
tccaccacgccttcggaagaaatgaatataccctaccgacggtggaatcaagaggcggtttctatttctctattgcgggcggtcaccaaaattgaagaccaagagagcgcgagagagaaaaaccttccctttatgtcaatggccccaagcccgggtttttaccaaaattagccaccacccccgatattagaaaagtgaggttatttcccgtcctaattgtaaaaagagggtttgtaattatacc

SEQ ID NO: 70370 - DNA, 169 bp, Glycine max
  unsure (1)..(169): unsure at all n locations
ccaaggcgtccgcngacccctgggccaaacaatcgttagtcgtctggtctgtcccgcgggagcggaggagctgtgtttatcggcaaacaacctcaaaaacattcatcaacggtcactattaatccatccatcattaagtaagaaaataagggtcgagttttttatcttt

SEQ ID NO: 70371 - DNA, 53 bp, Glycine max
accaaacgtacttttcagcactggccatgaaatttaaggattgtaattcttta

SEQ ID NO: 70372 - DNA, 97 bp, Glycine max
aaaacccggaccgacccacgcgtccgactaaatacaatccaaacttacgaacattaattatcaacatcataactctttaatagggactgctatattc

SEQ ID NO: 70373 - DNA, 240 bp, Glycine max
cccacccgtccgcccacgcgttcggaagaaaggaatataccttaccgatggtggaatcaagaagcatttgggattgcatagtgcgggtggtgaccaagatgggagaccaagagagtgagagagagaaaaatcttcgctttatgtcaatggcaccaagcacgggtttttaccgaagtgagccaccacccccgatatgagaaaagtgagtttatttggggtcatatttgtaaaaagggggtt

SEQ ID NO: 70374 - DNA, 93 bp, Glycine max
agaaaatgtaattttcagcactgtccaggaaatttaatgattggaattctttatgcctcaatggatgtgttcaaaaaaaaaaggcgaacgaac

SEQ ID NO: 70375 - DNA, 116 bp, Glycine max
aatgaaaaccgaccgaccacgcgtccgggaaaattaattcaaacactgtccaggataattaacgaccgcaactctttatgcctcagtcgattattaaaaaaaaagggggaccaaaa

SEQ ID NO: 70376 - DNA, 52 bp, Glycine max
gcaaaatataattcacaccactgatcatgaatattaaagatcgcaactcttt

SEQ ID NO: 70377 - DNA, 123 bp, Glycine max
gaaattttggttgagatgggaaagaagaacaaagtgaaggaaaatggaggcaaagagcattgctcctcgactctttttgtctccaacttgccctattccttttccaattctcagttggaggag

SEQ ID NO: 70378 - DNA, 101 bp, Glycine max
gttcatttttacacatccctagctctgtcgtttcgtttttgacgatggcgtttcgggtgcggagggcgtgacttcgctctctctttcgtctctctctcttg

SEQ ID NO: 70379 - DNA, 289 bp, Glycine max
  unsure (1)..(289): unsure at all n locations
acaaaatntaatatacaacactgaccattaattcaaacgatcgcaattctatatcccccagttttttattaaaaaataaaaatgtcaacaaatcataaaatcaaaatgaggcacacactttatacgatccaaccttacgtacaccatgcatgcaaaatctaactattcataacagtcccctacatacaattaactggccgcttttatacatcgatatgactgataaaacactaacaataaccaacttaatcgccttccagctcatcctcatatagacaactgtcctatt

SEQ ID NO: 70380 - DNA, 82 bp, Glycine max
  unsure (1)..(82): unsure at all n locations
ccaaggcttccgcccacgcgtncggccacgcgttcgtccacgcgttcgaggcacttcaggagggtgagagaatgtctcaagc

SEQ ID NO: 70381 - DNA, 56 bp, Glycine max
cttcgggctacttttgattgcttgattaaaaacctattgttttctgacaccagaat

SEQ ID NO: 70382 - DNA, 330 bp, Glycine max
aaccaacattatttcaacaaatatatttatttattttttttttaattattttttttttttaatatactctttatctctttttttttttttttatttataggatatatttttctttttaatatttatatattttttatataaatttatcttattttatttttaattttttttaataatatttttttaatttttttccttatttttattttttatataatattttctttttttttattattcctttcttttatttttttttttttattatatatattttacttttttttatatataattttaattatttatctcttatttttttcttttttt

SEQ ID NO: 70383 - DNA, 376 bp, Glycine max
  unsure (1)..(376): unsure at all n locations
gctccgcccacgcncccccagctccatcataacaaaaccaagcnccggggggggaaaaacaaacttgcccgaccccaaaactcctcttccacaccgccgattcttcttctttacatctatgtccaaaacatccatttaccctcccttccctccccttcgtctaaaaaccctttatcatctttacgtcctcaaacttctccccgcaaccctgtctccttcctccattcactacttaattttcctcaacattagtttacgaatttgatattgtttaatatattattccatagactttccactctaggccataatctttattttctttacaatataaataaattttttaatatttaagacattcttaattttttttttt

SEQ ID NO: 70384 - DNA, 205 bp, Glycine max
gtgagtgcacacacccaatcaaacatatgtgtttatttaatcgagtactcatgacatcggacgaggttgccgatcatacataatgcacaattacaccatccctttgaaccgcctaatcacgcacaaccagatgcaatgttcgcataggtccaaacacgaagagggacttgtgccatgcctgaactcaatcattcaaggttttaag

SEQ ID NO: 70385 - DNA, 283 bp, Glycine max
  unsure (1)..(283): unsure at all n locations
cgcaccagtttcaccgcacgaatatcttgttgtttggagcgatccgagaaaaactctgtaaacatgttggtttaccaggacctccttacaggtgatgagcttctctctgactccttccgttacaaggaaattgagaatggaatgctgtgggaagttgaggggaagtgggttgttaaaggagcagttgatgtagacattggtgcanacccttctgctgagggtggaggagaagatgagggagttgatgatgcagctgttaaggttgttgacatttgtgacacat

SEQ ID NO: 70386 - DNA, 171 bp, Glycine max
gcttcctcctcttacgagcctttcctttcagttcattgattcggtgggtagccgttgcagcgaggcggttctaaaccctgatcggtgccaacacacacaccgtgaacaatatgattgtctgggtggccgcaacaagggaacaaggcctttgagttttaagacgctgctgct

SEQ ID NO: 70387 - DNA, 208 bp, Glycine max
  unsure (1)..(208): unsure at all n locations
cacacactttatactataacaccctttttttttttatctcctaaattntaaacttctagatagattttctctttcaaacaaaaaaaaattatttaatctaacccttaatttaacacaattacttcattttacatatctctcaacccttcaatatctcaatctttttacaaacccaaacaatttttcaattttaaaaaaaacaatactt

SEQ ID NO: 70388 - DNA, 253 bp, Glycine max
  unsure (1)..(253): unsure at all n locations
tatttcaattaataaacttttgttcattttatctcatcataatcttcagggagattttttataaaatgccggtcggaaacatcntcctcttaattccttaataatctactcacccctacacgtttaattctacttcttcttttttcattctcaaccttcatcttctttttctcctgctcaatctccctcatctcctactacaatgctacctacaacttctcttccaccccatctctaccatattcttctcctt

SEQ ID NO: 70389 - DNA, 189 bp, Glycine max
  unsure (1)..(189): unsure at all n locations
gaaaaaaaaaaataaatcacgttttatttctcttctcttatcatcatcagaaaggatgttttactgttcttcgtctntcaaagcccgccccttggctcttatttctataacacgaacccaacttcttcacataacaacgacaaaccactttcctactttcccttcctctcccgcccccgtttcaatccc

SEQ ID NO: 70390 - DNA, 338 bp, Glycine max
  unsure (1)..(338): unsure at all n locations
ccgggccgaccgacgcgtccganaaaaanaaaaatcaaattacggtggtgagttctgcttctgcttcatcatcatcagagaagaatggcttctactgtgtcttctgccctatcaaagcccggcgcgtgggctctctattcctaagaacacgaatccgaactccttcaacaaaacaacgacaaaccactctccgactttcccttcctttcccccgtcgttttcaatcccaataaaaaaaaagcccaaacctactccctctccgaattcaccgtcaaaccccacaccttcttttcccaccaaaatcccgtcgttcttcccaccggtccccgtcatctcac

SEQ ID NO: 70391 - DNA, 155 bp, Glycine max
  unsure (1)..(155): unsure at all n locations
cgaattccggtcgaccgcgcgtccgtacagaattgccagagtgaaaaaatggcnccaggatttgcactgcctttaaaaaaattggacggcttctcagcatgggcgggaggccttaacccctctctattgtctcctacaaaatttcgtcaccggcc

SEQ ID NO: 70392 - DNA, 139 bp, Glycine max
gaagttgcgagagtgaagaaatggcgcaagacttggcattggatttggaggagcttcgccggctccacagcatcgccaaaagacctcgaaccctctctcttctctcctccgaaattcgtaacctcgaaaagttatcgtc

SEQ ID NO: 70393 - DNA, 394 bp, Glycine max
  unsure (1)..(394): unsure at all n locations
cccactcctncgtaagcttttcatccctctgtatttgtaatttgttttgtgctttgggaagatgttcttccaaatcaagaggggctttaaaatcatattgtgtgttttgcaacaattgctaagttcttttctgctattatcttggcactcttttccattttcatactctaaacagtggtaatggcttcttatgaacaaagaggccacttttattacaacaagagcaaatattgaagtggaaatgtcaaaagttaccaattcccatcacaatgctctaagagatttatcccgacccaataccacaaaccctgcatgtttttctttcaaaaatactccaagacattccttttttttgcccccccggtattattgtaattaaacttttttccccttc

SEQ ID NO: 70394 - DNA, 122 bp, Glycine max
ccaattcactctttttgttctcgccctctgccgtgggaggagtttgtaacatggctgctctaccaacggcggagcttagtgacgcaaatgcaacacagtacagttggatgtgaggggtgctc

SEQ ID NO: 70395 - DNA, 55 bp, Glycine max
cggttctagatctctatctataactatccaattcactttttttcttctcgccctc

SEQ ID NO: 70396 - DNA, 177 bp, Glycine max
cccacgcgtccgtcaagcattgcatccctcttgatttgtagtttgttttgtgctttagatgagagttctgccaaatcaagaggggttttaagatcatagtgtgtgttttgcaacaatggctaagttctttgctgctatgatcttggcactctttgccatttccatacttcaaacagt

SEQ ID NO: 70397 - DNA, 285 bp, Glycine max
cctcaccccccccccccccccacccccccccccacttccctcaccccttcctttccttcccccctatattctcctccccccccccccccccccattctcccccctctctcccccacaccccttccctccccccccccccccccccctccacccccccatcccctccccccccccccccctttcccctcccccccccccccccctctcccccttccctcccaccccctcctcctcctcccccccccccctcccccccttcccccccccctcccccccccccccccc

SEQ ID NO: 70398 - DNA, 169 bp, Glycine max
  unsure (1)..(169): unsure at all n locations
catatctcttctatantntcaggtagggttttttcacttggcgtggggccacaacctcnttacttttaaaaccctttctttacccaacttaatcncctttcaacacatcccccttttcccaactttcttaatatctaaaaaaccctcacctatctcccttcccaacaat

SEQ ID NO: 70399 - DNA, 83 bp, Glycine max
  unsure (1)..(83): unsure at all n locations
gtccgctctatagatccaancttacgtactcntncattctatttcatanctcttctatantttcaggtaagattattttaata

SEQ ID NO: 70400 - DNA, 240 bp, Glycine max
  unsure (1)..(240): unsure at all n locations
cgttcttccactccttctctatcttcatcaatggtgttcgtttatgctcanaaatcaaaancctacttgaaggagattttattcaagttcaagagaacaacaaaannaaaaacccattaccnttccaaaattcnntttattaatcacnacaataacaaatataacacttccaaatacccatttttatttccctttaacaacaaagacattttttcacaaataatatcttcttacatttcc

SEQ ID NO: 70401 - DNA, 96 bp, Glycine max
  unsure (1)..(96): unsure at all n locations
cttcaatcattnttttcaaaacacacactctccatcattttttcactcttttcctctttaattttaacaacacttctttcttattcattcaaaaat

SEQ ID NO: 70402 - DNA, 193 bp, Glycine max
  unsure (1)..(193): unsure at all n locations
cacttttgattttattcaatcaacaatcatntcngaggaaggacaccatttatagtccaagggccacnccctatccttcaaaacctaccctcatcaaaccaaaaccatcctcaagaacggatacatcgtcatcaaatgccgcccctttaatgttgttgaattttttaaccacaaaactttttagcacaaaaat

SEQ ID NO: 70403 - DNA, 237 bp, Glycine max
  unsure (1)..(237): unsure at all n locations
acatncaatgcatcatattcaggtttggcaaacaagattataataacgtggagctgcatatagtactagtactaccctacataatcccaatcttgaagaaaacttttttaaaaagcatacattctatattttgtgttttgctataccgtatcttttgtctcagcagacactaaccagaccttttgtttcaattttgactagataactttttaaattggagatttaaacgatcacaac

SEQ ID NO: 70404 - DNA, 231 bp, Glycine max
aactacaattgggaccgttcaatctaccactctttctttttcctctcatcaacacctttctcccctaatatgcagacttgcacccaggatcacagtttatctctcaatatatccagataatgattcttactttatggacagatttttcacatttatatagttatacagtttgatctatggcttgcaagaaatctctgaagcattatcatatgtttttaaacctcactattc

SEQ ID NO: 70405 - DNA, 232 bp, Glycine max
  unsure (1)..(232): unsure at all n locations
cctcttgaaggaccgccttgatgccagaatgcctgaggnnngtagcaagaatggaagaaaagttgaattaaatctgaacttaaaattgcctgttaccgtttttagaaacccaatgattggagaaaacaagtctttttacttatgttttaatgtttttttgaatttttcgaaaatttttggaacactttgccttatttaaggtcccgtaatgtaattaattttcttttaatgg

SEQ ID NO: 70406 - DNA, 239 bp, Glycine max
  unsure (1)..(239): unsure at all n locations
gcgcccaggcctccgcccacccgtncgcccacgctttcgtccacgcgtccgtgtacctntgtcggttcggtagctatgtgcattctacacaccctcactgtctaacataacactcgccattggctctgccaagacataaacaaatcgcacacactgaagatctccaacctcttgcataagacaatgcaacaggactggataaagctgtacaccgctggatacgacaccccacacgctga

SEQ ID NO: 70407 - DNA, 185 bp, Glycine max
  unsure (1)..(185): unsure at all n locations
gccgggcttgtgnaacacacccctgcgtatttcatttacaatacgcaatacaacttttgagtcgaggacgttcctaacaactctcgaatctctttaatcaacattatcagttcatttacaaacctatcctctaactatacgatctagttaaccgaaggctttaccaaaaatttcaaagaatgtat

SEQ ID NO: 70408 - DNA, 236 bp, Glycine max
  unsure (1)..(236): unsure at all n locations
aaaacaaaacaataatttggttataattgttccataantcnttttggggttgtttatatatcaancnacacntccttttnaancanaaaccnaaccntccacccctttntantttgaancnatcaacacncncaaccacnncnattatnatncaaatcaacatcacctccaccacctcaatcntcacnncttttctcttcnaatcattccccnaattttctacccttanccatttt

SEQ ID NO: 70409 - DNA, 309 bp, Glycine max
  unsure (1)..(309): unsure at all n locations
gcgcccacgccctccgcaccgttccgagtttttctgttacttctcatagnnagagttcgaccgcggcnggttgctagatatatagatatgcaagaaatgaactctcaacaatcnnncgagtcccaaccactttggatgcttcagaagaaagctttcgagaaatcgacgaccgatctagaaaccttactgagcccattttgtggaccaagaaggatcttcacagnnngaggtcagnncggagaatgcacctttggtgaaggaaaatttaagggcctattgtcttttcaaaattaccctggaggttgtgac

SEQ ID NO: 70410 - DNA, 256 bp, Glycine max
  unsure (1)..(256): unsure at all n locations
caaatctcccactaccaatcaacatctttctcaccactaaanncactnacaacgtctccgtttacattcacacaaaatcctcactctctctcaattcaaaaatctnaacccaacanncacacacnnaccaaannaaataaaanntaaaaatgccaactccaacncnncactctctcnncactctctacctcnntcccttttgttaaacaataaccgttaaccatctccannaccttggcagcacaaaagncaagcc

SEQ ID NO: 70411 - DNA, 75 bp, Glycine max
gcttgagagaatccaacctacctaccccttttcttttacgtcatacctcttttttagtgcgacctgatttaattt

SEQ ID NO: 70412 - DNA, 276 bp, Glycine max
aaatcaacaccctttcaacatcatagtgtgtgttttgcaacaatggcttaattctttgctgctatgatcttcacactcttttccattttcatacttcaaacatttgtaatatcttctaataaacaaaaattccacttttattacaacaatatcaaatatttaattataagtttcaatatttaccaattctcattacaattcttcaggagatttaatcatacccaataccacaaaccctgcatgtttttctatcaaaaattcttcaatacattcttt

SEQ ID NO: 70413 - DNA, 200 bp, Glycine max
caccgcactaatatcatgttgcgtgttgctttcccacaaaaactctgtcaacataggggggggtccattaccttcttacaagcgacaatcttctctttgactccttccgttacaaggacattgacaatggaatgctgtcacaatttgacggtaaaattgttgctacactagcagctgatgtatacattagggcaaaccct

SEQ ID NO: 70414 - DNA, 321 bp, Glycine max
  unsure (1)..(321): unsure at all n locations
ctcgaatacattccttaccanttatattgttatattgggagaaaaaactcttcacgcgtcgtagtttattacacatgctcacattnatcacctttganttggactccaccaataccaataaaaatgcaaatggaatgcattatgacaaatatcccaattgaatctataaaggagcatacccagttcacattggtgccaactatcctgctcatggcggagacgattatcctgtccatgacgcagctggtaactatcctgacaatgttgatacacacactcttcatgatcaaccctacccttatcataaacatttatacacct

SEQ ID NO: 70415 - DNA, 135 bp, Glycine max
accccacataaaccaatcttaaaaatacttttttaaaaatcatacattctatattttgaattttttatatcaatcttttttttaacaacactaccaaaccttgtttttaatttaaactagatactctttaaattt

SEQ ID NO: 70416 - DNA, 316 bp, Glycine max
  unsure (1)..(316): unsure at all n locations
ctgaaatccctctaaccnatnncaaaacnaaaaaanatananaaatctccaaaaaagaaaacaataataatactaataaacccaanctcatcaatgtcacttcaaaacagcgagacgatttatccaaaaatgtaatagcaaaattaaatatataagaggttaaaattaacgtttttcctatgaatctcatcagaacgatgattaatgtcgaatatccccatattcttgtttctcaagaaacattttttgccatcaacaactctttgtaaaaattcctttaacaattcttccaagaaacttattcttttttttttct

SEQ ID NO: 70417 - DNA, 254 bp, Glycine max
ggcaaagcttcttttgtaaatcctctttttagttcacaggtggaagccttgtacatcgagggggtcttatgatttatgcatgctcccatacatcacaagattcagttcatactttatagagagtaggctctgactgatgagatcaaaggccaaatctggttgtactaattcctatagctctactatagcactagcggctgtgcgcttacatcaataaccggactgttatactctaggtagatattccctaatac

SEQ ID NO: 70418 - DNA, 192 bp, Glycine max
accatatcaacaaaaaactaaacagcgacttagaaaattcattagactttcagaaactatagcttacattctgattctcttcatccgataagaaatcaatcaatggattgaatgagtttctgacttttaatgcttagaacatgcaaagcaacattaaaattatctattacagcctaacatttctatctataa

SEQ ID NO: 70419 - DNA, 317 bp, Glycine max
  unsure (1)..(317): unsure at all n locations
ttcggcaacttnatacctcnttctctcactttctactcaacttcaattaatcaaatccctgactttttttaaaatgtcttcagccctcaattctattttggaaaatcataatcaaatacagttaaaaatacataacaaacatctcactcaacatcaacacttcatatctacttttccactctcacaacaactaaaaaggaaagaaaaaccgattctacatctacaacaatgaactaaagaactatcgatttctctaagccccctcaaaatggctcgtgcacccttcacttcttttcccttcgtcctcattatccttc

SEQ ID NO: 70420 - DNA, 364 bp, Glycine max
cccccccccccagccccctcttaacacacgcacgcccaccccaaccccctcccccccctccaccccccttccccccccccccacccccccacctcctctccctcccctcccccaccacctcctctctccccccccccccccaccacccccaccctcccccctccccccccccccactccacaccccctccccctcctcccccccccctcccctcccccccccctcttccccctcccccccccaactcaccacaccaccccccccccaccacccaccccctcccccctccccccccccccccccctcccctccccccccctccccccccccctccccccctcccccctccctcacccccccctcc

SEQ ID NO: 70421 - DNA, 245 bp, Glycine max
gagttgcatacgttcaaccctacttctctacttacctttacatccgcactgtctcctctcctagagccataagggttcgcattctgacaccaaatggcggactaaaacgcatggaggagatcatcaagaaccattcggacccaactaaagacgcgtctcagatctggctctatcattcagcttgacccaagctacaagttggaaatgccaaaagagcttatcttagaagaaaggatgagctcatt

SEQ ID NO: 70422 - DNA, 114 bp, Glycine max
gtcgtgcatgataaatttgggcaaaattcctttattgagctatagttttaaattgtatatacagattccaacattgggattttaacaattaaagcattatgttttaaacttgaa

SEQ ID NO: 70423 - DNA, 153 bp, Glycine max
ctccctctctccaacatcttcatctacttaccaccatatcttaactcaccattcattctcctcattgtcacacattacatctaaatcttccatctaataacttttggctcttatcatgaaactcaatattgatttactatcaagtaattattg

SEQ ID NO: 70424 - DNA, 342 bp, Glycine max
  unsure (1)..(342): unsure at all n locations
cccacgcgtccgcccacgcgtactcggacgctttggcggacgcgtgggctgtcggggancataagancgtttttcaaggacctttggcagacccaactcaaacttgaaagcaaccatgtcatatatattgaaatgggtcaacttgtttgtcaataatcattcacttgctgaaacacccatctaatcaaaaaccaactccaactcaaatgcaataaacaccaccaagttccttaatttatccaaagacccactagcataccgaatgaatcgctaaaatcacgaggaatatacatgaaaatacaaaacttgattaagaggaatattgacaccaagaaacatgat

SEQ ID NO: 70425 - DNA, 440 bp, Glycine max
  unsure (1)..(440): unsure at all n locations
caaccgtggccgactcatctcattaccttgattaactnctcgatagtgctttaggtnattttagaacctttaacatcaatccttcccctccaagtgcagaatcaactactaatagcaagaacgatagtccttctttgccatcggtggttcaaagattcaacatatgtttacccaatctgagaactaataaaaatgagaaacacaatgctttcaaagacagccacgatatcaatacactcaacaagctcatggatcaaaccaaacacgctgttaagaaagcttgagtctatatccccacccactgcctatgatttacttaatgatgcctacatggaagaatgtgacaaacaatttcaacaccttactgactctcatgacatggaatctattctccataccatcatgcatcaacttatgtccaaagagatacttcattaacc

SEQ ID NO: 70426 - DNA, 154 bp, Glycine max
tctttttatcctttttttctccttactcaaagagcattagaaggttctatagattttggccagtccatttgtataagtcatattcacttgctaaaaggtatcaaatatattacaaataacagactttataacaataacctcttctctaataatt

SEQ ID NO: 70427 - DNA, 249 bp, Glycine max
catccgtctcacattcagactatagaaagactctatccttcgatcaaatacccggggctatttagaagcaatttaagaacaaaccataccccattttacggttctctcaagatgatcctgattccaacatcatttatttacgatattcatatcaaataataatgatgcagatgaattaactttatgtaatcatatactttagtaagcttaactaatacttttataacgagtccctatacacttcacgta

SEQ ID NO: 70428 - DNA, 349 bp, Glycine max
tcccactcatcttattacctggttcaacttctcgatagttctttgggggattttaaaacctttaacatgaatcctccccctccaagtgtcgaatcaactgcgaatatcaagaacgagagtccttctttacctttcaatgttcaaagattgatcattggtttaccctaattgagaacaaataaaaaggggaaacataaagcttccaaaaacagccacatatcatacgcgctcaacaagctcatggagcataccaaacatgctgttaaagttcttgagtctatatccccacccactttcaatgatttacgtaaagatacctttatggaacatttggtcaaacaattttaac

SEQ ID NO: 70429 - DNA, 306 bp, Glycine max
cattccacctatctcatacacaattcaccattcgaatacaccacttactgatcacgacgcctttcaaacacactccggaccatctcctctcatatgtcatccacgaatacacactactaggcaacatcaataaataatgccaaatatcccggtagaaactatatattaactatacccaaatcataactgatacaactatactacacatcacagtaacgcatatcctgaccaatgcaataactgaagctatactgctcatagaacttaccacccttctcattctgcctgctacccaaacccatgtac

SEQ ID NO: 70430 - DNA, 312 bp, Glycine max
tcccacgcgtccgtcaagcattttattcctctttatttctaaactgttttatgcggtagatttggatactttcaaatcaacatgggtcttaacatcatagtgtgtgttttccaacaatgtctcattcctttgctactataatctaggcactcttttccatatccatactttaaacagtcctaatggctcctaatgaacaatgaggccacttctattacaactatatccaatatggaagtcgaagtgtctagagttaccaatacccattacaacactcgaggacatgtatccagacccaataccacactccct

SEQ ID NO: 70431 - DNA, 321 bp, Glycine max
ctttacctatctcacctacccttaatcttacttattcactactcatccccatgacaattttaaaatcaaccggcgccattaacttccttatatcattctactttatacactacttattcacatcaataaaaatacaatgatgatcttgttgacatagcatattaactattaaaaacatttattcatataacttcatcacatttcatacttattcaacttattattaactcatcatcttatttaatattactattaaatctacaatctaatcaccttctacctttttcccaaataatctctactcaatcaattatttcaact

SEQ ID NO: 70432 - DNA, 250 bp, Glycine max
aaaaactaaaaaaaataaaaaaaaaaaaataaaaataaataaaataaaaaaaaataaaaataaataaacaaaaaaataaacaataactaaaaaaaaaaaataaaaaacaaaaaataaaacaaaaacaaaataataaaaaaaaaaaaaaataaaaaaaataaaaaataaaaaaaaatatatataaaaaaaaaaaaaaaataaaaaaaaaaaaaaaaaaaaataaaaaataaaaaaaaaaaaattaatatat

SEQ ID NO: 70433 - DNA, 104 bp, Glycine max
tacccaacacacacacaccaaaaaacaaaataaaaatacaactccaacccactcactacactctctacctctacctattgttaacaataaccctaacacctcca

SEQ ID NO: 70434 - DNA, 422 bp, Glycine max
tccaggccaacgacatctcaagcactgacattcccaaacactcctatcacaaaactctaaggctacatataggaatccttcacaactattactagataaaagactacacctcttacactccctagattcatgtacctaatcacacctacaactcatattttacccactcaaacccaacctaagctcactccaccttctacaacattaattcataaaacatatcatcaaacattatcgctgaaacagatcatcctacatcataccctcatgaactggctcgataaagtcccccatttataataactaattacgcaacacattaccctactcgtctccttttagaccgcaaagagattaaaacaccacaaacgcataacgcacatcttctaaaacacactcctactgtaaaacactattcacat

SEQ ID NO: 70435 - DNA, 323 bp, Glycine max
ctagagcattctgatacccttcaagatcaatcccttcataatcccaatatcaataataaggcctatccttgtggaccaatccactactactacccctactttaaatactaacatgatcaaaatcgtacttagaccgactatgaaccagctcctgagcatccgtattacgccaaacaaacttgttgaacaagcacagaccactcactgcactgcactatatgcttcatatgtgcaggccaataccactacagaatttgaagaatcttacgccgaccttcttaactattatcctcatcagtgccaccatgctgctgatgaagcac

SEQ ID NO: 70436 - DNA, 166 bp, Glycine max
acaaacaaaacaatgaccttcacttcttacctcaacaaattcctcttaccttctgacttcatactatatgcttaccaacaatttaatgaatatcaacataatttcagacctgctacaaaatcactcatacctaaaattgatacctatacacatcaactgcatactc

SEQ ID NO: 70437 - DNA, 361 bp, Glycine max
gttgacgattctaacaatcttggtctcaggattcacaggatgctgaagctcggactcagggttgccgaaggtgctcctgatgcacatgctgacatgcctgcacatgaggacgctgatgcacatgctcatggtagcacgacggaacaagccgatgaacattcacttatttgcctatgacgttgatactctcaatcttcgccgcatcagtcattgctctatggatgaggtctactaactagtgaacaatcctgaacagttgtctacctatgctcaatgatgacgtagttgcgactagcggtatactattgaaaactacggcggacgttgttatcgatccaagactacggtcacatgcatgcta

SEQ ID NO: 70438 - DNA, 221 bp, Glycine max
ctctatatatccaactttttactcattttttcaacttcaaatttaaagtattttttgagtcattttctaatttaattcccacaaacacttctattccaacccttaaatctcacttttttaacacctattaatacccttacactacattcttcattcatcattttacatattatctaatattcccataccaatcacccttcccaacaatttctcatccttaa

SEQ ID NO: 70439 - DNA, 74 bp, Glycine max
gctctatacgatccaaacccacgtacgccagcatactacttcatagctcgcctatacagcgacccctatcgaga

SEQ ID NO: 70440 - DNA, 447 bp, Glycine max
atggtgtatcaattactaacacattagtcactcgcccttttgtgatttcacatttgcttttctattttttcgattacaaaaaagaagaaagaaaatcggtgcttttcatttattattatgtgaagaaaaaaaataaaatctcatatcatgttgtcaaccaagtcttgaatatgcggtgtgtttgttcgttcgttcaccaggggtgtttaccacagagatagatgctgaacaagggaaggtgacggtttcagggaatgtggatcccaacgttctgatcaagaagcttgcaaaatctgggaaacatgcagaactctggggtgcacctaaacccaacaacaacaacaattatcataatcataattaccagaaccaccttgccgaccagcttaagaacatgcaaatttacaaccattccaaaagtggtggtggtggtggaaaccacaacaa

SEQ ID NO: 70441 - DNA, 380 bp, Glycine max
tctataactatccaatttactttttttcttcttcccctcttccctaaagcgtatttttttcataacttctctaccaacctccaaacttaattacccaaattcaacacatttatcaaattttaattttaaattttttcatccaattttcaaagtttaccttttttccacccttttttccacccccttttccccctaaaattttttaaaaccacattttttttaaataacctttttaaaccaaaaaccaaataaaaaaattttttttttatttaataataaaccttaaattttcctttttttaaaataaaatttcccctatttcccataacaaatctttttctccaattattttaaaaaccttcttcaaaaaaattaattaa

SEQ ID NO: 70442 - DNA, 175 bp, Glycine max
  unsure (1)..(175): unsure at all n locations
agacgatgtgccaacgtacacgcgcattctagctcttcgcctctttctcttctctccgggaacctgctntaatttataatcgtgtcacagcaccaccacagcctaacccttacacatacacaccttagaacccttatcgcacatcccattgcttccaaacgccttcttaacgaac

SEQ ID NO: 70443 - DNA, 218 bp, Glycine max
cccacgcgtccgtccacgcttccggaagaaagttttataccttacggatggtgtaatgaagaatgattaattattgcatagcgcgggcggcgaccaagatcgaagactcagacagtgacacatagaaacatcttcgctttatttcaatggcaccaagcaggtgcttttacagactcgagcaactacgccagatatgacaaaagtgaggttattttggg

SEQ ID NO: 70444 - DNA, 222 bp, Glycine max
ctctatgtctcacacacactttctctctctctttctctcacccagatcttgtaacaagcgccatgtctacctctccacgcgaaacggtcccgtacatagccaagctgacgcaacacacccagccctactaaaagatgctttagctcatttaaaatgaatcctcatcctccgaaacccaggatcagaccccggaataacctaacctactctcactcacctaca

SEQ ID NO: 70445 - DNA, 337 bp, Glycine max
caatttgtaatttcacagaccacacctaatacatagcggctttgtgaactttctacacgctcattgtcacaccgatgcccttcaaaaccatccatccaattccatttcttaactcaacacaactcctaatccaaaatcaattaaaactgaacaacttgataacaaaacgctatttccaacaccgtatataatcaaacaccaaaataaacaaaactgcaaatcaaacctacaagagccctctggtcagaacttcttccagattcgctaaacgtaagtccaatcaaacatattgtaattagataattgacaaacatgacccaatccttctacttttatt

SEQ ID NO: 70446 - DNA, 258 bp, Glycine max
agcaaagtcatttcattcaattcattttaaaatatcacagtagccacccaatacatagaattttgttatactttctacacgcacttgcttcttcgtatccatctcttacccaaccatttgaatacattacttaacccacctcaaatccaaattcaaattcaattctatctcaacctaatgtatgactcttcctattgccttcactaatctacaattctacacaaatttcccaaacgcgaaaaagaatatgcacactaa

SEQ ID NO: 70447 - DNA, 254 bp, Glycine max
gatcagcgtaacggcatgctactgacagatgttgatcgaagatggctttacagatcctaggacgtccatataatgctacatttggacttcacggacgtggcatccactaatactagacaagaggctaatggactgaatgaagacaaatatactaggggaagctatggaaggggttacccaaatcattgaagaacccgatattatgcctatgaataaagaagctatgctgctcatggcgggtgctctggacactc

SEQ ID NO: 70448 - DNA, 209 bp, Glycine max
gtttggtgtaactgcatgctctttgccattgttgatcgagtttacctttagatttctgagtgacccatatacttatacagtgtgattttaggatcttgttaactagtattcctagactattgcttaaggaactaaaaggagaagcttttattatctaaatcatagaaaagtttacaaaaaaatcataaaaaacccatttttatgccttc

SEQ ID NO: 70449 - DNA, 237 bp, Glycine max
ctacccactcatccacccacgcgtccttctatcattccttaccatctctttctcatcttccttcgctctttatatacctgtcctacgtcaacaatatccgttacaaaaacatattctttccaatccaacatcaactaacttcttagcctcaacaataactaccacttatctgcaactttgcatactttactacagtgaactcatcatcatcatctacaatgctttccactagattac

SEQ ID NO: 70450 - DNA, 328 bp, Glycine max
cccacgcgtccgtgaagcattgcatccctcttgattcgtatttcgttttgtgctttagataaatggtctctgtaaacattataactggtaagagcatagtgtgtgttatgcaacaatggctaacttctttgctgctatgatcttggcactctttgccatttccatacttcaaacagtgataatggctgctaatgaacaaggaggccacttgtatgacatcaagagcaaatatggaagtggaagtgtcaagagttaccaatgcccatcacaatgctcgaagagatgtaaccagacccaataccacaagccctgcatgtttttctgtcac

SEQ ID NO: 70451 - DNA, 196 bp, Glycine max
caataaccaacctacctaacaccatctcaacttattgccttcctctctcatctccatgcgcttagtctacttttacatacactgcagctccctccttccaccctacgatcacccatcccaccactctcacaacaccaaacccatactccaacatgacaacctttcctactaccacaataaccacctccatcaacac

SEQ ID NO: 70452 - DNA, 53 bp, Glycine max
gccacgcgtccggtgatttcagtgaatgatccgtgttcacttgaactcatcat

SEQ ID NO: 70453 - DNA, 127 bp, Glycine max
gacacgcgtgctggaacacaagctcatccagatttgcgtaaacactgtcagaaccgtgatgacgacctgctctattaccgtcctttcacctgcgacgtttgacaacatatctttagattggaacaca

SEQ ID NO: 70454 - DNA, 78 bp, Glycine max
gataggcgtgctggaacactcgctgacccagatgtgcgagaacaccgtctagaccggtgggaggcgctgcactattac

SEQ ID NO: 70455 - DNA, 193 bp, Glycine max
ctcactcatcccaacacttcactgaacaatctttacacacttcatctgatcatactcatcatcagcaattagacaagttacccatcagcatcactatcctctgtagaccacactaatccacatactcatactcgcagaatgcaactaagtctttaaacatcacaaacttgatctttacgttcttagaatcaat

SEQ ID NO: 70456 - DNA, 165 bp, Glycine max
acagacatccttctcacttatacatctccctacactctctgaatagaatctgttcagactgccttcttaaactccatactcagaatcactgcactacttccacaaaattctcatgtatacaccatctatcagacaccacatgacttcattcttcattcaattcat

SEQ ID NO: 70457 - DNA, 340 bp, Glycine max
cccacgcgtccaatacatcctgaactcatatgattaccatacactcataatcaagaaagagacatgagtatgaaaatctccattagcggagcacacccatctactagcacaaccaacatgacatacattacatactcagacatatacgctaatttcttcatgaactacctcaactaactctacattgccaaatctctatctctttacatactccattttgttctcttctaaactttcgactctcatccacaatatcctactatatgcatatacacttcattacagttatcattaactgctggaagctataaatgcataaatcttttagatcttgaaattc

SEQ ID NO: 70458 - DNA, 370 bp, Glycine max
  unsure (1)..(370): unsure at all n locations
cccacgcgtccggtgatttcagtgagtgatcggtgttcacttgatctcatcataatcgtcaggagtgaattgaagaagatgccgatcagaaacatcgccgtcggaaggcctgaagaggcgactcaccccgacacgttgaangcggctttggctgagttcatctcaaccttcatcttcgtgttcgccggctcaagctccggcatcgcctacaacaagctcaccgacaacggcgctgccacccctgccggcctcatctccgcctccatcgcccatgcattcgccctcttcgtcgccgtctccgtcggcgccaacatctccggcggccacgtcaaccccgccgtcaccttcggcgccttcgtcggcggcaaca

SEQ ID NO: 70459 - DNA, 56 bp, Glycine max
gccacgcgtactcttatttcagctaatgatcattgtccacttgatctcatcataat

SEQ ID NO: 70460 - DNA, 378 bp, Glycine max
gtccagccacgcgtgcgcccaagcgtgctttgatctctcagatctaaccttacccactccatcatacaactcagcctattgcgaattctttaatatgcccatgtcaaccttcgttttagcctctccataagagactacacatcgctacacattcaaggcttcatttgaagatcacagttcaaatatcttaactggtgtctaaaacaaccaacacacactagcatcggaagcctagacaacaacgtacaattgccatccaattcatctatagcttacatacttgctaatgcgttcgttgctgttcaccaccgtcttcgtggctccaacattggtcgcaagctcacccaacttgggtcactaatctagtcttgcgctccc

SEQ ID NO: 70461 - DNA, 233 bp, Glycine max
ccaattcactctttttcttctcgccctctgccgtggaaggaagttgtaacaatggttgttctaccaacggcggacctaatggccccaaatgcaccacatgtaccaggtggtaatgtaaggtggtggattcaagggtcaagggttaccgggggggcaaccggtttttcgggccccgtggcaacctgaaaggggttggagaccacctggtggttaaggagcctcttgagaccaaa

SEQ ID NO: 70462 - DNA, 174 bp, Glycine max
gatctataactagccaatttactctttatcttctcgccctctgccgtgtggggggaggttgtttcataaactgggctagcaacctcagatcttattgactcaaatgcaacacatgtatcaagttgtgatgtgagggtgttgcatccagtgttcaaggcttactgtggtgccacc

SEQ ID NO: 70463 - DNA, 117 bp, Glycine max
acggaaaaaaaaaaaagccttttactttttttcttttgcatgatttgaatcttgattggaaaagatgcgaatgggggtgttttacccatcaattcaattttaagccgtgccttcttc

SEQ ID NO: 70464 - DNA, 55 bp, Glycine max
gctgccgaaacccttccggaaccctacagtgtattagcaatcatgcactgacaat

SEQ ID NO: 70465 - DNA, 284 bp, Glycine max
  unsure (1)..(284): unsure at all n locations
attgtcagttttttcactttgttattccagctttgcactgtcttttgggagggttttttttacaanaggacgggatttttatcctacaattcttcattnttattcaaagtatcaatcaactgtccccttntttgttgttcgccatatcaaattttcatagaactacatactctactctcataatcatttttgtaaaaaggttggaggttgcgcttttgttgataagatatctttcttaatgctttaataaaagtggtacactctcatatatccttttaatttta

SEQ ID NO: 70466 - DNA, 215 bp, Glycine max
atttgtcgctgacgcactctacagctctgtctgatatagcccctgatcgtgtatcgaggtgaagcacttgtactcgatgctgagcgcaactgtacattccctagcttgttgttccttccttactctactagtctatgatggggatcacggtgcaggtctacgactgcttcgaataccatattccatctcttgggtgacattaccgatcttgcgaa

SEQ ID NO: 70467 - DNA, 172 bp, Glycine max
ccttttactttttctcgtttggctgatttgaatcttgattggaaaaggaggtgatagtagactgatacccgtgaagtcaattttaaaccgagccttttttaaaaatcataatcaaccccttttactaccacaaggaaatatgggctgccgatctaaaggatcccaacttaca

SEQ ID NO: 70468 - DNA, 185 bp, Glycine max
tcttcgacttccatattccatctgtcgactaacatttcttatcttcccaatccttctaactcgtaaccatttatacccatgcctgctcatgcattaattcctaaactaccgaaataccatacttctgcatccttcactaacggtagcacttcctaaatttccagtgcatcttccatgtcatacac

SEQ ID NO: 70469 - DNA, 172 bp, Glycine max
  unsure (1)..(172): unsure at all n locations
acgagcacttcttcttttcacactaccctttcaattatgacttcacagaagaaacttttgaaccgtatgctttaaataaaagtgcagcanctcgttctcaatatcntcaccattaaccaccacaaaccccttcatggctgcacatttaagaataaagctcctaaagctatta

SEQ ID NO: 70470 - DNA, 99 bp, Glycine max
cacaagcgttcgtccactccttcgatccaagctgcacttcacactaactacgtctattatgaaggcggtttacacctcccatggcctatctcaacctta

SEQ ID NO: 70471 - DNA, 80 bp, Glycine max
ggactggaattcccacgtaggcctacgcgttcgatctatctctgacacacactagagtctgtctggtttcagtcaaccag

SEQ ID NO: 70472 - DNA, 75 bp, Glycine max
ttacaacctttttaactagtctacctagactattcgctaacttactaataagacaagcaatattatctcaatcat

SEQ ID NO: 70473 - DNA, 341 bp, Glycine max
acgcgctcgcgttcgtccaaccctccgaccgtggttgaggttgaacacgcgtctaacgactatgtatgaaggagagtggtcctctacaactggcctagctgaaccatcaatgcagtgaggtgcattgaccaacctagcccactaggactctaatgagttgatctaaagtttgcctgcgacgttcaacgatcggattccatcggcccaagctcgtgacgcccattaacaactctaagaaactgactccaaggttaccatacgcttacacactgcttatctgcattatatatcccaaggttcataaactcttgatcaatgaccatcgcaccatgacactgaaa

SEQ ID NO: 70474 - DNA, 382 bp, Glycine max
gtttagcgtaactgtaagctatgtgactttgttgctccagcttaccactatatttttgacaagttccatttgtacaaccgcacggtattaagatcctacaatcctttattcctaaacaatgtatcaagcaacttaacataaaattctttaatatcgtaatcaatattcagatttctacatactctactctaatcgccattttttcctaccaataaaaaaccttcttttcttaacactatatctcgcttctctctataacataagccttccactcacatatatcattagagaattatacatcaaataaataggtccttcctttaacttgatccatataacttattccatctcaattaaactttaaattgtggtcaaatatttc

SEQ ID NO: 70475 - DNA, 186 bp, Glycine max
gccacgcgtccggtgatttcagtgagtgatctttgttcacttgatctcatcataatcgtcgaagtcaattgaagaagatgccgggcagaaacatcgccgtcggaaggcctgaataggcgactcaccccgacactgttgaaggctgctttggctgagttcatctcaaccttcatcttcgtgttcggc

SEQ ID NO: 70476 - DNA, 204 bp, Glycine max
  unsure (1)..(204): unsure at all n locations
atatttttagtggacctgtctcagcttacccttttacncgttggtattcactactcatgggcagggttcatcatggtgtaaggggggccaatgggtttcctaatgcaatctaactttggcccctactggtcttaataattaaaaataaatgaaggtcctggtggcaatggatttttaccattaaaaaaggtgaatggtattacc

SEQ ID NO: 70477 - DNA, 54 bp, Glycine max
cccacgcgtaccttcactctagcgatccaacttacaccacttcacctcatcata

SEQ ID NO: 70478 - DNA, 367 bp, Glycine max
aattccgggcacgacctcacgcgtacgcgtacgcgtagcattgcgttcctattgatatttagtccgcattgtgctttagatgaaggtgagggcaaattaagaggggcttgagatcataacctgtgtgtttgcagcaatggctaagttctttgctgcgatgatcttgacactctatgccatgtccatactatacacaatgctgatgtctgctctggaacagagccgccacttcgtttacatcacgagcatatctagtcttggaagtgtcaactagtgcctatgcccatcacagtgctctagccgaagggacctgacctcatgccataagcccagcgtgggatgctgttataagtgcagcacgacatgc

SEQ ID NO: 70479 - DNA, 324 bp, Glycine max
acgcgttcgtgtaactgtatgctcttagccattggtgatggagtttgcctttacatcgaggagggggcccataatacgtgatcgcgagtctgcattcacatgggtcttgaacgactatgagtgtctagactatcggctaaggaactaagaggagaccgttgtactttctgaatcatacgaaagtctatgatgctatcatgctgaacgccatcgtatgccgttcaatcgaaaacctcaactacctaacccgcgttctcaagacacttgttaccatgcgccttcatacgatatgtagtacttgagatatcataatggaactacata

SEQ ID NO: 70480 - DNA, 276 bp, Glycine max
gcctcgcgtgcactcaccttttcgattcaattttaacaccgacatcgacatgctgagcattagtgtgcatttcaacgggcatggcccgtataatcatgctgtgagggcatctacaaacctaacgctctttgatgctaatagacttgatccaatgtgtccctttcatacttaattaagcgatcacaattgaccatgctcaagatgcgcctttgcatctcatccaaactaactccaagctttccatagcttaaacactgcatatccgcatcctatatc

SEQ ID NO: 70481 - DNA, 143 bp, Glycine max
tccacgcgtccgtctatccttgcattccaatttttcagtagatgctattacactggcaccggtctacttccaaatcggcatgggctcaacgatccttatctcgatgattctataaacgctaatcaacttgcaccacaacactt

SEQ ID NO: 70482 - DNA, 56 bp, Glycine max
cccacgcatcctgttacttcagctatttctctttttccactacacctcatcataat

SEQ ID NO: 70483 - DNA, 267 bp, Glycine max
acggcttactcctcttaccatccttaactcccattccatttttacaccagaatcctgtacagaaagtcccgtctacaaatctatatgcctagactacacagatctactcacaaatcctacatgaatcactctaatctttcaccaggacaatccgcatgccatacatactttcactgctgcacatatatcctatcaacctcaacaacttaccaaattgttcgctcaatgtcttcaactatcgatttaccaatcctaaaaatctttgcc

SEQ ID NO: 70484 - DNA, 131 bp, Glycine max
gccacgcatcctaaaacacaatctcatccagattttcttaaacacttccatcaccgtgattagtttcatactctattaccttcctttcacctgctacttttaccaacagatctctatattaaaacacacat

SEQ ID NO: 70485 - DNA, 101 bp, Glycine max
  unsure (1)..(101): unsure at all n locations
tttttcttctctccctctgccgttcagagagtttnttacataactgggctaccaacngcngancttantgactcaaatgcaacacatgtagcaagttgtta

SEQ ID NO: 70486 - DNA, 202 bp, Glycine max
  unsure (1)..(202): unsure at all n locations
ccacgcgtccgcccacgcgtccggctcctctttttctctctctagaattctcaaagagccgagcgaaattatacgcggccaggacccngcatggcaccttccaccatgggccaacaaccgccgcaacaataccagcaaccttcgccgcaacagcaacaaccctacgtcatgatgccgccgcaagcccaagccccgcaagcca

SEQ ID NO: 70487 - DNA, 226 bp, Glycine max
  unsure (1)..(226): unsure at all n locations
gcaaatcctgcttccacctctcatatctgattttaccgtctccggaatccaactcgacctgggtcanaattcttgggtgtcatggcatctccattcgttttatccattcaataacagattttagttcgcttcaaattccacgcttcatcttaacatcacaaccctaacttctgatctcttctcaagcacaacccccacacgccatcttggcacgctacgaccacac

SEQ ID NO: 70488 - DNA, 224 bp, Glycine max
cccattttaaaatttactaaacatagttatttattagaaattatatatacatacacgaacataaactaacaatcaaaatcttcatatcatttctattataaacaacattataatttaaccatatcacatgatcactttacttataatatacctatatcatttcaataccacatcattcaattcatatcaccaaaatcaaatccttatactacaacaaactttca

SEQ ID NO: 70489 - DNA, 54 bp, Glycine max
cggacgcgtgggagaacctattttcactgttttttgaagaaattgtatcccaac

SEQ ID NO: 70490 - DNA, 217 bp, Glycine max
atcatgtcccacttatcactccatgatattcactataagtttcactagtctttctatcatcaagtctttagttatttcattacaaaattctcttttatctgtccatttcttatctgtaaacaatatctttaaattcaattgatttaattgctatactaatcattactattatgaacttttctcctaaatctcataatcttccattctctattactaa

SEQ ID NO: 70491 - DNA, 263 bp, Glycine max
accacgccaacatctcaaacaccattccataaggaaatgctgagatatcaaaaacgcacggggtcatatatcaaatctcacgctcgacacatgactccccgactatccattaccctccctacagatcaaacattaatcaatacaagatcctatttaacactccatactacacacttaaaagcttactttatcacactaaacctttacagatattctatatccttctagactgtctaatatttacatctatctacatcacactt

SEQ ID NO: 70492 - DNA, 353 bp, Glycine max
ctcccacaccttcactcaatccccacaaggtttttccatttaatattattaaggttcaattcagatatctcttaaagctcttctggaaataaattctataccaatgcttcaattacaagaaccatctctataaaaattctctctccattatttttaatttttcagatctagtctttctctttaacttatttattaaccctttccattgttattgagatcattaatctaaaaaaactccacattgtgtatcaaatttgaatcaaaattaacacacacaatttaaaaactctaaatcttctcattaatatttaacttaatacacttactaaatctacatatcctcttaaactttc

SEQ ID NO: 70493 - DNA, 86 bp, Glycine max
ttgcacttgctaaaaatgctatcaaatatcattacaaagaatattactttactaacaatagtcctcttctctaataatacactctt

SEQ ID NO: 70494 - DNA, 172 bp, Glycine max
cccacaccgtcctctcgcttcatcaattctttacgaaaatgctcatatatcaaaaaggtactgcatcatatatcaaatctcactctacccaataacattcgtatccacctattacccttcacaaatatcattcattaatcaatacaataacatatttaacactccacaatac

SEQ ID NO: 70495 - DNA, 359 bp, Glycine max
attttggttctctgtgtctctacgatcaggatccaacggtccaaaatggtcggggcgtgtgctgtttgttttcccaagttttagagctccaaaccttcagatccacctcattcgtctccagatcttccttcctggataacgttttcgggttcgagaaggcacttgtgttgtttttcgtacgaaatggagactaaacagagttcggtgacggttacgctcagttacggcgcgttgacgtgcgccgcggaatttctcgcgactttgctagcttctgctgtcgtcaaagcctcgcttttggccccggtgagtcactttctctggcttcgtgcctcttaaacctaggtttttttttttaggtc

SEQ ID NO: 70496 - DNA, 222 bp, Glycine max
tctaactacttcaaatcctctcaccttatctacacattaacactacttaaaccctaaccaagcatggcttttttcaccttcaccgcaatgtccacttacaatctttactcctcctactccatctcctactttcccacccaccatctcaccaactcctaacttatttacaaacacaacctctccttctcaatctacaccataaccaattaatatcactttaac

SEQ ID NO: 70497 - DNA, 157 bp, Glycine max
actactacccatcctttcacatcatcctcacattatcactccttacaccctaaccaacgatctgtcttattacctttacaccactgtcccctctcaaactctcttcctctttaaccatatcctccctatccacacacaaattcacaaccacctcact

SEQ ID NO: 70498 - DNA, 399 bp, Glycine max
cccacgcgtccggtgatttcagtgagtgatcggtgttcacttgatctcatcataatcgtcagcgtcgattgaagaagatgccgatcagaaacatcgccgtcggaaggcctgaagaggcgactcaccccgacacgttgaaggcggctttggctgagttcatctcaaccttcatcttcgtgttcgccggctcaggctccggcatcgcctacaacaagctcaccgacaacggcgctgccacccctgccggcctcatctccgcctccatcgcccatgcattcgccctcttcgtcgccgtctccgtcggcgccaacatctccggcggccacgtcaaccccgccgtcaccttcggcgccttcgtcggcggcaacatcaccttccttcgcggcatcgtctacgtca

SEQ ID NO: 70499 - DNA, 156 bp, Glycine max
aatatacatgtgacacttgggtgctaacttgggattacgctatggccttagatgtaatctagaatgccaccatgatgtttgtaagggcacgcgatatgggacttgatgaacaggccgccgctctagaggactcactgttacgcacgcgggcatgct

SEQ ID NO: 70500 - DNA, 258 bp, Glycine max
tcacttcaccaattctaaacacaccccaattaacatctatgactataaacttccccttggaagctaccatatctgggtccaatgtcatgattgtaatatttattctggccacaccagcaccacacatcctggacattccaaattcaacccatatactggtcattgttgacttctccatagtcatattttattctaacaacacatctgtgttcgaaacatgtatccatcatttattgagaaactcgctcatacatatac

SEQ ID NO: 70501 - DNA, 348 bp, Glycine max
cccacgcgtccgcttctctctctctctctctgctgtacttgcttgaagcaatggccaaagggtagagttcagtgctgctggctctcctcctaacatacactaatgtgcttgctgtatagcttgtacttgaaactttttcaccctcataccctcaccctcaccctgttcactacgccacacaaacacctctttacccaccagcaaatgctgcacaaccacaccacaaccaccacgaccaccagtctccagtaccaacacctgttccttcaccttctcaccacaattactcttctacccctgtccctgctaagcctcataatcaccaccatcaccatcaccctatttctc

SEQ ID NO: 70502 - DNA, 219 bp, Glycine max
ttacgaaacataaatatttattcggtcaggatatataatcacgatgaacatactacgaacaatactatactcctagtcatttttataataaacaacattattaattacccatatcatattatcactctacttataatttaatgatatcacctcaataccacataattcaagtaatattaccaacctcaaaaccttatactacaacatgctatcacttac

SEQ ID NO: 70503 - DNA, 398 bp, Glycine max
atatttttcgttttaaaatttacgaaacataattatgtattggtttatttatataatgagaggaacataaactaacaatcatattctgctagtcatttttataataaacaacattatgatttattcatatcacatgatcactttacttataatttatggatatcatctcaataccacattattcaagttatattaccaaaatcaaatccttatcctacattattcttatcatctacatttatcattacttcattactcaagtttaaaaaccaaatttttacatacttttaataaaattacacttctacttacatatttattctatattacacaataacttttaaatattatattataccatatttttaatcattctaatatacaatttcttacattac

SEQ ID NO: 70504 - DNA, 270 bp, Glycine max
atcaggcttcagagctcataacgacattacttttacatctcattatatacaaacatgctgagcagcgtttgctctaacctgtgcatggtcagataaacatgcatctgaactgcctattacttaatgtgaatcattaccactttcctataacaatttacgacatgattcaatcaaatatttagaaaaatagttcactcatactacaaatctatcatgctcacattataactctaaattaagctattaaaaatgatttctccatctaaaatc

SEQ ID NO: 70505 - DNA, 79 bp, Glycine max
tctctagacgatccaaacttacgtacgcgtgttttcaacttcataactcttctataatttcacctaaattgaaaccact

SEQ ID NO: 70506 - DNA, 431 bp, Glycine max
aaatgtacgcttaagagtaacgaacacgacttttcatcctcttatctcatctatattgcgagctcaagtgagactactactcagcgatgctcaactgagagtatatcttcatccacacggtacctcatatacatatcttacattctataaagaaataatgaaacatcatgtgatcttaggagactatcaacatcgttgttagtactcaaatactagatcttgataatcgtattactctccgcttatactacataattagccataatattcttaaacatgctcatatctttcgtgcatagacaaatattgctgatctgtatatcatgctcctaaaattctccagtttggtcttctatacaataccttgtcaccgagattatatatcatattcacacttcataaaagaaacttttataaataaactgatatat

SEQ ID NO: 70507 - DNA, 315 bp, Glycine max
aacatgcacccttaagagaaacgtatatcacatgacataactttatatactatggggaacgagttaacttttaacaaccactacacaaaactcatcaaaaagtataccattgtcaacaaagaaacacataaccatatcaaaattccgctagactaaatacgaaacattatttattctcatctgactactaacatatactctaatacacatcattctatcgtcgcataatctaattctctgaactcatactacataattcccaatgatatactcaaacaggataatatctttagcgccgacaccaatatctaccat

SEQ ID NO: 70508 - DNA, 184 bp, Glycine max
ttttaaaaatgaatactattctttccagcgagtgtataatcatccattacacagtaatcatcacaatacatgccaacttcatctaattttaaatcccctacataaaattaatgcaacacttaaatcatttgaatctcgattttcaactcattactcactaaaactataaaaaaaatcttaaaat

SEQ ID NO: 70509 - DNA, 370 bp, Glycine max
acgctttcgcaaccatcgcctactcatctcaagttcgtgtccaacttctcgatagtgctttggagaattagcagtctttaaacctgaatccgcccgcttcaaatgtcataccaacttcaaatagcatgaaggacagtccttcttatccgtccgagactcaaagattgtgcatctgtatacccaattcattaacgacgaaaactgtgaaacagaacgcttcctaagacactcacttggtctatgcgctaaacaagctcatcattcacaccaaatagacctacaaggagcttgagattatatgcctacccactggctatcatttaagtatggattcctttattgaacattgtctcaaacaatttaagcatct

SEQ ID NO: 70510 - DNA, 93 bp, Glycine max
aattacccgggtccgagccgcacgcgtgccgcaatgggttactccttaggagtaaacttataaatgacttatgacatcctactgatcctgatc

SEQ ID NO: 70511 - DNA, 370 bp, Glycine max
tccacacatcctcaactataactactctatttactctactaaatatattcaattgtacacatgtgacattttaacaaccttatgtcaatcaattatttatcttactgacccatattataacataaatattacacatatgatcatattcctttccattctgaacttaattaaaacgattttttcatccaattctacttaattcttatatatattaattagatttcttacttctaaaagtttaattatcttcgttagacctataacttcttaatagtcttccaatttataccccaaatttatatactggttcattcgtataaccctattttgcccactaaactacctatatgcttcgtgctcttactatcaa

SEQ ID NO: 70512 - DNA, 193 bp, Glycine max
tacaccactcataccaatctattcacacttcaactaattaccaaaacccttcattacatttctaaaaccaacaatgattctaaatacttactcccatctcataactcatctataatctccaattatacttttcatcctccctatcactctattaatcatctcaaactctatctatcccatcatcccaccatta

SEQ ID NO: 70513 - DNA, 137 bp, Glycine max
taccaacttcctctctaaaaacttacccactctaaaatctaattaacatcattatttatcatcaatgatatatattaccagtacactattcgaacaataatctactccaaatcctattaattataaacaaccttaac

SEQ ID NO: 70514 - DNA, 183 bp, Glycine max
acgctcacgcttaaaagatattaacgacatcactttcacatctaattatattcaatatttctcagcagtgtttgctcttaccataccatagtcaaacaatcatgcttcttaatcgccaattacttaattttaaacatctctaatttcccatatcaatccaacactatatgcaattactttttt

SEQ ID NO: 70515 - DNA, 304 bp, Glycine max
acgcataaacgtccatagtcgacacatccaacgtctctatccaaattgtagatcgtgcttaagagtacatgctctctattaccgttatacactactcttcacgttgtattccaacttcaactagtttccaaaacctttcattactttgctgaaaccatcaatgattgggaatgctttctcccatcttattaaccatgtataatctgcaactctactttccctcctccctttctctgtattaaggatctctatctctatctatcctatcgtatcaccattatcgatcaatgtatacatattcttc

SEQ ID NO: 70516 - DNA, 353 bp, Glycine max
attcgacccacgcgtacgcccacgcctacgctctagaatatgaccctgactaaaatttacaaaacataatcatttattatgaaagatatattatataatgagcataacctaaccatacaatcctattcttcatttcaataatatacaacactacaatttaatcatatcatataaacgatctacttataatttatgtatatcaattaaataccacataattcatgtaatatttcctacctcaaacacttactcttcatacaacattcagctacatacatcattaattacttcattcagcatatataccaacctatatctaacatacgggaaatacactcacttttacatacata

SEQ ID NO: 70517 - DNA, 300 bp, Glycine max
acgctcacgcttctcatcatataacatctgtactctaatttctaaatatatccactcttactgggccgtgaattttctaaccggaagtgaattaaatactcatgcttctgtagtgatctataaatgaagatgaatcattaccaaatctccattactctgtacgacgagactatatcagtttttttgacaaactgacgataactcctatatatacatcatgccatacttcattgtttaaaataatatttttacaagaagctctacatattgtatatagcctatgcaacagcatcactaatt

SEQ ID NO: 70518 - DNA, 271 bp, Glycine max
gatagtttgagtgctcctgactcagctaccctttaccttggttattcactactggtggccggggaacacatgttgtcaaccagcaccattggctcacttatggcattctactttgtgcactacttggtcttatcaaagatgatagatcgtggatctagccttcattgcacattaactatgactatggctgattgatactacttgatcacattgcatgatacggcaaccaatgcataatccaatgaatgaaagcatcttgcgatggcatctg

SEQ ID NO: 70519 - DNA, 320 bp, Glycine max
gtcagtcttaagcgctcaaaacgtccttactctaacatatcagtatgtgctggcatgctgggcaggagatgctctaaccggttcattgtcagattaacatgcatctgaactgtctagtacttatcatgaatctgtaccactttgctattacactttacgacttgatgcactccaatatgtagaaaaacgctcacaatcactccagatcgatcatgttcacactagaactttaaaagaagctgctaaaaaggtttgctccatctacaatcagagatctggaacagcatagggagctacagcagccaatggaaacagatgtg

SEQ ID NO: 70520 - DNA, 275 bp, Glycine max
gtcactcttcatagatcatgacgtcattactctaacatctcattatatgcaatcttactgggcagtctttgctctaacctgtgcataattagatgcacatgcttctggactgtctattacttaacgtgaatcattaccactttgctattacactttacgactagatgcaatcaaatatttagaaaaatgctctctaatactatatatatatcatgagatcactaaatctttaaattaagctacttaaaaggtgttctccatcttcaatcagagct

SEQ ID NO: 70521 - DNA, 59 bp, Glycine max
cttcattccacttcataactcttctataatttcacccaaattggattctttttccctcc

SEQ ID NO: 70522 - DNA, 144 bp, Glycine max
gaactacccactcgtccgaatcactactattgaataatcataacgattctacccacttttcgcactcttcgccaatataggcctcatgttatctggccgtacagtcaaatacttttataatcttaggcaaaatctatgttctac

SEQ ID NO: 70523 - DNA, 136 bp, Glycine max
gataactactattgaagaagcaaaactattctacccactgttcagactctaagccaatatagcccttatgttctctttcctgacagtcaaatacttttttaatcttatgcataatttaagtcctttaatttatagt

SEQ ID NO: 70524 - DNA, 252 bp, Glycine max
atcttgtctctctctttcactctgctcattcttttcgccgatccaatctgaatgaagatgtgtatatacatgcattcagcatttgccaaaacgagatccatcttcttcacaccttcactactcctcttcatattcgcagtcaccacacaccaacttctcatacatccacatctaccatcatgctcctttaaaaaactcggcaattcctacctcctcgcttgccgcaactaacgcatcttcacttcccaaccc

SEQ ID NO: 70525 - DNA, 347 bp, Glycine max
caacacgcgatcacacaaacattcaccttccacttattccaacctatctcaaacacttcgttcaagctattttttaaaaaactcaacccctcaaacttctttcatattaccatcattcaactccaaacacttttttttaatccacaatattcttataattcaattacatctcttacatttttcttataattctaatctcacttaccattaatgttactccatccaatacaccaactccatcaccttctccttcccctactatacacttaatcaactttccattttttcttaatttattgcttcttacatatatttacatatatatatatacatataaacaactttat

SEQ ID NO: 70526 - DNA, 134 bp, Glycine max
aatccttcccctacaaatttgaaagcaactaccaatatccataaacaaaaacctttttttacgtcactatttcaaagatttcacattcgtttaccctcttttataaccaataaaaatggtaaacacaaatcttt

SEQ ID NO: 70527 - DNA, 145 bp, Glycine max
cccaggcgtccgcccacgcgtccgcccacgctttcgcggacacatgggcttcaacgggtatgtccactttaactaccctgatggggatcagattccttactttgaagattgtgaatctgtgacctaccataatgaaaaagagggg

SEQ ID NO: 70528 - DNA, 266 bp, Glycine max
attcccgcatcggcccacgcatacacccacgcattcgcccacgcattcgctcacgcttcctcctacacaaaatcttcaactgggtaacggcaccctttcataccctgattctctaccagattcctaactttaaatatgctcattctatcacatacaataattataatgatgcgatcattgagtaacccaaaacgaatgtcaatcattattcaaatagctaagatactactttccctaattgaataccaaccaaagtgatttccacc

SEQ ID NO: 70529 - DNA, 304 bp, Glycine max
cccacgcgttcgaaagaaacagtgtttcatcattagggtttcgcagaagagagagaaacccagggctagggagagaaactcgcagtcgcagacatgtcttccttcgatgcctatcacgacgacttgaacgtcaactcttcttacactcgccagcactacgatgaccatgacaacttatatggctacggcagctactcctgcttcaccggaggattctacgacgacggagatgtcgccgtcgatcactacggcatcgcgtacccggagatctacagattcactgattcgaatcccgcttactctc

SEQ ID NO: 70530 - DNA, 281 bp, Glycine max
ctcacgcttccgaaaaggcctatgctatagttcataagcataactctgtgaagactaaagaagtagacttacaaaaacagccttgagccaatcgctaccgacctgaacgtctatgatcataacctacataacatacttaaacatatgctcgaatttgctcactaatattctcaaggaaccctacatggactaatacctctctcgtgagaagctgcattctactctctccaaaatgttcgaagcccagcctgaaaaacctactattcgatcatacaccccat

SEQ ID NO: 70531 - DNA, 104 bp, Glycine max
gaattcccggcccggcggacgcgtacgcttaggcttccgaaaatgacccggcttagattttaagcatcactctgagctatcggggatagtagattttcaaagac

SEQ ID NO: 70532 - DNA, 323 bp, Glycine max
aaatccttatcatacattttttactttatacttacttataacttaaataactacagaatttttttaaatttttacaaatcttcttacattcctactttcaaaaatctttttactaacttatattaaataccattaaccttataaactcattaatacttcaaaaacttctatattctctacactatttttaaacaactattactcttatacatcaattatccctttcaaaacttatactttttaactattcaatctacacctattatctattttattctaacttatcttaacaattttattcctctaaattccaatcatactac

SEQ ID NO: 70533 - DNA, 81 bp, Glycine max
aaaaaaaaaaaaaaaaaaaaaaaaaaaaaaaaaaaaaaaaaaaaaaaaaaaaaaaaaaagaaaaaagaaaaaaaaaaaaaa

SEQ ID NO: 70534 - DNA, 358 bp, Glycine max
accaaacttttcaatctcgtacacttatatattacttttattggggcatagttatattttactgattcaacaatacagataatgtctttttggttttaccatttccatttaagatggtgcttttcctcaatcaccttgtcacccaaccaaaatataacacccactttttgtaccaatattagttcctcatttaatttgtgtttccttactgttcaaaaatgttgtaacatactctcatttttgtccttcctaacaatacattatctcttgtctgtattctctaaattcttttatacccatttacaaacaatattataatgcaaatccaattctaactttcatttcttttgtttatata

SEQ ID NO: 70535 - DNA, 318 bp, Glycine max
cccacgcgtccggttgttatcattcctctgacttatggagtcgtagcacttgtttggattagaatgattcctgatgagcagggacattagccaaactatcaggacctcatttgcagaatccagtcctcaacaatcaaaagtatttccaaagacattagcgcatgacttaaacctgagggatacaaaatctcaacctctaactataagttacatcaccaaagtcaaagacgatacccacttcactcgatactcctcttaagtccagacactatgcgtgaaccatgcttaccgaaattcttccaacgggactttaggtca

SEQ ID NO: 70536 - DNA, 233 bp, Glycine max
caaacttttcaatctcttacactcatatattacttttcatgcggcatagttatattttaatgattcaacaatccagataattctttttcttttaaccatttccatttaaataagttctctacctcaatcaccttttcacccatccaaaatataacacccactttttataccaatatcaattcctcatttaaatgtgatttccatacttgtcaaaaattttattacatactccc

SEQ ID NO: 70537 - DNA, 332 bp, Glycine max
gaggtttttgtctgatgatgttggtaggtctagcaatcgagggcgagggcaagggcgatcttggcgaaattatgggaggaatggagcggatggtgatggcagaatgaggaagaatgggaatgggagaaggtttttgtccaataatgttgatcggtctagcggtggagaacagtcttctcctttgaattatgggggggatggaatgaatggtgatggtagattgaggaggaatgggaatgggaggagggttttgtctgatgaggatagtagcgatggacagcggtcttctcatttgagttatgggaggaatggactggatggtgatggtgatg

SEQ ID NO: 70538 - DNA, 201 bp, Glycine max
cgaccgactcgtacgcccagacgtccaagaaggcctcagcttaatttataagcataactgaactaacaagagaaagatagatttaaaaagatggccagcaccggaacaaaaccactaagcaggccatctaaaaaaacctacataacacactcaaacatacaccctaataacctcactaaaagcctaaattaacccaacata

SEQ ID NO: 70539 - DNA, 68 bp, Glycine max
tacctacgcctacattccacctgtaacgtttatatattatcacctaaatgccattcacttacccctca

SEQ ID NO: 70540 - DNA, 229 bp, Glycine max
tcatattgaggttgacgttgtggttggtgttgaatgattccgttgattcaatgaaggctttgatagatgttgatcaagaaccaattttatccagctactatttcagttccattttgtctcacaaatcttttgagagtgccttgtccaaccacctctccacaaatttgaacagcttgagcctttcaagcatcaccctttttgaccttttcatgggtgttttggttgatga

SEQ ID NO: 70541 - DNA, 260 bp, Glycine max
cacgcgtgcgtcttggaagactttgttgctccaattatcaatttcactatttacaaatcttctcaggacccaagacctatttcaaacggtaaatcggccgaagacttacctgatgatctccaaacacaagacagagacaaatgctttgaaacttataaccgcgaatcgatttatcatctcaaccaagaagcaactgccaactgatttctgtgacgaatccctagtccagaaaagataggaattatcaccaaattcattaa

SEQ ID NO: 70542 - DNA, 366 bp, Glycine max
  unsure (1)..(366): unsure at all n locations
tcacttcataatccatttcantctatttaataataataataaacacagaacttttcagaattcttttaagcccaanatcaatgccgtccaactattcccattctccgattaagatcttacattgcgactctggttacatactcgaagacgttcctcacttcaccgactacattccaaatcttcctacttatcctaatccacttcgatccaatcctgcttactcggttgttaagcattatttcttgcacanttactacactgttcctcataaagttgtttttcacaaatatattccaagaattatacattttctactttcatgtcctcttcacaaactatactttaaatctcattaactccaatcat

SEQ ID NO: 70543 - DNA, 315 bp, Glycine max
ccacctgaacaactcacctgctttcttatcccttccctacctccgttcacttaagacctatgttaaacttcaccaaacccctaccctctcgcggcttccatgtcacccttctcctcacaccctacaactaaaccttacttccaaaaaactattcccctcttctccaaactctactcctcccctaacctcagttccctaaccctaaccataacaatctcttatccatatcaaccttcattactcaccaccactaccctatcattattgactcatcccaatcccattccattcctactactactacttatatcaaat

SEQ ID NO: 70544 - DNA, 331 bp, Glycine max
cgcgtccgctctcggcttcgtcgttcactccataatccatttacagtctaacaaagaataataatatacagagaagatatccgggacctctttagaacaacagcaatgcacgccaacaattcctattcgaccataaagatcatacatgccaacgctggttacatactctaagactttactcacttcaccgactacattccaaaccttcctacgtatacgaatacgcttctatccaatcctgcttactcggttgccaagcattatacactgcacatatacgacactgttcctcagaaagttgatgttcacaaggataatccaagacgcatac

SEQ ID NO: 70545 - DNA, 194 bp, Glycine max
gcgcccacgcgtccgcacgctccaactttgctgatctctcatattcagatcgactcagcctactcagggaaataggccaatattaacaacaccatcgccagtcccaccactgaataccataccaagctccagatcaacaaccatcacaaactacgatcattcactgacaaaaccatctcacaggatgtcatcac

SEQ ID NO: 70546 - DNA, 319 bp, Glycine max
  unsure (1)..(319): unsure at all n locations
ccatccagccacgcatgcgtaccagcgccaaacaagccctaaatttctcttttctatcttattcttcctttaaccagtaanagaggatcatgttcaattcaccgcaagccaatgtcctaacacaaatcgcctccaagaatctgcgaaagtgaactgcgacctagcacgccatancatcccaccgacaaagtacaacgaacgaatgcaacagcagaatccaacttgaaaggatcaatcagtattacaactacaaactctcccggaaggtacgctacacaagccattcttatggaactcgaacctgtaaccatggacagca

SEQ ID NO: 70547 - DNA, 260 bp, Glycine max
accacgccttctaccaaacttattacaaattctacaactcccgtatatattagctctgtttaaagacccaagacgcggcttataaaaatattcctacatcaaacattataatcatcaagcacctttaacaacgtcttaaacaaccataacaccctataaccaaaaccccaattacaattcgttcactgcccataatggaaactacatcaaacacactagtaagatcacctgctgataaacctaatatgcactataacaac

SEQ ID NO: 70548 - DNA, 216 bp, Glycine max
  unsure (1)..(216): unsure at all n locations
acacaatttcaaaatanacattaacaacacaccaatttcgaaacatattaaccaccacaaggaccccaactaaaccctatatacaaacactacaaatcacaaaacaaaacaattaaacaaaattaaacaccataatacacaaaaatccacatactccaacaacaactaataaactaacaaacaaaactcaaaatcttaacacaacaatcacaaaac

SEQ ID NO: 70549 - DNA, 167 bp, Glycine max
  unsure (1)..(167): unsure at all n locations
tactgatcctaagcctttttcgcatacttcttaaagcctcctgtcatgttacattcactaatacaaaanattaatcaaatttagttgattattccaaatatccctgnttaaactatgtagggtcttacccaagtcatgngcagttctgttatccttgccatagcttt

SEQ ID NO: 70550 - DNA, 80 bp, Glycine max
aagaccacatcataaaatatttcaaggttaagtggaatgattctatatatccttaacatggttctaacttggattctatt

SEQ ID NO: 70551 - DNA, 52 bp, Glycine max
cccacgcgtccggcactcgacgcatacatttatcggttaaatctgatacatg

SEQ ID NO: 70552 - DNA, 77 bp, Glycine max
caccgctccaacacaggggaaggtgaagggagaccttcacgttcagggagggcaatgcgggaaccagatcgggtcga

SEQ ID NO: 70553 - DNA, 264 bp, Glycine max
aattccacccacgcgtcacgcactcttccactccttaccacactcactacttttaaatttcaacaccactcttactacattcagaactgtcaccaccttcttacattccatcaacttctatcctactcctttacctacactcaatttaacacttgctttcaatttcaatctttaaacaatccttttcttttatcaaacacacttatttacattaccaccaaccacttcttactactttaccacaacataactactttatcactc

SEQ ID NO: 70554 - DNA, 279 bp, Glycine max
cccacgcgtccgcgcgtcgctgctccgtaccagtttcactgcataaatttgagagagaactctgcaaacatgttggtttatcaggacctccttacaggtgatgagcttctctcggactccttccgttacaatgaaattgagaatggaatgctgtgggaagttgaggggaagtgggttgttaagggagcagttgatgttgacattggtgcaaacccttctgctgagggtggagaagatgagggagtcgatgacgcagctgttaaggttgttgacattgtt

SEQ ID NO: 70555 - DNA, 167 bp, Glycine max
attcccgtgtctacccactcatcctatcactcccaaaccctctactacttatcactattttcaacttatacaatttttaagaaatctcttataacataattacctcatcaccatttatatacaaattataaaactatcattaacttacacctttacatttaccttat

SEQ ID NO: 70556 - DNA, 65 bp, Glycine max
  unsure (1)..(65): unsure at all n locations
tcgtctcgcgcccatgccctgttctnntggagctacattacntnnctcgtcctggatnnttgata

SEQ ID NO: 70557 - DNA, 263 bp, Glycine max
ctcatgatgtgaatgaggctgatctacaggatgcacgagctcctaaggcacgttggattgggtgttctcaatatgaagcgtgctgctagttaaatgagaaaggtgaaagggcaccgaaggatagcgattagacgacgcactagcaaactgtattcgtgtgcaacaaggctgggaaggatgaccttgatagagctgacgagaaaccacgaattaagaatcacacgaacgaaacctgtgatcctgatacaattaaagagaccgct

SEQ ID NO: 70558 - DNA, 193 bp, Glycine max
tcgtcacaaccttcacttcctcacattttaatacttctcgttcaacactatatcaaacggctctttctttcttttccaaaaatctttcccttagaaagccataaagcaagtccctcccatgttcacatttttcttgaaaaacccctaatttatatttctactcttctctatctcattacaaaattcatttccc

SEQ ID NO: 70559 - DNA, 193 bp, Glycine max
cctttctcactctcaaatcaatactctgatcccgttatcttaacagactagcgcggtaaacccatccaacataactttatcgctaccatcaatacactcacatcatattctctatttgctttcaatcataccgctacttaccttcaacagttcaatttcaaccatcgatacatatcttttttcaacccaacca

SEQ ID NO: 70560 - DNA, 149 bp, Glycine max
aactttattactttacatactttatcttctgtcttacttttgttttatatacttattatcttcatcattttatttttccaattttaattgactcatttgagaccataaatataaaaaaaagtctacctctctatatatccaacttacta

SEQ ID NO: 70561 - DNA, 385 bp, Glycine max
caaaattatgacagttctttcactctttttccatttcacgccttccatttccattatcgattctgtgtcaatccgcggtagacatctcttctttccaaatgtctactttaaagttcaacaacagctcatgtacctccacccccaactgataatattcatctatctctattctatcaacttgttctatcacactcttttatacaagccctacatcttatcatctctacttctattcctaacattcctcttatgtcatccctacatcattccttagctagtaatttttcttcatatcaacgcaatctcttttcaacttcttcactgaaaaaacatcttaatctttccactgcttatatctcatttatatcttactttatctccaaca

SEQ ID NO: 70562 - DNA, 201 bp, Glycine max
ggagattctgatttgttctctcagatctgagcttaccgtagccggaatccaactcaagctagtgcggatacttgagtatgatcgcatcgacattcagtataacctctcaataagagattttacatcacttcaaatacgagcgacgacttgaagttcaaagtttgaatatcttaaccggtgtgtataacaaccaacacacac

SEQ ID NO: 70563 - DNA, 53 bp, Glycine max
ctagactactatgagtcctctcaaatcttatcttaccgcctgcactcaaacac

SEQ ID NO: 70564 - DNA, 219 bp, Glycine max
cagaggttgagtggacctgtctcaactaccttttaccttgggtattcactactcatggccagttcaattataatttcaaccggcaccattgacttccttatgtcattctactttttgcactacttgttctcatcaataaaaaatgatttaagttcttgttgtcatttcctattaactattaaaaaagtttatttatataacttgatcacatttcatatt

SEQ ID NO: 70565 - DNA, 201 bp, Glycine max
acgcaactgcccgttgacatctgcaacgaatctattagcatagaggatacgactgtaagaggcagtgagcgaaatgctgaactacaccaatcgtgcagaggtctgcatgctttatcatgctttcaaagcctttcattccatgcttagaagccaacactgtgtgggattgcatgaacccctctgacttattctctatcatct

SEQ ID NO: 70566 - DNA, 387 bp, Glycine max
ggagattctgatttgttctctcagatctgagcttaccgtcatcggaatccaactcaacctgggtccgattctcgcttatcatcctataaccgatcgctttagcctatcaatagaggaatctagctcgatgagaactcgaggattgctttgaaacccaaactcagcaatggctcttctgtacagcgagacgagggatccaaacaggcagtagcagacggaaaagcaaaagaggggtaaatgaacgtgcttccgatgaatcgcatcagaacgatgattaagggcgaagatcccgatattcgtgtttctcaggaagcattgttggccatcaacaacgctgtggagaaatttcttgagcaattctcgcaagatgcttattgcttttgtgtt

SEQ ID NO: 70567 - DNA, 217 bp, Glycine max
acccacgcgtgcggcatactctgagtcgttctctcagatctgattttacctttaccggaatccaactcaacctagtacacgattcttttttatcatcgcatcaccattaccattagtccactcactatgataatttatttctcttcaaattccatattctatatgaattaaaaacttataatagcataaactcaacttactaactctaccacttaca

SEQ ID NO: 70568 - DNA, 338 bp, Glycine max
tgcgcccacgcgtcctccaaaacctaaaagaagattaacgctttaatccccaaaatcgaaatgaaggaaaccgtaagctcttaaatccctctaaccgatggcaaaactaatagggatagataaatcgccaaagattataacaagaataatactaataaacccaagctcatcaatgtcacttcaaaacatctagactagggatccaaaaagggagtatcacaatgaaaaggagaagattggaaaatgaacgtgtttcctatgaatctcatcataactattattaatggctaagatcccgatatgcttttttttcatgaagcattgttggccatcaacaa

SEQ ID NO: 70569 - DNA, 115 bp, Glycine max
gcggcatattctgaggtgttctctcagatctgagtttaccttttcctgaatccaactcaacctgggtcttgttcatttttaacatcgcatcgccattcgctttaacctctcaata

SEQ ID NO: 70570 - DNA, 259 bp, Glycine max
ctcacgcttttgtttcacactcacctaatgttcttacatttgcattaaacatatttcaatcggttaagtttattatgctcatcaagctctattcaatttttcttaaatacttaactttacacctttcatgatcttcactagttataaatcacccatatacatattgtatcatttattttttcacttacatatcattaattcttcctttttctttcactatatttgctatataaataatatccaaaacaacttctttcaa

SEQ ID NO: 70571 - DNA, 253 bp, Glycine max
tcttctacatcgccatctataactagccaacttactctttaactcttctcctcactacaattggagcagtgtgcatcatcttcttcaccttcctctattcttctactttcctcaattgcaactccttattcctattcatcagaaacacctttatccaaaagatctttttattacaatttcatcataatttgttcttaagaccattttactacctctaaaaatttacatatcttttatctctcactatacaaat

SEQ ID NO: 70572 - DNA, 288 bp, Glycine max
gccacgtggtgtgacaagcattcacagcctgagctcgaactgtacatgtaccgcaaaatggatgcgcggacatgatcttctttagcgtcctcaactgtttatccttgcagcaagtgtagctgcatatgtgtattcgtcataagcatgtgagcacagaggatcttttgaggacaatttaagcctaatgtggtctgaggaccatcatactacctctagcgatggacagatctggtgtgtctcactagacaaagacacaggatgtggatttcacacaaagcaacgctacag

SEQ ID NO: 70573 - DNA, 273 bp, Glycine max
tttacacacattcttagaaacccttcactcatgatttcaaactctactgctacccaaaatggggtgcgcgttcattatattttttaagcgttctcaaatttttttccttgcagcaattgcagctgcttatgtctattcatcagaagcagctgaataccaaaggaacattttgatgacaatttcaccataatgtggtctgatgaccattatactacctcttaagatggacagatctggtatctctcactagacaaagacacacgatgtagattt

SEQ ID NO: 70574 - DNA, 174 bp, Glycine max
ttcgacatcacaatctataactatccaatttactctttatcttctctccctctggctaaggataaatcttaaacatgcctgctctaccaacttcatatcttacttactcaaattcaacacatttatcaatttataatattaaactcattcatccaatattcaatatttactttt

SEQ ID NO: 70575 - DNA, 374 bp, Glycine max
  unsure (1)..(374): unsure at all n locations
attacccgggctcgactcgcacgccgtcgcgtgttgactactcacagtgaggcatggagtaaggtatgtctctcctatctatgtaaattataaaatggctatcggaggaggtatatcagacgggcaatgttgcataggcgaacttcttgagttacatctgtaagaatgatgttggtcttccactcgacttgttgtgggccgattagcatgatcacagtacttttttgattgcaaatggcctgtgaattgcatttgaatatagaacctttgtgaaagctnttgtctcttggtattgacaatcgatgtgggtgataccagctcactgtgtcaattgactcttgcttgtatttcgtttgccaatgaagttcttttta

SEQ ID NO: 70576 - DNA, 242 bp, Glycine max
ctccactcctgctcactcttcttctctttccactacttttacatctcatcttcttctagatttaaaggggatttgttaataaaaaattcacatcaatactttttttattttccatgtttactcttttaattccactaccacatttccaccttatctacaatcttagatgcatatacaaacttattatttaaatattttataaaaaatcttcttatatttacaatatatctttcaattattcc

SEQ ID NO: 70577 - DNA, 151 bp, Glycine max
tttcagtttattgatttttgttcacttgatctcatcatagtcatcggcgtcaattgaaaaagatgccgatcataaacatcgccgtccgaaggccctaaaaagccacttaccccgacacgtttaaagccgcctttgctgaattcaatctaac

SEQ ID NO: 70578 - DNA, 181 bp, Glycine max
cacacgccttctcttacttcaagtattgaacttcagctacttctacatataatggacatgagtgacgattaaattcacatccgtattgaaacaattgcccatgaagaccctaagaagcccactaccactacccatctaatccacattcttctaagcatatactaacctttaatttagagat

SEQ ID NO: 70579 - DNA, 189 bp, Glycine max
aaaatatatctcttacacatatacatatataactgatgttaatataacttaatacttccctcaaaacaaaataaattataaacaaaaacaacctattaaccttcttcatttcatatattacatctataatcactaaaatctaccttatcaaaaaatttaacacatatcaaaataaaaatcattcatatt

SEQ ID NO: 70580 - DNA, 312 bp, Glycine max
tccacgcctccggcgatttcagtcagctattttctgatcccagctcctatcatactcaatggggatcgggtgaataaaatgccgctcataaacatcaccgattgaccgcctgaacacgcaaaataccactaccccttgccagctgatctacatgaattcatttcaaacttcactcttcacttcgatcatctcagacttcagcataccactacaatcatactcagcgactacggcaactgccaacactatcagactaacttgcagctccatctcccatgcattcaccctatattaccccgtctcacattgaac

SEQ ID NO: 70581 - DNA, 314 bp, Glycine max
aattcccggcccgacccgagcgacgcgtccggccacgcgtccgatagaatatccacttttcttttagatcttttatccatcagaaaggggtggatcaacttttctaaggcgtactatagtacatgaaagacatgtagcgccctcatgccactcgagctgaggatctgctaacttgaagcgtactttacaacagatgcttgttgacagagatgataaccgtattggatctagcagcgtattgatccatgcaatcagctgcaagtattgccgatgatgggaatataaaatcttctgctgtgtcagatgtttgactg

SEQ ID NO: 70582 - DNA, 244 bp, Glycine max
cgcacgcgtccgattgaatatccatggttcttatagatctgtcatccattctaaaacggtaggttaatatatctaagaggaactgtaatagctggaagatctcataggcctatctgcatatgcaactgacggtgctataacttggacccttactgctgaaaaaatgcgtcttaacgaagatgtacctattatccatctaccttggatatgttccatgcaatacgccgttggtataaatgatcag

SEQ ID NO: 70583 - DNA, 422 bp, Glycine max
ccacgcctccgctctattctacatacaaactcttcctctcagaactctctttctgtctctgtagaattctcaattctctctctgctatttattatcactctcttactcgcttctttcaccaaatcaaatgcttacgtctcttccccttcttctcttatttgaaagattcttgttgtctcaaaaattggtatctgtgccaatcacacctctgcaagtgtctttcttgctgttggttattccacaatttgtttcatcgatatattcatagtacttatagtacaaaaaactcttattttctcccaaaatcatttatattctactcctttatagtttaggaaggattccatttaagaatattatcttgccaattttctttaatcaaggcttacaatatcatcattatctaaattccattcaccatc

SEQ ID NO: 70584 - DNA, 352 bp, Glycine max
cccacgcgtccgctctattcttcaagcaaactcttcgtctcagatctctctttctctctctgtagggtttccgtttctctctctgctatttatgatcactctctgacgcgcttctgtcaccaaatcaagtgcttccgtctcttccccttcttctctgattggaaggattcctgtggtccgagattgtggtttcggggccaatcacgcccgggcaagtgtctttcttgcctgggggtattccaagttttggttcaagggtatattccaaggtcctaaaggtccaggaacctttaatttcttcccaaggtcaatccagatcctggcctggaaaagttggggaaggatccattta

SEQ ID NO: 70585 - DNA, 55 bp, Glycine max
aaaaaagaccggggaaaaaaaaaaaagggaaaaaaaaaatttaaattaaaatttt

SEQ ID NO: 70586 - DNA, 186 bp, Glycine max
gcccacgcgtccgcttttctacttggtcttctgacctttttttctcctgaactcaaacatggcgatgggtggtcgctgattcggccagtcattggatgaggcagatgcctgctgaagggttcaattgatcaagaaagctgagacgatcttttctcaagaccgtaagaatcgttatccaggaccatg

SEQ ID NO: 70587 - DNA, 138 bp, Glycine max
  unsure (1)..(138): unsure at all n locations
ccgggccgaccgcacgcgtccgaccacgcgtncnncacacatncggtttctgtttgaggatccaacttcataacaggtcatgcgtcctactttataagatcacttgcttganataatcttgtgttgctcacaaataaa

SEQ ID NO: 70588 - DNA, 77 bp, Glycine max
gaaaaagaggcgcaagatgagtggtatggtttctgggaaggtgaagtggttcaatgatcaggaggggtttggattca

SEQ ID NO: 70589 - DNA, 433 bp, Glycine max
  unsure (1)..(433): unsure at all n locations
gaaaanaaaaaaaaaatttaaatttttaaaaagaaaaaaaaaaagggaaaatgaaattttaaaaaaaagggaaaaaaanaaataaaaataanatnaaaaaataaaaaaaaatataattttaaaaaaaattaaaaaaaaaattaataattaaaaaaaataaaaaaaggaaaattaaaatttaatataaaaaaatataaatgaaaaaataaaaataaaaaaaaataaattaaaattaataaaaaataaaattaaaaataaaaataattattataaaaaattaaaataaattataataaataaatatatataataaaaattaaataaataaataattataataattaaattattaaaaataaatataaaaaaataataaataaatatattaaaatataaataattttaatattatataaaatatttattttattat

SEQ ID NO: 70590 - DNA, 474 bp, Glycine max
  unsure (1)..(474): unsure at all n locations
aaaattttaattaaaaaaattaaaaaaaaaatttgtatttttaaaataaaaaaaaattaanaaaaacttgataaaattaaaaaaaaaaaatgtggtttaataaaaaaaaaaaaaaataaatataataattatataaataattaattaaaataaaaaaataaataaaatataaatctataaaataaaaatttaaattatatttataataaaaaatataaaaaaaaaaaataaaaaaatatatataaaaaaaaaaaaaaaaaaaatataaatttaaataaatatataaaatatattttaataataaaaataataaattaaaattataatttaaaaatatttatttttattaaaaatttatataatttaatttataattattaacaaataaattttatattataatatataaatattattaaaatataattataataatataatatattttaaataatatatataaaattttatata

SEQ ID NO: 70591 - DNA, 141 bp, Glycine max
gaagttgcgagagtgaagaaatggcgcaagacttggcattggatttggaggagcttcgccggctccacagcatcgccaaaagacctcgaaccctctctcttctctcctccgaaattcgtaacctcgaaaagttattgtcag

SEQ ID NO: 70592 - DNA, 444 bp, Glycine max
  unsure (1)..(444): unsure at all n locations
aaaaaaaatttataattttacaaaaaaaaaannaaaaaaaacccagacttttaaataaaaacgtgggccgccaaaaaaaaaaaaaaaaaaattgataaataaaaataacaaaataaaaaaaacataaaaaaaaatacaattaaaaaaaaactaaaaaaaaaaaaaaaaaaataatataaaaaaataaaaaaaaaacaaaatcaaaaaaattataaataaataatactaattatactttatataacaatataaattaaaaaaattacaaaaaatataattaaaaaaaaacaattaaattaaaataaatatcaaaatataataaaattaaaaaaacataatcaaaaaaaaaaataataaaaaattaataaaattatccataacaatataataaaaaatataattgcttatctttataaaaaaataataaaaataaataaaaatatt

SEQ ID NO: 70593 - DNA, 275 bp, Glycine max
aaaaaaaaataataaaaaaaaaatataaaaaataaaaattaaaaaaaaaaataaaaaaaaaaaaaaaaaaataaaaaaataataaaaaaactataataataaattaaaaaaataaaaaaaaaaaaataaaaaaaaaaaaaaaaaaataaaaaactaaaaataaaaaaaaaattaaatttaaaaaaaaaataaaaaaaaattaaataaaaaaataaaaaaaaaaaacaattaaaaaaaaaaaaaaataaaaaaataaaaaaaaaacttaataaaaa

SEQ ID NO: 70594 - DNA, 282 bp, Glycine max
aaaaaaaaagggaccgcaaaaaaaaaaaaaaaaacaaacaacaaaaaaaaaaaaacaaaaaaaaaaaaaaaaaagcaacaaaaaaaaactaaaaaaaaaaaaaaaaaaaaaacaaaaaaaaaaaaaaaccacaaaaaaaaaactccccaacaaaaaaaaaaacaaaccctcaaaaaaaaaaaaaacaaaaaaaaaaaaattcaaaaacaaaaaaaaaaagaaaaaaaaaaaaaaaaagcccccctaaaaaaaaaaataaaaaaatcaaaaaaaaaaaaacaa

SEQ ID NO: 70595 - DNA, 129 bp, Glycine max
gaagttgcgagagtgaagttatggcgcatgatttggcattggatttggaggagcttcgccggctccacagcatcgccaaaagacctcgaaccctctctcttctctcctccgaaattcgtaacctcgaaa

SEQ ID NO: 70596 - DNA, 238 bp, Glycine max
  unsure (1)..(238): unsure at all n locations
cccactcgtncgcccacgcgtncggaagaattgatataccttacggatggtggaatcaagaagcatntgggattgcatagtgcgggtggtgacaaaaatgaggacaagagagggaggggggggaaaatcttcggtttattgtaattggaccaaacaaggggttttaccaaaatgggccacgacccccgatattaaaaaagggaggttatttgggggcatatttgtaaaaagtgggttt

SEQ ID NO: 70597 - DNA, 355 bp, Glycine max
cttttctactttgagtcttcttgatccttctttttctccttgaactcaaacatggcagatgaggtggtgctgctagatttctggccaagtccatttgggatgagggtcaggattgcacttgctgaaaagggtatcaaatatgagtacaaagaagaggacttgaggaacaagagtcctcttctcctccaaatgaacccggttcacaagaagattccggttctcatccacaatggcaaacccatttgtgaatccctcattgctgttcagtacattgaggaggtttggaatgacagaaatcccttgttgccttctgacccttaccagagagctcaggctagattctgggctgattatg

SEQ ID NO: 70598 - DNA, 161 bp, Glycine max
cttttctactttgagtcttcttgatccttctttttctccttgaactcaaacatggcagatgaggtggttctgctagatttctggccaagtccatttgggatgagggtcaagattgcacttgctgaaaagggtatcaaatatgagtacaaagaagaagactt

SEQ ID NO: 70599 - DNA, 54 bp, Glycine max
  unsure (1)..(54): unsure at all n locations
cccacgcgttcgcccacgcgtncgtccacgcgtccgcggacgcgtggggttcta

SEQ ID NO: 70600 - DNA, 292 bp, Glycine max
  unsure (1)..(292): unsure at all n locations
ggggcccacccaggcttgctcaaatacatcctttttcttaatatttctcttctcactctcacaattcaaactcttgcaccttgttttttattaaatgatccccaccaacactnctatcccaaccaataaatctcacttgttcaccacctatcaccaccaacatactacattcttcacttcacttttctaaagccataaaactctcacaaataattcccatcttcttttcaaatctcatctgtctcaaattcctccaaccccaaaccatacacctcaaatctaatctaccttt

SEQ ID NO: 70601 - DNA, 222 bp, Glycine max
  unsure (1)..(222): unsure at all n locations
agaaaacctaagcttagaattagaaacaaagataagatgataggaaagaattgatcgttgagaatgcanggaggaaagaaaagcgggagaatccattaagggaaacagctacaaacattggtgcttctgccaaggctggcatggagaaagaccaaggccactgtccaagagaaggcagaaagaatgacagcacgtgatccggtgcaaaaggagttggcaacc

SEQ ID NO: 70602 - DNA, 228 bp, Glycine max
ctatttttcacttttcactaaaatttacacacaacccctatttttttattcttctaaacacattcaaatattttttctctcatcaaacaatttccctaatcaacacttcaataattattcaataaacaaaaatttctattattcaacattttcctcttatccctaatacctttttttatcattttttttccctccttttttttacacacccaaaaaactcttttttaa

SEQ ID NO: 70603 - DNA, 285 bp, Glycine max
agaaaacctaagcttagaattagaaacaaagaaaagaagaaaggaaagaattgatcgttgaaaatgcagggaggaaagaaagcgggagagtccattaaggaaacagctacaaacattggtgcttctgccaaggctggcatggagaagaccaaggccactgtccaagagaaggcagaaagaatgacagcacgtgatccggtgcaaaaggagttggcaacccaaaagaaagaggcaaagatgaaccaggcggagctggacaagcaggcggcgcgtcagcataacacg

SEQ ID NO: 70604 - DNA, 94 bp, Glycine max
caaatttaaatccttaaaaaggcttaaaggcccaaaaggacataaaagggggaaaataaaacattttgaagtcatatttgcacacttgattaaa

SEQ ID NO: 70605 - DNA, 264 bp, Glycine max
cccttatctttctctcttctctctccccgcccaaaccctaactccctaccctatggcgctggctctcatccatcatgaaaggaggaaagtccaagaccgaatctaagagagccgatgccaaacttgctgtgaataagaagggcgccgccaccaagactaggaaacccgccggaaaggggaaggcagcgaaagatcctaacaagccaaagaggcctccaagtgctttctttcgtttcatgtaattataatatattggtatctcta

SEQ ID NO: 70606 - DNA, 162 bp, Glycine max
aaacagttttcacccataccttctcactttattaaaagctgtccgcccttgttaccgatgcgctgagtactaatacctttcctgtgccttaaaacaacttcctaactattcacactttaagttcgtagaccacaccttttcaaattttccaacgcttttctc

SEQ ID NO: 70607 - DNA, 202 bp, Glycine max
  unsure (1)..(202): unsure at all n locations
cccacgcctcctctnacacattttttttttttttcataanantgacctataataagatccagtatactctttttaattcctttcctccatcctcaccttactcttacatctaccattaaaatcctcacacctcaaatctttacattcatgcaataactaccaaattttttaactgttttaatttttaaaatttcccacctta

SEQ ID NO: 70608 - DNA, 271 bp, Glycine max
  unsure (1)..(271): unsure at all n locations
cctcaaatttaacaccatcctttgtggcgccaatgnnaagagccttggacattttatccgttccgttcaacccccacattttgtgtccttctgacaacgcgacctcatgcatcaacaacaacaacctccctctgaacgtccccttcgcccccttctcccgctccgacatattgttccgcttctccgactgtacccttaacttcaacaaatccaccccctccaaaaaccccgccgatgccgtcttcgacttttccaacgacgacttctttcc

SEQ ID NO: 70609 - DNA, 82 bp, Glycine max
tagatactaaatcagcccaaaaaggcagtatctaagaattcaagattttttctaaattaaaagcttgaatcatacgtgtcat

SEQ ID NO: 70610 - DNA, 165 bp, Glycine max
  unsure (1)..(165): unsure at all n locations
gcgtgcggaacgcgaacacaaattcattcaccttccgttcctacccttctctctctcnccacctcttcttgttgctctctcatgctccttctctcaaccaaaccaatccattattcatttgaatcttcttatacatcccaaaaaaacccaataaaaaaagggtct

SEQ ID NO: 70611 - DNA, 254 bp, Glycine max
  unsure (1)..(254): unsure at all n locations
cgtgcggaacttctaacacaaattttttcatttaccattcctatccttctctctntnnccaagccttagtcttactctcacatgctccttctctgaaccaaacccatccattattcattttaatcttcttatacatcccaaaaaaacccaatcaaaacactgtccttacaaacttctctttatccctaaaaaacaatcaaacctttccattaaaaaaagaaccccctttttttaaattcccaattttggtctca

SEQ ID NO: 70612 - DNA, 341 bp, Glycine max
gatactaaatgaccccataaaggcaatatcttataattcaaaattttttctaaattaaaaaggtgagtcatacctttcatgaagcagcatacgccaatagacaaagggaaagtgaagttatcaaaattcaacttctcctttttaaaagtctgattgcggtgcttaaaaaatttgttttttcaacaccaaacccaaaccctacttagatttcattctttctttcttcacacattcacataatcatctctctctcactttctgtgaggaactgacaatttgtcaccaactttaactttactacttacttgtccaattaactatttcattttcatatgccaaaa

SEQ ID NO: 70613 - DNA, 310 bp, Glycine max
  unsure (1)..(310): unsure at all n locations
ggggcgaccgaggcgtgcggttaatctttccttcctttacctttcttatcttcatttatctcatattaatttcaggcttggttgtattaaaaacgtgcccccctcaccaccataccttcaatttncaaagttccaagatattaataactaggactccatctttcacaatgcaactttccacaaatgtgaatttactgcctcaaatcttcatggttctttattaacatatgcatgccttcacatttcacatctacaagatacttgcttattatactctatcttctgttgagcagatcttcatactgcacat

SEQ ID NO: 70614 - DNA, 371 bp, Glycine max
  unsure (1)..(371): unsure at all n locations
atctntctttcttttttctctaatctttcctatctcgtgagaactgttttttttttatcttacccattcccacaaccatcctccaacatctttcatttcctctcctcttctttcttaaaatatattccattcacaaactacaattattgttcctccacacaatccctattcatgaaattttttcctattgaccattcatttccctccatattatccctttaaaccacccaaaatttcattcattacaaaatttttccacccaaatataaatagcaaatttaaaccatttcccttcatttaatttaactaaccaatttaacccctcctctaacccatttaccaataatttttcctttcaattttatttcccc

SEQ ID NO: 70615 - DNA, 125 bp, Glycine max
aaacacccttgtcgaccacaccaaaattaataacataaaaaagcataaaagcacaaaaaggcatgaaaaagggaaaataaaccattttgaagtcatatttgacaacttgattaaaggctgtcgtc

SEQ ID NO: 70616 - DNA, 322 bp, Glycine max
acgcgtccgcccacgcgtccgaaaagatgaaggattcacagaagatgaacatactactaatcaaaatttgcaagaattaggtcagttggagatggacagttctactattgcttttgtgcaaagattgagttcggagtcccccttgcatttttccaacagtttatttagcccttcggacagctagtccaccattccagccagatccccagttcagcattctaaatcaaaaccaaaacaccgacctaccaagtcagcctcttgttcagtttcttctgccactacacctgaaaaaacatgcacggggaattaagtagattctttt

SEQ ID NO: 70617 - DNA, 169 bp, Glycine max
cccacgcgtccgcccacgcgtccgacttactgccatgtccatggattctatggccacttccatcggagtctcggtccccgtgctccgcttgctcctctgcttcgacgccaccgggcccctcagcttgctctgccgctttctaccccgagggcttcccaagcacctctac

SEQ ID NO: 70618 - DNA, 79 bp, Glycine max
  unsure (1)..(79): unsure at all n locations
tgtggacctcacagtgaggctggagtttgtttcctcctacgantaaattaaaaatgcgatggaggacgaatcagagggc

SEQ ID NO: 70619 - DNA, 412 bp, Glycine max
aaaaaaaaaaaaaaaaaaaaaaaaaaaaaaaaagaaaaaaaaaaaaaaaaaaaaaaaaaaaaaaaaaaaaaaaaaaaaaaaaaaaaaaaaaaaaaaaaaataaaaaaaaaaaaaaaaaaaaaaaaaaaaaaaaaaaaaaaaaaaaaaaaaaaaaaaaaaaaaaaaaaaaaaaaaaaaaaaaaaaaaaaaaaaaaaaaaaataaaaaaaaaaaaaaaaataaaaaaaaaaaaataaaaaaaaaaaataaaaaaaaaaaaaaaaaaaaaaataaaaaaaaaataataaaaaaacaaaaaaaaataaaaaaaacaaaacaaaaaaaacaaaaaaaaaaacaaataaaaaacaaaaaaaaaaaaaaaaacaaaaaaataaaaaaaaaaaaaaaaaaaaaaaaaaaaaaaaaaaaaa

SEQ ID NO: 70620 - DNA, 318 bp, Glycine max
  unsure (1)..(318): unsure at all n locations
aaaaaaaaaaaaaaaacaaaanaaaaaaaaaaaaataaaaaaaataaaaaaaaaaaaaaacaaaaaataaaaaaaaaaaaaaaaaaatacaaaaaaaaaaaacaaaacaaaaaaacaaaaaaaaaaacataaaaaaacaaaaaaaaaaaaaaaacaaaaaaaaaaaaaaaaaaaaaaaaaaaaaaaaaaaaaaaacaaaaattcaaagacaaaaaaaaaaataaaaaaaaaaaaaaaaaaaaaaaaaaaaaaaaaaaaaaaaaaaatataaaaaaacaaaaaaacaaaaaaacaaaaaaaaaaaaaaaaaaaaaaaaa

SEQ ID NO: 70621 - DNA, 313 bp, Glycine max
  unsure (1)..(313): unsure at all n locations
aaaaanaaaccgacccacgcatccggttttntataactacattttctttaccattttttatgcaacacccctttaaatcctgcccgtgcccatataaatatacaattgcatttaacaactttcttaattatttttctaaactatttccttaagaactaaaaataaaaatttttaatattttaattattttaaaatattaaaaaaaatcattaaaaactcaattttattccttccaataaaaaaccttaattccttaacccctatcctccccacactttttaaacaatttcccttattttatatatgtcacatt

SEQ ID NO: 70622 - DNA, 267 bp, Glycine max
  unsure (1)..(267): unsure at all n locations
aaaaaaacaaccgacccacgcgaaaggntttaaaaaaaattaataaaaaaactctttcatacaacaaaataactttcctacccgctcgctttattttaaaatcactcccccccccaaaacaaaaaanttaataaaaaaatccttatattacccaacacaatactctacaaccacacccacctttcatcaccattctaaattactaatattcccttaccaatcaccctacctaacaataactcacccaaaaataaaaattttttaaac

SEQ ID NO: 70623 - DNA, 228 bp, Glycine max
atataacaaaactattttttcaaaaaaataaattacaaatttttcatttttaatatcattaaaactataaaaaaaaactattattaacacaattttatcccttacaataaaaaaacttacttacttaaatcctatccttacaacactttttaacataacccttcatcttatatttatcattaaattaatataattcaaaaaaataaatccatttttattacaccattt

SEQ ID NO: 70624 - DNA, 366 bp, Glycine max
  unsure (1)..(366): unsure at all n locations
aaaaaaccggaccgacccacacgtccgcccacccctccntcaaaattcttctttctttccctaccaattctttctctcaaccctgttgttttanttataaatcttcccaatcacaaaaaaatttgntaaatcaacaaaatcttttgcaccaaccccatcattctcttacaacatttcaaacaatcccgttaattttaaatccaacatatccttcaatttatcccaaaaccctgtaacaaactttttagataactatatattattccattcctttatatatttctccacaattactctcatattcaaaaataccctcttttcaaaaccctttttcacaaaaataaaaatttttttctttttataaaa

SEQ ID NO: 70625 - DNA, 227 bp, Glycine max
  unsure (1)..(227): unsure at all n locations
aaangtggaaaaaaatttaattaaaaaaaaaaaaaaaaacnccgccaagctatatttttaaaangacgggcccgccccnnnaaaanaaaaaaaaaaaaaaaaaaaaaaaaaaaanaaaaaaataacaaacacataaaaaacaaacaaatacaacaacaaaacaaaaaatcaaaaataaaacaactaaaaaaaaaaaaaacaaaaaaaacaaataacaaacaaccaac

SEQ ID NO: 70626 - DNA, 233 bp, Glycine max
  unsure (1)..(233): unsure at all n locations
cccacgcgtncncccacgcgtccgctccaaaaagaagaagaaacttaatcgatcatcacttgacttggctaatacatcatggcagacgagacccagaacaagtatgagagctctgaggttgaggtccaggatcgtggtgtttttgactttctcggtaagaaaaaggatgaagaagacaagcctcatcctcaggaggaggtcatcgccaccgagtttcaaaaagtcactgtctc

SEQ ID NO: 70627 - DNA, 405 bp, Glycine max
  unsure (1)..(405): unsure at all n locations
aaaaaaaacggaccgaccgcacaacataacggaaaaaaaacncaatttttattacttttttttaccaccaaaaaaaaaaaaaaactctgcctttttaaaaaaacacacccccccananaaaaannttanttctactcaaaaaatacaaaacaaacaacacattgtctttatcttctttcctcttcaaagtccaattattttttaccttaatacatctctcttaccaacaatttaatcaatattaactttattatccacctcctacaaaaacactcaaacctaaaattcattcctttacacatcctcctccatactcaaatttaccctcaaatttcctaaaattaacttaaatatttaaattcctattcctattccctacaaaaaaactttttaaaaattcttttc

SEQ ID NO: 70628 - DNA, 195 bp, Glycine max
  unsure (1)..(195): unsure at all n locations
aaaaaaccggaccgacccacgcgtacgctntttnacaacaanaacttaaaattattttttaatctnatcaaatcctcataacctccgccttttttttaaatcatcccccccccttcaacattnacatttatttatacactatataccccaccaattttcctttctttcccctaaataaaaaaaaaattaatttat

SEQ ID NO: 70629 - DNA, 209 bp, Glycine max
tttattacctaaaaaaataaacataaaatcatattcccatacatataaattatataccaacaaaaaaaatatttaattactctattaaaaaaaaaataaaaatccatttttttgtaataaaaatactattccaattttaataataataaaaaaaaaaaaaatccccccccttttaaaaatacataactaccttcgccctacaatcccaa

SEQ ID NO: 70630 - DNA, 337 bp, Glycine max
  unsure (1)..(337): unsure at all n locations
aaaaaaaaaaaacggaccgacccacacgaccggannaaaaataaataccaaaacaaatttatttaaacacacaatccaaacatatccctctccctttttttaaaatttccatcccacccaaaacataataancctaaaaataccaaaactatccacaacaaacataattataactccatatattactttcaaccatcccatttataaaccacacaccaacataacatatacaccaccaatacaactccacatacctccacctaattaccaattaaccaaaaaataaatactctaacactatactattatctaaaaaacccaccaacaaatttttcaa

SEQ ID NO: 70631 - DNA, 234 bp, Glycine max
  unsure (1)..(234): unsure at all n locations
aacactctctctcataacatctcgtccgttttattaaaatcnccatccccccatttaaaaaaatttaccatttaaataaccaaaattccccttcaaaaaaataatcttcaactttttcctatcaactatcctttcatcaccactnattacattacatacattttcaaatacaacaccattcattnccaataaaaacatttttatattaaattaaacaactctaatacccttctc

SEQ ID NO: 70632 - DNA, 415 bp, Glycine max
  unsure (1)..(415): unsure at all n locations
ccacgcgaacggccacgcaaccactcaaaaaaaaaattctttctaaaatntacnaaacataattatctgttctttttnttatataattagacccccataaacnaacaatcaaatccttctaatcatttctataataaacaacattaacatttactcatatcacattatcactttacttataatttacncatatcaactcaataccacattattcaattaatattaccaaaatcaaanccttatcctacaatattctatcaactacattactcataacatcattccacaactttacaaaccaaattttatcaaaccttaaaaaactacacttctccttacaaaaatatcccatatcacacaataactcttaaatactatacaataccatattcttaatcaaccaaatatacaattt

SEQ ID NO: 70633 - DNA, 180 bp, Glycine max
accctacctaatcaaaaatcacccatccacacaaccacacattctcacccctacaacacattcctccacatactacccaatccataccttatctctacacttcttactacttcttaatctcaacaataccataattcacaataaaataatactaataattcaaatatattaattacttct

SEQ ID NO: 70634 - DNA, 283 bp, Glycine max
  unsure (1)..(283): unsure at all n locations
gcccacgcgaacganaaaaaaaaaaattaaaaaacaatgttgatttctccttctacttcatcatcatcagggtcgattttttaatactgtgtctctcccccaancaaaacccancccctnnnctctcnattccnanaaacactaatcctaactccttcaacataacaactacaanccactctccnacttcccctccctcaccnccncctcttccaatcccaaaaaaaaaaantcccatacctactccctcnccnaattcacctccaaaccctacacctccttt

SEQ ID NO: 70635 - DNA, 288 bp, Glycine max
  unsure (1)..(288): unsure at all n locations
aaaaaaattaaaaaacaaattttttttactcctaacaactacatcatcatcccgctcgtttgttttaaactgnctctcctcccaaaacaaaacccancacatnaactctcaattcctaacaacacnaanccnaactccttcaacataacaacnacaatccactctcctacttcccctccctacaccccccctcttccaatcccaaaaataataatncccacacctactccctctccaaattcacctccaaaccctacaccttcttttcctaccaatatcccatcatcc

SEQ ID NO: 70636 - DNA, 221 bp, Glycine max
cccacgcgttcgcggacgcattggcgaagcaatcgtaagtcagctgttctgtcccgcgggggcaggggacctgtcttggtggccaaacaacctcaaaaacattcatcaacgttcactattaatccattcatcattaagtcagaaaataagggtcgatttttttatccttggtttacttctgaaccatcatggacgtacccagttcctgggatgcccttctg

SEQ ID NO: 70637 - DNA, 289 bp, Glycine max
cgccggcagctcgccccgcatggcccacccccccttcccaaacaccgcctggacccgcatgcagctggtgttctgcggtgcgctggagacctccaagctgaagcctgtcccatcctcttcctccctcttctccgacacgagcaacggtctgagcgtcgcccggagtgttgtgtacgaagggactctatctgctgggggttccttcgaatgtctgccccggcgggggtcccaccccttgtcccctggcgatgagaaggcgttgtactttcggtgtcgatcgttgggcggg

SEQ ID NO: 70638 - DNA, 257 bp, Glycine max
cgaccacgcgtgcatctgtatcgaacccttctccaaatttccgatcccaccgcagtcgcgtcctgctctgtgctgtaccctcggtgtgcgaaggccgcactacgaccggcacccccctgaaagcatcctgaagggcctggactctccccgcctcggctgcaccctgactccccgggcggacagtccttgaggccctcagcagacgcgttccgaacccccccccatggtgtcacgcgggaactggtttcgggtgctga

SEQ ID NO: 70639 - DNA, 356 bp, Glycine max
cccacgcgtgcgctgacgcatgttcgaaacaatcatatgtcgtctgttctgtcccgcgggggcaggggacctatcttggtcgaggagcaacctcaaaaacattcatcaacgttcactattaatccatccatcattaagtaagaaaataatgttcgatttttttatcttaaatctgcttctgatccatcatggatgagccaacttcctgcgatgcccttcacaaacaggcaccaaaacttgaagctcagtttgatgagcacatcaatccttatcgtaaaatggcttctacccatgtgtctacaaaagctgcctctccacaaagtgatctatagtctcttattgagcctttactcaaa

SEQ ID NO: 70640 - DNA, 236 bp, Glycine max
cccacgcgttcgcggacgcgtgggcgaagcaatcgcaaagtcgctgttctgtcccgcgggagcagacgacctgtcttgatcgcccaacaaccctaaaaacattcatcaacggtcactattaatccattcatcattaagtcagaaaatcatgatcgattcttttatctttgatctgcttctgatccatcatggacgtgccgagttcctgggatgcccttcgcaaacaggcaagaaaa

SEQ ID NO: 70641 - DNA, 158 bp, Glycine max
caccaacgtcaaacaacccatatatctctcttctatttcttcttcttcctttaaccattaggcaggtcttgcaccttcatggaggcccattctctaacccaatcctttccaacctctattaatccatctatccactagcacggacattgatcccacct

SEQ ID NO: 70642 - DNA, 321 bp, Glycine max
agttttcgtacaagccattaagaggacaacatcaaaattctgtcttatgcacaactgcaggaactgagtcctcctggcaccatggaacaccactaggctcactctctaaaccccattcaccaaaccattccaggaacacaccaaattgaagacatgtaacaccagaacatggaacgtgcaaaccaatactacactgatatggccgacctcgatcaacagacaatggacgcacttgcaccatacattgaacttcactacaacatctttgaatatgatacagcaccatatgcataagaagtgacagaactcatctcatctgaa

SEQ ID NO: 70643 - DNA, 189 bp, Glycine max
tcatactatcactcctaaacccattactactactcttttttattcacttaacattattatcatggagcgcctctatttaatagtctgcctccccttaaatctaaatttaaaacactcaataaactacactttcttaacaacctcataagacatttacccattttttcaccctattaatatcgtataact

SEQ ID NO: 70644 - DNA, 332 bp, Glycine max
tattttttttcgtccacattccaatggctgtaaaggagaacgtccacccccaagtcatcggttcctgcccgactccgtcgaaggctttgaaattgtccgaaaagtcttcgttgaaggacgttcagacagacaacgcagccgttccactggtggtggacgagacctcttatcccgaaccgacctgtgagttttatggcggccttcttggcccacagctgccagaagctgaacggtttgttctggatccaactcttgttgaggagtacaggcacaaaaagcctccattccggttcaatggtctcggagaagttgtgtaccttcgcacatatgcc

SEQ ID NO: 70645 - DNA, 283 bp, Glycine max
attctgaagctgccagaccgaataaattgaccatgacttgacattggatttataggatcttggacgccttcacagcatcgccgaaagacctctaacactctctcttctctccttccaaatatcgtaacctctacaagttatcaccagagaaagcttatgcgcacattacatctccgatttcaacctgaactaacgtggcaccttcacctgcactgaagtatgctgcactcgcgtcactcaattgcgaccacaatagtgacacagtttagatatatgtcttaat

SEQ ID NO: 70646 - DNA, 423 bp, Glycine max
cccgtcccgacccgcgcgtcccgttcatctttattccactgaatacaacatgcacatattaacgtataccctatataatctcgatcgtcatctcatctatgacgggtgaccatatcccatgtgaatctattcattcaaatacctatccttatacatatatctcaataatctcaacattcctcattgtgaactacaaaaactaccctacatccatgcctcaccatggctgatcctaagctacaaagaccactcaattcatgataacacccttctgcgtgactctattataaattatctcgtccaccatggaatcaatgaccattcggaccaaaccgcttagatcttttcgtcatccattgcacgattacaaacatgaccattactttccaactaactgccatttcattaatttccctttcattt

SEQ ID NO: 70647 - DNA, 116 bp, Glycine max
atcgctcctagagcgactaattcgggtatgttttgtggactgatcaagaggaacttggtgggctatatagaattggctggaggcctcttacattttgtggtgtatactagcaaaat

SEQ ID NO: 70648 - DNA, 141 bp, Glycine max
gaagttgcgagagtgaagaaatggcgcaagacttggcattggatttggaggaacttggccggcttcacagcattgccgagagagctctaaccctctctcttctcttcttcgaaattcgtaacctcgaaaaggtatcgtcag

SEQ ID NO: 70649 - DNA, 266 bp, Glycine max
gaagttgcgagagtgaataaatggctcaagacttgtcattggatttggaggaacttggccggctacacagcatcgccgagagacctctaaccctctctcttctctactccgaaattctgaacctctaaaagttatcgtcagaggaagcttgtgcgcatattacggcaccgatttcgaccggatctaaagctgcaccttcacctgcgcttaagtatgcggtactcgcgttcgtcatttgggaccactatagtgacaatattaaaata

SEQ ID NO: 70650 - DNA, 286 bp, Glycine max
tcatacgaaagctcccaaaccgactaaatcgctcatgttttttcatctgaacaatagtaacttggacgcctacttataatcgcctgcagacctctaacactctctcttctatactcccaaatacttaccctctaaaaattactctcttacaaaactactccgcatattacctcaccaatatcaaccaactctaatacttcaccttcacctacactaaagtatactgcactctcctcattcagatctcaccacacatattcacaacattaaaatatctctattaatt

SEQ ID NO: 70651 - DNA, 308 bp, Glycine max
cgacccacgcgtgcgcgactcgtgggcggactcgtgggcggactcttggtgttgctggcgcggtacgcccacggcgtgagtcagtactgaaagtacgggctgctgctggaggactagacggagcaccccatcatgttcgccacagtcctcgagcgcctgcgcaacgacttctaccgctgcccccaggccttcctgcacgagctggagtggctgttcgacacggtgcggcggcagcagcggtacgcctgaaaccatgtgttggcggagtccatgctgacccggctgctgatggccgtgaaggacattct

SEQ ID NO: 70652 - DNA, 255 bp, Glycine max
gacccacccatacttaaacatccataccatacataccactacttttaactttattttacttatcacgtgaatcaagaacgcctcactaccatctcttttccaacccataatactccttcttccaaacaatccagtacaaacacattatcatgaacctaattatacatctatctccacatctactctaatataacccaattactctaatattaacatatctataacataaatactcacttaaacatacctataaaa

SEQ ID NO: 70653 - DNA, 89 bp, Glycine max
gacggtgctatagcggacacgccggccgtgtttgaggataagaccgagttcaacgtggtgatctacaaagtaccgaccaacgctctaat

SEQ ID NO: 70654 - DNA, 305 bp, Glycine max
gtctatttttgttcagatctcactcgcattcgctatgtggacgaagtaccttttcctgggagcgagatactcccatctggtctccggggcatggatagaccgcatacgtctgttgtgggacgagcacaaagagaaattactgcaccgctggaacgtgactgaggatctgacgcggttaaagtgcttcgctcataacgtggcccagatcaacaccttcaacgcacagtaggaggacagcgcgcagtactggctgaacaagttcgctcatctgtgccacgatgagttctgacgccagtacaccgggc

SEQ ID NO: 70655 - DNA, 303 bp, Glycine max
acgcgtgcgcccacgcgtccgattttttttcgcaatggtgtggctgaatttattcttgtggtggagcagggcggggtggctgccggcgggcgccgccctcctccccgggccgcccaccgggttctcggtgtccggcgtggcgtggcgagacgacgacgtcaacggggcactggaccagtccgagaccctgctgagcggggtccgggtgtacctgcgccgctgcggtgacccgatgcccattacccccgtgcagaccaccgacatgtccggcacgttccggttcaccggcgtgacggcggacac

SEQ ID NO: 70656 - DNA, 128 bp, Glycine max
  unsure (1)..(128): unsure at all n locations
ttccaattctaaattcctaaaaactacatccaatccttcttctaaactccatttttctctcaaattntccactccaaaccttaaaaacctactattcattcatacaccccaaatcaattatctctaat

SEQ ID NO: 70657 - DNA, 223 bp, Glycine max
cgacccactcatacacccacgcgtccaaaacaaacactatttcattattataacttcgcagaagataaacaagcccgatttctatataaagaaacgtcgcactcccatacatgtcttccttccatgccttcatcaactacttaaacaccaactcttcttccactcaccagcacgacaattactatgacaacttctctagctacaacagctactcctccttcac

SEQ ID NO: 70658 - DNA, 345 bp, Glycine max
  unsure (1)..(345): unsure at all n locations
aattccccgtccgacccactcatactcacactcctacaatacatacactactccattattatcatttcacttaacatatctaagcacgactctatatcatacgcactcagacctcncacacctctctcttctctactccaaattcacaacctcaacattaatcttcttacaaaccttctccccacattccctctcccatttccacctgatccaaaatctacccttcatctaccctaaaatattccgccctctcatctttcatcttcgaccactataattacaaatttaacatatatctcttaatcaactcaatcaatcacaataactctcaatcctactttaaat

SEQ ID NO: 70659 - DNA, 246 bp, Glycine max
  unsure (1)..(246): unsure at all n locations
tttttatgaatttctgattntataccaagtacgtttaattcnttgaacaaacaaacaagtattttttcgtctttcttattctttagttatcatattcttagaaatattatcatgcatatgtcttctaattttccacagtcaatactgttgcatataaatcttttcactagttacatacacatatcagtatttcaattaatcttcttttattttacaggtaaaaattttggttattcttcttttttt

SEQ ID NO: 70660 - DNA, 354 bp, Glycine max
tttcgattatttcttttctaattttttttctctcccttcccatttttacagagttcatggttacaatcaccacatcccgggcttaccattctcaacatcatttttctcttttattttatgccacacttgttttgtcttattcactacttttattaaacatttacccaacccttcatatccaacaccaatttttcaccttatccacctcttcctctttttccacttttcctcaatcaccaatttcacactctaactaccttcacattctctacgcttttctctatattcaaaatatacatatccctttctccactatccatcaacaatctcatcaaacaaatcacacccaacttt

SEQ ID NO: 70661 - DNA, 318 bp, Glycine max
cggacgcgtgggtctttttttttgaaaatgtgaaggctttgcgggggatgccttccatcgtgcagggaaatgctgttcgggcggatgctgtcctggctccatcgctctttcgttccacaggcgtccgggaggcggtacccacctgcgggaaacgtctaaacggtggccggggcagtcaagtggagtggcgtacgcagaggcaaaccaatggatgccccgctccactgcatactgagggcaaaggttgtaggggacaagtcggggtgccactgtccctgtagttgcaggctgtttggggggtttgggggactatatctc

SEQ ID NO: 70662 - DNA, 342 bp, Glycine max
cccacgcgtccgcgaaaccacgatggacaggtttttgatgaatttctgattggtgtgcctggtaggtaaaatgcgttgaacagacaaacaagtgttgtgtcgtctttctgagtgttgagttgtgataggctgagaaatatgagcatggatatggcttgtagtttgccgcagtcaagagtgttgcatggaggtctggggacgagttacagacacagatcagtatgtcagttaggctgctttgattttagagggagaggttttggttgtgcttcttttggggactcgagaagtgtttcaagactgcagaggagcaggatgaatgtttctgctttgtggaataat

SEQ ID NO: 70663 - DNA, 255 bp, Glycine max
aagacattcttcacatcaatttatacattttttttctcaaaatttaaactgttatccagttagtttcaaaaccaattccgaccaaccctattatcccaaccaataaatctcaattattcaccacctatcacaaccaacacactacaatctccattctaattttctaactctatataattctcacaaattatttcctccttctttacaaatccaatctatctctaattcctccatccccaaattttacacctaaaa

SEQ ID NO: 70664 - DNA, 364 bp, Glycine max
  unsure (1)..(364): unsure at all n locations
gcggggcgtcacgtccacgcgtgtcgctaacaccactgatggacagtgttttttgatgacatttctcgattnggtgtgtcctggtagataataattgcgttgggcaggacagaacaagttgttgtgttcgtctgttctagagtgttgagtctgtgatcaggctttgagaaatactgagcataggatatnnggcttgatagtttggccgcatgtcaatgagtagttgcataggaaggatctggggcacgaagttacatgacacgagaatcagtagtgtcaagttaagtgctgcttttagatctttaagaagggagaaaggttttggttagtgctttctttttggggaccttcgagaaagtgtttc

SEQ ID NO: 70665 - DNA, 216 bp, Glycine max
tctctccatctactatctctcttttccatctcttccaccaatatcttcttcaaaaatcttttctattacattttctaaaatctattttttaaatcatattataaaaaacatcataacctaacttcttaatacaaccacacctcttatcaatacaattcaaactctaattacaaatttattcataccacttattattacctattctatactattttc

SEQ ID NO: 70666 - DNA, 381 bp, Glycine max
ctattttttttcggtgctccatgcttagcatcccgtgctacccatgcctcccatcgttgggagccggcacagcatttccacctgcccgtgcattactcccgccgcccccgatcacatcagtgtccgccctagctcctcaatgtgtttcttgtgtacccgagccagtggtgcaggttcagtcatatcccgtcttcgtatccggccctccggctgaagccccgagggtggatgtcaaagtggtggatcggcaaggccaggactgcggctaccttcagcaggagctcacgcatgtgctgctccagctgcacaccgaccagctggaggaggagcggcagctgcagcaagtggccgacctcagcgggaagctgcgctacattcaag

SEQ ID NO: 70667 - DNA, 290 bp, Glycine max
cgaaccactttctaaatcatatctccatttaaataatatattttacttttcgcgacaggttcatttactaatcatgtttgtcatccattatttctcttttccaatacagttattactccttttgatctcatcaaacttcttctacataccattaattccaacctctacattctcaatataaaaatccaaccctacaatattatcttttactgctttttactattttattcctaacaattaccactttccttcttacttttcaacttatttaacttcttacgatattcccc

SEQ ID NO: 70668 - DNA, 342 bp, Glycine max
acgcgtccgatttatctcgtgaccatttcatccgggattcatcatgtcttccccgacatcttcactgagtgcaggtgcaacattggcatgtttggggctgtgctgacgttccatattttcttccacaagctgaacgagattgctatcctgagtgctttcaatttttgcgtggctatcaccatcactgtggtggtgtgctactagtcagatgtttggaggaaccccaacgcacatactgatatcatcaacatcatccatgaccagtatacctaatacatcttgattgcgttccccaacattgcatttgcgttctgcatgccagtacattcttccaccaattta

SEQ ID NO: 70669 - DNA, 325 bp, Glycine max
aattcccgaccgacgcgtccgcttctcgtagctcatcgaaaatgcaagcttttctacgaagaatctcaacagccacaatctcgacatctaatcaattcgacgctcttccatccattattgccgatcaatttccgactactagactgccattctcgagccttaagtcccggatctgcgaaaacgaatatctcaagccccattaccctgtattactttcggatgtcctgacattgataacactgacatgaagccctttaagatcttcttattttattaccctctctaatatcttgcctattaattatttttcctctccatcttttaa

SEQ ID NO: 70670 - DNA, 224 bp, Glycine max
acactttaatcttcaaaatcttcacaaaccaattctacacagacttaaccacatgaaaccgtagaactactctaaaccagatctactcctctatacatacactcaaccaacacattacttcaactacactccaatcgaatacccacttcttcctatcatacctcaacaattccaactcctaactatcctagcaccagaagaacatcttcaacttccacaatcac

SEQ ID NO: 70671 - DNA, 200 bp, Glycine max
cccacgcctccgcccacacctccggaagatagtaatatacacttacggattctacagagcaagaaccatttgtaactcgcagtacgctcgtatctcactaatataaacgacaaatacattgacagacacaacactttcgattcataacaatttcaccaaacagttgcctttacagaacaaagcatctactccaaatatca

SEQ ID NO: 70672 - DNA, 323 bp, Glycine max
ctattttttttcggccgttgcggccggcctctggcggtgtgccgcccggtacatggccagattccgttccaacttcatccgctgcccgtctgccccaccgggcggcgacccttccccatggtcaccgccgacggtctgatcggcaactccctgctggccctcagctcggcttggatgccccgctgaggcgccaggccggggctgctggccgaccccaacgacctgccggcccccgccgagccccggacccggcaagggcccagttgaaagtgggcttcgagtaccgcatgatagcgccccgacctccggctgatgatggaccc

SEQ ID NO: 70673 - DNA, 212 bp, Glycine max
gtgcatgtggcggtgatgtttgcgctgcactcttcattgccatcgcactgcttccccgacggacgaggtgggcttcgtggcggacatcggcttctaggtcccgaaactgggcaccacgctggcgcacgcgacgcacgtcctgatgggcttcttcagcatgtctgttgtggacctgttgctcgtgatgtacatcccccacgtcttccaccggc

SEQ ID NO: 70674 - DNA, 186 bp, Glycine max
  unsure (1)..(186): unsure at all n locations
acgcgtccgcccactcgtccgctcgctttattttcccttcccttcatctccacttcagaatgatatcctactatgtatgtctagccgaaacaagtccaacaccatcaacacactacttcaatctcaatcgntcacatttaaaaatgtttttgagtaatgggaaaacttatgcaccatttccaatta

SEQ ID NO: 70675 - DNA, 278 bp, Glycine max
  unsure (1)..(278): unsure at all n locations
acgctcccaaactcattcttcaccttctaaacaaacgcaagaagcaacaatgcatttttttgttggctgtccaaaaaacggggctagctaatcttccatataatgcaaactgaaaagtccattaaaatcttttaaagctgggagtaaatggccgtctcttaaagaaagctgcaaactttttgctcgncatccccgtcacatgngcaacaagaagaatctgngtatatttttaaaatggccatagngtttcatggcagtggaaaaggatgcaataccca

SEQ ID NO: 70676 - DNA, 362 bp, Glycine max
ttttatttgaagacccataacagaccactttttgctctgcattatctgcttgtctaatgtgtgagtgtccttctcaagaaggacaagaatttttaccgcaatttaacaacgattatcaacaaacatcaccgaatgccgcgtatgaagcagcttgcccgttactgaatcaagcgattcaaatatgttgccagaaacactcataactctgcaacgccactgatggcgtttggatatgcttttagttaccactttctctcttggattagcttacctattgctccttttctattagtggctcctgtcccaccttgcttttggacttgagctttgtatatttctgattgttcaatgtctagtgtgtg

SEQ ID NO: 70677 - DNA, 228 bp, Glycine max
gtgaatgcgtataatacgattctagagaaatttgcgccaacatgcagtgtgtgtacagcaccgtcatattgtcgacgacggacgagctcctagtcgtcggctgccgaactacgtcctcgaagacgacggcagaggagctgtagacgcgcttcgaggagaagaacctctgcgacgtgtcctgagaagtctgagagcacgtccggctggattatacccaccacatcgagt

SEQ ID NO: 70678 - DNA, 346 bp, Glycine max
atgcagacgaatgagttgagaccactgtatgttccgcataaacggcttgtctaatgtggggcgttttcttgtcaacaagggcagaacttttggccgacatctaacaaccattgtcaacaaaaatgaccgaatgccagctatgaaacaggttccccgatactaacccatgcgacataaacatggaggccgaaacacacgtacatctgcattatacccaccacaactagacgtccttttaggtaccaacctttgatttcaatgaatatacgtattgcttcttttagattaccctctacaattccacaaagctgaaacaacagcacttactgtactactgaatcaatca

SEQ ID NO: 70679 - DNA, 366 bp, Glycine max
ctcatcacttggcataacatttcaaagagcgtcgggttctccacaacgtcttcaatgcacctctaacccattctcttctctcctccaaaattcgtaacctctaaaagatatccctacagtaagcttctgcgcatattccaccacctatttccaccgtaactaaactgtcgccttcacctactcttaactatgcaccactcacatcaatcaattgctaccatcatattgacacacttaagatatatccgttaatgcatgcaatcgattaaaataaatctgaatccgagtttaactcgacatcattcgatgctaagtaccatcatgttcaaaggaagaactaccgatcttcaatatcaaaattccaca

SEQ ID NO: 70680 - DNA, 334 bp, Glycine max
aggacgcgtctaagaacctattctcactgcttatcgactatattgaatcccatgctgggtgtacttatacaggctggcatgatcagatgtgctatgatccaacgaaaccaaactacaggctgcaatttacacattaacactatactataacgtgcaaactatcattgtataacaattcagtacataacatacatatggatgcactacaccgtgcattcacaacgtatgcattttcatgagacggtgcagcactctaagaccctcatctatgctgaaaatccccaaaacagatttctaaacgcctactctctgaaaattacatagtaagaacact

SEQ ID NO: 70681 - DNA, 351 bp, Glycine max
  unsure (1)..(351): unsure at all n locations
acgcatcccatgactcgtccgggctaatttcatgatccgtttgtacacacactctctctcatagatgataggtttnaatattaggttctgacgtgaccagatctgcaatgatagaccactcactgaccacgctaccacttctaacgtctcatcatgaactcgctatgtgtactcaagcacccatgctcactgattacatgcaagacctaccaccgttccacatctttcatcaacccaaccaagcatttgcatgtaagctagagagcttcttcgaccctactcttcaagcataaactcgtctcaagatgatgaaccatgaactctgaagaaaatccaagtgatgaatttaat

SEQ ID NO: 70682 - DNA, 194 bp, Glycine max
ctttttcactcccacacgacatacaatacactttcttctaaaccctactctacttaccgatattctacccacataattccactcatcactctcactttctctaaacactcttactattcaatcccttacttatctccttcaatcgccacctaacaacaaaactaaactatacccactctactttttttatctca

SEQ ID NO: 70683 - DNA, 189 bp, Glycine max
tccacgcattcgtccacacctacgttataacttacaataaaatactcatcccacacgcaatggtcttatctctctcctctcatcacttcatatattcacaatttctcttccaccgttaaaccctagacccaactgccaacccctgatccaatccatgtccctcaaccacctcctatccgtgtcccacca

SEQ ID NO: 70684 - DNA, 383 bp, Glycine max
cccactcatccctttaataactacacatccctcactctttcacaccaaccttacaccaagcacaatggccaagctcctaactcccaaaacctatctcgtctcatattctaccctctctactctccatccatatcaccaacatccacttcgaatagcttttctataactcacagtaaaatcgattacataaaccacactaaactaaagatcataacttctctattcactgaaactacacctaatccaacgaaaacacacactcttatcacaaacttattcacctactatacacttactcaacttatcctatttcagctgagtacccctaattcaatatcactacatatacacttatacatcaactcactcttaatctcaaacac

SEQ ID NO: 70685 - DNA, 269 bp, Glycine max
tcttattctcaaagttatccatcgtactcaatccacactacaactcactcaccttatactgaactttttccatcatcataaccatcatatcattatcaatattaaatcaccactcacacaaatacacattctcaccctactctagtcttaaatacaaccaacacaatttctctataacctattttcatcttcatctttattctacttacttctttcttaaatttataccaccccttcttattacctctaatctatcttcattcaaatta

SEQ ID NO: 70686 - DNA, 104 bp, Glycine max
atctcacaatatgcttcttcttaagtttcatgactcccactaaacacaaacgggtcgtacaacttaaccctgagagagccctaccattttccattttaaattca

SEQ ID NO: 70687 - DNA, 398 bp, Glycine max
attcccaccgcaacccacccatctcatctacccctgctcacactcaccattctttattacatctatttcactaatggtgggaagataacatcaaacatttgccataacattccaattcaatcctactcttaacttttccatctcaacctctataacttctattcactttcttacactttttctaattccaacttataaccgactctcactttgtctccaattattatacccattacttcatactctaaaccctacataaacatctcttcttaattctaaaactctttctttcactcctcaaaccttacatttatgatcttcctttgaacaccaattacccctaaaagcatattacttctaaatatctaaaccctacctatcaatacatctctacacac

SEQ ID NO: 70688 - DNA, 299 bp, Glycine max
cgcgtccacagcgcacgaatatcttgctgatcgtttcgatccgagaaaaactctgtaaacatacggactgttcaatacctccttacgggtgacgagcttttctcttactccttccgttacaagctaattccaaatgacatgctactcaaagttgagggaaagtgttttattaacagagcagttaatttatacattattgcaaaccctcctgctgagaatgaaacataatatcactactctaatcatacagctaatcaagatgcttacacttgtgacacattcatacttcatcatcaacc

SEQ ID NO: 70689 - DNA, 266 bp, Glycine max
cacccaacgcttacgcacgcgtttatgcgacctcatacctcttctatactatcgcctaggttcaattcactggcgcgtcctatacaacctcatcctactaaaaccctatcatcacccaacttaaaccacttccagcacatccccctttctccatctctcttaatagcaaacacatccttacctatcgaccatcccaactattacacatccttaatcccgaatatgaccctccctgtatctgaccatccagcgcagaaaatgtgaca

SEQ ID NO: 70690 - DNA, 312 bp, Glycine max
tcccactcgtcctcccactccttttattttttgaacaaaactactaaaccaacgtcttcttaatatgtatccattcccagttccaatttccttccaatcatctcttaaacaaactaatcctcaatacaatactatctaatctcataaactagtacagatacttataactaacctaccttcatatcatatccaatcacaattttgtctacaacattccatatatcacctaataaccattattaattaaccatacactattcaaaacttgccttaatccttacttcaatactccttcttctaacacatattacc

SEQ ID NO: 70691 - DNA, 236 bp, Glycine max
cccacgcatctcaccactcgtcctcccacacatactactttatgaccaacaatcctctaacaacgggatgttgctaccattccattcacagaccatgccactcccatacaacgactcaacaaactactcaacaattaactactatctaatatcatacactttttaatgatacccataactgctttctaatcctaaagataaaatacatctgtcccattcctagaaaagcttgtcat

SEQ ID NO: 70692 - DNA, 240 bp, Glycine max
cccactcatccacacacacattctcccacacaaccaatttcctacctcacccttccaatatacaagaccgacataatacaatcactggcagaactatcactctccaacactctaactcacataccatatatcaaatcaataccatctcttaaaacacaccaatgatactaacacctcatccacgacccatttattctcacaacaaactctactatcctctacccactactcattataaca

SEQ ID NO: 70693 - DNA, 341 bp, Glycine max
acccactcatccaaccacacatcccatttattctataattttagtctatgttataccaatcttaattccggaatgtttattataaaattactgtcaaaacaagttccaataccataaatttcttaattcttttttcataattttttttactctactctagacccattctaagtttctcttctattcctagcttacttctatgtccttttcattgctttaattgctgaataatcctttaaaaatcttcttcttaaaactccattcctttagctttcatttcatttttttttactctttccttattacttttctcttatattccttccttttaaatttccaca

SEQ ID NO: 70694 - DNA, 197 bp, Glycine max
catccaagaacaacaagaggaacactaacaatctttttttcttcagaagaccaatcttcctagggacggcttcattaaaaagcttggcgatcatttttacaatcctgcccttgaaaacgatgagtccaatactctctcgtcgttgaatactactcgtggtcacaaatttcttaataatgctcaacttactaacaaaa

SEQ ID NO: 70695 - DNA, 420 bp, Glycine max
  unsure (1)..(420): unsure at all n locations
cggacgcgtgggagaacctattttcactgttttttgaagaaattgtatcccagctggctggagtgtcctcgctcgtatgataagttgcgctttgatccaagtaaaccaaaatgcaggctgttagttacacatgatgactatagtataacgtccaaacttccaagggagagaacttctgttggtaccatacttagggatccagttgaccgtgtttttagtacttatgaattctcaatagaggttgcagctagatttttggtgcattcaaacttgacttgccgaacacaaataggttgactcctcacctattttacttaagagtaagcacactggatatctggccttggaagtatatggttccatggatgatggaagacctaattgctaggagagaagctaggtacaatangggactgaata

SEQ ID NO: 70696 - DNA, 298 bp, Glycine max
  unsure (1)..(298): unsure at all n locations
acgctcaccagtttcaccggaccaatatcttgttttttttaactatccaagaaaaactctatctggatgtttttttaccagtacctccttacacgtcattagcttctctctaactccttccgctacaagngaaattacacaatgagaatcgcatatgaataaactttaccaacaaatcgaattattaaaacgagcacttgatctatacattggtacaaacccttctacttacattttacgataagattatggatttcatcatccaccttataaacttctttacattgattacacattc

SEQ ID NO: 70697 - DNA, 350 bp, Glycine max
agaaaatgtaattttcagcactgtccaggaaatttaaggattgtaattctttatgcgctcatgttattattaaaaaaaaaaaaaaaaaaaaaaaaaaaaaaaaaaaaaaaaaaaaaaaaaaaaaaaaaaaaaaaaaaaaaaaaaaaaaaaaaaaaaaaaaaaaaaaaaaaaaaaaaaaaaaaaaaaagggcgcccctttaaaagaatcaaagttaactaacccttgcatccaacgtaaaaccttttaaaaagggtaaccaaaattaaattaattgcccgtctttaaaaaactttgaaactgaaaaaaccttgccttaaccaaattaaatccctttgaagaaaatcccctt

SEQ ID NO: 70698 - DNA, 443 bp, Glycine max
tcgacccaacttccgaacacccttgtacaccacaccaaattttattacataaaaaagcataaaaccacaaatgtacgttttaaaaaaaaggataagccattttcaactcatattttcacactttattaaaacctttcatcccttttcactcatacctttttttctaataccttccctattcataaaaacaaactcccaactattcacacttaaatttcttacaccacaccttttcaatttttcccacactttcctcaaataaaaaatcattcctactccacacattttacttttatttaaaactcacttgtcattccctcatcttcctctcctcaaatgttaactttcaacaatactttaccctcccccaaaatattaacttccttaaattaattaactaataacaaaactcaaactaatgctaaaataaactcacaaatcaa

SEQ ID NO: 70699 - DNA, 251 bp, Glycine max
  unsure (1)..(251): unsure at all n locations
atgaaaaaggagactgagtcacgtgtttgctccacttattgaattaatacaatgcgggaagggtttacgaaaatgggatgtgtggaccagtgcatgtataatggctctaacattaccttactcatatactatcaattatggttgttaaatcttattaacagtgaactaacctatggacacgagcttctaaaactatttgacacccngattgtctgtagcttggctactctacatagcttactgcatcatcg

SEQ ID NO: 70700 - DNA, 205 bp, Glycine max
ttcccaatttatcatacttttcatatactactctttcttcatctactacaccaattctttccataaactctttcttcaaaccttcattaacctctccaccaatttctacaacattttttactataactattaataatttattcattcaatattctctaattctaatatatataattccattcaaaaccaatactaatttcttctt

SEQ ID NO: 70701 - DNA, 418 bp, Glycine max
cccacgcgtccgcccacgcgtccgctagaacttataatagaatactcgtcccacaggcaatgttcttctctctctcctgtcatcacttcatatattcgcaatttctcttccaccatgaaaccctatacccaactgcaatcgctcatccaagccatgtccctcaaccacctcctctccttctccccccgatccaaacctccaacctccaccctctcatccctcccatccctctcttcctcaccctccactttcgctacctccgcctcctcctctccaacccatctttcccccaccatcatgatctacgaccgctccttccactccgtaaaatccaagctccagcagctcaaaaaccccaaccccctctacctcaaacatggatacccccttaccaccctctattaccacacactcatac

SEQ ID NO: 70702 - DNA, 372 bp, Glycine max
accaccccttcaacaacctatgccgattgcttacacgcacgctgctcaaacacctacgctcgaacaccttcgatctcctcacttgctaccacacttctccgtcctactccaacctccacttcatcactcgctcttccatccctccgataacatgcacctctatcttcaccgatgccagctcatcaactaataactctaaactctatccaagatcaaaccatgctcatgttataaaatcaaagatacgactgaaaatggtatatttgctgccaattgggaatattctgcatcagaagccaattcttcaaatctgaataacagaacaagcctacgcatgtctcaacaagcaatgaatgcaattagtcacatatc

SEQ ID NO: 70703 - DNA, 371 bp, Glycine max
cactccttcttttcaatttacctttttatttcctctttgtccttacactcttttactttgtaatggttattataaaacccattcttacatcttcaacattatccttcaaatcctcaaaaatttaagacttacacactattaagtcataacattcaatttcaaaaacacacttcttataattacattaaatttttcaaacaattttatttataaaagattcctccaaaatgtattttatcttcattactattaaaaatataccatttataacataatcaatatccttataacttattaacttaaacaattctttataccataatttttcaatagattttattaaattattttcttcatgcattttacaaaac

SEQ ID NO: 70704 - DNA, 145 bp, Glycine max
gcgacctgtagacctatttactgtttttgaagaaattgatcccactgttggagtgtctgctcgatgataagttgcgcttgatccagtaacccatgcaatctgtagttacacatatactatagtataacgttcaactacaggtgag

SEQ ID NO: 70705 - DNA, 347 bp, Glycine max
gctcccactcatcccatattattaacttcaccatttcttatcatattccctccttttagctaaagttgattattatcatggtactgctcattccaacctctcttactctcacaagtcttacccttttctctatttaacctcttatcccaaacctcctcttctttctactcataactttcatcaactcttcttttattcattcacgcatcttattatatctaataattctttatgttatcttcataatctacaccaaaatcaatcattcttactattaatttcaatatttttacttcttcttcattttaataatcatattcataaattcagtctttttaatcaatctt

SEQ ID NO: 70706 - DNA, 284 bp, Glycine max
cccacgcgtccggctcaattgaccgatgcagttccacgtcgtacttacactgctgtactgggtgatgagatataaaaagcccatccttacttcttcaacactatgctacacatcctggaatacccttacctacatacactactgacacaacactctatttcaagaacacatcttcacatacttacatccatatgttgaagcagtcacgcatgataaaggaagctcgcaaatctggatgtgatctgcataacgcatcaccaagatcactcatataacactattaa

SEQ ID NO: 70707 - DNA, 91 bp, Glycine max
cccacgcgtccgcgtttccaaatattcacatattagaagaacaatacttctcgccctagaagctcatgatatgctatataatccatcctta

SEQ ID NO: 70708 - DNA, 375 bp, Glycine max
acgacccactcgaccgacgacgcctattcggagaaaccctacactctataccccattactctactactacccaaaatgggtgcaacggcatcatctacttcatcttcctctaaactgttcattgcatcaactgtagctccttaattctattcatcatatacaactgtgatcacagtaccttataaggacaatttcaacatcatattgccttactaccatgacactacctataatgataaacacacctcgtatcagcaactaatcccagacacagaaagtgtactaaatactcaacatccctacataaccagatttttcattactaaactaacattagcactacctaacatctcagtagattgtgacatcttatac

SEQ ID NO: 70709 - DNA, 183 bp, Glycine max
ctttgtgtactttgagtcttcttgatccttctttttctccttgaactcaaacatggcagatgaggtggttctgctagatttctggccaagtccatttgggatgagggtcaggattgcccttgctgaaaagggtatcaaatatgagtacaaagaagaggacttgaggaacaagagtcctcttct

SEQ ID NO: 70710 - DNA, 123 bp, Glycine max
attcgacgctgcaggaatccacagaccggcctgatatagcagatgattgttttctgtcggcggcaaggtgtattcgctactgacctcaactgcttattgcctcgtcggaggatacttcattag

SEQ ID NO: 70711 - DNA, 136 bp, Glycine max
aaaattacaacaccaatctcactcattgcaaaatagagccattattattactattcttaaaatatccactcttgttctttaccaattctttctcaaactctttctcctaatttcaatcttttaactttccttttct

SEQ ID NO: 70712 - DNA, 159 bp, Glycine max
cgacggcttcgtcagcctcctgttttcagtacctgcaacttacctctttcatttattatatcggctcagtgagatcaaacgggtgaatctgaatggactccgctgatagtttctcttaaagcctccttctgtgcaagccatgattataatcatcatcat

SEQ ID NO: 70713 - DNA, 54 bp, Glycine max
  unsure (1)..(54): unsure at all n locations
cccacgcgtncggtcgcaagagagacaggtcagcctacttttcccgtcacgacg

SEQ ID NO: 70714 - DNA, 84 bp, Glycine max
ttccctgatctacccactcgtccgacgactcctcgcctcataaaccctccactctcgaatccaaactcttctcctacccaaaat

SEQ ID NO: 70715 - DNA, 131 bp, Glycine max
ccgctcgtcttcaatcctttcgttattctcttattcatccttctcttctgaataatccatatctcgtttcttggctaatctccaacactcttttacccaccccatctctatatatattatccatatctaca

SEQ ID NO: 70716 - DNA, 236 bp, Glycine max
aattcctgttcgacccacccgtccgtccacgcctccggtcgcaagagatacaggtttttcctacttttcccgtcactatctcctcaagtcgccttcgacccttacctatagccctttttctcattagactctctactatgaataccactacctcctttctctcatgatctataacgtcctaccacattacttctacatccttaatctcaagtccctattcaagaactacagaccca

SEQ ID NO: 70717 - DNA, 347 bp, Glycine max
  unsure (1)..(347): unsure at all n locations
ctactcatctcattaccttatccatcctcaccataccacttcgcaggatgggccacctccaatacaccttcctccactctcatccttatcagctattatccctacctacttctattcatcaaaaacaactgtttcccaaatatctttttaacacaatttcatcctaatgcggtcctagacccatttaactacctctaaagatggacagatctggtatctctcactagacaaagacacaggatgtggatttcaaacaaaacaacgctacagatttgggtngttcagtatgaagctgaagttggtagcaggtgactcttgctgtgtgtgacagcttattatatgtgctc

SEQ ID NO: 70718 - DNA, 368 bp, Glycine max
agggggcctatgcggagaaaccctacactctttagtgcttcatctactacaacacaaaatggatacaagcgcatcatctactccatattgctctatactgttccttgcatcaactgtagctgcttaattctattaatcatatacaactgcgatcacaggaccttttaaggacactttcaacatcatgtggtctgagtaccatgacactacctataatgctaaacacatcttgtatcatccactaaacccagtcacagagtgtgtattacagacactacaaccctacatatccagatgtttcaatacgaaactgacgttagcactacgtgactctgcagtagatgtgacatcttatactctgctctcat

SEQ ID NO: 70719 - DNA, 257 bp, Glycine max
gacccactcgtccgattgcgcgcgctctaccgtggtttcaacatcttatgtgttttaatcatcgtctatcaaagtggatacttgggcatttattattctcataatactatttgtcctcacagcgccattgcatgatatcttatttgccacctttacccttgaacgtctcatcatcaatgatccatctcttgcatcatacccaatatacactgatataagaagaatcatcatcacctctgattaatctgtcaagtaca

SEQ ID NO: 70720 - DNA, 66 bp, Glycine max
acccgtccacgcggcctgcggggaacctggatcattccttcgcggaatcgatgtgaaccgtttacc

SEQ ID NO: 70721 - DNA, 121 bp, Glycine max
cccactcgtccgcacacgcctcccgcgccaccatacacacgtctttctacttttcccaccaccactcctacaagggctcttctggccttttctaatccctcagacgatcatacgactacta

SEQ ID NO: 70722 - DNA, 245 bp, Glycine max
ggcgtccggccagctctaccgtggctttacatattatgtcttgtaatcatcatatcgggactcgctactttggattcgacgatgctgcacttccattcatggcttcaagggcaatgcttgatagcattgggggccactctggcccttggattggtatcaccactggtgcttgatcctgcctcatagcctctattgactccaagtttaaggctgatcatggctagaatccatgctaaggttttaac

SEQ ID NO: 70723 - DNA, 88 bp, Glycine max
cggacgcgtgtggtttcctagtatgcaaggtaaagaatcagcaaatttcaaccggggatccgggactaacatgttgacaaaagtctac

SEQ ID NO: 70724 - DNA, 140 bp, Glycine max
ccactcgacccactcgtcctcccacgcatccgcttacctattctccaaaattactacatcaacacatttcaacccgaaatccgcgactatcatgttaccattaatctacctacattcattttcttctactaaccttctta

SEQ ID NO: 70725 - DNA, 64 bp, Glycine max
aaggaaacagctacaaacattggtgcttctgccaaggctggcatggagaagaccaaggccactg

SEQ ID NO: 70726 - DNA, 131 bp, Glycine max
aataaccgatcgacccactcatacgactaattgtccttatccttattgatttacattattgccaaatcaatccaattctacgagttgaacacattatccaacattcctactctatattaacacactttact

SEQ ID NO: 70727 - DNA, 259 bp, Glycine max
acgaaacagccttgtcgaacacaccaaaattaatttcatttaccagcataatagcacacatagagggtctgttgggaatatataacattttgaattaatatttactcactacgattaaaggctgtcatacctagagactgatgctttgtatactaataccttccctgtgcgtaacagcaactatcaaacttttcacacttaatttatgtttaccacaccatttcaatattccctacactattttcaattaaaatacctt

SEQ ID NO: 70728 - DNA, 451 bp, Glycine max
  unsure (1)..(451): unsure at all n locations
atcaaaatttcaaaataaacttaaaatggcttaaacagatcgtgcaccctacaaagcaagtgcatatatattagtgacattagagtgcaaatgtgagcaagatccataccacagaaactgaggcaactatatcatacatcattattccagcatctgcaagggcaaggctagcacatgatatgacaactgggagatcacctgcaacacactcactaatactattacctgctataaaattaagattttgccaaaaggtttcaattacataggatcattcatcatcttccattataaaattcaaaggaatatttcagcctctcaaacaaatccactacgaaccagactaccataaatgaccacatcttgatatctacatttaaggtgtccataaaaaacttctaaattatagaaaattgaggcaagcatcatatgtacatgacatncattaata

SEQ ID NO: 70729 - DNA, 265 bp, Glycine max
ttccgtccatttcatacttcatcctattatttctttcccattctacattccactaggtccgcgtcttatttttattcatctctcgccaaccactcttacccacactcaaacaactactcatactaccacaataccattaactacacacattcctatactcactattttattattctctaacactttccctataccatccaaaaactgtttcaatttctaacagattctgcacatcttcttcttttaaataaaactattatttact

SEQ ID NO: 70730 - DNA, 469 bp, Glycine max
cggaccgacccggcgtccgtttagacttgctggacccgacctctctaaactagatttataatataccgattgcatctaaggttggcttataatcgaggcatgctcacgagcaaaccttaaacgggccaatgtgcaacttgtagatgccaaaggctccatctttcacaatgcaactatacgagaatgttaatccacagcggaaaatctacgttgagcactattatctgtctcatgccttcataaagcctaactactacaggcattactactacaaactagctgatctcgatgcgtaactgacctcttggcaagcaaattcaacaatttttacacaagaccagttagaagtttgactttgtggctcacaaatccggagtccataaattctgctttaccaacaagtcttcttatcatgaaactgtcgattttgatgtacatgttggtcacttctcttactttgagcaacatg

SEQ ID NO: 70731 - DNA, 399 bp, Glycine max
ctcaccattgtgaccgaactaatatcttgctttatttagcgatccgacaaaaactctttaggcaggtttgtttaccaggacctccttactagttataaacttctctctgactactttcattacaatgaaatcgataatagaatgctcttggaagttaagaggaagtgacttgttaaactaacaacatacgtagacacatgtacatactctattactgacgaacattgttatctataattagtggattatgcacttgtattttgtgattaacaggcttgaacagatttacgttatacttacttctcatggcatttacttcacttgggctcgttgtcaaagcatagttttccacccacacatactttgactactggaatcgacagctacttgatggctttc

SEQ ID NO: 70732 - DNA, 310 bp, Glycine max
gaggatttgggattgggaaggcgagggattgcgctgcgtctcttcctcttctctttcgatgcatccctcattcataatcttccaatccaacaacctcagcctcacactcacacatacacacatctgaacgcgtatcgtccctcccatggcttcaaagcgcatcctcaaggagctcaaggacttgcagaaagacccaccaacttcttgcagcgctggtccagtagctgaggacatgttccattggcaagcaacgattatgggtcctgctgatagtccttatgctggaggtgtattcctagtcactattcac

SEQ ID NO: 70733 - DNA, 87 bp, Glycine max
aaggagatatatgtacctaaaacgattagattttgaaagagaatacaaacatataagcttacgtggaattttaaatggatgctaagc

SEQ ID NO: 70734 - DNA, 80 bp, Glycine max
aaaaaaaaaaaaaaaaaaaaaaaaaaaaaaataaaaaaaaaaaaaaaaaaaaaaaaaaaaagggaaaaattaaaaaaaaa

SEQ ID NO: 70735 - DNA, 317 bp, Glycine max
acgcggacgcatcaggtatactaagccttgagagacaggaagagcacacacgcattatcggttccggggcacgtaattcgcatgctcaccaagacatggcagtggcagaggtaccaaacctagagaaagaggctccagtaaagggcatatgtcaagcaggtcatgcaacgacctcgattacccactagagcttcagcaccatcactggtggtgacataccagcggatgaataccgaatgaccaaacaattgaaccttaaatggtcgtgaacaggtatatgatcgtgccctacaacccagctttacatgtggatcata

SEQ ID NO: 70736 - DNA, 202 bp, Glycine max
cccactcgtccggcaaacatgtccacctcaacaactcttttttttgcttatcccttccctacctccgggcactgtatccctctcttatacttcaccaaaaccctaatctctacctttatccatattacctttcttttcacaccctacaacgaatccttacttccaaaaaactattccccttttctccaaactcttcttcttc

SEQ ID NO: 70737 - DNA, 154 bp, Glycine max
aataataaaatttaattcccctccaaatccaagcttgaatttaaccctaaaacttgaattaccttacctgtgcggaaaaccacccaccccccccaaccttggaaacccataccaccacctaaaaatgccatcccaatcaattctaacttaccaa

SEQ ID NO: 70738 - DNA, 236 bp, Glycine max
ttaaccccttaattaaaaaatttaaatccctttaaaatccaagttttaatttaaaattaaaatttgaaaaacctaacctttttgtaaaacaacccacacacaccaaccttggaaacccaaaccaccaccttaaaattgcaatccaattaattctaacctaccaaaactcttaagggtttttttctctgcacccgggtcctttttgcctcggccattggcccaacctaccccaactt

SEQ ID NO: 70739 - DNA, 263 bp, Glycine max
atctctcatatctcttcttattttctccccaatccaactcaacccgggtccgattctttttataaacacatggccattctctttaacctctcaataaaagaatttaaatcgcttcaaataccaagttttaattaaaaattaaaattttaataacttaactgttgtgtaaaacaacccacacacaccaacctttgaaaccaagacaacaccccataatattcaaccaaatcaattctaacttacaaaacttctaaaatgttttt

SEQ ID NO: 70740 - DNA, 120 bp, Glycine max
ttttttttctttttttttttttttttttttttttttttttttttctttttttttttttttttctttttttttttattttttttcttttttttttttttttttttattttttttttttttt

SEQ ID NO: 70741 - DNA, 284 bp, Glycine max
cacaggcttactatacctatctcatttactttttaccttgattattcactactcaggaccagtgtaattataatgtcaaccggcaccattatcttccttatatcaatctacattaagcactacttgatctcatcaataaacatatatatacgatcttgatgtcattgcatattaactatgaaaaatgttgattgatataacttgatcacatttcataatattacaacttatgtataattcaatgacttattatatattaataattaatctacatttagttcttc

SEQ ID NO: 70742 - DNA, 226 bp, Glycine max
gcgtccagtctaacgacaacataggcttttagattatccaacatgccatacatgacgcggatagggtgactattaagatcactctgttctttactatcaaaagaccaccctaccaagctttcttcttgtatctacctccctaaactataaaatcatatatatccacatcatttacaactaatgctatatacacacttaccattaattcattatcagaccctactta

SEQ ID NO: 70743 - DNA, 318 bp, Glycine max
ctccgaaactcagtcttcaccttctaaacaatctcctttgcaacatggcatttcttgcttggaatagaaaatactgcgcttgctaatcttccaatatatggcaactgagagttcaattagaatctttgaaactgggattaaatggccctcttttaaggaagctgctacttttggctcgccattccgtcacattgcaacaaaagatcagggtatatattttaaaaggccatcagtttcatggcattggaaaggattcattacccaatcgcattggcaatgcaccttccaacattgcaagctcatttctgggcatataaa

SEQ ID NO: 70744 - DNA, 353 bp, Glycine max
ctcttcctcttctcgttccatgtatccctcataaataaccttccaatccaacaacctcatcctcacactcacacatacacacatctaaactcttatcatccctaccatctcttcaaatctcatcctcaattaactcaactactttcacaaaaacccaccaacttctttcatctcttatccaataccttattacaagttccattttctagcaaccaatattttacctgctaataatccttatactacatcatcattcctatttcactatacactttcctccatatcatctctttaaacctcccaacataaccattataactatacactttcattcataaacattaacaaccaat

SEQ ID NO: 70745 - DNA, 53 bp, Glycine max
cgcaccattttcaccgcacgaatattttagctcaacggagcgatccaattaaa

SEQ ID NO: 70746 - DNA, 203 bp, Glycine max
tgatgctcaactcttttttcaatgcctattaagtcattactttttattacttgaaaagattttatgcacagattaattttttgataatattaatatttgattacattgtaaaatttacaacgtaatatgtatatacactaactctcttcacaacatgtgcaaaaattaaatattaacctaactataactttatccatttatta

SEQ ID NO: 70747 - DNA, 201 bp, Glycine max
ctccatatttattaattttacttccatacctttcaatgcgggctatggttagattatcatgattctgaactctttattcatttcctattatgtcattacttatcagtacttaaaaataatttatgctactataacttttacttactattaatatttcattacattctaaatttacatcttcatatttatatacactaactc

SEQ ID NO: 70748 - DNA, 364 bp, Glycine max
cacctttgttcactcttcttctcttgcggtttgggttttagcgcagcttcttctagatttggtgaatatgggtaaggaaaaggttcacatcagtattgtggtcattggccatgtcgactctgggaaatccactaccactggtcacctgatttacaagcttggaggcattgacaagcgtgttattgagaggtttgagaaggaagctgttgatatgaacaagaggtctttcaagtatgcctgggtgctggacaaacttaaggctgatcgtgaaagatgaatcaccattgatattgctttgtggaagtttgaaacaacaaagtattattgcacagttattgaagcccctggacattaggattttcat

SEQ ID NO: 70749 - DNA, 255 bp, Glycine max
actttccaacttactttcaacaataccatccaagtatcacttctatacaaaagcttattcaattcactattcaatcttataacctatcctcattttttttccaatcactatttaatctacaacattcttcaaaaccaataatatcatctctatctaattcaaacacccttcttttctaaactcaaaacttacatttctattctaactcttaacaccaattaccccaaaaagcattttactctctattttctaaac

SEQ ID NO: 70750 - DNA, 297 bp, Glycine max
gaaaaataaaaatcaaaggactttggttaatgctgcttctgcttcatcatcgtcagggtatatattctgctactgtgtcttctgcgtggtcaaatccctgctcgtgttctctctattcctatgaacacgaatcctaactccttcaacagaacaactacaagccactctcctacttcccctccctcgccgccttcgcttccaaacccaagaagaataatgcccatacctacttcctcgccgaattcaccttcaaaccctacaccttcttttccgaccaaaatcccttcatccttccca

SEQ ID NO: 70751 - DNA, 324 bp, Glycine max
  unsure (1)..(324): unsure at all n locations
ccactcatccactcaccaatctcactttacgacaatcatactttntctatctaccctctaacgacgtctagtaacatttaacaggaccaggacaccaacacacgagattagctactcaaatactacatctgtaacaagttattatataatggtattccatccaaagttcaaggtttacagtttggccaaccacctctccatccccacattcacccaaaaccttcttcaaaacaactagtataatatgagacattcttaagaccaacatctaatgaagattacatttttcacacattcaaactaccttatcatacccaattctat

SEQ ID NO: 70752 - DNA, 243 bp, Glycine max
tccttctaactcctctataccttactcaatctttctatatctaccatagatagttttcttttatcactctacatccctaatttcacatcatataaaccatctacacccaacaaacaccaaacttgctttcataatctcaaaatttcacttctaaactattaaatccattccctttacaatcatgattaaaacattcctcctatatcctattactaaatcctttacacttttacattattatcc

SEQ ID NO: 70753 - DNA, 340 bp, Glycine max
tatacattatccaacctgttttactctttcatactactacataactatacgataggttcaattaaattcaagtcactccccatcattttacaacatcattactactaaaaccctcactttacccaacttaatcacctttcatcacatccacctttttccatctatcttaataactaataatccctcaccaatctaccttcccaacaattactcatcctcaattactaataatactcaccctttatcttctcattaatctcatcattaattatttttacacacaacatcacctctactctttccatcaccctatctacctctcctttctcttacttccctt

SEQ ID NO: 70754 - DNA, 282 bp, Glycine max
cacgcatcctacaaaatttcttcacactatcatgttttatttatctcccacatactttgtaactacggtttgtttattaaataatcttctctgctcttcatgacctcctttaaatttctcatacacactctcaaaaatacttccacaccatataattaacccttattctttctttgaatctcttctctaaaactttcctacacttaatccaacacctatcacaattaccaggcttcaacacattatctttatctatactaacactgttataaatttatatta

SEQ ID NO: 70755 - DNA, 327 bp, Glycine max
tttgaatacattccttgtagtttatactgaaagatgggtttgaaaattgccttactgggcctaggcctttcccttatgctccttttggtctccctctgaggtggcatccacgattccaaaaaaggaggcaaatggattggataatgccaaatttcccgttggaagctatgaagggggttaccaagttaatggcgttgccggttatcctggcaatggcggtgccggtatatcctgcaatggcggggggggtgtatatccggcatatgggggtgcacactcttcatatgggggggtatactctgcccggtgggggatactctatgcata

SEQ ID NO: 70756 - DNA, 315 bp, Glycine max
cccactcatcctcacctacactcttcctcaactatctaatttctttcactatcgcacatccaacatttccgctcgttttcatttattctatccccaactatactcatatcactaccaaaaaaactaatctaatcaccacctattatgaccataaaactacaaactccatccaaaatttctaactccagactaacataacaactcattacagccttataccaaaatatcacatctactcaattactacagcctacatatacactcatcacatcattcataccttctaagacaaatccaaccactttactaaacata

SEQ ID NO: 70757 - DNA, 233 bp, Glycine max
aattcctcatttcacacttgccatatcaaagaaaaagacatgttcatttgatcagagatacaggcattaatcacttcaatcattggtttcaaagcacaatctcgccatcattagtacactctaatcctctataattttatcaacacttttagcttattcattcaataatatcttcaattaagccaaaacttactcttatccatactattaatccatcctcaatctttaacttt

SEQ ID NO: 70758 - DNA, 339 bp, Glycine max
atgaactactatgtgacaggacgatctttagtgctgctcttgatctataacagtccgggatgaattgcggctactgtatctcttgcctagtcaaagcccgatgcgtgtcatctttactcctactaacacgaatcccaactacttcaacagaacaacgacctgccactacacgacttcccctccctcgccaacgaacctgccaaacacaagaataacaaggcccatacctactgcctaaccgaattcaccatcaaacacgacacctcatttgactaccaagatcccgtattactcaccaccgttcctcgccagcgcaccgtcgaagagctctaacgcacc

SEQ ID NO: 70759 - DNA, 123 bp, Glycine max
agaataatgaaagtcaaagtagatatgtttagttattaggggatcaccggtgtaaactgtgatgacagtttatcagaaaagtagatgtgtttcacttgctaagaaaagtatgtatccacctta

SEQ ID NO: 70760 - DNA, 148 bp, Glycine max
ccattctaagcatgcatacacctttcttaaactcctcttgatcaaacaaaaaaaaacacatcaaattcaccacattgtctttacttcaaatattatcaacacaaatttttctttttaaccctttacacttaaaaaatatctcaaaaac

SEQ ID NO: 70761 - DNA, 264 bp, Glycine max
catcacatcaataccctcaattaatcttccttatatcatcctaaacatattaactctctcacaatatacactttcaaatactatcttttacttaaacactactcatattacactatcaattccaaaaatacctttactacactcaacaacatcacatacctaatctatcatactatttattaacctacttatattattctatctattactaacatacatttcatcaaatacctattacctattcactaaacttcactcaataaa

SEQ ID NO: 70762 - DNA, 307 bp, Glycine max
caaaccctcttgccatcctctccaaaactcatatcataactttgcatcacatacacggggactcttacaagcgatcacaggtcgttttgaacacatgtttactcactctgattagggctcctgttcgttgtgaccctttcgtagagttctaattccgtactcgttcatattaccctctacaatgctatgcacattttgaactcgctcaccttaccgtcacaattgtaacaattgttttctgaaatacacgacctgtgacactactacacttgcccttatgttgcatactcacctatgactgctgatt

SEQ ID NO: 70763 - DNA, 387 bp, Glycine max
tccaattcgacctaggcgtacgcgtacgcgtacgcttcacaacacccgtgaccgaacccaaattggattccacagaatagagcagggcctctagtctgagatattataatatttattacagcatctacaggtgtggttgtaacagtaattgtgattgctacatgtaacatcattatctcatgcaccatgtgaatagtgggttcttgccctgaaaatagtagttattgcatttattgattatagctgctttcagcccttacagttaactctgtacctatttatgtattctagatgatcaagtagatcggcaattgggcaaagtcctaatgtccaagcacatgctcaaagataatgtcatgcggtctataggatccatgcttacgtaca

SEQ ID NO: 70764 - DNA, 298 bp, Glycine max
caacatcaatttatttcacaaatatttacattaatcttactcattccaatttcaagcactgtttacaatctatgcgttccacaccttcaacctttcactcttcttttatattaccatcattcaactccaacttcttttcttaatcttcacatcttctcatatttcattttcatctctaatctatattcctttcatactccttcactcccataattctattccatcttatacaccatcttctatcactttctcctccccctactattctctcaatcaactttccatttttcttcatttt

SEQ ID NO: 70765 - DNA, 175 bp, Glycine max
ccgtgctaacctcacaatgaggctctataattaagcctcctacgatcaaattaggaatcgtttcaattctaaatcagggggcatctaaaagggaattcttaactacactgaagatgatatggtctccaccaactttatagtcgatagcatatcaagtatttttgattcaaacgct

SEQ ID NO: 70766 - DNA, 87 bp, Glycine max
  unsure (1)..(87): unsure at all n locations
gcgacgctcacgcgnntccgcggaccgcccgtgggtttttcttttcaaatnntcccgtgaagaagaccacttcagaaagaaatgagg

SEQ ID NO: 70767 - DNA, 114 bp, Glycine max
  unsure (1)..(114): unsure at all n locations
aaccttaantttaanaacacgttttttcaatctccttaataaaacctaaaaattcgttcctttaaaaaacgcgcgcccccccaacaaacaaattcctacttccttccatccttt

SEQ ID NO: 70768 - DNA, 228 bp, Glycine max
  unsure (1)..(228): unsure at all n locations
atccattcatcaaaacatattaataccttacaccaaaaaatnaacccgccctttaacaaatctccacaccaacantacacataaatacttccataacattcaaaatacactttatatatccaaaacaaaacccattatgcttcatcatctaatacatcattacttatctcttaacacactttattatccaacatacttaattccaaacccactatactaccctattaa

SEQ ID NO: 70769 - DNA, 92 bp, Glycine max
  unsure (1)..(92): unsure at all n locations
acacccacacntacaatttaccaaatatccactttatacaaaaacaataatcccatcccccctgcctcattataaacgcgacaagccccccc

SEQ ID NO: 70770 - DNA, 317 bp, Glycine max
gccgcctgctcaaaattcaaaacccacatcctccctcctttttttttactaaacttctaatttaccttctgcccttttaatctctaactccaccttcaaaattctacattatccctcaatttattcatctgcatttcatatattcagttctcatcgaaaaatgtactttcaccaaagacccattccttcttcctgctaacacccacaaacccagaatcttaagaccaccaccaccaccaccacctattcgaaatcacaatctcatgctcttctccctctctacctcaccaacaccctattcttctgaatactcttct

SEQ ID NO: 70771 - DNA, 252 bp, Glycine max
  unsure (1)..(252): unsure at all n locations
cccacacatccnaccacgcctacaattaatttataaccataaccttatccnaaatattctgccatttttaaaaacaacccttcccccataacaacaccaaatttcaaatcaactcttatcactcacattacatacaccaacatatcccccaaaatccataattatttccttaattaacccttcaaatcctaattcccttcttcctaaaaactccactttattctcctaaaaatagtccacccccaaaccaaa

SEQ ID NO: 70772 - DNA, 302 bp, Glycine max
ccttaaatgacttctggggccttgtaatggcagcttggaaatcttggaagttccaggagggggggccctttaaagcttccttttaaaaagttttgaaaaaataggacccttggaaaatattttggaagggcctccagggttgaacctttggaccaccaaattgggaaaaaattgcctggggatttttttgagcctgggattgcccaacttcccattgccccatttttttgtttcccttttgattgccaccgatggaattccttgttgacttttaaaagtttttttaaacattgggctcaagt

SEQ ID NO: 70773 - DNA, 405 bp, Glycine max
  unsure (1)..(405): unsure at all n locations
aaaaanaggggcggcccacgcgtccgcccacccacccnccacncctnccncccatatatatcatatatcctatcatccttaatctcgcctttattttacaccaactttccactcattaatctctacaaatatcaaaaatcccccttcctcttttaatcaaaccatatttcatatttacaccaaattttttttaccaaaatttataagatcacaattcacaatccccatacaataaaatgtaaaataaatccttaaaaatttcatttttcacaaatacactttaaacaaaattgaattacataaaaattatccttcaaacacataaccaacgctatataaacctttcttcttatcttttctaaaaacctctttttcaaaaaaaacaaaccctttttcacctatcat

SEQ ID NO: 70774 - DNA, 254 bp, Glycine max
  unsure (1)..(254): unsure at all n locations
atacgcggacccctanactgacacatacacactattgcctcaaaacagacctaaacaccatcttgttcattttctaacaccgaatatgcaacaaagannaaaccaacacaaacactaacaataataacaagaataaatcatttgcttatacccttacatcttcttccattacaattaccatctgacaaaaatcacattcacttcccaagacattcatcaattataacttcattctaacttcacttaatcttcat

SEQ ID NO: 70775 - DNA, 204 bp, Glycine max
  unsure (1)..(204): unsure at all n locations
aaaaaaaaaaaaanaccgcccgcacgcgtaccaacaccttcaatatctaactaaaaaccatttttttttaaccatcccttctaattccaattcgtgcttttaataaaaacctccccctccaaaaatctacatttactctaactttctccatctccattacatattatacacaaaacatcaaaaaattaacattcaccaaatact

SEQ ID NO: 70776 - DNA, 316 bp, Glycine max
  unsure (1)..(316): unsure at all n locations
aaaaaccaccccacccgtccaatcaactccaatttttagctccctccctcctttttctttacttctcttctcattctccttctcgccttctaatcactccctccagctccncanatctacattttccctcgttttctgcatctgcatttcatagattcagttctcatccaaaaattcacgttcaccaaatacccattccttcttcctgctaacaccgacaaacccaaaatcttaataccaccaccaccaccaccacctattctaaatcgcaatcacacacgcttcttcctctctacctcaccaacaccctcttctt

SEQ ID NO: 70777 - DNA, 354 bp, Glycine max
  unsure (1)..(354): unsure at all n locations
gtccggatcccgggtcgacgagcctccccaacctccgaccctggtgctattgaaccttggcaactttcaactttgttcttttattactgtgaattcnacagttagaccatgttggtgngtgtatttgctctnaaaggttgtttactgcttttgttttctttttctcttcttttttgtnttctttttagctttctttattttttatataatttctttttttttttaattttatctttttcttttctattatttttatttttttatatttttttttgtggttgtttttttttattcattattttttatttttatcacttattttatttctttttcatttttatattttaaattttt

SEQ ID NO: 70778 - DNA, 112 bp, Glycine max
aaaaaaaccggccgcggaaaaaaaagggaaaaaaaatgaaaataaaaaaattttttataaaaaaaaaaaaaaaaaaaaaacccgcccctgttttaaaaacgctgggcccccc

SEQ ID NO: 70779 - DNA, 115 bp, Glycine max
aaaaaaaaaaaaccgcagcaacaacattcttaaaatttaacaaacttttttttcaacaccaacaaatccaatcgctctttttaaaaaaatccccccccaaaacaacaaaaacata

SEQ ID NO: 70780 - DNA, 280 bp, Glycine max
  unsure (1)..(280): unsure at all n locations
aaaaaaacaccacctcccccacctctnaacataactttccaatttgtaaacactccacacccattctgccttttatttttcttcacctcacgttccaacaacttttttttaacacatatctacaatcaccttcctaaatcaccacaactctaatttttttttttctaacaattttatttcatttaacactatccattttacacacaatatcaaatttcataacaccttattttttattttccctaccataataaaaaccaatttttccctcatctttcta

SEQ ID NO: 70781 - DNA, 362 bp, Glycine max
  unsure (1)..(362): unsure at all n locations
ccgtccgnngtttggtgtaacctgcatntgtctctttgcacatatgttagataggagtattgccctttaagatttttggagtgtgcccatataagttatacgaatttcacttttaaggagtcttgtttgacttagttgttccttagactaattggttaaaggaacctaaaaaggagaagatttttaatattgtaacatcattaggaacagtatataacaaaaaatcgatgaaagaaccgcacatttgtatgtcctcgtccaataaaaaaaaccttgagttccttaaacccnngtgtcctcgcggacacattgttaagcactttgcccttcatttttatattgtgatcattaagattaattat

SEQ ID NO: 70782 - DNA, 220 bp, Glycine max
  unsure (1)..(220): unsure at all n locations
cccacacatcctnccacacaatcaaccacactatcgatcacgcatcaacaaacccacctcgttgcatttaataagtggcttacaactatccanagtatactacaaaaaacttccataaagtgacaatttcccataaacaactctatccacatcatcgacacccatctaattcacaaactctttctccaaaaccactttcacctctacaccatttacaaca

SEQ ID NO: 70783 - DNA, 257 bp, Glycine max
  unsure (1)..(257): unsure at all n locations
aaaaaaaaccaatcgacccgacgcgtccactcaaaaaanaanttaaacaataaaattttttatggatcacaccacataaaaaaaacccgctgattcttaaaaaactccctccaccccccaanacaaacaaaaatcaacatttattaactcaaaattcctattaaccccttcaattcagaaaatcgacttacacataaaacccaaacctttttaacaaaatcactgtctaatataataacttaacaaccatcttaaaa

SEQ ID NO: 70784 - DNA, 83 bp, Glycine max
cccatcccattcccaccactcaaaccataacaactcacatcgctaccatcgaacacacatcatttttcacaaaatcactcaca

SEQ ID NO: 70785 - DNA, 232 bp, Glycine max
  unsure (1)..(232): unsure at all n locations
cccacacatccncccacacatncactttttttatctcaatttcaaaacttaataattccccgctatatataaaaatactctcttttttcttactttttttaatacttcccattccatatatattatccttccaaattttttacaaaaaaaacactttttaattaaactcttttttctttttttcctttcaaaatccaacccttttaataattataattaaatcaactttttt

SEQ ID NO: 70786 - DNA, 283 bp, Glycine max
gccacgcgtacctgcacgcgttctaaaaaaaaagatgtgatccggcgcgtacattctggaggggggcatatagaggatcgaagtgattttaaggccttttttattcatgcatccacacacttgcgctagagaactcaacactgaacaatttacattgctcattacacgaacataatcctcaaactattcaaaatctccaccctttgccgtttcatctagaaccttattctcctaacctatactattcccacaatcgttaacattttcccttattttcacaccc

SEQ ID NO: 70787 - DNA, 465 bp, Glycine max
ggaaatacccgggccgacgcgacgcgtccgctcaaaacttgtcttccccctctctcctcctcggaacgccattcgcatgcagttctcgcacgggagactgcacaattatatttcaaagcgcaacccatttcaacatttcatcatttttctcgtgtaaccatcccctcacccacgaacccatcccatgaatttcccaaaatgccctcaacccagaaccccctcttctccttcctcctacattccaccccaccgtacccaactgcaccctcgcatgatctccctctactcttcttctttcttcttccttaaaatatccaaatccaaccaccaaacccacaacccccaattccttttggttttttttccccttcttttttttaaccccccctttcttttttaactttttttcaacggccttcaactttacttcttccccaaatttgccgacttccgcccctacttctt

SEQ ID NO: 70788 - DNA, 383 bp, Glycine max
  unsure (1)..(383): unsure at all n locations
aaaaaaaaaaaaacgccgccctaacggccataancttcaaactaccactttttttatcaaacaaaccaatcctccccgtttttttaaaaaaacttccccccnccaaaacattttacttactaaccaaacaattccctcttatacactataacaaatcacccttttaaccaactcttctttcctatccttttaaaaacccctttattatcttcactatccaaaatcttctcctacactacccttttatccttcctcacattactctttaatttttcccccacaatttattctacccaaatttaaaaactttccaacttttatttatttctaataaaacttttctcctctttatatctcatttatcctttatttctccttttaca

SEQ ID NO: 70789 - DNA, 271 bp, Glycine max
  unsure (1)..(271): unsure at all n locations
cccacgcgtacgnccacacatacaaaatgactaacataattatttcaaatctatctcactcctttnaatcccgcctaattataaacaggctcgccctccctccaacctnnataacnctcacaataataaccctaatctcgaaataactactcatccaaaaccttgtcattattaaactcaacactatcattaacacttctttaattctatcacccacattattaaaattactaaatcctaatattatcttcacaaacctacaccaaaacca

SEQ ID NO: 70790 - DNA, 205 bp, Glycine max
  unsure (1)..(205): unsure at all n locations
aaaaaaaaattttttaataaaaaataaaaaaaaaaatatttcgttatattataaaaagcccggcccccccccnaaaaaaaaaaaataaaaatatcaaacccaaatctaactctatttaaaaaaaaacaaaataaatcaatcaatttaaaataaaataaaaaaaaaaaaaataaaatcaaaaaacccccctctaactattttacat

SEQ ID NO: 70791 - DNA, 145 bp, Glycine max
aaaattcctccccccactcaaaaacacaaattcatattaaatatttctcaaaaaaaaaaaaaaaattcacaaccactctaaaatatcccatcttactccacaccttcattcaacattcatatctcatctataatcccacctaaat

SEQ ID NO: 70792 - DNA, 452 bp, Glycine max
  unsure (1)..(452): unsure at all n locations
gggggggaaaggaaaaaaaatgaaaaatataataattttttttttttatanaaaaaataaaacctttcgttttttttaaaaaaaaggtccgcccaccttaaaattttatttttttaaatttttttccattttctaacttaattttttaccattttatcactcttaactcctctttttttttattcttaattattaaaacatctttcccattatattttccctttctctattcttctcttctcctccttcatcttatttacacaatctttttatcttatcttttataatatattttttttttacatttattcctttctccatcttttctttccttatttttttactactcatataatatcccattttattctctctcatatttattttaatttatctcttacttcttttattttcttaatacttctttatctatctatttcaccaattttctt

SEQ ID NO: 70793 - DNA, 501 bp, Glycine max
  unsure (1)..(501): unsure at all n locations
aaaaaaaaattttttttnaaaaaaaaaaaaaaaataaaaaaatttgtttttttttaaaaaaaatgtgttgggccccaaaaaaaaataaaaattttattaaattaaatttactataattcaataaattatagaaaatattactaatatataataatttaattaaatatatttaattttaaattattctttttataaaaatatttttttttatttgtaaaaaaattttaatataataattcgtatttgataaaatactattaatttattttattaataaatttattaattttaattatataaaataaataaaatatatatttaaattaatattttaatattttttataaaaattataattttttattaaatatataatataatattaatttattaaaatataatatttataattatttttctatatttaaaaaaataatatatataaataaatcattttatataaatattttatataaatttaattatatatacttatattaa

SEQ ID NO: 70794 - DNA, 196 bp, Glycine max
aaaaaaaaaaaaaaaaaaaaaaaaaaaaaaaataaaaaaaaaaaaaaaaaaaaaaaaaaaaagggaaaatttaaaaaaaaatatgcgtaaataaaaaatattataaaaaaaaaaatttttgtttttaaaaaaaaataaatttaaaaatattataaaaaaaaaaaaaagggcccccctttaaaaacacccaatttta

SEQ ID NO: 70795 - DNA, 62 bp, Glycine max
cccacgcgtccgcccacgcgtccgaaagatattagatgtgatcccgggtgccgtccttccaa

SEQ ID NO: 70796 - DNA, 237 bp, Glycine max
actagtcatccatcaagcatagctttcccatttatttgtctcttgtccaatgcagcacataggaagctctgccaaatcaagaggggacttttcataatatgaggcagaatttaaacaactgcataagatctttctgccatcactctgacacctcttatcatcatcatacttcatacagcgttaacaacctctatacaacactgatgcctcttctattacaaccctatcactactcgt

SEQ ID NO: 70797 - DNA, 314 bp, Glycine max
cggacgcgtgggttatcctaagtctttgggaatagtgctgcaatggcttcaagtcaggaggaggtgacccttttgggagctactggaagcccatttgtgtgcagggttcatattgccctcaagttgaagggagttcaatacaaatatgtcgaagaaaatttgaggaacaagagtgaactgcttctcaaatccaacccagttcacaagaaggttccagtgtttattcacaatgagaagcccatagcagagtctcttgtgattgttgaatacattgatgagacatggaagaccaaccccatcttgccttctgatcc

SEQ ID NO: 70798 - DNA, 203 bp, Glycine max
ttcccttccttcatcttcggtctcggaaaaatttcccccgggcaatgcctgtccaaaccaagcccacccccaccacacccctgtttaaacttcaaccggccccattagaaaatggttttaagtatggggaaacctgagcccccattgccaagtattattgggggaggtcctaaaatggttaacattgagaaaaaccccttcaa

SEQ ID NO: 70799 - DNA, 117 bp, Glycine max
cccaggcgtccgattttaactgtgtgtgtgttacaattgtgaaaagtactccaaactatgagggtaaggtaactttgctaatgggcatctactattccactgacaagcttaacttgc

SEQ ID NO: 70800 - DNA, 395 bp, Glycine max
  unsure (1)..(395): unsure at all n locations
cggacgcgtgggagaacctattttcactgttttttgaagaaattgtatcccagctatctggagtgtcctcgctcgtatgataagttgcgctttgatccaagtaaaccaaaatgcaggctgttagttacacatgatgactatagtataacgtccaaacttccaagggagagaacttctgttgttaccatacttagggatccagttgaccgtgtttttagtacttatgaattctcaatagaggttgcagctagatttttgtgcatncaaacttgacgtncgcacaaagatggcttacgcctagctctagactaaagagtagccactgatattgcctggagatctggtcatgatgaggagactattgtagaagagctagtcagagggactgatatatg

SEQ ID NO: 70801 - DNA, 52 bp, Glycine max
ggaaggggaacgacgtcgcagggttggagagtgccatacaggcctggcagga

SEQ ID NO: 70802 - DNA, 130 bp, Glycine max
cccacgcgtccgcccacgcgtccggtgattgaagctagttagaacaagatgttgcagctactctacactgcgattttctccgaaatgcttttgattctcacgctcgtcttcaaaaccccctgagaaaaac

SEQ ID NO: 70803 - DNA, 80 bp, Glycine max
aaaaaaaaaaaaaaaaaaaaaaaaaaaaaaattaaaaaaaaaaaaaaaaaaaaaaaaaaaaaagaaaaaataaaaaaaaa

SEQ ID NO: 70804 - DNA, 343 bp, Glycine max
cgcgtgcggccggctctagggctgaccctcctgcagagtctgagttttacgacggagttcgacgtactagtccagggggagcttatcaacgctctactcctggtgattaaggcactgagggcattgacgaacctaacgctggacgatgctaccgactagaacgcatggatccctaaacacttcaaggaatggatttcatatgaccaagctgaagatgcgaagaagcaactggcagaatctattgccaatgtctaccattgtttaaacacatgattagctgacagcatctatcgaactgcttattctttagatatttgtacttgatttcagcacttcactgtaa

SEQ ID NO: 70805 - DNA, 99 bp, Glycine max
  unsure (1)..(99): unsure at all n locations
aacggaagaaggtgaagagaccattgaagttactggattatctgcttggcgaaggtaagggcaggccgnctcaagaatttcaagaattttgcccgaaat

SEQ ID NO: 70806 - DNA, 61 bp, Glycine max
  unsure (1)..(61): unsure at all n locations
aaacggaagnaagtgaagagaccattgaaggtttctggattatctgcttggcgaatggaag

SEQ ID NO: 70807 - DNA, 121 bp, Glycine max
ctcggattcttatccaaacatctatttccaatatctctgcatgatattgcccagaggacccgaccactatcacaagaatcaggtcccacttctcactacatgacattcactaaaactctaa

SEQ ID NO: 70808 - DNA, 176 bp, Glycine max
tttctatactgcaaaaacactcaataccaacctctaaaaaaacaatccctcactttaatcttacaacatctccacattgatccataatactccttcaaactcattcaacactcctcctccacacctcctttaatcgcacccaaaatctccacaaaggaccataactctatcaccac

SEQ ID NO: 70809 - DNA, 257 bp, Glycine max
atcccaacactttcagttacaggtttcactttatgctgaagcttggactgatcagtgatgtttaaactttcagagcggatgctcacatgcctcctcttgaggactcttatgcatattctgatggtagcaagatggaataagttgattaaatctgacttaattgcctgttacgtttttataaacaatgattggagaaacattctttatactatgttttatgttttttgaattttctaaaattttaaacgttggctatt

SEQ ID NO: 70810 - DNA, 128 bp, Glycine max
acccacgcgtacggtcgtgcatgataaatttttgcaaaattccatcattgacctatagttttaaattctgtatacgttattataacattgttgttttgacaattaaagcattatgttttaaacttgaa

SEQ ID NO: 70811 - DNA, 210 bp, Glycine max
atcccaacactatccgaacatgattcatttatgctcaagcttgcacttatcagtgatgattacactgacgaggcggatgctcacataccttctatttacgactctgatacagatgctaaaagtaacaaaatcgaagaagttgatcaaatcttacttaatctctctatacttttttacaaacaatcattatacaaacaatctttttactat

SEQ ID NO: 70812 - DNA, 142 bp, Glycine max
cccacgcgtccgtcagaaaacatcataccactcatacaaaatcatactatccaccaacacaggatacgtttaaaattaacggaggccaaccaaattcacatatacaaccacatcgaaaacaccaaccccattatacacatta

SEQ ID NO: 70813 - DNA, 275 bp, Glycine max
tttcatgtttgctaactattttggtttaatgaacatgcctatcactacatgaaacgttcaattaaaaggggcggcagcatctttcaatccttcaatactccataataatgcttcttcctcttcaaatattacttacctttcttctcaaacctatcctacatattcattttctcttaaactcacaaccatcttatctttttactaaaagcttcttatacattctctctataatattcttactattttatcaaaaacctatcccattgtactatatt

SEQ ID NO: 70814 - DNA, 289 bp, Glycine max
ccttgtctaccacaccaattttaattacatatataatcataaaatcacaaggacacgtttaatttcaaagatgggacatccttaagtcatatttgcacactttattaaatgctgtcgtcccttgttacttatgcttgttgttctaataccttccctgttcttaaaaacaactccctaactattcacacttaaagttcttataccacaccttttcaattttccctactctttcctcaaataaaatttattgtctactcctctcattttcctttcatggaaaactcacttt

SEQ ID NO: 70815 - DNA, 123 bp, Glycine max
tgctcgataccatccaagcttacttacccgttcttgctttttcatagctttactatagcgtcgcctaagttcaatttactttcgccctttatacaaccataattactattgaaaacctcttct

SEQ ID NO: 70816 - DNA, 400 bp, Glycine max
actctcctattacactttctctttacatttatcatatatcacatcatccttaggtaagttttaaattttagcaaggcttcactacttaatttctacaaatatcaaatatccccctttctcttttattcaaaccatatttcatattttcaccaaattttttttaccaacatttctaatatcacaattcacaaaccccatataataaaatctaaaataaatcctttaaaatttcattttttacaaatacaatttaatcaaaaatttaatcatataatatctatctctttcaatacattattatatgctattttaaactctttcttcttatatttctttcaaaatttctcttttaaaaatatcaaatactttttcacctaatattacatttaataatttttat

SEQ ID NO: 70817 - DNA, 197 bp, Glycine max
aaattacatttgtcctttataaattcatcattttattaaacttttctctcccttttaccttacatatttttccttcttaaattttttgttctcaatcctttcattactctttcctctcaaattttcttaaaccttaaccacctttttttgatttttttataaacacccttcccataatatttctctcataaaatcta

SEQ ID NO: 70818 - DNA, 193 bp, Glycine max
attctttcttccaatcccttttttccttcaaaaaattatcctcctaaatcccttatcaacacaaataaaaccatcttttctcctaaaattcccccaacttttactccttttaaaaaccctacttttaaaattttctatttataatacaaccattaaaaaatttccccaagttacccaaacaaaaatgcatttt

SEQ ID NO: 70819 - DNA, 293 bp, Glycine max
cccacgcgtccgcccacacatatcaaagactcttccacatcaacatttatattcacagcataggttgtatttatgactgaaacatcccataaccacctcactgctaaaatcattcaactcatttccctttacatgcttcaacacagtttgtatttgctcattatcatcctggaacacccatctattacaacaacagctacaatctaaatgcgatcgtcaacacataccaacttccattacacaactatactagatgtatccagacccaataccacatatcctgcataatattc

SEQ ID NO: 70820 - DNA, 258 bp, Glycine max
ttatcctctatactaattgtctggctttcattcacgagaggttcagaaattctacccgaaacttaataactattatcatcataattgcccaaatacctcaattaaaccacattcccctttactaaatcaaacaactaccatatatccacacatacacacattactttataagccacaataatcatttaaatcatcatataaccaccactctctctcttataattacttacttattccttcttttgaactagtggctcc

SEQ ID NO: 70821 - DNA, 114 bp, Glycine max
gtcgttcatgataaatttgggcaaaattccaacattgagctatagttttaaattctatatacaaattccaacattgttattttaacaattaaggcataatgttttaaacttgaa

SEQ ID NO: 70822 - DNA, 114 bp, Glycine max
gaaaaaaaaaaaagccttttactttttttcttttgcatgatttgaatcttgattggaaaagcttcgaattggggtgttttacccatcaattcaattttaagccgtgccttcttc

SEQ ID NO: 70823 - DNA, 114 bp, Glycine max
gtcgttcatgataaatttgggcaaaattccttcattgagctatagttttaaattgtatatacaaattccaacattgttattttaacaattaaagcattatgttttaaacttgaa

SEQ ID NO: 70824 - DNA, 70 bp, Glycine max
agaaaatgtaattttcagcactgtccaggaaatttaaggattgtaattctttatgcctcatgttattatt

SEQ ID NO: 70825 - DNA, 260 bp, Glycine max
acaaggcgtacttatcagcactgtccatgattttaatagtttgaaagtctttatgcctcaagttatgactccatcctattctaagagaacactaagtcaggattcagttgatatatatgctgctcattgcaaaaattgcttgaaattgtagagagattgatacacaagattaagtttgaagagattttaaataaacctactgacgaaccctttctttgcagcataaaggcttttaattcctgcaattaacctgatgatat

SEQ ID NO: 70826 - DNA, 139 bp, Glycine max
cccacgcgtcctaccacgcctgcgcttaaattgtatgcacaacacggatagtaacgtcaagggtcatttatgattacgtcctgcagcttatcactaccatctaacacagcgatagtgataacgttcataacatactcta

SEQ ID NO: 70827 - DNA, 110 bp, Glycine max
ttattccacttaatcaaacaagatcacttttatagataccctctatattatctagtctagttcttatcttttcagggcaaacacacccttttcgcatttatctatctaaa

SEQ ID NO: 70828 - DNA, 108 bp, Glycine max
ttaagacttactccatcatcaattcccacttttcattttttcctcacccaacgctctttaagcaaaagttattctacattctgcctacggccattctctgacccaata

SEQ ID NO: 70829 - DNA, 198 bp, Glycine max
gacccacgcgtaccccaggcatcctccaacacctcccactttttctctctaaactctttctcacccgctattgtttcattttcaacgcatcttgaacatacaacctcttcttaacatttccatacaaaattctcttatagaatagaactatattattaatgaaaactataataataacaaatctgaagcgcatttaac

SEQ ID NO: 70830 - DNA, 230 bp, Glycine max
cccacgcgtccgacaacgcgtgcgcttaattggtatgtaccttacggatagtaggatcaagggacatttgagattgcatagtgcagctgatcactaccatggaagacagcgacagtgatagcgagcataacatactctttctgacactcgcactatgcaaggatttgtacagaagtgagctacgacgccagatatgataatcgtgagaagattcgttgtcatatttgcaa

SEQ ID NO: 70831 - DNA, 192 bp, Glycine max
cccaggcatacgatttcctatctatgcaacgtatagtttcatcaaatctcaaccccttatcagcgaggtacatatttacaaaaaactacccaattacattatgttcttgtaacctcctcaacccactctaagtcgtgaccttttaattatgaaagaattatacaacaaattcttcaataagaaattactatc

SEQ ID NO: 70832 - DNA, 202 bp, Glycine max
ccaattctactcttatcttctagccctctgccgcgtggtgagggtgtaacatggcgtgctctaccaactgctgagcttagtgactcaaatgcaacacatgtagcatgttgtgatgtgagggtgtttcatccagtgttcaaggtttaccgttgagccaccgtgttctccgtccccgttttcacccagaaggtgtttgaagaca

SEQ ID NO: 70833 - DNA, 276 bp, Glycine max
ttcaaaacaatccatgcaatcaattctcatttatagactcgaagattacatcacggataagtgtcctttacctaatgacactactttactaatatgatttgacatgcacaaatacaatagattctatatcagccttggacaatgccaataactccggatataactttggagcaagttcacccaactcaaatgatagcaggaattctcgccattgaaatatctggatatacaaatcactgaatttgaaagagcgtattaagaacactaagaacaatc

SEQ ID NO: 70834 - DNA, 364 bp, Glycine max
acgctccgaaactgattcttcaccttctaaacattctcttttgcaacatggcatttcttgattgcgttagctaagatctgactaactaatgttccaatatatggcaactgatagtccaattagaatctctgaagctgggagtaaatggccgtctcttaaagaagctgcaacttttggctcgccatcccgtcacatggcaacataggatctgggtatatttttaaatggccataggtttcatggcaatggaaaagatgcattacccaaccgcagtggcagtgcacctccgagcatggaatgctcatttctggccatataaaacttgttatcccagaacaccaccaagaatgccaactttggatct

SEQ ID NO: 70835 - DNA, 279 bp, Glycine max
cccacgcgtcctctcatgacgataataatctaaactctcactttattcaaccacccattacctaaaagctaagtttatatccactaacccatcccccatacatttcaaaagtgaatacattccccaactatgacccatccaattcacccaacctcactacattcattttttacaattctcttatcactcacattcttatatacctctaaactccaatatcaaatctatcacacctaatgattcatgtcaatcctataacaactatttacacccctccaa

SEQ ID NO: 70836 - DNA, 98 bp, Glycine max
ccaacttaaaaagcaccagacgtatccttacacattttgcactgccaaaactcttgtttctcacaatataatccatattcaacctacaattatttctc

SEQ ID NO: 70837 - DNA, 186 bp, Glycine max
gaagttgcgagagtgaagaaatggcgcaagacttggcattggatttggaggagcttcgccggctccacagcatcgccaaaagacctcgaaccctctctcttctctcctccgaaattcgtaacctcgaaaggttatcgtcaaaggaagcttctgcccaaattccggcgccaatttcgcccggaccta

SEQ ID NO: 70838 - DNA, 214 bp, Glycine max
ctcgagcatccgaacactttcgatggcaggttccattgatgaatatgctgttggccaactggaggagtttaagctcaagaagcttgtgtttgcctgcatggaggtgatgacacttgtccagagtctgaatgtgacgagaaggcatgaggagatgaaagataacttagacgactgatgacgggtgagaaacgatgattggagagacagtcttttt

SEQ ID NO: 70839 - DNA, 332 bp, Glycine max
tcggaagggtccagagtaaaaaaatgtctcaagatattgcattggatttctatgatcttctccggctccgggatcatatccaaaagacctctaaccctatctcttctctcctcctaaattcataacctcgaaaagttatcatcagattaatcttctactcacattcctgcgcccatttctatctttactaatatttctccttcacctactcattattatgctgcactctcattattcatttaataccattatagttacatagataacatatatgttttaatcgaggtaatccatcacaataattttgaatcctattttaagtctatatcatt

SEQ ID NO: 70840 - DNA, 255 bp, Glycine max
ttttattcatccattcatacactaccacctagataacacaacacttaacaatttacattactcattacacttacttaatcctcaatctatccaaattcttcaaccatgtcattttcttctgcatctgctttctccaaacttatactatttccccattcttcaacttcttcccttatcttcacaccctttcgttccttcaacaacaacctttaactattccctttcttctacttctttcttcaacccaacaacctt

SEQ ID NO: 70841 - DNA, 140 bp, Glycine max
acataacatactcaaacatatactcaaatctcctcaccaattgcctcaacgaaccctacaactccaaatacctctctcattaaaacctccattacattctcttcaaatctttctacacccatcctaaaaaacctactatt

SEQ ID NO: 70842 - DNA, 301 bp, Glycine max
gacccactcgtacgcccacgcgtccgattttaactgtgtttgtgtgacaaacttgaaaagtactttatggtataagtttaactcaactttgctatttataatctactattcatcttaataagctaaacttaccatacttaattgctaatctaaattcccttgaaaccaattacctgcatttgtcaaaattttcccactattatatccaccattactaatcataattaacccatatttcaatatataataattccctttcattcttgacattcaaattttacaatttaaccaatttaaatca

SEQ ID NO: 70843 - DNA, 295 bp, Glycine max
tcaaaattcttctgcctttccctacttattctttctctcaacctatttagcttaagtcaggttttgaccaatgactagcggttttggtgaatcaactacatcttctgcacctatcccatcatgctcagataacattttaaactatgcctttgattttcaattcaacatattcttcaatttgtcacaagaccctttgatcacactctgttgtcacctattctagattcacaattccttatatttttctccatcatcactcccattctcataattgacctatttctattcccttttt

SEQ ID NO: 70844 - DNA, 245 bp, Glycine max
atcaccctgccgacccacgcatgcgcccacgcttactcctccctctccatactactatcctattcaaacaatgtctcaaaggttacgtgcttttttcaccaaaaatcttccctactctaataacaccattacaaatatctcccattttcatgtcttcctctaaaaacttctactttctattcctactcttctatacctcatcacacaattcatacccttactcaatttatactactaaactctct

SEQ ID NO: 70845 - DNA, 198 bp, Glycine max
  unsure (1)..(198): unsure at all n locations
cgtcccgattagcgtgctanngtttgcctttattggtgtaccttttgttgggtctctatcccnntgctggatgccgtgcatctgagcggatggctcannaaaatcangnnatgaagaaagcagaagggannggcagatnactatgcagnntttctgggaatttnntctggaannnatggtgctnnngggataccctat

SEQ ID NO: 70846 - DNA, 316 bp, Glycine max
ctgtttgcctattggtgttcttttttgtctctaccctgctgcatgccgcatctgtcgatttcaaaaatcagatgaagagcataaggaggcagaactatcagcttctgaattttctgtaaatggtgctgtgatactatctgctgctagcacagttgccagtacttttctcttagttcttgttgcttaatggggctacaagtcatttttctccacaattgcccttgcagcatcttcttctccccttggagtcattatctgtagcactggctgttcatggtgttgcaactttgctatctgtacttgggtgttctttact

SEQ ID NO: 70847 - DNA, 172 bp, Glycine max
aacaatatattcataaaccaaatacccatccattatctctaaattaatcatcacaatatcaaatataacactcctaaataccaactttaatctctctttaacaacatctacattcatctacaaataatatctactaacattacccaccatttatatcttactactacatatt

SEQ ID NO: 70848 - DNA, 189 bp, Glycine max
tctgaatacattcactatactttatactgattgaagggattcaatatgtccttacggatcggaggccttttagtcatgcatcttgtggtctactctgacggagcatacacaaatacactacatgacgcaaatggagcacatgatgcctaatatgcacatgcaagcctataaggaggttacccatgctat

SEQ ID NO: 70849 - DNA, 76 bp, Glycine max
gcttgctcctcttacgagcctttcctttcatttcattgattcggtgggtccggttccagcgaaaccgtcctaaacc

SEQ ID NO: 70850 - DNA, 186 bp, Glycine max
acgcccacgcgttcgaccacgcgtacgcccacgcataccttgactcttgggactcaacttgaatgaccacgctaactaccctgattctgatcagattccttactttgtatagtaatgaccatatgacatacaatactgagaatgaatggatcatagcatgcttgtcatgcaatgccggtggagact

SEQ ID NO: 70851 - DNA, 199 bp, Glycine max
acgccacgcgtcgcggctgattaattgacgtatataataatcaattgctcacttatgaaaggcgtatgaggagactttggcacagcacaacctaccatccacaaagtggagattttgactcattgaccaacttagcgctgaaggaggcgaatgagttgatcgaagggctgccgaagaagttcaagggcgggagttctaa

SEQ ID NO: 70852 - DNA, 272 bp, Glycine max
acgcccacgcgtcggaacccattgtactataaaaacactttgcgctattaagacataaacatggggttatgtacaccatcaaatcatatgaatctaacctctcaacctatgaccataatgacaacatgtagcaagattactatcacatgttaaccaccacggtaacataatatatagctaaagctatctattggcactcatggtaagcactccaaaatgcctagaaatatggcactgccacaaatatgagataatattactaaattactacc

SEQ ID NO: 70853 - DNA, 104 bp, Glycine max
gatggctactattgaagattcaaaacgattctacccactgttcggactctaggccaatttagcccttatttaatttgcccggacactcaaatacttttctaatc

SEQ ID NO: 70854 - DNA, 248 bp, Glycine max
acgcttgaatacattccttgtagttcatactgactgatgggttagaagatgacgttactgatcctaagactttccctcatgctccatctggcctactctgacgtggcatccacgattacaatagaggaggcaaatggtgtggatgatgccgaatattcctgaggaagctatagatatggttacccaggtcatggcggtggcggttatcctggccatggcggtggcaggtatcctgaccatggcggtcg

SEQ ID NO: 70855 - DNA, 237 bp, Glycine max
gacccacgcgtgcggttgaattcttatgcaaagatttctgcccattttctctggatgatattgcccacgtgatcggtccactatgtcaaggatcagctaccacttcttacttcatgacattcaacattattcactacttgctctcatcattaaagactgtagttggttcatttgaggagtctcttttatctggcctattcttatctggaaacaatagcatgaaaatctatggttttc

SEQ ID NO: 70856 - DNA, 125 bp, Glycine max
gaagttgctactgagaagaacgctttcactttttggcattggatttccattatcagggtgggcttcataccctatgcaagtcacctttaacattctctcttctgatcatctaaatccgtaacctc

SEQ ID NO: 70857 - DNA, 446 bp, Glycine max
ctctctgtgtatttccctacctctcccttcaagatgcagatcttcgtcaagaccctcaccggcgggaccatcacccttgaggtggaaagctctgacaccatcgacaacgtcaaggccaagatccaggacaaggaaggaatccccccggaccagcaacgtctcattttcgccggaaagcaacttgaggacggccgtacccttgctgactacaacattcagaaggagagtactcttcacctcgtcctccgtctccgtggtggcatgcagatcttcgttaagacactcaccggcaagaccataaccctagaggttgaaagctccgacaccatcgataacgtcaaggccaagatccaggacaaggagggtatccccccggaccagcaacgtctcatcttcgccggaaagcagctcgaggacggccgcaccctcgccgactacaacatcca

SEQ ID NO: 70858 - DNA, 294 bp, Glycine max
  unsure (1)..(294): unsure at all n locations
cgataatcccaacactttccaaaacttcatccatcaacatactgaanctaanactgggcgaggttttatatactggtgaagcacactctaacattcctcctnttaaacacgctaatacaaatactaagggtagcaacatctaagaagccgattaaacctaccttaacttcctactacctttttataaacaatgattacataaacacactttttactatcgtttattacaactgaattatccaaattacccaacctttactaattatattccccatgcaatacattctctattgt

SEQ ID NO: 70859 - DNA, 158 bp, Glycine max
cccacgcgtccgagaaggcctgggcttagtttataagcataactgggtgaggaataaatagaagatttataaagatggcgtcgagctcataccttccgtcttggagggcggtggcgatcacttacataaccctctctttcttattgacggatctagtc

SEQ ID NO: 70860 - DNA, 375 bp, Glycine max
cgacgcgtctagttttgatttcttaatcaaaaccaattcttttcttacaccaaaattctatatatagagctagatttttttaatatacattccaataccacacatatctactttcacaaccaacaccaaaaactctaaccttaaactaggaaaaggtaaatgcttaatctgctagttctactttatggatgttttaagaactttatcactttacatactcatactggttctgtgctttacttttacttttgatagacaaaatgtctctgtattcattttcattgttaccaagttcaaattgactgcgactgccttataaaaaaattaaaaaaaatttacttaaaattataaaaaaaaaaaattgggcgacccctt

SEQ ID NO: 70861 - DNA, 411 bp, Glycine max
gggtcgcttggactgactcatgaacacttatggattactgaaaacagaatcgtggaaggagacatgttctatcacatattgatgccaagagtgcacacctccactgacacaaccaacaggaagaactctaaatcttggaggaagacagcgtggacgcttgatatgacagttacgatctaacgaagttcaaggaactttatcacgacacatacttcgtcggtcctgagcctgacttcagtgattgagagacgacatggcatctggtgcatcctgaagcgatgcaactgaatgaggactgctcaaaaaatgttaacctgcttcagggttgcactgccattgaattaggttctggtgttgggctgacctgtatactttgcaacatattctgccataacgttgtgatgacagatc

SEQ ID NO: 70862 - DNA, 214 bp, Glycine max
ctaaaccatcacaaacactaacaataataataataataaatcatttgcttatacgcatccttcttcatcaattacaattaccatctaactaaattcacaaatcatttctcaaaacattcaactctactttcttcattcttctaccactcatttttatttaacaattcatcatttttcacctttaaccaatttgctaaataaatatctttcaaaa

SEQ ID NO: 70863 - DNA, 233 bp, Glycine max
  unsure (1)..(233): unsure at all n locations
ccactacaaccacattctcccttcccaccaccacaacggggatttttataaaactgacgaccncaatccctccaactacttttcctaccaccctacctcacacatttctggtttgatcctatttacctttctacggtgtttcaaattcaccaccttcatatctttttcacccaccaagatttcaataggctaaaagcttctcttccttaattaaactctacttctctagatta

SEQ ID NO: 70864 - DNA, 346 bp, Glycine max
  unsure (1)..(346): unsure at all n locations
cagtaactcacctcaccatttncnatttattacattgtccaanctcnnntcttccaccagaacctcttactatatcttcccacccataacccctccttccaaactctcctctctccgactccccacccgccgccaccccaagccaatcacattctacttctccaccatcaccgacaccatctacgtcctcaacaaactccacaaagccaccttctcctacctttactcctaccaccaagtgcacactactacaaagtctgaactgacgataaataagaaggctttgctactcccttaccccatcgctttcacccccacatactcacataaacacattccaaacttc

SEQ ID NO: 70865 - DNA, 261 bp, Glycine max
  unsure (1)..(261): unsure at all n locations
cctaccttncctaaaagaaatttttttaataaactggacccccaccccttttttttttcaanttcatattaaccttcctttcacaccccacaacaaaacccttatttcaaaaaacaatattccctttttttcaaaaactttttcttccccaaacttaatttcccaacaccaaacaaaaaaaacctcctattcatcataataacctttatatcctcaccaccactacccctttttttttttttctttacccaaaacccaaac

SEQ ID NO: 70866 - DNA, 417 bp, Glycine max
  unsure (1)..(417): unsure at all n locations
cccacgcgtccggcaacagaagctcagccagattcgggttaacactgacagcaccgagagggcaaccagctcgattttctgccttatacctgcgacggttgccaacagatcttatgttcgtaacacagatcctacaagtacgacgcgtgcctgaaatgcgaccacaacagcgtacaggatggtgattgcgaagcatgatccatgtccatcgataccaccggacatgtgtgacacgaccaggaggcaatcttgcagaatcacctcaagtctcggaagtgagaccctaccaagaagcngaaaccaatttgtcccgtcaagcggttcaaggaggatttgacggttttcaacaccattacatgtaaaacttgccacattaatgtgagcctcaggcatcgttttcatgatgatcatgcctgt

SEQ ID NO: 70867 - DNA, 175 bp, Glycine max
aacaaacgtaactgacccgcagctcaatgtgattactattaacactgacggtaccgagagggcaattagatcgctatgatgtcttaaaacagcgacggtcgccatacgagacccacgttaacaaccccgatcatacatgctcgaatcgttcctaaaatgccacctcaacagattt

SEQ ID NO: 70868 - DNA, 203 bp, Glycine max
cacactcgtccctcaccagcacctcagctttactaccaaaaacactgacagtgcggagaggtgcaatatgaacgcatttctgtctttcatctcctacggttgccataagatacctagtttgtatcacagatcctacatgctctaatcgtgcctagaattataccacaacagattactgtgtgatgatttaaaagcttgattca

SEQ ID NO: 70869 - DNA, 151 bp, Glycine max
gttacatcttctaacagctcaatcttacttacacaattcttgatcatccacacggtcgggggaaccttgctatacagctgactctcatcaggcactctgctgatcgtaacattgagatttccactccataaaactgtcactatgcaaaatt

SEQ ID NO: 70870 - DNA, 329 bp, Glycine max
ctgagtatgactgcacccgtctcagcgacttcattatcttggtcattcactactcatggggatcggaatcattttgcaaagcgcgaccattgccttccttaagacattctactatgtgcactacatcaccttatgagcacagatatatagcggatctcgttctcatagcgtattaactatgaaacacgtacattgatctaaaccgaccacatagcatactatgtcaacaaatgtctaacgcattcactcatattataacgacatggtatcttgagaatgctctccaatctacccatttcccaaaataatgcactcaatcaagtttctca

SEQ ID NO: 70871 - DNA, 248 bp, Glycine max
cccgcgcgtcctccaaaaccgaatagattaaaaacgctaaaatctactaaatcgggaatgagaaatttaaaaacactgaaatccctctaaccgatatcaaaacgtacattgataaataaatcttcaaataatataacattaataagacgatatatacccaatcttcatattgactcttcaaaacagcgagacaagtaatccaaacacatattatcataaggaaaatgataattataatacaatgaact

SEQ ID NO: 70872 - DNA, 204 bp, Glycine max
gctgcctcctcttacgagcctttctttttattccattgattcggtgtgtgctggtgcaggtgaacttagctagaccctgatcggcttctgcacaccttctgagaacaagattattgtctgcgtcgtcttcgattgtcatcataacaatcttctgtacatacatatctttacagaagccgatgatgctcttaagctacatcatat

SEQ ID NO: 70873 - DNA, 153 bp, Glycine max
ccgacgcgtccgtcaagcattgcatccttttggatttgtagttcgttttgtcctgtaagtaaaatttctgccaaatcaagaggggttttaaaaccatattgagggtttggcaccaatggctaaaatcttgctggttatatacctggcactctt

SEQ ID NO: 70874 - DNA, 198 bp, Glycine max
aatacccacctacacctacgcgggcaccgcctcctctatacaccactacttactatcacaaccagccaccacacgaccaagcaccgtttcatacaaaaatcaccccctacacattcatcaatttcacacacacactcaacatatataactcttatgcttctcactacaaaaacacactcaacatcttccacaacatct

SEQ ID NO: 70875 - DNA, 346 bp, Glycine max
ttagtagatctatccattatggaactggtcaattttaattctgagaagaactatagtagtagaaagatatgttttgccaatatgcatatttaactgaggttgttataactcgttccttccctcataaaagtagaaataggatagaaaaggatcctactatcctcctccattggatatattacatatatatggagtaaattctactcggtcagaaaatagatgtattatcatgaataatgtgagcagtctcacatctctaattttggtgactgattcaaggggttaaattcgatccataaggttaatatgcaatacaatggctacctgaattgtaatgaatgccaac

SEQ ID NO: 70876 - DNA, 198 bp, Glycine max
cggcccgacccacgcgtccgattggcaaccccatgcgacgaatccgacttctccactccttctccgtcgtcttgctctagtggatctaccacttctcatgaactaactaactatcaatcccctaccctaattcctccaatttccccatttttagtctaattaatcagatttgcaaaatcctaatttctctatcctaac

SEQ ID NO: 70877 - DNA, 333 bp, Glycine max
  unsure (1)..(333): unsure at all n locations
cccagcgacgaantcgnctcctccactccttctccgtcgtcttgggctaggggtactacctcttctcatgaactaactccctctcaatcccctaccctaattcctccaatttccccatttaggtttctaattaatcagatttgcaaaatcctaatttctctatcctaacacaaacccccagtgattcaaacactgtcgcaatgagctttcaatgtccgcggccagcgatatccagatcttcggagggaggaggagatccggctgcgatggacgagagaaagaggaagcgcatggagtcgaaccgcgagtccagacggggaacgcgggtgaaga

SEQ ID NO: 70878 - DNA, 174 bp, Glycine max
  unsure (1)..(174): unsure at all n locations
aaagaccctnggcgaccacaccaaaaacataaacataaaaaagcataaaagcacaaaagggcataataaagggaaaataaaacatgtttaagtcatatatgcacacttgattaagggctgtcgtcccttgagacagatgcatgaggtgctaatacctaacctgtgcgtaaaaac

SEQ ID NO: 70879 - DNA, 234 bp, Glycine max
cccacgcgtccggctccctctccccgcttctcttctgttcaaacaatgtcgcaaaccgtggatgcgggcgtcgccaaaaaacttggctggggaaaggccgaaggcaagtgtctcccatggtcaggtgtttctggaagaactgctgctggatattcctactctgctctaggtcatcacagaactcattcccgcggccaacttagaggactaaagcgaggctttaggggcgcatct

SEQ ID NO: 70880 - DNA, 107 bp, Glycine max
gaatacccgggctcgcgcacgcgtgcgcccgcgcgtccgctcgagaatatgacccgtcctaaaatttacgaaacataatgatttatgatttatgatatataatgaga

SEQ ID NO: 70881 - DNA, 99 bp, Glycine max
cccacgcgtccgaaaagaaggaagaaccagctgaagaatctgatgatgacatgggtttcagtctgtttgactaatttatgtaatgcttttgttgagttt

SEQ ID NO: 70882 - DNA, 187 bp, Glycine max
  unsure (1)..(187): unsure at all n locations
gcgattgatattgaatatccatggttttcttatttcttttatccattaaaaaactcgacatggatatttttaanaagaactatagtagttgaaagatatcttttgcaaatattcatatttaactgaggttgttataacttgttcctttccttaaaaaaaataaaaaaggaaagaaaaaaaacctttt

SEQ ID NO: 70883 - DNA, 141 bp, Glycine max
  unsure (1)..(141): unsure at all n locations
nccgcnccggccannaaagagaccaagggtctaattacaaaaaaattccaaaaatttaagacctagaaattttaatgaaaaaaaggtaaccaccttaacccatccaaataataattaaagaattaaaattcaaattccaaa

SEQ ID NO: 70884 - DNA, 327 bp, Glycine max
cgcgtccgcttggggatcccaacacttttggtaacaggatccacattttactaaatcttggactcatcagtgatgtgtacactggtgaagcggatgctgacattccttatactgaagacgctgatgcatatactgactgtatcaacattgactaatctgatttaatctgacttaattgtctgataccattttataaacactgattgaagaaacactctttgtactacaactaatgtttatacaatttacgaaatattggaacgcttgcattctatgtccaaatgtatttataacgttaacggaaaaaaaaatatctagtgttgacct

SEQ ID NO: 70885 - DNA, 282 bp, Glycine max
cagagttccagttaacctctctcacctacctattactttgattattcactactcatcaccggtacagtgataatctcaaccggccccattcacttccttatatcactctactattttcactacttgttctcatcattaaaaatacattcaagttctcattcccatatcatattaactctaaaaaactctcattcatataacattatcacattacatactaatgcaacctactatcaattcaacaacccaaattatattgcaacgatatttactgatacattt

SEQ ID NO: 70886 - DNA, 219 bp, Glycine max
accgacgcgtccgccgaggcttagtgtaccctagtcagctacgctagacacttagcaaataacaactcctgatcggcgaagggcatatttacaacagcccaactaactgcataatgtcattctaacatactcactacactgcacaacgagctctgataaacaccagtgaataatgcaacagattgttgactaaacaacaagaatatccatctagcagct

SEQ ID NO: 70887 - DNA, 257 bp, Glycine max
  unsure (1)..(257): unsure at all n locations
acccacccgtacacccacgcatccggccactcttccaaaaaaatttaaatttcttctcccatatgaaccctaaggtcnattgttacatcacaaacggtcttcaacactcttaaccaaccctcatataccaaataatctacaataatacctaaactacttacccacaaataccatataatcacatcaaatacaacaaatttaaatactgacattcaacttcatctttacaaatacacttatactaactaacataccaa

SEQ ID NO: 70888 - DNA, 296 bp, Glycine max
catctccaaacatcacattttctatcttcaatataaatctcagctatatataaaccaatttataataaaactacacatacagatcttattccataatcatcatcatctactaacaaaatgctcaaacctctataaataaacttatactctccaaatatcattcaatatttcctgtaataaatcttcaaagaacacatctcatttaaccccatatgtaaacttacacattccaattaaatttatatatcctttatcatatacatattattctctaatctactttatcatatattaat

SEQ ID NO: 70889 - DNA, 286 bp, Glycine max
agaaaacctaagcttagaattagaaacaaagaaaagaagaaaggaaagaattgatcgttgaaaatgcagggaggaaagaaagcgggagagtccattaaggaaacagctacaaacattggtgcttctgccaaggctggcatggagaagaccaaggccactgtccaagagaaggcagaaagaatgacagcacgtgatccggtgcaaaaggagttggcaacccaaaagaaagaggcaaagatgaaccaggcggagctggacaagcaggcggcgcgtcagcataacacgg

SEQ ID NO: 70890 - DNA, 274 bp, Glycine max
cttttgtactttgagtcttcttgatccttctttttctccttgaactcaaacatggcagatgaggtggtgctgctagatttctggccaagtccatttgggatgagggtcaggattgcacttgctgaaaagggtatcaaatatgagtacaaagaagaggacttgaggaacaagagtcctcttctcctccaaatgaacccggttcacaagaagattccggttctcatccacaatggcaaacccatttgtgaatccctcattgctgttcagtacattg

SEQ ID NO: 70891 - DNA, 302 bp, Glycine max
cgggccgaccgacgcgtgcgcccaggcctgctgttggctatactaaccgatctacacatctgaaaatcaccagagcatccggttaaatcaaaaaatgacatagacaatagcccaaccgaaccctatgctctatcacgactaaacaacaaaactataatttaagtaaccatcgacgaccacctatacacttgtaccacatacaccatatgtaacctctgaatccttaaacaactatgttaatattgagaataccaagacccaacctatgataggaatcctgattgaccaccaggcattcattg

SEQ ID NO: 70892 - DNA, 75 bp, Glycine max
gcttgcgacgaggcaagcttacgtacacttttttgcgtcgtcatacctcttctatagagtggcctaggtgcaatt

SEQ ID NO: 70893 - DNA, 301 bp, Glycine max
cgaccgacgcgtgcgcttggtgatcccaacacttttcggttacagtgtatcacaggatgctgaagcttggagtgagcgttgattaatatgctggtcaaggatatgctgacatgcctccttttgatgactctgatgcatatgctgacggtagcaagatggaataagttcgttaaatctgacttaatcgcctgttacgcttttacaaacactgattggagaaacagtctttctactatgttgtatgtcttttgaattttcgaacttttggaacgttgcctagttaggtgccgcatgtattagg

SEQ ID NO: 70894 - DNA, 185 bp, Glycine max
attcaaatgctgctagtcatttcaataataaacaacattacgatttattcatatcacatgatcactttacttataatttatcaatatcatctcaataccacattattcaagtaatattaccaaaatcaaatccttattctacaatattctttcaactacataacatattacatcattctgcaaat

SEQ ID NO: 70895 - DNA, 116 bp, Glycine max
gaaaaaaaaaaaagccttttactttttttcttttgcatgatttgaatcttgattggaaaagcttcgaattggggtgttttacccatcaattcaattttaagccgtgccttcttcag

SEQ ID NO: 70896 - DNA, 169 bp, Glycine max
cccacgcgtccggtaggattaattgatgtatagaagaatcaattgctcacttatggaaggttgtatgaggagactttggcacaatccaaccaaccaaccacaaagtggatattttgactctttttttcccttaaaaaaaaaaaaaaaaaaaaaataataaatatataaa

SEQ ID NO: 70897 - DNA, 268 bp, Glycine max
gcgcccacgcctcctcccagcgctcctatcccttataccacacttgccatatcatataagacaacagcaacatttaatcagatatacaacatggacgcacttaactcaatggtttcaaagcacaaactcaccaacaatgggtcactctgagcctctaaaaccatatcaacacttgtggcttatacatgcaaaaagtctccaataaaaccaaacctaacgcttatccatgctaagacacatactcaaactctaactttaccaatactat

SEQ ID NO: 70898 - DNA, 141 bp, Glycine max
gaaaaaaaaaaaagccttttactttgtttcttttgcatgatttgaatcttgattggaaaagcttcgaattggggtgttatacccatcaattcaattttaagccgtgccttatgtaaaaaaaaaaaaatattgtaaataaat

SEQ ID NO: 70899 - DNA, 309 bp, Glycine max
aaaaatatatttaaaaaaaaaacaaaaatattaaaaaaaatttaaccctaaaattttttaaaatttacttctaacttttttttgtttaactttttatttttttaaaacctaattttttccaaatttaaaatttttaaaccttaattactcttttttaaaaaaaattattatataaattttaattttttctaattatatattatattttttaataatattatttaattaatatatatattattttaataattatattttattatctaaaaataattttttatatattttttattatattttatactattt

SEQ ID NO: 70900 - DNA, 360 bp, Glycine max
  unsure (1)..(360): unsure at all n locations
acctcgccacctcatgattgatgatatgcgctctatgtgaggtctagagatggtggagagctcatacactnacctttcaccatgaagatgaaaccatcgacgtgggaactgtcaagaaaatcaaatgttgagagatacaggtgttgccagcggaaatagatcgaaaagtatcagaggtgatgaagttctgttccgagatggcaaatcacgcccattcgactaaattgttttctgcacacgcttgaagaaatcaactgaaaagtggcttcagggggtgatgatcctctaaatataatgagaatggcttttccaaagttcagagttccaaaattattggaaagggcgaaaccgttttgtttt

SEQ ID NO: 70901 - DNA, 418 bp, Glycine max
ttttcctttctccctccttcttttttctttttttttgggcctctttttataatttaaattaaaaaaaagaagtttttttttaatttttgacccaatataaaaaaatataattttttttttattttttttttttttctttttcttttttttttttatttttttttttttttctttctttccctctttttctttttttttctttctttcttcttttttcctttttttttcccctctttttcttcttctcttttttatctcttttttctcttcttttcctttcttctctttttctctttcctccttttttctctccccttttttttttcccttcttttttctcttctttttttttttctcttttttttttctttcccttttcttttttttttcttttttcctttctcctttttttcttttt

SEQ ID NO: 70902 - DNA, 245 bp, Glycine max
cttcaactgctccattctcaccttcggtccccacgccgtctactatcctgccacgcgctcatctgaatatgatacactcggaacctctatcaaagtcgctgctgcttatctagcaacggcattagtgaagattatttggctagctacttctatcaaggtttcggagagagatagatatgatccggatcaggagtttgtgaaggcattaacaggctgaatagatgtcgttgggctttataccgtct

SEQ ID NO: 70903 - DNA, 273 bp, Glycine max
  unsure (1)..(273): unsure at all n locations
ctaatggaggctttgctgctaagcagagaccacttactaaactctgagaagcaccacganaatgttgatatagtgccaaaacaaaagcctcaaacactggattccctgttttcaaacatgaaagaacaaacaattttatttttgtcaattcaaaataatgttttgcaacccaatttacgttgaaataataagctcccattgataaaaagcccatcttccaactaaatttctcacaccattgtcaatttcattatatcacccttttaacctata

SEQ ID NO: 70904 - DNA, 170 bp, Glycine max
atttcctattcgcttctattataattggaatttatagttttgtattacacccaattaatgtttacagctgctgtattttatttttacctgctgtcctataatacacatgtaacacctttattattgttataacttattttcttctcctttcatcatctattttctctcct

SEQ ID NO: 70905 - DNA, 409 bp, Glycine max
  unsure (1)..(409): unsure at all n locations
cccacgcgtccggatcgagataactagaaacagtgtgatgaaaatgaaggtccttggtgggttcgttgctacaattgtgggagcatggcaatgccatgcgtacgatatgttccctctccgaatgaacactggctatggtgcccgtactccggaggtgaaatgcgcaagttggaggcttgctgtggaagcacacaacatctttggctttgagaccattcctgaagagtgcgttgaagcaacaaaggaatacatccatggcgaacaatatagatcagactccaaaacagttaaccaacaagcttacttttatgccagagacctcgaagtccatcccaaggacacatttgtgttcagtatagatggcaccgtactctctaatattccatactacanaaaacatggatattgg

SEQ ID NO: 70906 - DNA, 261 bp, Glycine max
atgtctatcttatctattgcctcaccaacgtacacgatgatcaatttcaatctcaattaatcgacagccattgacatgttctttgacggctcacgcgagaagaagagggaaagggaaagtggttatgagcatggatgcaagaatgggagcgacgggcaccaaattggagctgacgagctatttctaatccaaccgacaggttagacctgtgactgtcttgagcctcaaagaaaggctcatcgagacccagatcaaaactga

SEQ ID NO: 70907 - DNA, 336 bp, Glycine max
  unsure (1)..(336): unsure at all n locations
tacaccgaactattatacatctattaangacattcttttatcgacctcacagttctcctttgctaagtttatcacaaaggggcgggccgcttcccacattttttccccttttactgtcttaatatacatgacttactcccccaccccttatactcatctttcacatttccttcacttttatcaacctttaaaaacccaactcacacatattttgtcacctttttcttcttagactcatgaaacgtataattaccttccagtccatgataattcaactttcacccatgaagtattataccctctactgaacacatgtgattcttcctttcctatctt

SEQ ID NO: 70908 - DNA, 257 bp, Glycine max
ataacctactccaccaccacttataccatcttacacatttccttcatttctcatcaacctgacaaaatccaacccatcaaaactttcccacctttttcttcttatcctcataattctcataaccaccttccctacccttacatttcaaatttctaccatcaaactttatacccttcaatcaacacttgtaattctctcctacctatctcctatcctctcacatccccatacctttttcacacctaaataccaccata

SEQ ID NO: 70909 - DNA, 276 bp, Glycine max
  unsure (1)..(276): unsure at all n locations
taaactccttntcctccccaatgtttcaactagtctatataaaatataaatatcacgtttcacattttttatctaaacttattgaaatttatcaaccactcctttactcgtacattctaaacatatactgtttcaatcttcttaaagttttctttttattatatatgaaaaaacgaaataaaacttgcttctttaatttctattttcactgattacactcacctcctctctatttaggacaatttcttcatttaagataaaacaattcctacaact

SEQ ID NO: 70910 - DNA, 350 bp, Glycine max
  unsure (1)..(350): unsure at all n locations
tcttctctttnctcctttttttttccccccctaaccccctcccncacgaagatttttttaatagtccgcccccccccccccccccctntncccttctttcttttctcccttcttcctccccctctcccctttccctccaccaccacattctctttttttcctccccccatctcccccctctcccccctttttcttntccttcccctcccccctctctctcccccctctttcccctctctcccctctcccccctttcctctccccccttctccccctctttctcctccctccctcactcctccttctctctcccccctccctctccctttttctttccactctcctccctc

SEQ ID NO: 70911 - DNA, 398 bp, Glycine max
cccacgcgtccgctagaaacagtgtgatgaaaatgaaggtccttgttttcttcggtgctgcaattttggtagcatggcaatgccatgcgtacgatatgttccctctccgaatgaacactggctatggtgcccgtactccggaggtgaaatgcgcaagttggaggcttgctgtggaagcacacaacatctttggctttgagaccattcctgaagagtgcgttgaagcaacaaaggaatacatccatggcgaacaatatagatcagactccaaaacagttaaccaacaagcttacttttatgccagagacctcgaagtccatcccaaggacacatttgtgttcagtatagatggcaccgtactctctaatattccatactacaaaaaacatggatatggg

SEQ ID NO: 70912 - DNA, 97 bp, Glycine max
ttttactttatctacacctaaataaccaccacccacacctttatcatcttattttcaccattctcatctcaattccataattcttaaattcctttct

SEQ ID NO: 70913 - DNA, 262 bp, Glycine max
cttctctctctttcccctttctttctttcttcttcctccccccccttttttttttacctctcttcccccctcacccaccccctttcctccctcttctttctttttcttctctctctctcttcttttttcctttcctccttcttccctctttctttctttttcctcttttctttttctctctttcctctcttccctctctcttttcttctctctcttttctttcccttcctcctttcttcttcttctttttcttccccttttc

SEQ ID NO: 70914 - DNA, 127 bp, Glycine max
gcacctcgcatgagaactgagttggtaccattagagaggctaccagattatctgttaaatagactgaagttggataaatagtcaggataaaagaccaagaggtattatgaaacagacacctctgctt

SEQ ID NO: 70915 - DNA, 364 bp, Glycine max
  unsure (1)..(364): unsure at all n locations
cttacacanatatctnatctctcttaaaaaaaaacaacaaccccnccaggaccggctccctaacaatttatgatatcccccattanccctctattctttcttattaaatactattataccataccctctttttctcatatatccataaaactattatatcttctacttattacttcattatacctaccagatcttcttacttatctacataaaacacctgtcatttcttaatttactaatacaaccaccactcctaaccactctacttcacttaccatcatctaactttttactacacctatgttcaccctttttctcactttataagccccacttccaaattcccttatactcacatcataac

SEQ ID NO: 70916 - DNA, 454 bp, Glycine max
attcccggcggacccacacaccgacctccatttcctttatgtttatggttttttcgtgcaacagtaaagaccaagcagagacagcttttaaaaattgcgggtatttattaacatcaatgtttcatgcattatctgcccctagcttttgtttaagctatcccgttaaccttcattatcctccttctttatttcaaaaaacatgtttttctattcactgttctttttcacacacaaaataattatctaaaattgaatatactccttgtctcattattgacttgtgcaatccttgtaacaaataccatgtcacaattcacaatgtttgatttgaaataattcatagcctttctccagcacaacgtattcacatgaacacaattcattcaaaatccctcattcgaatatgtcctatttttcaaaaaccaatttttccttccatatcccctaacataca

SEQ ID NO: 70917 - DNA, 86 bp, Glycine max
  unsure (1)..(86): unsure at all n locations
ccgtccatcctcgttactctctaccccttgtttttaaatcccctgcnactcancacatacgtacttcttcaccatcggcggataaa

SEQ ID NO: 70918 - DNA, 153 bp, Glycine max
aacggcaactactcggatagttctaaaacttcttgtttaacatggcttgtcatgtttgccatgacatatgtatttgtcatggttattcttctaatccgtgtcacagtgtaaaagaaatgactttcaatataacttatcccattaataagcttt

SEQ ID NO: 70919 - DNA, 391 bp, Glycine max
ttcccggcggacgcacgcgtacgcccactctttctcctacgcgttcttgaatatttacctcatctgcaacgtatcaatgggagactgcttcatatagaactctgacccaaaaaactactgtcctgattctcgcacatgccgtacctgtctgaatacacatgtactgatcaagaaaaatgaccttatgtgctgctatcactgcttccttaacaataccaaggaaatactcttcatcaagtacatctaaaagagcacttgtcaactactgaccaatatccaattctgccactactatatttttaaaaccttatgtttgaagaaacttgagactgtattttttaatctaagtaactatcatactttatttgtgatactattacacactctatat

SEQ ID NO: 70920 - DNA, 213 bp, Glycine max
  unsure (1)..(213): unsure at all n locations
ccctcacttccaccaattctttcttttattttaacctcatcttcttctactcaaaggcagatttctacataaggaactctcgcccaatnatctaccttcctaatccactcactttccctgtcatgtgttaattcacacttactcatcattacaacttccctcatttttctcattcacaacttacaaaacacaaccatataaactccctaaatc

SEQ ID NO: 70921 - DNA, 271 bp, Glycine max
  unsure (1)..(271): unsure at all n locations
accacactctttacccttcataccctcttttttaactatcatnaacctcaattatggaagttttattaaaaaactaatatcccctatatatccttcttcaaattactctcaactgtaactattttaactctccaatttatattcttaaatttatttcataatatttttctttacaatatatctatcataacttttcctaattcaatcactccttatctaacttacatattttatattatttatatttacttttactaccatattttacttc

SEQ ID NO: 70922 - DNA, 195 bp, Glycine max
tccgtttctctctttccttaggagggtggatggtttggaaaaatggattcttgccattttgaagggggaaaaaaaacccttggaaagggaaattgtaggtgtccctttccttgaattttaaaacccaaagaagcaaaaggctggagttacctgaaggggatttgagcaaattcctttgcttggggaaattgaaaa

SEQ ID NO: 70923 - DNA, 313 bp, Glycine max
ccgggccgacccacacaacgcccactctttccttttctcatacgatcttttatatatttaaccaaaggttcacgagggggtcatgaataaactgtgtgaggaaagaaaaaaagataaactacttacttaaaattcaagaaccaacaaaagcacggcctttatacaagatccaagcttacttacacatccactcgacgtctataactcctctataaagtcacccaaattcaattcaacgctcttattaccacaacttattacactgtaaaactctgaccttacccaacttattaccctatctacacacttccct

SEQ ID NO: 70924 - DNA, 397 bp, Glycine max
  unsure (1)..(397): unsure at all n locations
gctatctttctccctttatctataacttttcaactacttttctaaattctaacctatgctgcttttacaattgggacgactccaacntttcttactcttacccaaaaaactactatcctccttctcacacttgcccttgttttttaaatacacatttacttatcactactttttgtcttatacccttcatgcattactcccttatcaattccaatgaaattgtcttcatcaactataccttaaatatcatttttctactacaaaccaatattatattctttcactaacatttctttatgatgttattttttaataaactttaaactttttttcttcatctaattaattcttaaacataatttttaatccttacaatactcttatttaaattctcttt

SEQ ID NO: 70925 - DNA, 199 bp, Glycine max
tcttcctaaaaaaaaatataaaaaaaaaatttaaaaatttataaaaaaaaattataaaaaaaagattaaggaataaatttaaatagaataaagactaaaaaataaaaaataaaaattataaactaaattaatatcaaaattctacattatacattaataaaaaaaattactaatataacacaaatatattaaaaatatc

SEQ ID NO: 70926 - DNA, 155 bp, Glycine max
cccgtgtcgacccagacgtgcgcccactcgtcctaccacgcgttcgattcattctagttctttattcctactagccacgttgactcggatcctggattcgttctcaattatctggtagtaaggaatagcttaaaggcacattacaatgaatgcat

SEQ ID NO: 70927 - DNA, 164 bp, Glycine max
ttaatgtaaactcttatattatgatcattctaaactaaattttctttgatgcacattcacttgcctttatcaaaaacttaccatacttcatcctctactatcaactccaatttcatttccaaatacctccttcaataccaaccacttctacattcaacttacct

SEQ ID NO: 70928 - DNA, 443 bp, Glycine max
gaagaacaagcaacagagaactaacaacgacatacaaatcacttcatcaatcatatattgcccacgtatacgcactgctaactgagcctgtgccggcatcgtatctatactcacacaactcacatacactcatatatctcacattattataacatacatttacataacctatacttctaaccaccaatgccgaatgcatcaaatatacatgatccaacaagctaccacaaccaacatgcaaacattataatacttgtacctccatcaaccttcacacttcttaaaccatctaccttacgacaataggaacgtacggaacattagctcacaccaactaccacagcacgacatctacaacctcgattgctactaatacccactttatactcttacattcatacaactctatcattcgaccacctatcttcatttgcactcaactt

SEQ ID NO: 70929 - DNA, 145 bp, Glycine max
tcaaaatcactcaagcccagattcaaccatatatacttttaacccaatgctatgatgtttcaaaattgagatcgttaaatataacagttactgcagcccacaataaccctctacaataacattatctcatatctattatcaacac

SEQ ID NO: 70930 - DNA, 384 bp, Glycine max
aaaactttttgtcaattcatttcttagggttagactctgcttctttctccaacggcacacgcaaaaaaacatggcaaaggagagaacaattggtgtggctctagatttctccaaaagcagcaagaatgctctgaaatgggcatttgacaacttagccgataaaggtgacaccatttatgtcattcacatcaacccaaactctctatactagtcccgcaacaagctatgggcaaaatctggttctcgtgagtatcaattttgtgccaattttatttatttgggtttctatattctatattgtatatttgtctgtgaacatttcttttatatctattgatctgagtcgatctgatctgatccgattttattttgcttaatgtaatt

SEQ ID NO: 70931 - DNA, 355 bp, Glycine max
tccctatcgaccaggcgtccgaatataaaaaaaaaaaaaaaaaaaaaaaaaaaaaaaaaattaaaaataaaaaaaaaaaaaaaaaaaaaaaaaaagaaaaagttaaaaaaaaaaagaaaaaccaaaaaaaaaaaaaaaaaaaaaaaaaaaaaaaaaaaaaaaaaaaaaaaaaaaaaaaaaaaaaaaaatcccccccttaaaaaaacccaaaattaccaaacccttatatcaaaacaaaaaaattctaaaaactacccccaaatataaataaaataccacaaataaaaaaactctcccccataaaaaccctaaaaaaccccaaaaaaaaccacttccaaaaaaaccccatttcccc

SEQ ID NO: 70932 - DNA, 381 bp, Glycine max
actctatagatcccccgctgacgcaaccatacactttaaccttcatcctctcaccttctgtttcatctaaacaacggctattgcacagcttcggctattttctaaccggaatcagtcatagtgatagcgatgaacaatctacctacatcatatctgctattgaatactatcctaataaataccatgaaattgattataatctaaacattgatcaccgttccacttcaatcatgcatactcacatattgccagcaccttaaaacctcaatatcgaatcttattcgctatttgttcataacgcttagcacataaacaatgcacgtttcatgtgataaagttgaatacacaattctctatgaaatgcacatgctaaaacacaat

SEQ ID NO: 70933 - DNA, 273 bp, Glycine max
  unsure (1)..(273): unsure at all n locations
tacttgacaaggtggaaactccatgcactatcattcaaaccaaaaaggatgcacttgtgccacacaacgtagcgctctacatgaagaacaaaattaaagggaaagttactttagagatcatagatacacttggccatttcccccatttaactgcacaccttaagttcgttcaagtgctcaaggctgctctagcttcataaaacgaggaataaatatataaaacatgttantttaatattttcttaacgcatacttttatggtgaatttcctct

SEQ ID NO: 70934 - DNA, 134 bp, Glycine max
cctccccctggttccgttactactgtcttcccaagtgcttccaaaatcccgggaacgattacaacaacattttcggcttgaactttaacctaaatctccaaaataaaaatgaaaatgaagggaaggaaggaaaa

SEQ ID NO: 70935 - DNA, 274 bp, Glycine max
ataatcaactgtcaacaatcttccactataccttttaaacgtgcatcaaaaaataattttagtaatgttatacataaaaaggcttgaaagatatcaaatcctgaatagactacaacctctaaagcggatgaaatgtactcctatggatcagatcattacttcactgtaatattcaatgaaattattacaaaccataataaatctaacaaaaatacaaaatcaatttccatattatacattctaaacaaatatataaacttccattatacaaaac

SEQ ID NO: 70936 - DNA, 52 bp, Glycine max
gagactcttacggagaatatgaagttggttgctgcattagttgctgcagcat

SEQ ID NO: 70937 - DNA, 275 bp, Glycine max
aatatcacttctacttcagttgccatcacatacaatctgatttatgttctacacaacaacaaacattcagccacgttcactttcataccactaccactacatcatccaaaaatcaccctctacaccacaaattctctctcaaactctaatactcaaatcaattcatcttttaactataacgcaacctcatcactcacatcaactattgttacaccatatatactacatccatatcttcctcatactcctaaataagaattcttcccttccctaaa

SEQ ID NO: 70938 - DNA, 178 bp, Glycine max
  unsure (1)..(178): unsure at all n locations
ttctctcacctgaaaatgtcttgctgctttggtttctgtccttgcggaagctcctacaagggcaacgtcttctttttaaactgcgagatgtacccacacttgatctacacctagtcaaccaccacctanacctttctcatggtactctcagttaatgctcaattctagagtgctgaaa

SEQ ID NO: 70939 - DNA, 460 bp, Glycine max
cactctttaagatcccctccggacgcacgtataacacacgacctcacgaaactttaacaaacatcttcaatctaacgggaacctttactgcaattggccatctatcaaccattatcagcagcttcctctctttgacttatacaaatagttatcaccaaactaacaactaattccttctaaaatcatatcactcctgacacatctcaatacctctcaccaatactcacaacaatatgaatttctctgcctttggctacatcatcataattacccaagatcaaactattaattggatcatacatgcatcatctcgtatcatcggcattagtgaacgaatcatgcttcggcgttaaaaaacaatgttattcaatcgtttatcatattctgaaaatgttgatcttgattacactccatttcataaaaaattaacggcgcaccatttccattaaacccataacat

SEQ ID NO: 70940 - DNA, 467 bp, Glycine max
cccacgcgtccgcccacgcgtccgctagatattgaagcgtcttcagacttttattcaaaggagtgtaattcaacactttctcttttggatgagcttcgccacttgcaagttaaaaattgtgttaaaacaaaagctgctgaagatacagatgttgagtcagaaaaaatctcttgctcccaaactcaactccaagaaatggggaatactgatcctggcagagagaacatgtctttgcatgtgaaccgaacaaaagattggatgcagaagacatcagcacatgtaaataagctgttgagtgcaacatttccacatatctgtattcacccttcacaaaaggtgagaaagggacttgttgatgctataaaaggactcttgtcagagtgcttctacacactgggggaaagtagactgatgcttatggagtgcttatgtgccttggtcgttgatgtatctaatgatgtgtcttc

SEQ ID NO: 70941 - DNA, 296 bp, Glycine max
ccactcgtgcgatttactgaagtgttcttgactggtttgcagaaagctacttcattttgccatggtttataatactcgagagtgctgtgaatataataacaatgtccagatagaaattgtgaagttagaatgtttattgtagggttagagtccatatataaaattgtgaattaagaatctttattgaaagatcataggcactcacaatctattgttttcattttggatataacatatttaatattttttaatggccacaagatataattaaatttttattgtataatatttattta

SEQ ID NO: 70942 - DNA, 397 bp, Glycine max
atcccctgctgactgacgcatcacacaccacacctgaaactttagcatttatcaacaatctccagggtaacttttctggaatttgcgattaatcaaccagtattaacagctcgctctccttgacttattcaaataactatcggcaaactaactgctaattgcttctaaaagcatgtgacgcctgacacatctcaatacctctcaccaattctcacaacaatatgaatttagcttcctttggctacatcatcattattacccaagatcaaactattaaatggatcatacatgcacattctcgtattatcggcattagtgaacagtttcatgcttgtgcgttaaaaaacaatgttattcgatcgcttatctatacattaaaattttgatcttgattaca

SEQ ID NO: 70943 - DNA, 382 bp, Glycine max
accactcgttcgcccacgcgtccgacaactccaactatatgtgcaactacttgtgcacgggaacctgtactacatgcttcgctgcacgctatcataccactaacatgaactaccacatgcactacgttattcactattgatgctactctaaagtcatccttaatattattatgatgcttatcactactcttatggacacttacttctacgccatttttcaaaacggactccacttctataggacgaatgctttcgttctcgtgaatgcaagtgcatatctcactatatgggtcacctatagcgaatgctatgaccgtctatgtacaacatgtatcctagataccctaacgtgctacccaacttattacccttcttaatcatc

SEQ ID NO: 70944 - DNA, 123 bp, Glycine max
cacacgcatactcctcaatcattcatatacatattcacctacactaatccatcagtttctataaactgaatcagtctccttaacacatgcgcaggggcctttcattactccacaactaaagtc

SEQ ID NO: 70945 - DNA, 354 bp, Glycine max
aaacagtgtgatgaaaatgaaggtccttgatttcttcgttgctacaattttggtagcatggcaatgccatgcgtacgagatgttccctctacgaatgaacagtggctatggtgcccgtactccggaggtgaaatgcgcaagttggaggcttgctgtggaagcacacaacatctttggctttgagaccattcctgaagagtgcgttgaagcaacaaaggaatacatccatggcgaacaatatagatcagactccaaaacagttaaccaacaagcttacttttatgccagagacctcgaagtcattccaaggacacatttgtgttcagtatagatggcaccgtactctctaatatt

SEQ ID NO: 70946 - DNA, 306 bp, Glycine max
ctcacctacttattcgcttttcgctctatttcttaaattattaaccctattatatcactcttacatttttctttaaaataatctccatcctataccctcactatttcatcattttactctttatcatattactctaattcctccacttacttccatatattctactattatctattaccatattactattcaacctactacctcaatttcataattccaatataacccttcacatcttcatttactctcatcttactttctccaaaatattttaataactcctttttaatctctttatcattatta

SEQ ID NO: 70947 - DNA, 107 bp, Glycine max
tcttccacccactcctccccttactcttactttcataattacacaacaatcttctttctcgcgttatgggttaatcctagattttctaactccacccattcacacta

SEQ ID NO: 70948 - DNA, 373 bp, Glycine max
tccctatccgtctgatcttaatcatcccataaacctttactttacttacttatttcatctatcatctaacttttctgttttaggtctcttattaaattttctaactccaccatatcacactcatatttttccaccatcttatctccatacaattccttcactatctcaacctataactctatatcacatttcactaattcctcaacttcctccctcatattctcctttcatctattaccatataactcttaaaccatccaaccatttttcatcatactaatatacccctactatccttcaatcactctctctttactttctccaattcctcttaatatctccttattcacctcttttactctattaaaaatct

SEQ ID NO: 70949 - DNA, 429 bp, Glycine max
gtagcatggcaatgccatgcgtacgatatgttccctctccgaatgaacactggctatggtgcccgtactccggaggtgaaatgcgcaagttggaggcttgctgtggaagcacacaacatctttggctttgagaccattcctgaagagtgcgttgaagcaacaaaggaatacatccatggcgaacaatatagatcagactccaaaacagttaaccaacaagcttacttttatgccagagacctcgaagtccatcccaaggacacatttgtgttcagtatagatggcaccgtactctctaatattccatactacaaaaaacatggatatggggtggagaaatttaactcgaccttgtatgatgaatgggttaacaagggcaatgcaccggcactgcccgagactcttaagaattacaacaagctggtgtct

SEQ ID NO: 70950 - DNA, 147 bp, Glycine max
cccacgcgtccgtttttatttatttcgtaagcctttaatttttgttgctgctgctactgctgctgtaaattagactgagtatgtttttcaagtaaaattagggtttttggattatatgaaatgatatactgtccgagtctttgatat

SEQ ID NO: 70951 - DNA, 429 bp, Glycine max
agtttgttgtgagctataagctagtttatcgtgaggagaatatgaagttggttgttgtctttgttgctgcagtagttttggtagcatggccatgccatggcgcaggctaccaaaggttccctctccgaatgaaaactggctatggtgagcgttcttcggaggtaaaatgcgcaagttttaggcttgctgtggaagcacacaacatccgagcctttaaaaccattcctgaagagtgcgttgaaccaacaaaggactacattaatggcgaacaatttagatcagactctaaaacagttaaccaacaagctttcttttatgctagtgaacgcgaagtccatcacaacgacatatttatattcggcatagataacaccgtactctctaatatcccatactatgaaaaacatggatatggggtggaggaattta

SEQ ID NO: 70952 - DNA, 314 bp, Glycine max
cccacgcgtccgcccacgcgtccgcgcccttttttttttttttttttttttttttttgttttttttttttttttgtttttttttttttttttttttttttttttttttttttttttttttttttttttttttttttttttttttttttttttttttttttttttttttttttttcttttttttacttaattttatttatttttcattaattataatcattttatatttgaaatatttttctttatacaacttttttaattttttctatttttccattttaaacatcttttaaaatggggaattattttcttatt

SEQ ID NO: 70953 - DNA, 438 bp, Glycine max
ccacgcgtgcggtttgttgtgagctataagctagtttatcgtgaggagaatatgaagttgtttgtttggtttgttgctgcagtagttttggtagcatggccatgccatggcgcaggctaccaaaggttccctctccgaatgaaaactggctatggtgagcgttcttcggaggtaaaatgcgcaagttttaggcttgctgtggaagcacacaacatccgagcctttaaaaccattcctgaagagtgcgttgaaccaacaaaggactacattaatggcgaacaatttagatcagactctaaaacagttaaccaacaagctttcttttatgctagtgaacgcgaagtccatcacaacgacatatttatattcggcatatataacaccgtactctttaaatatccatactatgaaaaacattgatattgggtggaagaattt

SEQ ID NO: 70954 - DNA, 417 bp, Glycine max
ttcccggtgggacgccacgcgtgcgctcgttcttcttcttttgttgttctgtgtttgtgtttgttttttctctcacctgaaggggtcttgcggcggtggtaactgtggttgcggaagctcctgcaagtgcggcaacggctgcggaggctgcaagatgtacccagacttgagctacactgagtcaaccaccaccgagaccttggtcatgggagtggcacctgttaaggctcaatttgagggtgctgaaatgggtgtgcccgctgagaacgatggctgcaaatgtggaccaaactgctcctgcaacccctgcacttgcaagtgaggtgttgggagagcaagcttcaagcagagatagcccttaattaggaataatgataaactattaatgtgtagctaaaaacttatggattatgtctg

SEQ ID NO: 70955 - DNA, 320 bp, Glycine max
tccacgcgtccgaaaaaaaaaaaaaaataaaaaaataaaaaaaaaaaaaaaaaaaaaagaaaaaaagaaaaaataaaaaaaaaaaaaaaaaaaaaaaaaaaaaaaaaaaataaaaaataaaaaaaaaaaaaaaaaaaaaaaaaaaaaaaaaaaaagtgggacctttttaaaaaatcaaattttaattaaaattttttgaaaaaaaaaattttttttttatgctaactaaaataaatttaattgccttttttttaaaaaatatataaattgtaaaaaccttgattttactaaattaaattcctttaaataaaatacctttt

SEQ ID NO: 70956 - DNA, 358 bp, Glycine max
aagcaatctatggtgtcacctattatggcaaaggacgaatgccaggctttggtaaagagtgcatgccacggggtcagtgcacatttggagctcgtttggaagatgaagatatccagatattggccgagtttgtcaagttacaggctgatcaagggtggccaagtatagagactaaagaagaatgatttaatacatatttggttcaatttaatgaatttatttaagaaaaaaaacaattgcttatttgtttcaattttttagggaacttttggaaaataaatgattatttatgtagaatttagctgaaccaaacatgctattaactttcgtttcattaatatataaatgtttgatttgc

SEQ ID NO: 70957 - DNA, 441 bp, Glycine max
cggggggagccacgcgtccgcccacgcgtccgaaggaacacaaatttatattagatctgaaagaaaagagaagagtggtaggtttgtgggagaagaagaagatgaagaagatgaggcagttgtcctcttcacttgaaatcaaattcaagaccgctttgccttccttttcagtacattccatttcgaatggaaacagtgctttgctattttcatttttaaaatagacattgggcttcttcttgttcctcttttttccttccaattccgatttggtcctaatgcctattttaaaatgaaaacaatgatacactgcttttgtttgaaactattgttaaggaagataacgccgacgagttcttcaatttgattttagctgacgaggacttttttattcatccacagtctctgaatctgtacgactaaacaagcaaagaaaaacac

SEQ ID NO: 70958 - DNA, 422 bp, Glycine max
gtagcatggcaatgccatgcgtacgatatgttccctctccgaatgaacactggctatggtgcccgtactccggaggtgaaatgcgcaagttggaggcttgctgtggaagcacacaacatctttggctttgagaccattcctgaagagtgcgttgaagcaacaaaggaatacatccatggcgaacaatatagatcagactccaaaacagttaaccaacaagcttacttttatgccagagacctcgaagtccatcccaaggacacatttgtgttcagtatagatggcaccgtactctctaatattccatactacaaaaaacatggatatggggtggagaaatttaactcgaccttgtatgatgaatgggttaacaagggcaatgcaccggcactgcccgagactcttaagaattacaacaagct

SEQ ID NO: 70959 - DNA, 410 bp, Glycine max
  unsure (1)..(410): unsure at all n locations
tatgcgaagtgagggtgaaattggattacatgcatttgtctcttacggagaggctccaaccagctgaatcttcgaaacattccaatataataaacttgaactccagaagaaaaatggggtaggcaacagggcacctactaagtgtttataacaccacagatccatgcctgctgcagttctgtctgctcttcttttgtcggacacaggcttgattggatccaaccagacattacataacatgacgtcggtagctattaacggaattagctcgttagttacacctttagttctttgctagtgtcgcctctgcataatgatgatatctatnccttttattactgatatttagtctttattttatattctcctaaaatattagatgttacacacgtgtatgattcatctaatgt

SEQ ID NO: 70960 - DNA, 148 bp, Glycine max
cccacgcgtccgtttttatttatttcgtaagcctttaatttttgttgctgctgctacgtgctgctgtaaattagactgagtatgtttttcaagtaaaattagggtttttggattatatgaaatgatatactgtccgagtctttgatat

SEQ ID NO: 70961 - DNA, 407 bp, Glycine max
  unsure (1)..(407): unsure at all n locations
cggacgcgtgggcggacgcgtgggaaaagcccagggaagaagaaaactaggtcgcatgttaacacttgtaggttgggtttcatatntngggtttccaatcttcaagtgttaatatgcgacctatatgttgttttccgggggctttttaaacgctttttttttttcatatgtggactctttcttatttccgggagttttgtgttggattttgttggcgttcctgttttttttttaaatggtattttgtttgatctgtttctctacttgttcatttcctttgtttttatagttgggggtggggggtttattttatgctttctttatttttatttattaatttttttgtgattattttttttttttattttttttttgttgttcttatgattttttttgttatttttttt

SEQ ID NO: 70962 - DNA, 356 bp, Glycine max
  unsure (1)..(356): unsure at all n locations
cccacgcgtccggcggatttggtggaggtggaggtggtggcggaggtggtggaggaaggaggttcgggtagctgatttggcnaanaaacannatgatgttttggtgcaggaggttgatttggcgttataagtagtgatacacttattttttcaaaataataacattactatcacagatgctcttatctacttactttatgacgaaatttcaactgatcctaaaatcttcttattgcattaagaggtttatgaatatcaacttgcatacaacattttcacatttttgctcatacaagtatggccatgtgagggttctcgattctccaataactgaagatgaattttctggaattgct

SEQ ID NO: 70963 - DNA, 418 bp, Glycine max
agtttgttgtgagctataagctagtttatcgtgaggagaatatgaagttgtttgttgtctttgttgctgcagtagttttggtagcatggccatgccatggcgcaggctaccaaaggttccctctccgaatgaaaactggctatggtgagcgttcttcggaggtaaaatgcgcaagttttaggcttgctgtggaagcacacaacatccgagcctttaaaaccattcctgaagagtgcgttgaaccaacaaaggactacattaatggcgaacaatttagatcagactctaaaacagttaaccaacaagctttcttttatgctagtgaacgcgaagtccatcacaacgacatatttatattcggcatagataacaccgtactctctaatatcccatactatgaaaaacatggatatggggt

SEQ ID NO: 70964 - DNA, 387 bp, Glycine max
  unsure (1)..(387): unsure at all n locations
cccacgcgtccgcccacgcgtccgcgcccttttttttttttttttttttgtttttttgtttttttttttttttttttttttttttttttttttttttttttttttttttttttttttttttttttttttttttttttttttttttttttttttttttttttttttttttttttttttaagggaaataaaattaatttaaattataataaataaaaaaattttaaatggaaaaatattttttttatgaaaatagtataattttttgaattgnaatttaaaaaaattggggagaggggaaaaatttatgaataattgaatttaaaaaatatggtaattattaattttaaaaggtagtataaatttataattttaaaaaaaaagtttttt

SEQ ID NO: 70965 - DNA, 403 bp, Glycine max
gtttgttgtgagctataagctagtttatcgtgaggagaatatgaaggtgtttgtttgctttgttgctgcagtagttttggtagcatggccatgccatggcgcaggctaccaaaggttccctctccgaatgaaaactggctatggtgagcgttcttcggaggtaaaatgcgcaagttttaggcttgctgtggaagcacacaacatccgagcctttaaaaccattcctgaagagtgcgttgaaccaacaaaggactacattaatggcgaacaatttagatcagactctaaaacagttaaccaacaagctttcttttatgctagtgaacgcgaagtccatcacaacgacatatttatattcggcatagataacaccgtactctctaatatcccatactattaaaaa

SEQ ID NO: 70966 - DNA, 383 bp, Glycine max
ctcgttcttcttcttttgttgttctgtgtttgtgtttgttttttcggtcacctgaagatgtcttgctgcggtggtaactgtggttgcggaagctcctgcaagtgcggcaacggctgcggaggctgcaagatgtacccagacttgagctacactgagtcaaccaccaccgagaccttggtcatgggagtggcacctgttaaggctcaatttgagggtgctgaaatgggtgtgcccgctgagaacgatggctgcaaatgtggaccaaactgctcctgcaacccctgcacttgcaagtgaggtgttgggagagcaagcttcaagcagagatagcccttaattaggaataatgaataactattaatgtgtagctaaaaacttatgta

SEQ ID NO: 70967 - DNA, 449 bp, Glycine max
gatcgagataactagaaacagtgtgatgaaaatgaaggtccttgttttcttcgttgctacggttggggtagcatggcaatgccatgcgtacgatatgttccctctccgaatgaacactggctatggtgcccgtactccggaggtgaaatgcgcaagttggaggcttgctgtggaagcacacaacatctttggctttgagaccattcctgaagagtgcgttgaagcaacaaaggaatacatccatggcgaacaatatagatcagactccaaaacagttaaccaacaagcttacttttatgccagagacctcgaagtccatcccaaggacacatttgtgttcagtatagatggcaccgtactctctaatattccatactacaaaaaacatggatatggggtggagaaatttaactcgaccttgtatgatgaatgggttaacaagggcaatg

SEQ ID NO: 70968 - DNA, 133 bp, Glycine max
ttttgtcgggccgcgtaccgccactcattcaattcttttctatcatttcaactatctctaaccattttaatcccaaagaggaggcatcattttctgaaattcaactccctaaatttttaaacaaaatgtctta

SEQ ID NO: 70969 - DNA, 289 bp, Glycine max
catgttattcttcataacttgttaaagtactttctccctgtcttatttgttttgcgctgagttaagttcaatcggattttgcatacagctatataattatgctttagttaagtttgattgcttctgcttttgtcttaaaaaaaaaaaaaaaagatatgaatacaaaaagccattgaaaaaagatgaagacaaaaattaataaaaccaaagaatctgaaagaagaaggaagaggtgcccttgttatatttggaattaaccattttcgggggcggcgcttttaaaggttcc

SEQ ID NO: 70970 - DNA, 320 bp, Glycine max
ctttcgaaagattttatccaattgaaattttaaaaatgactgggataaacttaagaattcaattattgaaattgaataagtaaacaatttaattggattggtcgaatggtatcaaaaaaatggagtactaactcccatttcttatttattattgaattaaccgatcaacttgctttgttatcgaacatttctttttgatttcaaaaattttccggaaaaaatttgaatctatttttatatgcgaatcaatcctactacttctggtcctgaggtttctgcgcttgaaaaaaaaaaatctgggacgtatcgcccaaataatt

SEQ ID NO: 70971 - DNA, 186 bp, Glycine max
ctacccaccctcctcttatttctctactctttccttttaaatctcctactcatctctatctaagcagtttaatattacatttaccatcttttaaccactcattccaatactaaatctaattaaattatcatctttattccactataaaccccatttttcaatcatcaaacttttaaaatccttcca

SEQ ID NO: 70972 - DNA, 182 bp, Glycine max
ggtggtcaaggaggaggaagtggaggagggtatggtgctggtggagatcatggtgctgctgactgtggtggtggagctggaggtggagctggtggaggctatggtgccggtggagaacatggcattggctatggaggaggtggtggaagtggtggagggagtggaggaggttatggtgatgg

SEQ ID NO: 70973 - DNA, 411 bp, Glycine max
ggcactgcgttggactcgtttggcaccgtcacgcgttcgttgttcgaaccgttcgaatgggaactgctgtgtggtgtctggtagtagttgcagagagagggggacatggtttgctaaaagggataagatgatgaagcttgcaggatattccctggccgtttcatttgctcccataagttccaatgtcgttaaaagcaatggcagattcacattaggtatatctcataggaacacgtgcagctataggctgttttctactcatgcccagaaacaacaattacaggagaaacctggtgtggttgccagatactaccttcctccttggtttagtgttgcttcaatgatggactggacagaccatcactacaggactttagtgcgcctcatattaaaacatgcttggcttgacac

SEQ ID NO: 70974 - DNA, 436 bp, Glycine max
tgcaattgaagttaaaagccttagccttccctacaactccaaacacaaagacatcatcatgcatggctgcctccgtctccactgtcggagctgtcaacagagctcttttgaacctgaatggttctggagctggagcttcagctcccagttcagccttctttgggaccagcttgaagaaggttattgcctcaagggtccccaacagcaaggtttccggtggaagcttcaagattgttgctgtagaagagaagaaagagattgaagagacccagcagaccgacaaggacagatggaagggtcttgcctatgatatctcagacgaccaacaagacatcacaagaggaaagggtttggttgactcccttttccaagctccacaggatgctggaactcactatgcagtcatgagctcctacgagtacctcagcactggact

SEQ ID NO: 70975 - DNA, 446 bp, Glycine max
cccacgcgtccggtttgttgttgtaactcgttcttcttcttttgttgttctgtgtttgtgtgtggtttttctctcacctgaaaatgtcttgctgcggtggtaactgtggttgcggaagctcctgcaagtgcggcaacggctgcggaggctgcaagatgtacccagacttgagctacactgagtcaaccaccaccgagaccttggtcatgggagtggcacctgttaaggctcaatttgagggtgctgaaatgggtgtgcccgctgagaacgatggctgcaaatgtggaccaaactgctcctgcaacccctgcacttgcaagtgaggtgttgggagagcaagcttcaagcagagatagcccttaattaggaataatgataaactattaatgtgtagctaaaaacttatgtattatgtctgtgatggttttcgtgcactctggtgtttt

SEQ ID NO: 70976 - DNA, 451 bp, Glycine max
tgttgatcgagataactagaaacagtgtgatgaaaatgaaggtccttgttttcttcgttggtacagttttggtagcatggcaatgccatgcgtacgatatgttccctctccgaatgaacactggctatggtgcccgtactccggaggtgaaatgcgcaagttggaggcttgctgtggaagcacacaacatctttggctttgagaccattcctgaagagtgcgttgaagcaacaaaggaatacatccatggcgaacaatatagatcagactccaaaacagttaaccaacaagcttacttttatgccagagacctcgaagtccatcccaaggacacatttgtgttcagtatagatggcaccgtactctctaatatttcatactacaaaaaacatggatatggggtggagaaatttaactcgaccttgtatgatgaatgggttaacaagggcaa

SEQ ID NO: 70977 - DNA, 435 bp, Glycine max
tccggtttgttgtgagctataagctagtttatcgtgaggagaatatgaagttgtttgttttcttgggtggtgcagtagttttggtagcatggccatgccatggcgcaggctaccaaaggttccctctccgaatgaaaactggctatggtgagcgttcttcggaggtaaaatgcgcaagttttaggcttgctgtggaagcacacaacatccgagcctttaaaaccattcctgaagagtgcgttgaaccaacaaaggactacattaatggcgaacaatttaaatcagactctaaaacagttaaccaacaagctttcttttatgctagtgaacgcgaagtccatcacaacgacatatttatattcggcatagataacaccgtactctctaatatcccatactatgaaaaacatggatatggggtggaggaatttaatg

SEQ ID NO: 70978 - DNA, 54 bp, Glycine max
taaatccatcatcttagtaactctttttaaatatgcatatatcaaatcatttct

SEQ ID NO: 70979 - DNA, 430 bp, Glycine max
  unsure (1)..(430): unsure at all n locations
cccacgcgtccgtgttgatcgagataactataaacagtgtgatgaaaatgaaggtccttgggttcttcgttgctacaattttggtagcatggcaatgccatgcgtacgatatgttccctctccgaatgaacactggctatggtgcccgtactccggaggtgaaatgcgcaagttggaggcttgctgtggaagcacacaacatctttggctttgagaccattcctgaagagtgcgttgaagcaacaaatgaatacatccatggcgaacaatatagatcagactccaaaacagttaaccaacaagcttacttttatgccagagacctcgaagtccatcccaaggacacatttgtgttcagtatagatggcaccgtactctctaatattccatactacaaaaaacatggatatggngtggagaaatttaactc

SEQ ID NO: 70980 - DNA, 130 bp, Glycine max
aaaaaaaaaaaaaaaaaaaaatttaaaatttaaaaaaaaaaaaaaaatacggtaacgttaaaattaaaaaaaatattaaaaataattaaataaattaatttaaaaaatataatttttaaattatattccc

SEQ ID NO: 70981 - DNA, 409 bp, Glycine max
gatcgagataactagaaacagtgtgatgaaaatgaaggtccttgttttcgtcgttgctacaattttggtagcatggcaatgccatgcgtacgatatgttccctctccgaatgaacactggctatggtgcccgtactccggaggtgaaatgcgcaagttggaggcttgctgtggaagcacacaacatctttggctttgagaccattcctgaagagtgcgttgaagcaacaaaggaatacatccatggcgaacaatatagatcagactccaaaacagttaaccaacaagcttacttttatgccagagacctcgaagtccatcccaaggacacatttgtgttcagtatagatggcaccgtactctctaatattccatactacaaaaaacatggatatggggtggagaaattt

SEQ ID NO: 70982 - DNA, 153 bp, Glycine max
gagaggtggtgtttcttaaaaaaataattcttggggccaatgggcccatcggtaaatggtcccagggagaaatcaatcttttggatcaaattagaactttttcttaacaaaggtgaagcaaatatatgtggcttaacagaccattagtggggc

SEQ ID NO: 70983 - DNA, 356 bp, Glycine max
  unsure (1)..(356): unsure at all n locations
catgttattcttcataacttgttaaagtactttctccctgtcttatttgttttgcgctgagttaagttcaatcggattttgcatacagctatataattatgctttagttaagtttgattgcttctgcttttgtcttnnnnnanannannnnnnnnnanaaaaaaaaaaaaaaaaaaaaaaaaaaaaaaaaaaaaaaaaaaaaaaaaaaaaaaaaaaaaaaaaaaaagggaggacaaaataaaaataaaaaaaataaaaaaaattaggggggggccgttttaaaggatcaaagtttacttccccgtgcttgcaaggnaatatttttttattagggcccccaaaataaaattcagggg

SEQ ID NO: 70984 - DNA, 216 bp, Glycine max
gaccacgcgtccgccacgcgtccggaataccccctcttttgctgcatcagaggagttgtaaaggaagagcatggctgcacaagctcttgtatcatcatcttctcttaccttctcagcggaggctgcaagacaaagtcttggaccaagatcactccaatctccatttggcttctccagaaaagccttctttcttgttaaggcagctgctaccccccc

SEQ ID NO: 70985 - DNA, 267 bp, Glycine max
aactattgtaattttctaacttctttaattttttaccacaaactcatctccgggctccgtgttatttcacatcctttactcaacaaacaacagccaataaatcatataaaaaaaattaccatcttttgtcggatccgaaccaaatgtatactctaaatcaaattatctacttaatcctcattttactatatatgtcatacttgtttcaaatctatctaaaatatacacttaaccttggctgttacaaaaactttcttctttagaatt

SEQ ID NO: 70986 - DNA, 408 bp, Glycine max
gagctataagctagtttatcgtgaggagaatatgaagttgttgggtttgggttgttgctgcagtagttttggtagcatggccatgccatggcgcaggctaccaaaggttccctctccgaatgaaaactggctatggtgagcgttcttcggaggtaaaatgcgcaagttttaggcttgctgtggaagcacacaacatccgagcctttaaaaccattcctgaagagtgcgttgaaccaacaaaggactacattaatggcgaacaatttagatcagactctaaaacagttaaccaacaagctttcttttatgctagtgaacgcgaagtccatcacaacgacatatttatattcggcatagataacaccgtactctctaatatcccatactatgaaaaacatggatatgggg

SEQ ID NO: 70987 - DNA, 407 bp, Glycine max
cccacgcgtccggtttgttgttgtaactcgttcttcttcttttgttgttgggtgtgtgtgtttgttttttctctcacctgaaaatgtcttgctgcggtggtaactgtggttgcggaagctcctgcaagtgcggcaacggctgcggaggctgcaagatgtacccaaacttgagctacactgagtcaaccaccaccgagaccttggtcatgggagtggcacctgttaaggctcaatttgagggtgctgaaatgggtgtgcccgctgagaacgatggctgcaaatgtggaccaaactgctcctgcaacccctgcacttgcaagtgaggtgttgggagagcaagcttcaagcagagatagcccttaattaggaataatgataaactattaatgtgtagctaaaaacttatg

SEQ ID NO: 70988 - DNA, 99 bp, Glycine max
ttttcatcttccaaccccccattctttttcttgtcctaaacttatactaaaaagggtgtttgatagctttctccgattttatgatcttggatatgcaca

SEQ ID NO: 70989 - DNA, 117 bp, Glycine max
aaaaaaaaaaggccgaagggatattttacaatatataaaaattttaattttaatataaataatttatgctcaggaaaattataaaattaattaaatttattattttatataatttat

SEQ ID NO: 70990 - DNA, 412 bp, Glycine max
cccacgcgtccgtgttgatcgagataactagaaacagtgtgatgaaaatgaaggggcttgttttcttcgttgctacaattttggtagcatggcaatgccatgcgtacgatatgttccctctccgaatgaacactggctatggtgcccgtactccggaggtgaaatgcgcaagttggaggcttgctgtggaagcacacaacatctttggctttgagaccattcctgaagagtgcgttgaagcaacaaaggaatacatccatggcgaacaatatagatcagactccaaaacagttaaccaacaagcttacttttatgccagagacctcgaagtccatcccaaggacacatttgtgttcagtatagatggcaccgtactctctaatattccatactacaaaaaacatggatatgg

SEQ ID NO: 70991 - DNA, 414 bp, Glycine max
cccacgcgtccgcccacgcgtccgcaaggctctactctactgcttcaccgtctgctctagaaaattcagtggtgatacatggcttcggctactctctctgtagccaaaccagcccttcaggcaaatgggaaaggcttctctgaattctctggcctccgcagctcatcaggcttccttcccttttctagaaaatcttcagaggatttccattctgtcattgccttccagacctatgcagttggaagcagtggaggatacaagaagggtgtgacagaagcaaaactgaaggttgccataaacggatttggaaggattggaaggaacttcttgaggtgctggcacggtcgcaaagactcccctcttgatgtcattgccatcaacgacaccggtggcgtgaaacaagcctctcacctt

SEQ ID NO: 70992 - DNA, 202 bp, Glycine max
ccatggggctcgctaccataggatacctctccttatcaaaaccggctttgctgggcagcctgaacaggttaaaaggctcagagttactgttgcctccctatctcacctcattacagcctctgaaaccatatacaaaaatggcggcttgccagcaggagagtatattgataatgaaccagctatagcaaactgtgtgacattt

SEQ ID NO: 70993 - DNA, 191 bp, Glycine max
  unsure (1)..(191): unsure at all n locations
acccactcttccnaaaactancaattcattaactattataaacacgtatatatcacagcatcgctcattttatatacccttctctccttcatattcactcttctactctttcatcttctcatttcacatttctatcatttctttaacctttaattttttttatcttttttcttcatatcccttttcttttc

SEQ ID NO: 70994 - DNA, 201 bp, Glycine max
ccgaccttctatcactgcgtcacgctctaactttcacacttattatcaccctaatcctcggtgttctggctcagtcttgagagtccattgacacaactaatgtctaagaactctaaatcctggaactcgaggtcgcacgccaaactcaccttaaggattgaactgacagactacactacactcttgacttatacaatccat

SEQ ID NO: 70995 - DNA, 316 bp, Glycine max
  unsure (1)..(316): unsure at all n locations
ncgnccacgcgtntcgnccacgccgttcgnccacgtcgttcggagaaaaagaaaaaaggaaagaagaggtataagtggatgtagagtacgttttaagtgtgagtctctttttacttcgtgtacacttctgccaaaaaaatggttgttgtttacttgtaacattttcatcatcatccttgcttgaactgtaactcaaaccctagctggttttgttagcttgagttctttgtaaatcatcacttcagtttagtgtttcaaatttaaataataacttatatgatgattcccttagtttgctttgctgcnnnnnanaaaa

SEQ ID NO: 70996 - DNA, 104 bp, Glycine max
tccacgcgttcgctctgatcgtgtctctacgtgttatcatatatccaattacatgggctctgtctcagttttcaggagctttaggctctgagaaagacttaccc

SEQ ID NO: 70997 - DNA, 155 bp, Glycine max
atcgaccacgcgtccggcgtccgatcaccttatgctgatcaactttttatactagcacacagcaacactgtatggggaccaggatcctctacgcgtgtttaagttccagaattatttcccagacacgccgccttctttttgtgttataagtgatc

SEQ ID NO: 70998 - DNA, 401 bp, Glycine max
  unsure (1)..(401): unsure at all n locations
cggacgcgtgggcggacgcgtgggttggaatcggaggagggacaacaccattaacaggccgagatggcgtttgatggcccaggaatcaccctctctcgactcagacaaaaccgccactgctgggtccctctccttcccttttctcttctcttctcttctctttctttcgctttttcctttcttcattcttcctttctattctctccgcagattctgcatcattgaaggccccgaaactgtacaggattttgccaagatggagcttcaagaaattcaggacaacattcgaagtcggaggaacaaaatcttcttacacatggaagaggttcgcaggcttaggatacaacaaagaattaaaaacgcttgacttggaattntaagcgaagagcaagagaatgaaa

SEQ ID NO: 70999 - DNA, 390 bp, Glycine max
cccacgcgtccgacgaaaagaagtgtttattcttggaattctttatctacccaggtggcacacaacccttgaaaacgcaagttcttgatcaaatggttttcaaatgtaaattgatttcgattgggtaaggaaattatagtttatgggaagaaattataattaattgaaattacaaaggatggcataaatacgaagagttggttagagattctccaaccaatctgattataattcaagctagtcgattagggagatacataacatgagataaggcttagattagaagaattacatcatattcttagtttctggaagaattatttaaaacaaaaaatcctaacaactattacagaaatatcatttaccaacttggtatgaaaatgcattaaa

SEQ ID NO: 71000 - DNA, 354 bp, Glycine max
  unsure (1)..(354): unsure at all n locations
ccacgcgacgcgntcttcagacacacaatttgaaatttcagtatggacaacaccactaacacacccgtattgcgttctatggcgcgaggagtcaccctctctcgactcaaacaaaaccgccactgctgcggccctctccttccctatactctgatcttctcttctctttctttcgctctttacattcttcattcttccttcctattctctccgcacattctgcataattgaaagccccgaaactgtacaggattttgccacgatggagcttcaagaaattcacgacaacattcgaagtcagaggaacaaaatcttcttacacatggaaatacgttcgcaggcttatgatacaac

SEQ ID NO: 71001 - DNA, 105 bp, Glycine max
  unsure (1)..(105): unsure at all n locations
gctattacctctttttccaaactctaaaaatttttagttccacaaaaccaaaccaaaatgggggcagcctcngtctcatccaccatgatatcaacaccaacctta

SEQ ID NO: 71002 - DNA, 273 bp, Glycine max
aaaaaaggagaccaaaaggaaaattttgatttacagtgttccaagatggacaagagggtgcgactgataccatgcggggcgatcactagaattacaaatcttatcatttcgttcttcgaccttcacttctttcttgctctaccaatcatcttccttctcctttacccttagaatgcatgtcctctctcttaatgggtctagggagtatgagattctataatgaatatttgacacacaatcccaattttaaagacccctttctttacaatgctt

SEQ ID NO: 71003 - DNA, 414 bp, Glycine max
gttgatagatggcataaaaagagtaaagtatactttgatagtgacagtgacgagggtgaaagaaatgatgttacagggaatgcaggtataactaccggtgcggttacgttggaggagcaagaagctctggctttgaaattgttaaattccatgcactcatagaatatgcgtaattcagctgtaacattttgtgacagcaaaaacgggtggaaagagagcaattcctgaaacattataggagttctgttaacaaaaaattttgatctcccaatttttttgtcatctctttcaagaaaggtagacatagaatcaatttacttaattttatttattttaactaaaaaaatgggagtaacggacatccttatgtgtaccaaacacgatgtttaatattattgagatatcataagttgt

SEQ ID NO: 71004 - DNA, 229 bp, Glycine max
cacacacataactgaactaaaccaatcttattcaacccgcaacagacattcaaccgagccgggtatcacacactcgcgcactcatatatatcttctatccctgcaacaacatagttgttctcttcactctcacaatgcgaatactaattgaactctctctcatcaccatccacctctacttctacctctatatcaccctctgcaacgacctcaccaactacgatcacct

SEQ ID NO: 71005 - DNA, 221 bp, Glycine max
  unsure (1)..(221): unsure at all n locations
cccacgccttcggcaggctttatgtatttgatccttatggtttcaactcgttgtcattagggtgggctcctctctttacatgtggccattcctgactgggtacctgagagatgttttgtttatttaggaattaatataaaatgatatcttgtctgtcnnaaaaaaaaaaaaaaaaaaaaaaaaaaaaaaaaaaaaaaaaaaaataaaaaannaaaagggcg

SEQ ID NO: 71006 - DNA, 388 bp, Glycine max
cgagataactagaaacagtgtgatgaaaatgaaggtccttgttttcttcgttgctacaatggtgggagcatggcaatgccatgcgtacgatatgttccctctccgaatgaacactggctatggtgcccgtactccggaggtgaaatgcgcaagttggaggcttgctgtggaagcacacaacatctttggctttgagaccattcctgaagagtgcgttgaagcaacaaaggaatacatccatggcgaacaatatagatcagactccaaaacagttaaccaacaagcttacttttatgccagagacctcgaagtccattccaaggacacatttgtgttcagtatagatggcaccgtactctctaatatttcatactacaaaaaacatgga

SEQ ID NO: 71007 - DNA, 452 bp, Glycine max
gcaactcaagctgaacaagctgttttagattaagaacaggaaagcaatgacacagcggctgcaaaccattgagctgtgccggattagacagagggagagagatgaaaagcttattaaaagaaagaggtagctcccgatttaacgagtttggagcaaatgtaaagagcgggaacatttgacacgacaagatacaattctgcaaatgagagaacaatggaaggtggcagaactttttggttcactattgatcctttggttgctccattccttttttgatgccttattatatttaatcactacagcaaggataaccccattcttagctaaaaacttgaatgttcctatctatgaattattttacctgtctaacggtagcgttttggtgcggttatggattccactaccatttgttaaacaattattatgcctgcatggttagatagaaaatgatg

SEQ ID NO: 71008 - DNA, 245 bp, Glycine max
  unsure (1)..(245): unsure at all n locations
ctcaatcaaccattgcaataacattctactcctctctcttaaccccacccctctgcggtctgataaccagctaccgggcgctcccatctcatcaagcaaaactcctacctatacttctncaacccgaatcccttcaagttcttcataacaatcatatcatcagccaacaaccagaccaccaagtcaccaacaaaagtcaattcttcaccaatcctgttcaccccaccagaactttacccaaacac

SEQ ID NO: 71009 - DNA, 202 bp, Glycine max
gcggttagggttcacaacctttccttttccttttgcttgcgaatctgaatcaaataatcaatcatgcattcattattcatcatgtgggcggcgaaaaaaatcacgctcaaaagatccgaccgcgaggctttctaggtggaggaagccgtggcgcttgaatctcacaccataaagcacatgatcgaggacgactgcgccgaca

SEQ ID NO: 71010 - DNA, 185 bp, Glycine max
cgaccacgcgtccgcagattttaactctctctcggccaaagttacactttgatcgacctctatctcacatagcgtttgttaatggctactatttcatttaacacaaaaactttctttaacaattccacttggaatccccacattgttaaactcatctgcccagaggaaggcatcgtctatcacac

SEQ ID NO: 71011 - DNA, 74 bp, Glycine max
  unsure (1)..(74): unsure at all n locations
tcgggnaaaaaaaaaaaaaaaaaaaaaaaaaatttttaattaaaaaaaaaaaaaaaaaaaaaagagaggngggg

SEQ ID NO: 71012 - DNA, 443 bp, Glycine max
cccacgcgtccgaagaaactgcatccaagttctgtccttttcaaaaaaacaaaacttaggtgtccgattgttagatgcttttagtgcaaatatgtgatcaaaattggaattttacctaggttatgcaataaaggtggatgttagttatagaggtaaaattctaattttaattggaggataatactgattactgaaagaacttaaggtattgtgcttaggttttatttgtggtagaaagaattagttatggtagtcaatcgttgggttacagattaacagtttgagtggccttctgttttgaatttttaaatggtgaagggagcttgatattttgcacatggtgatggattaaagatttaaggattagcttttcttgcttttgtgatttggttattggattttttttaattgaaattgtcaaataaaatatcactactgaatta

SEQ ID NO: 71013 - DNA, 199 bp, Glycine max
cccacgcgtccgcttatttctctatttaaatttcaaaaccctgtccatttcaacaggtatgacaaattatcaaacgcggcctgatcttacttatctctctgacatgtgcagtcatctgcgtcagcaaaagtactcaaccattttttctcaaaacaatgatgctgtaccagcatcgctgaccgaaccaccaccgttaatg

SEQ ID NO: 71014 - DNA, 237 bp, Glycine max
ggctaatgttattgatgttaccaaacactatttgatttcaccgaaacacccacttcccgtggtccaggaagatttaatgagtgccctgaaattcgtcactattcacatattccaaaaccgtcttgaatagtgtcttaaaaaccattcacaccatgaaaaaatgttcttctccaccaacagctccgacgccaacatttcaagctatatgtgcattctcttcggcgttacaatatttac

SEQ ID NO: 71015 - DNA, 259 bp, Glycine max
  unsure (1)..(259): unsure at all n locations
atggctgcctcatccacaatcaacaacttcttctctttcttcttacccacaaaaccaccacgggcctgttcaccggaggtgaagggcagcaccaccaccaccacttctatgaacccttcttcttagacccacaaacccttcttgcagcccctaatttgccaatacaacccttctncttcttncccttcttncctgtcttcttcttctgaattggccctctgtatatgcccctccatggcgtactccaacacgctctttt

SEQ ID NO: 71016 - DNA, 56 bp, Glycine max
ggggccgaccacgcgtcctaaaaaaaaaaaaaaaaaaaaaattttatatttttaac

SEQ ID NO: 71017 - DNA, 209 bp, Glycine max
  unsure (1)..(209): unsure at all n locations
gcgtgaccccacgcgtnttcccacgcgnnctttttactttttctttccatggccncntcctgcgtcctcgcttttttctcctcactctgtcgcaccaaaaccaaaccctctctctttacaccccccttcaaacccctcacactccaatttttatgcctcaactcctccgtcttttttttcctttccgcaccaactcaccgctcttccct

SEQ ID NO: 71018 - DNA, 242 bp, Glycine max
gggccgaccgacgcgtccgcccacgcgttcggccaccaaaggtttgtgtatagggaacttaatttgatttcgtggcagtggtgatttttgagaagaggcatgagatttcaatgtatgaagaactcaaagataggttgttggagggtgttgcggttttggactttgacatgctttgttctacaatggctttgttagctttacattgtaaatggtgaaagctgtgtgcttgtatatgaataata

SEQ ID NO: 71019 - DNA, 151 bp, Glycine max
aagaactactactgacgaaccgcgactcaccaccgacgatcaatggacaacaactataaagtgttaaagcatgtaaatgctggcatcttccaccgccggagatgccggacacagaaatgtcggtgaccgcatcgtggtgatgggcatgtac

SEQ ID NO: 71020 - DNA, 350 bp, Glycine max
attttggcatggagtgagtgagcttagctattggagggtgcgagtagcccccctctagcttgtcaaggatgcttacttcctctatcttcccaaggaagttaccttccttgcttctcaaggaagcttctcatgtgctaggctataaatagaaacatgtataacatttgctataattttaaagaatgaaaaacttatgagatacaattcaaagtttaactgtttttcctaatctgcttcaatacttatgtcccttctctctcatttttttcctccattgaaacttccttttaaagctcttattcaagggactcttttgggggggaaacctctttttccatggcctattcttc

SEQ ID NO: 71021 - DNA, 54 bp, Glycine max
tttaattttttatttttttatttatattattttatatttttttatatatttttt

SEQ ID NO: 71022 - DNA, 324 bp, Glycine max
  unsure (1)..(324): unsure at all n locations
aaaaagganaattgnggacgaaagccnncatcacaaccaaagttcgaatccccgttagaagaggtgcctatatttagtgcccgacagagcttcgaaaaagattgcccccaaaggaagataccagtggagagccaaataaacatggatgaaaacccagttgagaaggttgatgaagtggaagccactatgcctattgtagaagtcaagagcctagaaagtttgttccaagaaaatcaagagttggaagatttgtcttctcaaaaggaacacaaagaagtgaagccactgattgctgagttcaataaagttgaagaaagtaatgag

SEQ ID NO: 71023 - DNA, 226 bp, Glycine max
  unsure (1)..(226): unsure at all n locations
cgccccgcgnccggnngnnngnnccccgngttggaaatctctatgtccattatgggttccaggagcatgcttaatcttctctctggtcacagtacaaaaacgtaaaacagacacaacacaagctgagtttttgtgtgtaagtttcatcatcatcatctttgatccaccacacttgaaagtgaaacaactagaaagcgactttcgtgggcccctctttacaactgga

SEQ ID NO: 71024 - DNA, 352 bp, Glycine max
  unsure (1)..(352): unsure at all n locations
caaatggctagtacatgaaactgagtcgacggttgaaatagtaacatttgttcatcgtttgcataagctgcaaaattgtctataactatcagcctatcaaattctttcgatttttagctagctattataccacaaggtatcagtaaatatgtatttgataacaattattttccgtagtcaaatcatttattcatgttttctaaatgttgtaaagaagtttaattgaatgaaattgcanagtgaaaaactagtgtagacacaagtccgggttatgaaaaaaaaaaaaaaaaaaaaaaaaaaaaaaaaagggccggccgttttaaaggtcccaagttaccgtccccttccttcc

SEQ ID NO: 71025 - DNA, 252 bp, Glycine max
ttttgatattcgagttctgtgctttcggacggtatatttggcgagatgggaggacaaagtcctggaaaatggatcagaaacttacttctggggaagaaatcatcatcgaagtccaagtcttctagagagaaagatattaataaaccttcaagttacaaggatgttctggtggcgtcttccgaggcatcaatgtctgcttcaacatccggagctaatgctactaaaggagtgctatcagaaaaaggaagtagt

SEQ ID NO: 71026 - DNA, 215 bp, Glycine max
tgatgaaaatgaaggtccttgttttcgtcggggctcaattttggtagcatggcaatgccatgcgtacgatatgttccctctccgaatgaacactggctatggtgcccgtactccggaggtgaaatgcgcaagttggaggcttgctgtggaagcacacaacatctttggctttgagaccattcctgaagagtgcgttgaagcaaccaaagaataca

SEQ ID NO: 71027 - DNA, 308 bp, Glycine max
gaaaatctgtttcatgcgcaagtagcttaaagaaatcacgtggggaagaagtgcagtaatggaaagtttggtggtgaagtggaggacatatcaggtcttgagcagtttagagcggcaatatctttaccaggtgtttctgttgtccattttgaaactgcgtcaaacttgcaatgtaagcagatatcgccattggtgaatacactatgcagtcgtaatccatctattaacttcctcaaggtgaatattcaaacaagccccgcagtcgctgctgctgagaatgttagggttgtaccaaccttcaagatcta

SEQ ID NO: 71028 - DNA, 233 bp, Glycine max
attcttcacactccagtagctgcatcaacttcatttgcagtcccaaatgcattggcactcaatgatgtgtctgaagatgttcgtgtctacactgactattagaacaacttcaagatttatattcccgaaaaattgcaagtttgaacaggaaaccgagaatctattgggtttaaatccataactgctttttacccaacacaggcatccaatttcaatgtgaacgttttcatcac

SEQ ID NO: 71029 - DNA, 216 bp, Glycine max
tcggtgttcacttgatctcatcataagtgggtcggcgtcaattgaagaagatgccgatcagaaacatcgccgtcggaaggcctgaagaggcgactcaccccgacacgttgaaggcggctttggctgagttcatctcaaccttcatcttcgtgttcgccggctcaggctccggcatcgcctacaacaagctcaccgacaacggcgctgccacccctg

SEQ ID NO: 71030 - DNA, 394 bp, Glycine max
  unsure (1)..(394): unsure at all n locations
attcccnntcgacccacccgtccncccactcctccttttaaacaatatagctcatggaggagctattcgtagcagttctatcggtgcttcttgtggcagcgttgatcccactctacctatggaaacgccgtcaagattctcaacctncccctccccaccgcgacgaagctcctcaggctccgcggagagaaaccgtggcgcgcgccgncgtcactcgtcgcatgcgtcggcgacctgccgnctctggagctagcacttcggcagatccacctgcgacgcaagaaggatctggtggtgagagtgatgatgaagctgccggcngaaggtattatgaggctaaagcatcaaagaaaaaggagattaaaaggcaagagaaggaagaaaggcgtcaagc

SEQ ID NO: 71031 - DNA, 176 bp, Glycine max
ttcttttcttctttttttttttctacagttctcacttgatacacatcatattgtctctgtttaaatttaagaagatgccgatcataaacatctccatctaaattccttaatagactactcaccccaacacttttaatgcttctttggctgaattcatcttaacctttatcttcttc

SEQ ID NO: 71032 - DNA, 202 bp, Glycine max
tcttcacttcatctcatcataaccatcagcttctatttaaaaaaatgccgatcaaaaacatctccatcgtaatcccttaaaaaacatctaaccttaacactcttacactcatcttcctgacttcattataatcttcatatacacattccactactcaatcttcttcatcgtctacaacaatctcaccctcaacttccctaac

SEQ ID NO: 71033 - DNA, 52 bp, Glycine max
ggttcattttgaggaagaaactaattaataataatcttatcactctggttat

SEQ ID NO: 71034 - DNA, 186 bp, Glycine max
catcacttcatctcatcataatgctcggtttcatttaaagaagatgcggatcataaacatctccttcttaataccttaattaactactaacctcaacacctttaacacacttctttctaacttcatctcaaccttcatatactcaatcacactctcaatcttctacatctcctacaacaatctcac

SEQ ID NO: 71035 - DNA, 216 bp, Glycine max
ggcatatttaaaaaaaaaataaaataatattttaaaaaaaaaaaaaaaaaaaaaaaaaaaggaaaagataaataaaaaaaaatggacagaaaaaacataaaaaaaaaatataaaaaaaaaaaaaaagggccgccctttttaaaggatccaactttacttacccttccttgcaacttcataccttttttttagtgtcacctaatttcaattaattgc

SEQ ID NO: 71036 - DNA, 93 bp, Glycine max
atttgtttggatgtctatgtttaaaaaaatccgtttactatgaaagttacatacatgatagaggaaacggatttgtttggatgtctatgttta

SEQ ID NO: 71037 - DNA, 419 bp, Glycine max
  unsure (1)..(419): unsure at all n locations
gagcgatgttggtgttccgaagtctgaaccagaatcctacgaatgacagaagaggggggggaagaggatgaagatgaagatggtgatgatcaagatgacgacgatgaggatgacgatgatgatgacgaagaggacgaggcaggtgaagaagaggatgaagatggtgctgaggatgaggagaatgaagaggacgaggaagatgaggaagcattgcagcccccaaagaaaagaaagaagtgaatttagtttagtaaagcctcctctttgtattgttgtgtacgaatttggcttctaacttccatgtttttacttttttgggtactaaacttccatgttcttatttaagttattaaggaggcttatgtaggacatgttttaattgatatctatngttaccattgcgtaattagaatgctaca

SEQ ID NO: 71038 - DNA, 400 bp, Glycine max
tcgacgccacgcgtcacgcggacgcgtgggtccaaattcatatttaggatatggtgccacccttcttgccccctgttcagacagaggtgcagccttaagatattatttatccacactgtttcagtgcttggtattcttaaatcttcttttccaatggttattgttcaagtgcaactggatggtagttaaagttggctaaatttgcatccatttttgtatttttgggaggtagtatgattatttaaagttgaggcgttgtccttaggatctaagttgtaggaattgcattttatgtctctcgaatgagttaagtatagatattgttatcagattgatgttctcttgttctagaaatgtatgtgaactgtgaaggcccgcaactattagatttttgtctttg

SEQ ID NO: 71039 - DNA, 381 bp, Glycine max
agagaagttgctcctcatctcaccgctcttagttcttcttccttccttcaaaactcgaatgagccatttctttgtttttcgttctcttgcagttcctgaggtaaagatacaagcttttctcttctgttcactggatcgggttccaggaattgaagggtaggttcagtaggggttgtgttgatctgcaccaagatgcttaatttgcgttgaaaaattcattcatttgcgagactcggcatcggaaatgaaccagttagttgaaagttcaacgactactcaaagggtatctagagttcaagctccactggttgactctgtttcttgctactgtaaagtagattcaggtctgaaaacagttgttggggcaaggaaaatttgttc

SEQ ID NO: 71040 - DNA, 260 bp, Glycine max
cccacgcgtccgctcatttacggcaatataaaaggatgattacaacatttgtaattctcaggggaaaaaaaaaaaaaaaaaaaaaaaaaaaaaaaaaaaaaaaaaaaaaaaaaaagggtgaaataaaaaaaaaaaaaaaaggtaaccaacaaaagaaaggaaaggaaaaaaaaagcgtagtgtgaatcttaaaaaaaattctttggctcgcgttaaaaaaaaaaatcaattgggaaaactactggaatcaaaaaaataaa

SEQ ID NO: 71041 - DNA, 74 bp, Glycine max
cccacgcgtccggtagggtgttcttatttggaatgcttgtcctcaactatacccagtttggatcctatggtgat

SEQ ID NO: 71042 - DNA, 151 bp, Glycine max
cccacgcgtccgcccacgcgtccgttggaaatggctatgcccctgttcttgactgccacacttcccacattgctgtcaagtttgctgaactcatgaccaagattgacaggcgatctggcaaagagcttgagaaggaacccaagttttggag

SEQ ID NO: 71043 - DNA, 493 bp, Glycine max
  unsure (1)..(493): unsure at all n locations
cgnttccggaaaaacctagtgaaaacccanntaacacaatnatcctctacgtacctnnctccataacccttccatcgtgtcgcgcgagatcactnnnactttcaaccagccgtgcactcggcacctcgatcaaccgcctcttacgacaacctcgtgaaggggcgaagacactttggacccatctgannatcattggtatttaaaatgnngtttcgtttgggaaatgaaaatgatcggaaagaaagatttggattaagggcttaacgggattntggtatttatttttctcaattccttggggccttaatctnntcttcttttgacccaagggatttgcnntagcaatggggaanaatatacctnnctttgtnnttctggaagggtatcccttgacncaattgngnnactgaaatcncnnactatgcannattcttcaatgannaacgtagtannatttcaaaggggaacccaatnnttcatttgnnngtattgg

SEQ ID NO: 71044 - DNA, 100 bp, Glycine max
cccacgcgtccgaaaaaaaaaaaataaaaaataaaaataaaaaaaaaaaaaaaaaaaaaaaggagaaggaaaaaaaaaaaaaaaaaaaaaaaaaaaacat

SEQ ID NO: 71045 - DNA, 374 bp, Glycine max
gtccgatcgagataactggaaccaggtgtgatgaaaatgaaggtccttgttttcttcgttgctacagttttggtagcatggcaatgccatgcgtacgatatgttccctctccgaatgaacactggctatggtgcccgtactccggaggtgaaatgcgcaagttggaggcttgctgtggaagcacacaacatctttggctttgagaccattcctgaagagtgcgttgaagcaacaaaggaatacatccatggcgaacaatatagatcagactccaaaacagttaaccaacaagcttacttttatgccagagacctcgaagtccatcccaaggacacatttgtgttcagtatagatggcaccgtactctctaatat

SEQ ID NO: 71046 - DNA, 452 bp, Glycine max
  unsure (1)..(452): unsure at all n locations
cccactctttcttccacgcgtccgttcattttttcttattaaaaaaaaaaaaaagagaaagagtttaataaaaaattaaaaaaaatataaaattatatttatttaaaatatttaataaaaaatatttaaaaaaaaaaaaaatttaaaattaatttaaaaaaaaaaaaaaaaaaaaaaataataaaaaaaaaaaatttgggctctccttttttaaaaattcaattttttttactttttttttcaaattttttatttttttttttttcccctttaatttatttctttcccccggttttttaaatttcngaacgaaaaaatcctttctttttcaaaattttttatttttttaaaaaatttttcttttttcaatttttttatttattaaaaaatcttatccttttttttttttaaatattttcccctttttttttttttatttttctctctttttt

SEQ ID NO: 71047 - DNA, 410 bp, Glycine max
  unsure (1)..(410): unsure at all n locations
gcgcccacgcgtccaattggatcaaggctggggggtggggcccttcggaaggtgcaattccttggccaggctgtgctgctccaattggtgtaaaaactttctcttttcagttttaaacttctccctacactcgtccaaagcctctagttcctattccacgtggcaaaagtagagactctgattctgagccgcttctagaatcttccatcgtgcaagaagtttcattcgacgacgacgacgaagaagaattccttgacgaatttgaatacgatgaagcagcggatggcgatgaatactatgaaggaagaagaggaatacgaagaggaggctggtgtgcccttatgcaggtgatggcggcgcangtggcggaatctccctcgccggaacttggtgggataaaaaagcactag

SEQ ID NO: 71048 - DNA, 381 bp, Glycine max
cccacgcgtccgtagaaacagtgtgatgaaaatgaaggtccttgttttcttcgttgctacgagttttggtagcatggcaatgccatgcgtacgatatgttccctctccgaatgaacactggctatggtgcccgtactccggaggtgaaatgcgcaagttggaggcttgctgtggaagcacacaacatctttggctttgagaccattcctgaagagtgcgttgaagcaacaaaggaatacatccatggcgaacaatatagatcagactccaaaacagttaaccaacaagcttacttttatgccagagacctcgaagtccatcccaaggacacatttgtgttcagtatagatggcaccggactcttttaatattccatactac

SEQ ID NO: 71049 - DNA, 264 bp, Glycine max
cccacgcgtccgctaaatttttggtgtcatccgtaattgctgatgataacggatttgacagcaataatctcagaaagatactaaaatatcagccttttgtactaaaaaaaaaaaaaaaaaaaaaaaaaaaaaaaaaaaaaaaaaaaaaaaggaaaaaaaaataaaatagacgagcaagcaaacaaaaaccttggctaatagggacactctaaattaaatgcactgaacttaaatttacaacctctgcgactgggaaaactcttg

SEQ ID NO: 71050 - DNA, 319 bp, Glycine max
  unsure (1)..(319): unsure at all n locations
acgcgnntccgctttnntttctccttcacatttnnctccattctcacaactatcaagggnttcnntgatctatgtcggggaaggaggctcccggcctaatgattcggaanagttgtctggnnagttgttggtctttcgagaggctcgcnnacggtggcactcttttggacactctactggaagctctctaagaggcctcattagacattgannagatgatgcctaatctaccaagaggccttttaaaaaattattgaatctttggtgnngcgttggtnncttggaatnntgtggtggctttcttgtataaatctcaata

SEQ ID NO: 71051 - DNA, 378 bp, Glycine max
taaaaaaaaaaaaaaaaaaaaaaaaataatatttaaaaaaaaaaaaaaaaaaaaactggaaaggttataaaaaattggtagccacaaaacaacaatcttatatatactataataatatctctacaatctttttataaaaccttttcttttatattctattacatggtccttttcttttttattcttatttatttacttttctttttacaatttttttttcttttttttgtttttcattatttttttattcctttatttttttttcttctacttttatttattacattattcttatctttcaacattcttttatctttatctcctaatctcttctttttctcttttatgttttttatctattatattttttctaccttt

SEQ ID NO: 71052 - DNA, 384 bp, Glycine max
cccacgcgtccgtagaaacagtgtgatgaatatgaaggtccttgttttcttcgttgctacgattttggtagcatggcaatgccatgcgtacgatatgttccctctccgaatgaacactggctatggtgcccgtactccggaggtgaaatgcgcaagttggaggcttgctgtggaagcacacaacatctttggctttgagaccattcctgaagagtgcgttgaagcaacaaaggaatacatccatggcgaacaatatagatcagactccaaaacagttaaccaacaagcttacttttatgccaaagacctcgaagtccatcccaaggacacatttgtgttcagtatagatggcaccgtactctctaatattccatactaccaaaa

SEQ ID NO: 71053 - DNA, 380 bp, Glycine max
gtccgctttaataaataatccccccttgttccatactttaaaaaaaaaaaaaaaaaaaaaaaaaaagaaaagttaaaaaaaaaagaaaaaaaaaaaaaaaaaaaaaaaaaaaaaaaaaaaaaaaaaaaaaaaaaaaaaaaaaaaaaaaaaaaaaaaaaaaaaaaaaaaaaaaaaaaaaaaaaaataaaaaaaaaaaaaaaaaggggccgccccttttaaaaaatcaaattttcctaccccttctttccaacaaaaaattttttttttggggccccaaaaataaaatcaatggccccgattttaaaaactttccaattgaaaaacccttttgtaacccaaattaaatccttttaaaaaaaatccctttttcccccgttggg

SEQ ID NO: 71054 - DNA, 215 bp, Glycine max
cattgatgccatggcttagatacatgtaatatgcgtacgtttgtgggaatacgtgattggtaggtggtgcagattcgataaggtgcacgaggcacacacgggccgttctttgtcgtttggatgattactcttagtggatgaatgggagacaacaactttttatggctaactacgagctacgagcatgatgcctcctactctatggctattgatta

SEQ ID NO: 71055 - DNA, 285 bp, Glycine max
atacgcggtgcaattttttctccaaccttttgcctttttcatacacaaagatataaccttgccttaggtacctttaaaatgcgggtgctgccatacctgacttaacagtgagaaatggcagctccttgaggctgaggagaccccatgctcatgttacatcatacaaaccaaaagctaattggaaagatgatggatttcaggaggttctttacacaattcctgcaactgaaactggcccttacaaggccaaaggtggtgttggattggtcatgaatgaagtgctgc

SEQ ID NO: 71056 - DNA, 335 bp, Glycine max
gctcaattgcctgaattgctataatttctagacatcactcgatcgacgtctccccggtgacgccaattggctcgggggctcctctacccccaccataaccactcatctcgataataccatcgacattaccttactatttatgagcctcctatctgaaaaccctctcacgcttgacaattccacaatgatcaccacgagcttaccactgcatattgacctgactgcctcactgtgctcgaatatcgaactctacgatacgaacgctgcctcatgagcttcaattacaactcgctaccctattcaattaccgatcgttcaaacatatttcaatacag

SEQ ID NO: 71057 - DNA, 340 bp, Glycine max
cccacgcgtccggggaattatgtttcttcatttgataaattgtgttgaaagaatattaaaatttgaatatagtttttacactgcttttgtatcttaaaaaaaaaaaaaaaaaaaaaaaaaaaaaaaaaaaaaaaaaaaaaaaaaaaaaaaaaaaaataaaaacaaaaaaaaaaaaaaaaaaaaaaacatacaaaaaaaaaataaaaaaaataacaacacattaataaaaataaaaaggcggcggattttaaaaagtttaaactttaaaatcaatgagctttcccaagctaatgcgcataaaagggccattaattataataaccaggctaatatttaaaaa

SEQ ID NO: 71058 - DNA, 151 bp, Glycine max
  unsure (1)..(151): unsure at all n locations
caaaccgaagaagaagccaccagngnacaagccnccagagnacaagccaccaggggacaaaccaccgggggagaagccaaaaccaccggnnaacaagccgaaaccaccggngaacaagccaccaaagaagaagccaccanacaagaaacca

SEQ ID NO: 71059 - DNA, 70 bp, Glycine max
cccacgcgtccggcttggtgtgcagtggaaagagggtggaaaagagtggtaagggggagggcggcgcccc

SEQ ID NO: 71060 - DNA, 382 bp, Glycine max
aaaaaatgaccttgtacatgaataattttggaaagatgaaaagaagtgaagaaaaagcgaaaagcccttacgtatgaagtgtatggtaaaaaccttctggaaggaaaggtaaagtgaatgaagctgtgaaagctgtcagggacatggaaagaagaggagttattggaacagccagtgtatattatgaactagcttgttgcctttgcaacaatgggaggtggcaagatgctattctggaggttgacaatattagaagtcttcctcatgccaagcctttggaggttactttcactggcatgattaagtcttccatggatggtggacatattaatgattgtatatgtatatttgaatacatgaaagagcactgtgttcctaatat

SEQ ID NO: 71061 - DNA, 403 bp, Glycine max
aggcctactcgttctgtaacaagcataagcattgaggaaacgtccattagttattgtaaagtgcgaacgctgcttttgaatgtgattctacgtttacctttcatcactggaacagcattacgtgatcaaatatatttcgagctatctcatgaacctctgctatcaacaattgacttgttatccactctactctcatctaaaaatgccagcttcactttggactctatgctttgtaaaccgaagcaccattttaacttgaacgtatttgatcagacttagacactgcaagccagatactcctcatctagacgcacacaactgggctcatcttgttcctaaaataacgggctaaatagtgcggtctattcttcaagtggctctacatgatcacattaaatttttt

SEQ ID NO: 71062 - DNA, 372 bp, Glycine max
tggaaggaagtatcgacacatgtgacaaatctgatgatgcagatgctcctatggaggttgcccaccaagatactgttgtggtggctgatgattttttgatcaagatgttgctggcacccttcctatgtcacctgttaatgatgctctaaaggaatttgatgagtgcaacactgatgatgatcaaggcatcaataagggtgatgacaaccaagatatgaacagtgaaactgaaaatttgaatctggctgatggcaacatggcacatgaagattaccagcatccttttaatgatgatgaaaaatctgctgatgaacgtgactctatgacaagttctgaagggcgttttgttgagctcgagtcaatttctcattc

SEQ ID NO: 71063 - DNA, 461 bp, Glycine max
  unsure (1)..(461): unsure at all n locations
aacgcatagtcacatactacactagggacagaactctgaatcgagctggtgtcgtgtcccagttgaatagaattgcatcttgaaagatggcggacgaagagaagccaaatggagaagaacaagtgaaggacaacaacaacaacaacttatacgacgccgatcagcgtctgatcttggagccttgcaagatcaaggcctgtctgatccctctcttccccgaaacttctagaacctactctcggcaactcctccaatggtccagtcaaggttactccctgcgacgcatactcttcatctccattgggatagttgcacttggagctctgttaagacttggtgcttttacgctcttttntctggctgctactggaaatgccattttcgtcttccttctcaaatctttggctgtggctggaggcttcttgggtctggactttgcttttgtgacagccatatataat

SEQ ID NO: 71064 - DNA, 428 bp, Glycine max
cccacgcgtccgcccacgcgttcggcaaaagcttcgtggagacttaatatgaaagagtttcatttgtcaagccaaacaaatgatcactaaaatcattaatccttcactttccgtgcctttctttataaacccagaggcattctttcttccttcttttttctgttgaaagttgaaacgtttcttttccttttttgtgttcagttgtgcaaatccaggtagtcatccttcacctttttcctctttttcattatttgaatgtttaagtttctgtactttgtaatggatttgctttgctataatggtgatatgttgaattgtgatgggtctgattttggtctaagtgttggtgtgttgctttgggtaaatctaatggatctttgggtactcttttaaactttagaacctaaattatggatatattattaaat

SEQ ID NO: 71065 - DNA, 256 bp, Glycine max
ctttcctttgctctggaatgaacatctctattttatatgttccgattccagcaaattattggtaatgaattgcgaacttatttttgtttctcatgacgtgtgtatttcaaacatgtcaaagcattagccgattaatttaatgaatgcaacgtcccacctttgataaaaaaaaaaaaaagaaataaatataaatgagaaaagttatgcaaatacaagaagtaaaaaataaaaatttataaaatttaagaattatatt

SEQ ID NO: 71066 - DNA, 139 bp, Glycine max
ccaacgcgtccgaaaaaaaaaaaaaaaaaaaaaaaaaaaaaaaaaaaaaaaaaaaaaaaaaagaaaaaaaaaaaaaaaaaaaaaaaaaaaaaaaaaaaaaaaaaaaaaaaaaaaaaaaaaaaaaggaataaaacccaaa

SEQ ID NO: 71067 - DNA, 411 bp, Glycine max
agaacctatgccttgacaaacctcagtaccaagaaccccggtttgttcgcacttcagtctccaagtcataagtacactcttctctccccattcactggcattggcttttggtagttgaagtcttcctttgttgtcaaattcagaccagtatttgaaaaatagacaagaagagcaagaaaataaagcagcagaaggggtgaagatagggatggcgggcatgtctggatatagttgctgctggcagtgggcggaggtgaaatccatgggaatgggctattggttcccttcctcaactaccaaaaggagtttccggcctgtgcttgtttctgtttctgctatctccgatgataactctcactcttacactagcagtagcagcaaaattttgggggggaaaaaaaaagggaaagc

SEQ ID NO: 71068 - DNA, 162 bp, Glycine max
cccacgcgtccgcccacgcgtccgatttttaatttattcttacagtatgtacttaataagagaaaataacaaagttcagaggtgtgcttttattcacttgtgtaatttgtatatcttaaattctcaatacatgcaatgcatttaagtggttggctttttaaa

SEQ ID NO: 71069 - DNA, 197 bp, Glycine max
aacaagtgtactgaaccttgatagtattgagaaaaaaaaaaaaaaaaaaaaaaaaaaaaaaaaaaaaaaaaaaaaaaaaaaaaaaaaaaaaaaaaaaaaaaaaaaaaaaaaaaaaaaaataaaaaaaaaaaaaaaaaaaaaaaaaaaaagctaaaaaaaaaaaaataaaagaaagaaaaaaaaaaaagggggactca

SEQ ID NO: 71070 - DNA, 369 bp, Glycine max
cccacgcgtccgcccacgcgtccgtatgttttgatcctctaaagtgcagacagagggtgcagtttgaagtgcaagtgggaaacattgacaagaaattcaagaactggttataacaaatccctagtttgttatccatctgaaacccatttatcaacactactttttactgttgaaagcttaccttgcacttcgaaggatcttgatccataataaatatagccgtgagtgtgggatcaaccgatcaaccgtgtattctgtgatggacttacacagattgatagattactatttgtgactagaatatcgtttattgcgtgtaaactctgattaggtagaagtcaaaaaccttggattatatcaatttattcc

SEQ ID NO: 71071 - DNA, 310 bp, Glycine max
cccacgcgtccgactagaaacagtgtgatgaaaatgaaggtccttgttttcttcgttgctacaattttggtagcatggcaatgccatgcgtacgatatgttccctctccgaatgaacactggctatggtgcccgtactccggaggtgaaatgcgcaagttggaggcttgctgtggaagcacacaacatctttggctttgagaccattcctgaagagtgcgttgaagcaacaaaggaatacatccatggcgaacaatatagatcagactccaaaacagttaaccaacaagcttacttttatgccagagacc

SEQ ID NO: 71072 - DNA, 300 bp, Glycine max
  unsure (1)..(300): unsure at all n locations
cccacgcatgcgactagaaccagggnaacgacaaggaacgcacaagcnngccgggacatgcaatttagctagcacggcaagggcatgccgcaagacctattgaacctgccagtgaacactggctatggctgcaagcactgagtatatgaaatacgccatgtgagtcggcatgctaactaatgccagcacacatcatcctcctagacgcatagctgaaggctggatcggatcatcacttgctgactcaaaaaactagatagactgatcaaactcgagagaaactaagttgctgcatacaga

SEQ ID NO: 71073 - DNA, 136 bp, Glycine max
cttaaactacattcccatttgtttttcctttttgagatttcatcatcctgtatttttggtttctgttttcggacttcaatggaaattaatggatgagaactaatgaataagctattgtgttgtgttgctttgtttc

SEQ ID NO: 71074 - DNA, 338 bp, Glycine max
caccaaccacaaaagggggaaggtacaaaccaaccccaacaacacccccaaggggcaaccggggaacaaccacccaagaaccctctaacccaacaccctcaggcccaacaacaccatcaaccccatcaaaccctccctcgggaggagggggggactataacacaccaccaacacatggaggtgggagccccccaacaccaaacactgtgagcccaccttcaaacccaaatgagccaggcacccccactaaccccgtcacacccccctacccgacttacccaaaacccctcacagggacacgcaactaccggaacactcacccaggaaacaattgggga

SEQ ID NO: 71075 - DNA, 267 bp, Glycine max
  unsure (1)..(267): unsure at all n locations
ccacgcacgcgggaaccggaagcagaacgagcacaaaagngcaacagacgaagcaacaagcgcaggcggccggccaccacaagggcgaccaacgccagaacgcacaacaagagacagagaaaggcacagcggngaacangaccggggcagggaacaaggcancgagggccaaaacagccgcaaacgaggacgagaagagcaaggccagggccaaggaccacgaggccaaaaacgccanacaaggcgaagaccgcaacaaggcggaag

SEQ ID NO: 71076 - DNA, 223 bp, Glycine max
  unsure (1)..(223): unsure at all n locations
aaccccggagcgacccacgcgngcgcaaccacggaacaggaccagggaccggccgcaaacgcagcgaggacagcacacggggcncggcgcgcacgccaagagacagcaagcgancaagggcagcacagacgccaaaacaacggcgcacaggacagcgcacacacccaanctaccacaagagaggcngcgcaaagggagcaacccgcacaggacaggncaaagg

SEQ ID NO: 71077 - DNA, 297 bp, Glycine max
aaaatagcccctgaatatcacaacaaagccaaattttatttcgtggatgtgaataaagtacctcaggctctattcaagcgtggcaacatatctaaaatgccaacaattcagctgtggaaagattgaaagatgaaagcagaagtcattggaggccataaagcctggctagttattgaagaagtcacaaaaatgatccaaaagtatttatgatccaaaaagtattttttttcttcaactttttcatattggctaccgtatttagctgtgtatcatatatattgaactgtgtacaatatc

SEQ ID NO: 71078 - DNA, 409 bp, Glycine max
cgagataactagaaacagtgtgatgaaaatgaaggtccttgttttcttcgttgctacaatgttggtagcatggcaatgccatgcgtacgatatgttccctctccgaatgaacactggctatggtgcccgtactccggaggtgaaatgcgcaagttggaagcttgctgtggaagcacacaacatctttggctttgagaccattcctgaagagtgcgttgaaacaacaaaagaatacatccatggcgaacaatatagatcagactccaaaacagttaaccaacaagcttacttttatgccagagacctcgaagtccatcccaaggacacatttgtgttcagtatagatggcaccgtactctctaatattccatactacaaaaaacatggatattgggtggagaaatttaac

SEQ ID NO: 71079 - DNA, 356 bp, Glycine max
aattcccacctcgaccgacgcgaactaatttaccacattacactataaatttaacttgttacaaactgtataatgactatacaattgcgacttctaaaagtcaggtggctacaatgcaaatggttgatgatcctctatttcaagaccacgcatccttatgttgtgctcaagctacagaatcatacttcaacaaccacactaattaataccttcttaaatcctatcttaaatgacgaactgaatttcactcttacacaacccttgccagttcttaattttcaactcttaaatatatatcttctcaatgcttattacaacatggccacttcatttcttaaccttcaaccattaatctc

SEQ ID NO: 71080 - DNA, 457 bp, Glycine max
  unsure (1)..(457): unsure at all n locations
atcgagataactagaaacagtgtgatgaaaatgaaggtccttgttttcttcgttgctacagttttggtagcatggcaatgccatgcgtacgatatgttccctctccgaatgaacactggctatggtgcccgtactccggaggtgaaatgcgcaagttggaggcttgctgtggaagcacacaacatctttggctttgagaccattcctgaagagtgcgttgaagcaacaaaggaatacatccatggcgaacaatatagatcagactccaaaacagttaaccaacaagcttacttttatgccagagacctcgaagtccatcccaaggacacatttgtgttcagtatagatggcaccgtactctctaatattccatactacaaaaaacatggatatggngtggagaaatttaactcgaccttgtatgatgaatgggttaaacaggggcaatgcaccgcac

SEQ ID NO: 71081 - DNA, 203 bp, Glycine max
gcgcacaaagataccgagaaatgattggtttttgtaacttgtgtgcagtaacaaaataattgagtgatttgtcacaaataggaagttggatgatttcatgtcttgctttttctagctacatatggctttggaaaagaaaaaaaaaaaaaaataaaacatgaagttctaaaaaaattttattcacaaattcaaattcattatat

SEQ ID NO: 71082 - DNA, 470 bp, Glycine max
gaattcccacctcgaccgactcgaacgtttatgcaactattaactctgcactatactttctcgaagcatgagctatctactttacaggcttattacaacaacgagaacatccatctttacatactagctactaccgttactgtatcatcagatcttatcattagtaaattttccttgctcaatctctttctgatttacatcttgcgcattaaatatatcttcattagatcctctactcaacttcatgtcgatggaaatatcttttgttcatactatactatttgccagcgccttatactttttccaaagttatatttctaataatactctatgccctgtttacctttatcatctacatcttcttctgacaacactcacaattttttactgaagaaatttatgcagacagtctttatactattgtaacttgtcttaatctacatattcctaattctattttatgattgttt

SEQ ID NO: 71083 - DNA, 170 bp, Glycine max
cttcttgatccttctttttctccttgaactcaaacatgtcagatgaggtggttctgctagatttctggccaagtccatttgggatgagggtcaggattgcacttgctgaaaagggtatcaaatatgagtacaaagaagaggacttgaggaacaagagtcctcttctcctc

SEQ ID NO: 71084 - DNA, 340 bp, Glycine max
tctatcaccagacgacacacgttcgaccgcccatggaagctgttgcgtcactggttcaagaggctaaaggtgtacaaagcggtgggggaatagctcaacttgcaggcttagctcaaagcctctttaaaaaactattcctacgccactacgtacgcccttaattgtgtccttattcttgatctacttgtcccgtttggctaatattcaccagatcatacatttaaatcttcatatcataaattaagcaactgccaacttgcaaagtcttgaatttcttacttctaattctagtattgttaatgctgttgctatatgatgaatggctgaataaatctgattt

SEQ ID NO: 71085 - DNA, 451 bp, Glycine max
ggaagcaccaaatttgaaccaaggagcacaaagcaagcacaagcagaagctcacactcaagaagaaagagaactcagtaaggagaaatgcaagcgtaaacaataaagactgaacgctgcaacccctactgcaagcctacccatctttttcagactgaacactgcaaccccacatgctagaacgtgttcgcgccaatggcgggactgcccagatgcctagtcagcatgtcccgccacgccagtttgaatggcggtatggaccctgtcccgctgctgtcaatggcggcatccatggttttgcaccctccgctgtttcacagcttttatggattttgtggtagtggattcagacaacggaaatgaagcagaacatagctgtctagaagagagtacaagtatatttgaaagagttgaagttcaagaaccatatgtgggcatggaaattgattctg

SEQ ID NO: 71086 - DNA, 208 bp, Glycine max
tccacgcgtccgcaaacttcttgtattatatccactgatcaactttcacaggctcgaagggtgtataacaaataggtggcatacaatactctaccatgaatcataaatccaattactaacctagagcatgcaccaatccatataacatgtctcttatatctgataactactttttaatcgaatcataattaaaatcaaaatttctatt

SEQ ID NO: 71087 - DNA, 203 bp, Glycine max
cccactcgtcgcatcacacatccagctaaatcaacaatcacttttctaattttaaacaccctcttcaatgatggcatctagagccttcaaacaggcccctgtcactcttaataaatcctcatctatagtccttccctccctctcaaggaactcctcttcattcatagttgtggccactactcacattaatatcaatactcaca

SEQ ID NO: 71088 - DNA, 414 bp, Glycine max
gttgatcgagataactagaaacagtgtgatgaaaatgaaggtccttgttttcttcgttgctacaattgtggtagcatggcaatgccatgcgtacgatatgttccctctccgaatgaacactggctatggtgcccgtactccggaggtgaaatgcgcaagttggaggcttgctgtggaagcacacaacatctttggctttgagaccattcctgaagagtgcgttgaagcaacaaaggaatacatccatggcgaacaatatagatcagactccaaaacagttaaccaacaagcttactttatgccagaaaacctcgaagtcaatccaagggcccatttggggtcaatataaaatggaccgtactctctaatattccatactaccaaaaacattgatattgggtggagaaatttaac

SEQ ID NO: 71089 - DNA, 215 bp, Glycine max
acgaaaaaaaaaaaaaaaaataaaaaaaaactaataaaaaactacaaacacacaaaaaaggaacgggcactcataaaagaaagtgagagtaaacaacaaaaaacatatataacataaactggccggaccttttaaaggttccaaccttaccaacgcttacttgcaacttcataacttttgatagccgccccctaatctcaattcatcgaccctcc

SEQ ID NO: 71090 - DNA, 254 bp, Glycine max
acccactcgtccgaactgaacagcgctccttatttcactcgaatctactcttttcctttattctataatacacgtgacaggcatcatatcatgaataaactctatacaaattactcaatcacataactcatacacttatcttctctcttacattctcatattctacacatgactaactgtatatcattaatcatctctatctaagctagattatcacataactcataacataattgctcatactcgatatatat

SEQ ID NO: 71091 - DNA, 177 bp, Glycine max
acgcccacgcgtccgctcagtttcatttaaattgattgacgatattatgaattgtatgtgtatgttcagttggttctgttaaggtgtatttgattttagttttttacttttgcttgtaaaaaaaataaaataatatattatatatataattcaaaatttttaataaaaaaaatttat

SEQ ID NO: 71092 - DNA, 386 bp, Glycine max
  unsure (1)..(386): unsure at all n locations
tcgtacctgcccaacgccgtctcgtatcgtagatatatnttagaaaccagtnngtgatgaannatatgaaggggtccttgggttttcgtggtcgttggctacatannttttggtagggcatggcnatatgtccatgcccgtacganntatgttcccttcttccgaaatgagacatcttggcttatnnngtgcccgttactctcggaggggtgaaattgcgcacaagttggaaggcttttgcttgtggaaagcaccactaactatcttntgggcttttgagaaccattctctgaaaaaggtgcgttgaaagcaacaaaaggaatacattncatggcgaaacaatatagatcaagacttcaaaacaggttaaccacacaaagcttact

SEQ ID NO: 71093 - DNA, 226 bp, Glycine max
acgcatagctcgtaagataacagtgagtaagttagttattcataacccactatttagcggacgggatgctattagcagtgataggcatattcatgttgcctagaacttttctaaaggaagcaaaattgctcttaaatggcctatttacaatcttattcgtaaccgtgacatactttacatcgtacacatcaagcctttctgacgaagtgaattcccaaatcttctc

SEQ ID NO: 71094 - DNA, 172 bp, Glycine max
ccacgcgggcgcagtctctaatatttttctcactgtcttgtctctccttatatactgcatagagagagatggcagctccgacatctggtgctgtgtggaatggcttggcatcttccttcttgagtggaggaaacaagagccaaacccttctggccactgttattggaggcaa

SEQ ID NO: 71095 - DNA, 392 bp, Glycine max
gcgcttttactatattttgtttttctctctcacaatttttctgcttgcttctacttcgtgtttgtctgacgcttgctgaaccagtcttgcatagtcagagaaaacaaacgtaagcaagaagaaggagaacttcgccaccgttgtggctgccatggaattcacagctgccaccgctactctcacgaagaagctctccaacggctgtggctacagcgtcaccggaagatctgcgtacgacggtgtcttcgccactcctatcaagctccgcgctccgagcttctcctctcacttcgacgattaccgcgagattttctgcacgtcgtcgcccggttcctcgattccgatccttgaacttccggagctcaaccagaggagaaagaacgacgatgttt

SEQ ID NO: 71096 - DNA, 352 bp, Glycine max
gattcatcaaaaaaaaaaaaaaaaaaaaaattaaaaattaaaaaaaaaaaaaaaaaaaaaagggaaaagagaaaataaaaaaaaaaaaaaaaaaaaaaaaaaaaaaaaaaaaaaaaaaaaaaaaaaaaaaaaaaaaaaaaaaaaaaaaaaaaaaaaaaaaaaagggccgccctttttaaaaattcaaattttttttccccttcattccaactttttatttttttttttgtgccccttaatttaatttcattgccccccttttaaaaactcttaacttgaaaaacccttgcctttcccaattttattccctttgaaaaaattccctttttccccagttgtctttttaacaaaa

SEQ ID NO: 71097 - DNA, 237 bp, Glycine max
tccacgcgtccgcccacgcgtccgaaaaaattaaaaaaaaaaaaaaaaaaaaaaaaaaatgggaaaaaaaaaaaatataaaaaaataaaaaaatatataaaaataattaaaaaaaaaataaaaattatataaagaaaaaataaaatttaattttatggtcgtatattttaaattgttaagacttgtaaaaaccgtggcgtttcctaactttatttaatttgtaataattttaaaatt

SEQ ID NO: 71098 - DNA, 431 bp, Glycine max
cccacgcgtccgcccacgcgtccggataactagaaacagtgtgatgaaaatgaaggtccttgttttcttcgttgctacaattttggtagcatggcaatgccatgcgtacgatatgttccctctccgaatgaacactggctatggtgcccgtactccggaggtgaaatgcgcaagttggaggcttgctgtggaagcacacaacatctttggctttgagaccattcctgaagagtgcgttgaagcaacaaaggaatacatccatggcgaacaatatagatcagactccaaaacagttaaccaacaagcttacttttatgccagagacctcgaagtccatcccaaggacacatttgtgttcagtatagatggcaccgtactctctaatattccatactacaaaaaacatggatatggggtggagaaatttaact

SEQ ID NO: 71099 - DNA, 344 bp, Glycine max
ctgttatttacatcaatggaaaaccatttgttcttcgtgaagttgaaagaccatacaaaaacatgctggagtacacgggaattggtcgtgaaagggtggagaaaatggaggctcgattgaaagaagatatcctacgagaagctgaacagtatggcaatgcaataatggttattcatgaaacagatgatgggcatatatacgatgcatgggagcacgtcacttctgaaatgattcaaaccccacttgaagtttttaaaagcctggaggctgatggatttccgattaagtatgcacgtgttcccatcaccgatggaaaagctcctaaaagctctgactttgacact

SEQ ID NO: 71100 - DNA, 431 bp, Glycine max
  unsure (1)..(431): unsure at all n locations
acaccctcatcctccaccacctcctaagaagctatactactatcattctccaccacctncacgccaccctcacccttacccccatcctcacccccacccacaccctcatcctccttacgtttaccactctcctcctccaccccctaagaagccctacaagtacccttcacccccaccaccagttcaccctccctacattccacacccactttaccactctcctccaccaccaccttacaagaagccttacatctatgcatcacctncccctccttaccactattagcatacctctcatcgatatgaacaatatgtgcaacgaataaaataaagcgatggaaagcgcttctcgatgcacgaaagagaaaaaatggaaacaaagtttccgccttttttctttcataaaaaaaaatgttaaacttatttttttc

SEQ ID NO: 71101 - DNA, 427 bp, Glycine max
  unsure (1)..(427): unsure at all n locations
cccacgcgtccgtgttgatcgagataactataatacagtgtgatgaaaatgaaggtccttggtttctgcgttgctacaatttgggtagcatggcaatgccatgcgtacgatatgttccctctccgaatgaacactggctatggtgcccgtactccggaggtgaaatgcgcaagttggaggcttgctgtggaagcacacaacatctttggctttgagaccattcctgaagagtgcgttgaagcaacaaaggaatacatccatggcgaacaatatagatcagactccaaaacagttaaccaacaagcttacttttatgccagagacctcgaagtccatcccaaggacacatttgtgttcagtatagatggcaccgtactctctaatattccatactacaaaaaacatggatatggngtggagaaattta

SEQ ID NO: 71102 - DNA, 435 bp, Glycine max
cccacgcgtccgcccacgcgtccgctttgtcggctttttactctgaaaaagtaacgacgaggtccactgcagagcaccgttgtcaccgcaacaatcatcgacaaaacgccgtcgtttgaagcagctacggagatccactgcgatattcgattgaattccgcgctctcttacaactagaagaatcaggttcaattttccatcgcaatttcggtatcttctcttcctccaatttaaactcgcgttgcaatattcagggtaattcctcaatcgtttctcctgtagcttcagtttccgttttcctagaacttatcattgttaaattgttgctctgttattttattcgcatgactgctgcaaaggtttctgctcagtgtctcggtgctcgggttttgcagtagtcgtcagaattgggcaactgcaaagagggtagtatcg

SEQ ID NO: 71103 - DNA, 362 bp, Glycine max
  unsure (1)..(362): unsure at all n locations
accgacgcgtgcgcccacgcgtccgctcanggttaggatcgtttcatctactatgtttgttctcctacggttagcgcgcgtgtttcccatagcagcgtccaatttcttagttttgtgaattagcgtctttctcttttccgtgtttaattcatcaatgttatttgtcatgtattcaattgaatccgtgcacaataagccgatgctctggataacataatgaaggcagcatggttgtgtgctcggaaattgaaatattacgtcaatatgtctgctctctttgatgaacttaatgataagagggcctggttgcgacctacattttttccttgtttcctttcaaattttctttaatccctgttttt

SEQ ID NO: 71104 - DNA, 434 bp, Glycine max
cccacgcgtccgcccacgcgtccggagataactagattcagtgtgatgaaaatgaaggtcgttgttgtcttcgttgctacaattttggtagcatggcaatgccatgcgtacgatatgttccctctccgaatgaacactggctatggtgcccgtactccggaggtgaaatgcgcaagttggaggcttgctgtggaagcacacaacatctttggctttgagaccattcctgaagagtgcgttgaagcaacaaaggaatacatccatggcgaacaatatagatcagactccaaaacagttaaccaacaagcttacttttatgccagagacctcgaagtccatcccaaggacacatttgtgttcagtatagatggcaccgtactctctaatattccatactacaaaaaacatggatatggcgtggagaaatttaactc

SEQ ID NO: 71105 - DNA, 262 bp, Glycine max
cccacgcgtccggagctttttgtgaggatttcaaagcatggcttcccttgcagcatccactgctgctgcttcccttggcatgtcagaaatgcttggaaaccccatcaacctcagtggtgccacaaggccagctccatctgcctctagccctgcctccttcaagactgtggctcttttctccaaaaagaaggctgcacctccaaaaaaagctgcagctgctgctcctgccaatgatgagcttgccaagtggtatggtcctgac

SEQ ID NO: 71106 - DNA, 223 bp, Glycine max
aaaaaaaaaaccttttttaatttttttaaccaaaaaattaaaaatttgatttttttttttttttttaaaaaaaaaaaaaaaaaaaaaaaaaaaaaaggggggcctttttaaaaaaaaaaaattttctttccggttttttgaaataaaaattttttttttaggggaaaaaaaaaaaaattaattggccgttttttaaaaaagtgggaaataaaaaaaacttggg

SEQ ID NO: 71107 - DNA, 65 bp, Glycine max
aaacggaacgggcatttttttatttaaaaataaaaggctttaattttacatctacatactcaaag

SEQ ID NO: 71108 - DNA, 424 bp, Glycine max
  unsure (1)..(424): unsure at all n locations
cccacgcgtccgcccactcgtcctttgacgtttgggtagtttatcgtgaggagagtatgaagttgtttgttttctgtgttgctgcantagttttggtagcatggccatgccatggcgcaggctaccaaaggttccctctccgaatgaaaactggctatggtgagcgttcttcggaggtaaaatgcgcaagttttaggcttgctgtggaagcacacaacatccgagcctttaaaaccattcctgaagagtgcgttgaaccaacaaaggactacattaatggcgaacaatttacatcagactctaaaacagttaaccaacaagctttcttttatgctagtgaacgcgaagtccatcacaacgacatatttatattcggcatagataacaccgtactctctaatatcccatactatgaaaaacatgg

SEQ ID NO: 71109 - DNA, 437 bp, Glycine max
cccacgcgtccggttgagaactaagaaggagaagcaaatggcttcctcaatgatctcttccccagctgttaccactgtcaaccgtgccggtgccggcatggttgctccattcactggcctcaagtccatggctggcttccccaccagaaagaccaacaatgacattacctccattgctagcaacggtggaagagtgcaatgcatgcaggtgtggccaccagttggcaagaagaagtttgagactctttcctacctgccagaccttgatgatgcacaattggcaaaggaagtagaataccttcttaggaagggatggattccttgcttggaattcgagttggagcacggtttcgtgtaccgtgagcacaacaggtcaccaggatactacgatggacgctactggaccatgtggaagctgcctatgtttggttgcactg

SEQ ID NO: 71110 - DNA, 430 bp, Glycine max
gttgagaactaagaaggagaagcaaatggcttcctcaatgatctcttccccagctgttaccactgtcaaccgtgccggtgccggcatggttgctccattcactggcctcaagtccatggctggcttccccaccagaaagaccaacaatgacattacctccattgctagcaacggtggaagagtgcaatgcatgcaggtgtggccaccagttggcaagaagaagtttgagactctttcctacctgccagaccttgatgatgcacaattggcaaaggaagtagaataccttcttaggaagggatggattccttgcttggaattcgagttggagcacggtttcgtgtaccgtgagcacaacaggtcaccaggatactacgatggacgctactggaccatgtggaagctgcctatgtttggttgcactgatgct

SEQ ID NO: 71111 - DNA, 331 bp, Glycine max
tgagaactaagaaggagaagcaaatggcttcctcaatgatctcttccccagctggtaccagtgtcaaccgtgccggtgccggcatggttgctccattcactggcctcaagtccatggctggcttccccaccagaaagaccaacaatgacattacctccattgctagcaacggtggaagagtgcaatgcatgcaggtgtggccaccagttggcaagaagaagtttgagactctttcctacctgccagaccttgatgatgcacaattggcaaaagaagtagaataccttcttaagaagggatggattccttgcttggaattcgagttggagca

SEQ ID NO: 71112 - DNA, 403 bp, Glycine max
gcgcccacgcgtccgcccacgcgtccgcaagtagttgagaactaagaagaaggaaatggcttcctcaatggtctcctccccagctgttaccaccgtcaaccgtgccggtgccggcatggttgctccattcaccggcctcaaatccatggctggcttccccacgaggaagaccaacaatgacattacctccattgctagcaacggtggaagagtacaatgcatgcaggtgtggccaccaattggcaagaagaagttcgagactcttttctacttgccagacctcgatgatgcccaattggcaaaggaagtcgaataccttctaaggaaaggatggattccttgcttggaattcgaagtggaacacggtttcgtgtaccgtgagcacaacaggtcacctggatac

SEQ ID NO: 71113 - DNA, 132 bp, Glycine max
taaaatcaaaattactcaatttttatttttccaaaatgatcaattatataagattggcgcgacttataaatgacgtgcatcatttcatattgatagtatatctatgcttatcgtgccactcctttcttattt

SEQ ID NO: 71114 - DNA, 376 bp, Glycine max
cccacgcgtccgaaaaaaaaaaaaaaaaaaaaaaaaaaaaaaaaaaaaaaaaaaaggaaaagggaaaaaaaaaaaaaaaaaaaaaaaaaaaaaaaaaaaaaaaaaaaaaaaaaaaaaaaaaaaaaaaaaaaaaaaaaaaaaaaaaaaaaaaaaaaaaaaaaaaaaggggggggcctttttaaaaaatcaattttttcttccccttttttgaaaaatatttttttttttttggggccactaaaataaatttaatggcccccttttttaaaactttggattggaaaaaaccttggttttcccaaatttaatccttttgaaaaaaatccctttttgccaagttgggtaataaaaaaaaaggcccaaacaattccttttt

SEQ ID NO: 71115 - DNA, 437 bp, Glycine max
cccacgcgtccgcccacgcgtccgagaaacagtgtgatgaaaatgaaggtccttgttttcttcgttgctacaattttggtagcatggcaatgccatgcgtacgatatgttccctctccgaatgaacactggctatggtgcccgtactccggaggtgaaatgcgcaagttggaggcttgctgtggaagcacacaacatctttggctttgagaccattcctgaagagtgcgttgaagcaacaaaggaatacatccatggcgaacaatatagatcagactccaaaacagttaaccaacaagcttacttttatgccagagacctcgaagtccatcccaaggacacatttgtgttcagtatagatggcaccgtactctctaatattccatactacaaaaaacatggatatggcgtggagaaatttaactcgaccttgtatga

SEQ ID NO: 71116 - DNA, 441 bp, Glycine max
ttcagaagttatttcatgaattcaattctttttggagggtgacttctgtgttatatgttaatatcagggagtaaatagtgtataatttcaaaaagctgattccttttttacattttttttgtacagcttctcacattttctatatattttaattgaatgagttggcttattgataaatgtgacggttggaaacttgttctggtatatcaggttttaaatggaaaccatttttaacctctgccaacatgaatgagtttccaacagccgtgatgagcctctaacatgtaagaaggaatccctagtaagattacttcaatgaaatttacctgttacgcttggcttctgagctttaataatttgttaatacgattctggcctctctttcctttgctaattaactattttctcttaatgctaccctctctttcctttgctaattaa

SEQ ID NO: 71117 - DNA, 290 bp, Glycine max
cccacgcgtccgcccacgcgtccgcggacgcgtgggtagtttatcgtgaggagaatatgaagttgtgggttttctttgttgctgcagtagttttggtagcatggccatgccatggcgcaggctaccaaaggttccctctccgaatgaaaactggctatggtgagcgttcttcggaggtaaaatgcgcaagttttaggcttgctgtggaagcacacaacatccgagcctttaaaaccattcctgaagagtgcgttgaaccaacaaaagactacattaatggcgaacaattt

SEQ ID NO: 71118 - DNA, 458 bp, Glycine max
  unsure (1)..(458): unsure at all n locations
aaaagggggcgaccgacgcgtacgataaaattaaaaattactcnatttttatttttccaaaatcatcaaatatataagatggccgcgacttttaaatgaacggcagcacttcatatttatcttattactatgcttaatgagcaactccctacttttttagaaccgctccactttaacacatttataaacccccatcatcttataaatcaattaaacaagaactaataaccaactcatccttctcaattatctatatctaaagaactattcaaaacaaaaaaaaatatacaaaaactatctattataacaacttaactattgccaagcatataataacaaatatcttatttacttttaaatcaatataaatatacatatctattaatacgtcaaacaaaaaaataaaaaaaaccattcatatatatactctaatatctaaaacgcctattccttatatt

SEQ ID NO: 71119 - DNA, 337 bp, Glycine max
cccacgcgtccgaaaaaaaaaaaaaaaaaaaaaaaatttttaaaaaaaaaaaaaaaaaaaagagaaaggggaaaataaaaaaaaaaaaaagaaaaaaaaaaaaaaaaaaaaaaaaaaaaaaaaaaaaaaaaaaaagggggccgccctttttaaaaaaccaaattttctttccccttctttcaaaattataattttttttttggggcccctaaattaaattcactggccccccttttaaaaccgtcggactggaaaaacccttgccttacccaacttaaatccctttaaaaaaattccccttttcccaatttgggtaaaaacaaaaaagccccaaccc

SEQ ID NO: 71120 - DNA, 420 bp, Glycine max
  unsure (1)..(420): unsure at all n locations
tcgnccacgctatcgtgaggagaatatgaagtngtttgttttctttgatgctgcagtagtttgggtggcatggccatgccatggcgcacgctaccaaaggttccctctccgaatgaaaactggctatggtgagcgttcttcggaggtaaaatgcgcaagttttacgcttgctgtggaagcacacaacatccgagcctttaaaaccattcctgaagagtgcgttgaaccaacaaaggactacattaatggcgaacaatttacatcagactctaaaacagttaaccaacaagctttcttttatgctagtgaacgcgacgtccatcacaacgacatatttatattccgcataaataacaccgtactctctaatatcccatactatgaaaaacatggatatgcggtggaggaaattaatgaaac

SEQ ID NO: 71121 - DNA, 143 bp, Glycine max
ctcacgcgtctctatagatgatctcaacctttatctaatatccgtgaagactactcgcaacggggaccaactacagatcaattgcaaactcaaaaaacacttacaacaggacgatagtgaaatgcacgaccaaaaacatatct

SEQ ID NO: 71122 - DNA, 293 bp, Glycine max
ggggcgaccgacgcgtccgcaaaaaattaaaaattactcaatttttatttcttcaaaatcatcaattacatacgagcgccggtctctatataaatgacacgcagcatttcatatccatcctattgctatccttagtgcaccactcgctccattcttataactaaaccaattctccaaacttatttaccgaatcaccttctaattttattaaaaaacaactaataaccaaccccatttctttacattattctacatctaataaaactaaatcaaatcctacttccaatattaac

SEQ ID NO: 71123 - DNA, 414 bp, Glycine max
gtgatcgagataactagaaacagtgttatgaaaatgaatgtccttgttttcttcgttgctacaatttgggtagcatggcaatgccatgcgtacgatatgttccctctccgaatgaacactggctatggtgcccgtactccggaggtgaaatgcgcaagttggaggcttgctgtggaagcacacaacatctttggctttgagaccattcctgaagagtgcgttgaagcaacaaaggaatacatccatggcgaacaatatacatcagactccaaaacagttaaccaacaagcttacttttatgccagagacctcgaagtccatcccaaggacacatttgtgttcagtatagatggcaccgtactctctaatattccatactacaaaaaacatggatatggggtggagaaatttaac

SEQ ID NO: 71124 - DNA, 178 bp, Glycine max
  unsure (1)..(178): unsure at all n locations
gtcgtctgagaccattgatattcccgacggcgtgagcatcttggttcacgcttaggttatcgatgttgatggccctcgtggaaaacgtttntcgagtacttccactcatttgaactttgaacttgtaacttattaccgactatggcggtgaaatgtagtcttatattgattcttggtt

SEQ ID NO: 71125 - DNA, 296 bp, Glycine max
ctggtggtgatagtggtttaggtggtggatatggaggaggagcatgaggtggtggagttggaggacttggaggtggtagtggtctatgtggtggttatggaggaggaagtggtctaggtgatgtaatcggtggacgcctatacacaggaatagggcttggatgatgcctttacaaagggattggaattttgagtggccttaacaaaggcatatttgttagtgtactttgctataagtggagttaacatgtgtattcgtgcgttcaagcatgttgaattcaaagagccttgaaaaat

SEQ ID NO: 71126 - DNA, 451 bp, Glycine max
gtttgttgtgagctataagctagtttatcgtgaggagaatatgaagttgtttgttttctgtgttgctgcagtagttttggtagcatggccatgccatggcgcatgctaccaaaggttccctctccgaatgaaaactggctatggtgagcgttcttcggaggtaaaatgcgcaagttttaggcttgctgtggaagcacacaacatcctagcctttaaaaccattcctgaagagtgccttgaaccaacagaggactacattaatggcgaacaatttacatcagactctaaaacagttaaccaacaagctttcttttatgctagtgaacgcgaagtccatcacaacgacatatttatattcggcatatataacaccgtactctctaatatcccatactatgaaaaacatggatattgggtggaggaattttatgaaaccttatatgatgaatgg

SEQ ID NO: 71127 - DNA, 258 bp, Glycine max
cccacgcgtccgcccacgcgtccgtggaaagaatgtttggccacattgatggaggaaacgggtcaaaaacttcagtgactgttgacagggaatgtgtatccccattgaattctttatgtgcagaatgtatacccaatgaggaaggaaagccttgtgcttttccttaccttaaagtgatcaaaattgttgctttcaggctgtaaccgcatattttgataaccattgttgattaaaaggcaagaaattcatgctttctct

SEQ ID NO: 71128 - DNA, 299 bp, Glycine max
actactcatgctgtcatcaacggcagattcgctgacctggcagagctacaccattacatggatcgcggtataccaaaggagctagctaatgctaagccacttgttcaagaacctgacccgtcttaattacatacaacagccatgcattcattataatccttaccttgtaacatgtttaacttaatactatatgaacatctgggcaattgcgcactgacaaatagttcacttatctgcacttgaaaatgtgtcaggttatgtcctcaccatcataatggagactactgtgagatgaacta

SEQ ID NO: 71129 - DNA, 302 bp, Glycine max
ctcttgagagtcacactcttacttcaagacacgtaccgaaagaaactatcatccatcaaattatacactatacacgaacggtcccgctatctctctccaatatcacgaactactaactttcattggcaattttcacgaaacacttgctgcaagaactcccaggagaaccgtcattgctgcataaacatatgatctgattgatccaaacactgttcaccgagttcgcattactacaagtaacctgtactcaactgcattactgcatgaacgtaacaaacactttggaacatctctttcaacaa

SEQ ID NO: 71130 - DNA, 218 bp, Glycine max
gcaaatcgatgtgttaagttatttcatagtccatgtttctatctaaaaatgaagaactattcgagagatactttgaatatatgttccgtctgttctataaatgagtggatgtgaaaaaacttttttgttagtaaaaaaaaaaaaaaaaataaaaaaaataaaaaataaaaaaaaaaaaaaaaaaaaaaaaaaaaaaataaaaaaaaaaaaaaatataa

SEQ ID NO: 71131 - DNA, 243 bp, Glycine max
tttaattctcatcttattctcatctccaatccaaatatggaggccatcactgcttccttatagagctctatcaaaaactgttccttaaacaataccaacaactaccatcatcatatcacccccccataagaagatgatagatcatctacataattagacataggaatctcattctgctaaaactatatccctgaccccaataaaaaacatatctccgacaccacattagagctcaactcccac

SEQ ID NO: 71132 - DNA, 253 bp, Glycine max
ggtttcggaatatcccgggtgcgactccactgcgtctcgctgagacaacctattttatattaatacctaaaatatattgtcagctttcagtgcctgttcggtagagtattctgtatggtacgttttctggggtttcgccacttcacatctcagtatgtatgggttgtgtgcacccttttaactctccaacaaccttcaaagctctctaaggcatacaatgaacacattgtcaatgcttttataccatactcat

SEQ ID NO: 71133 - DNA, 266 bp, Glycine max
tttttatttggtttttgggttttttttttttgttgcaccgtattcaaggattctatgttgttttttttaaaaatacttacagcacaattgatttaatggaagctatttaatttgtccagttttgtggccacttatttgaaggcaatctttgtacgttttgtttggtataaattttcatttttgagcgttcaatattagctagttcttatattttaacgcaatattactttctgaaaatctttataaagttaactttttccataatt

SEQ ID NO: 71134 - DNA, 443 bp, Glycine max
cttatttcttgccgttgggaggaaaccacttccagcggtacacatgcagcatgttaaggggatgtgagtggtgcaacagcacctggtcataccgagaagacaacgttcatgaagccaaataggagctgcgcacttctcgatgcgcatcctgacatgtactccaattgactatcgatcacgttatgtgcttgtacacctaaatcgctgcacataggcgtcaccttaaagcctatggccttgatcatgaagctatacgttgagaagtgagaatctacagcgattgagaagcccaagcgcgtatggtcatgattcaagctcatgactattgtacctgtgacgaatggtgacataacaggagcgtacattggcatgacctttactctagtggacatgtgaccgcttatgaatgagcatgatccggcatagtatactattggatacag

SEQ ID NO: 71135 - DNA, 220 bp, Glycine max
tcgcccacgcgtccgtgacgcgtgggcggattcttggttcatgtcttctcgactcacctggggaatcgcgatcataagggccgtgttcgcggcatctccctcaagcttcaatatgatgagcgcgtgcgccgtatggacttcttcctcgacttctccgctatcaacaccgaccacatataggtctacaaggataccctatacatgctccaatccctcggta

SEQ ID NO: 71136 - DNA, 277 bp, Glycine max
ctcacgcctacgtcaacgcgagcagtatatgcaagtgtatcgtgaggagaatactacagtggttgtggtctcaggtgcaggccatggcgcaggcgtacgaacgtgccatgtcgcgaagctacccaaggtatcgtgagcgaatgaaaactgtctatggcgcacgttctacgctggctaaatgcgcacgcatcatgctagccgtgaaagcacacaacatacagtgcgttgaaaccactcatgactagagcaatgaaccaacatatgaatccaactatgg

SEQ ID NO: 71137 - DNA, 338 bp, Glycine max
cacagaccgagaaatcccaatcctatggcacaagacgggtatctcgatgaacagttggcgcagctactatccaattttgtgcaccagagggaatcactgtcgaatcaagaagaagtagagctgcgtactaaaaatgaaactcttgtattagaggttacaatagatcttttttaaagacaacgcagcaccatgaacgagacgcaaatagcttataatgtcggataaataatcaccctgattggataacttagatgagaggatatcaatcatcaaaggcttcagtaacacaggtgcagacgctcttgagtgatgcaaacataatgtggatgccagctata

SEQ ID NO: 71138 - DNA, 365 bp, Glycine max
cgggccgacgcacgcgtccgctagaaagtgatcctacaacacgtacattcttatgcttaaaaaaccaactacggtatcgtctacattgaaccacattgacttggcatacaacacttactctaggtatgctcattcattaccatcatgcaactgtataaacagaagatatatcacgctctacgacttttgatgttttgaacctggtgcatggtaaatcgctagcatcttctaattgaaatacagagttaaatccttttaatggacactcatttattaaagatgctaaagattattaaacaatcattcatccctttaaagaaagctagtacaacattaccaaacataatgcatataatccttttaat

SEQ ID NO: 71139 - DNA, 303 bp, Glycine max
gtttgatgttctaactctttcttctacttttattgttctgactatgtttgtgttttttgtctcacctaaaaatatcttgctacaactgtaactactgttgcagaagctcctgcaagttcggcaactgctacctaagctgcaagacatacccacacttgagctacactgagtcaaccaccacctataccttagtcatgtgagtgccacctgctaacgctcaatatgactgttcttaaattggagtgccctctaagaacgatggctgctaacttaaaccaaactgcatctacaacccctgcactt

SEQ ID NO: 71140 - DNA, 333 bp, Glycine max
ggacgacccacgcatccgcctcaataaaaacccgtttgttaccaattccatcttacacatgcacctcgctcactttgacactttagaagccacctctccacacaatgcttctaatccaaaccaccaacataaacaaattcatattgaaactgtttactgaaccattgttttcttatttgtttgttactctaccaatctttataacaattcattctctaaaaatatccttcttttttattaatcaaagccaaactcaaaatacaactcttgtaaatcaaccataatataatcttaaaattgattctgctatgtattacgaaaaacaccttattt

SEQ ID NO: 71141 - DNA, 457 bp, Glycine max
gccgggggtagtgcgactgcggtagggacgacgttgctccgcgagcttgtcctcctggggatgtgccaacccgacggcttggaccagggtcagaggctggagaacttggacctcgcagcgaatatcggggttcaaacccaagaagaagcaactcaagcggagagatggcggaagaccgactatccgatttgccagagctttaaactgatgcaggtactcactcaccgaacctgtttgggttaccttgaagagaattcccgtagggtcctcatagggtgaatgcgcaaaacgggtctcgatggcctgcaaaagtcctgcccaagtggggaaccggtggttgcacatcatccactggaaccacgctaaggcgggtccttccatggtgaagaaaacaatggttagacgctctagttctggggtggagtgataggcgaaaaactgaatgattttgaacgcc

SEQ ID NO: 71142 - DNA, 451 bp, Glycine max
gattgatccatccatttgtcttctaattagcttatttttgtgaattttgtagactttgaaagtcttaccaagttaccacattatcatatttggcctcaattctcttgaatatttgtttctttacggctgttcaaaactgtataataaccagttattgaatgaacctagggatgtagaacatttgatgaagatttatataggtaaagctcctttttatccccaatcaacaccttcctactccagagaacataaaagttgagttagctatttattgccttcctcgccaattttcccatgtatctgcaaacttgatctaagtttctgtaatttactttaaatccctgatgctatcggaaatttatgttgcttaaaaagcctagatttaaatggaaactaattttctatactgcccaacctcaagaacttttcaaactgttccatttaaacttac

SEQ ID NO: 71143 - DNA, 455 bp, Glycine max
cggactcgtgggaaaaataataaaaattttataaaaaaaataaaaaatttttaaaatttggaaaaatttaatgcaaaaaaaaaaaaatataataaacttatttttttttttaataacactatatattatcttttatatttttttcattaaaattaattttttttttcttctataaataatattcaatttaatattttatttaatatctttttaataatataattatttttttttttattatatattttttataaactttcttacttttttaatcattttttattaattatattttataatttgtttatgttttatattatatattatattttaatttttattatattatatttttttttttatttttttaacttaattatattaatttaacttttaattattttaatttatattttttttattttttttatacttaatattattttttttttttt

SEQ ID NO: 71144 - DNA, 315 bp, Glycine max
  unsure (1)..(315): unsure at all n locations
cccacgcatccnataccaccaacttttttttatacacattttatttaacaattactcattgtacaatttgtgttatcttactgaaaacttagcacaaaaaaatgaatgctacacatttccaaacaagagttacatccacttattagctaattaagaagccaccatatattcaaataccatatagtacttttatggtgtctcaccacaacgccacacaaagccttatcgaatttactattcagcttaatatatccactctttctccatatcccatcatttttttttaactataccagaattaacacaatttcgact

SEQ ID NO: 71145 - DNA, 292 bp, Glycine max
  unsure (1)..(292): unsure at all n locations
ccacgcatccactgaccaaaacgatcctttttgacagttcttgattataacttactttcgttaaaatgtgctgttcttgcttctcaattacctcaaaaaatntatgggtccattttcatgtttagggtttcttagttcttattcgctacttgcgaagatgttggattttaaggttgtcttgattttcttcacctggctttgatgtttcactttttgcgaattattgattttttttttatcaatattttattcacttattaagctatcaagcgctctattccccagtagcaaa

SEQ ID NO: 71146 - DNA, 178 bp, Glycine max
  unsure (1)..(178): unsure at all n locations
cacaacttccaaacctgtcaattttgcaacctagcctgccttatncacccaccnaccaacccacactcnacccataccccttctatcacctttaacaaattcaacccaatccaaccaaacattattccccaaatagatcctaatatttcaccctccttcctcttacaactcaccaaaa

SEQ ID NO: 71147 - DNA, 411 bp, Glycine max
cggggggacgcacgcgtccggcagaccacgctaaaccttcgtgcaacttatggcctttcacttcgactctctagaattgctcactcggttgctctgcctaaagagatggcacatcatgagcgtaggaggaaggccatgaacaggcacagaggtgctatgcacacacatcaacataagggtattcacagaaacaactgtgaaagtgattctgtgaaatatggagatctcgttgacaatatcatgcctaacctgctgactactaacacgaatttaatgactctttcgactactattacaataccgaaccttcgaatccattaatcaagcctgtgtattcaaaagatgacatcttcgacaccctaaccggcaacacgctagatcgtggatcacataaccggatgtttagtgttc

SEQ ID NO: 71148 - DNA, 407 bp, Glycine max
  unsure (1)..(407): unsure at all n locations
acgcgtccgctgaaatatgcttttatacttacatattttatcactggtttatttaactatttgaattgttgacttggatatgcttttgtgcttacatatantatcacaggcttatttaattatgtttatttgtcttgctagcctagcttattcttttatgatgatttagaagattttggaaagggtgattggatatagtattgtcaatattttctttctatgcctaaaattttgctatgatattctacaaaatgtctacgtgacctatcacagtagctattgcttttaatggattctgtaataaaaaagggtgacttactttcttattttatttcaacacctacgtaatcatgatgctatatctgttcctgtcagttcttaacattgttgaaacttgtctttaaaat

SEQ ID NO: 71149 - DNA, 313 bp, Glycine max
  unsure (1)..(313): unsure at all n locations
cggcgcgacccacgcatccnaccttatcccttatcctttcaaaacctttccatgtctacctccnncactgctctttttctcccaaccctcactctccgaactcnacaacctctctgttctccccaatgcttctcctcgtccctctccctcacccctaactccaaacccatttccatttccgccgttttcctcaaaacaacgctgtcttcgtcgtcaccgttttcgctgtcgtctcgcttcgttccccatgtctctttgtttgatcatgaagaggacacctttctcgactgatactgccccagcttctctctct

SEQ ID NO: 71150 - DNA, 238 bp, Glycine max
cattattgcatgacatactcggatatgtctaccacggcctcctctctgcttcacccacgtggatctacttgaggcagaagtacctctttcactcctcaaaccattacggacgataaactctaaacataagctagttaacctcaaatcctcatagactatgcaacgcaccactactactgataatgctcaattcacgtacagactttattgggaacctttaacagtctacagtggtcta

SEQ ID NO: 71151 - DNA, 177 bp, Glycine max
cgaaaatgtggaagagacggggatatgtagaagacgtatttcaattgataaactcatggttcataggcctaaatctagctggcataggctacacagcctattttttcggattctttactgtccacgcttctttttatctcgtgatcttggatacgtacaacactgcgaagacattat

SEQ ID NO: 71152 - DNA, 96 bp, Glycine max
tttgattttgctttatgagatttcatcattctgtatttttggtttctgcattcggactgcaatttaaattaatggatgagaactaatgaataagct

SEQ ID NO: 71153 - DNA, 352 bp, Glycine max
  unsure (1)..(352): unsure at all n locations
cccacgcatccactaattccatcaatcattttctaacattatacacgcatatactanattcgtgtaattcgaccaacactctgtccaaattgctactctttaaatcagatccgcgacacccaccccaccaaaaccttgcacaacccatccactacacttgactcatgacgatccagccactttcatcctaggaacatcatattgctttaatagcttaaacatattgaaaaatgaatcttagatctcacacttagctatcgaatgtatgatcgtgatgacatttacatgcactctaggacttacacgattatcgtcccccataatactggacatgaacgaagaatttatcaac

SEQ ID NO: 71154 - DNA, 419 bp, Glycine max
  unsure (1)..(419): unsure at all n locations
aggaaaagccggcgcgacccacgcatccnaccactccctccctttcttataacaattatccactcataacacaccatcgtgaccttggaggaactaaaccgtgacatggcaaccacaaacatctcaacctgtcacatccaatacgtcatcaattccattattcgcctacacaacagaaattttttacactctaacatttacatgaacagacgacacccatacatccaatatacgacatacatgtcactcatacaacttacgaattctatcttaccaaccaaacctgaaaacttatacttccttttctcagcagcagaactcatcatatctgcctaggaaaactttgatacataatccacactcaacacatcatactcttcaccaaaatataccatataccatacatcaaatgccttttt

SEQ ID NO: 71155 - DNA, 218 bp, Glycine max
ccacgcatccgattaaaaataagaacgtttatatcaagttacaatactcctaataaacccgcctattttgtaaaacttaccggcccccacccaaaacacttcatcttacaactctcattctctcaactacatatcaaaaatcctaccctaattaaatctacccattcctttctatctaacaaccttacatatctcactatttcaatcataaaattttc

SEQ ID NO: 71156 - DNA, 83 bp, Glycine max
tttaaaaaaacaaaaaaaaaccccccaaattgcaaaattttaacccccctcccccaaaaaaaaaactactattaacaacaaaa

SEQ ID NO: 71157 - DNA, 398 bp, Glycine max
  unsure (1)..(398): unsure at all n locations
caaaaaacgagaatcgccaacgtgttcttcttgnactttatggccgcaacccaaccagcgtggatatgctacaaggtcctacaacagactacacatcattttatccttcacggataccaaggcatgaaacgtcttatgagcaaactaaaaaagctggttctttatatcgatactactgattctctttatagcaactgttactctgctctacttaatagacaagcactttgaagctatatctgtgctaaatgccactcaacacctgcttttcattcagtttttcggagctctaaaagagctcatgagaccgatgtaaatgctgatgcatggcacatctcagaacagatctgggtgtagttctaacatatgttactaccacctctactagttactctatg

SEQ ID NO: 71158 - DNA, 329 bp, Glycine max
gcgactccaacaaatccctaatctcaacttttacagtatcacccgcaggcgaacacgcgtgcactatgccgaacgcgacggaacatgtgaatcatcaatctgtacgaaccgactgttgtgctacaaacatgttgatgaacgcgcagaataatctggcgaagcagatcaacttcgaggctatgaatgcgagcaagaatgacaccgcacaggatcatacgctaaaagtattagagtgaatgcggactgagtgtgatgcgagctcttgctgtcgacccaatttagcaaaagcagaacttataaactctcgaacgaacctacgtatgtagaga

SEQ ID NO: 71159 - DNA, 427 bp, Glycine max
  unsure (1)..(427): unsure at all n locations
ccgggacgacccacgcatccnaaaaaccctaanccctatttcaccttctgaccaccaccctacaaaccctgccaaatttgcaacatcatatgacaccaacccacaactccctatcctatgacgctcaatcctcccaactaaaaatcacaatcaaactaactacccaatcccatctaaatcaacccaatctcaacacagcccatccaagctatcgattaaactcctactaactacaccactctaacaccatattaacctcaacgaccacattacaacactgacccactatgaacaccactatttgacctaccatctttaccatccaaaaaatcaactttcaacattttactaaatacatgatatagcccatattgatcgaacttcccaacaattgcaaagcctgaataacaacttcgacccacacatt

SEQ ID NO: 71160 - DNA, 278 bp, Glycine max
  unsure (1)..(278): unsure at all n locations
cccacccaccaaaaaccctaaccttttttaactatttataccaccaacaaaactgccaatttttcaaattaaaaacccccccccccaacacaaaatcctcaancgctaatcctcccacctcaacatcttaatcataaaactacccaatctctctaatcaacccttttcaacacactcaccaatctaccgattacctcctataacttcccactctacaccatctaacccaacgatgctctaatcaccttccccgaggaacaccccgangggatntacca

SEQ ID NO: 71161 - DNA, 300 bp, Glycine max
cctacgcgtccgcccatttttacacccattcgtccaatcgtactttttgttctttttaatattaatcgcctgtattaatccaacaaaaaatgtttctttgaaactaaagaaaaacaaactaagattgtcctaaactgaagaaatacaaaaaaaaatggcttgagatcaatcctaaccactaaaaaaaaaaaaaaagtgctttctctctaaattatccaagcttacttactcttgctttctactttatagcttttttatagtgttacctaaattcaatttacttgcctaccttttacaacg

SEQ ID NO: 71162 - DNA, 245 bp, Glycine max
  unsure (1)..(245): unsure at all n locations
acaacaaaaaaccnaaacttgtatatttttgtaagtttattattctcctcattaaacttnnaacgaattcaaaatacacatactagtaacttcccaaaattgctcttccattcttaacgtcaaccacaacctcacctatgctcttcttactccaactaaagactgcttaaaagatattatatctctttcatttaaatatcaattcatcttcttatcattctttacattcactacaactttttctt

SEQ ID NO: 71163 - DNA, 308 bp, Glycine max
  unsure (1)..(308): unsure at all n locations
cccacgccaacaaccacacatacaaatcctttcttactttttatctaaccttcaaaaaccttcttaatttgacaaatcatttctccctaattccnactaacctatcaaatactatcttctacttattcctacttccttctcctatacacaattcaaaaacatcactcttaattcttctcttcttttcaccttttaccacattattattctcctaacaacttcttcattcaccactaccactcaaactactactttaacatttttataataccaatttccacacataattttcaattattactaacttc

SEQ ID NO: 71164 - DNA, 277 bp, Glycine max
ccacattcacctgaacttttagtgaggattccaaagcatggcttcccttgcagcattcggtgcttctgcttaccttggcatgacaaaaatgcttggaaaccccatcaacctaacatgtgccacaaggccagctacatatgactatatccctgccttcttcaagactgtgactcttacttccaaaaagaaagctgctcctataaaaaaagctgcagatgctgctcctgcctacgatgagcttgccaagacgcttgggcctgacctaatgatcttcttg

SEQ ID NO: 71165 - DNA, 179 bp, Glycine max
  unsure (1)..(179): unsure at all n locations
cccacgcgtccgccgacacannccatacttanaaaaaaattacaccagtttatcaatcaatctcaaacttgttcattttggaatttttatccccatcaaacacctacaaaacattacatactaacacataaaaccctctcctctataccaaacataacataataacatctctaaccata

SEQ ID NO: 71166 - DNA, 267 bp, Glycine max
  unsure (1)..(267): unsure at all n locations
acaancactaataacactcctgctgcttttttattacactgccgctccactcaaacacatatctcactccaaacctcatctctttcactactttttctttctccatatacttatcttcctacttgtatctacttaactacacttattcacattaattatttaagcactaacgctcattctccaccatttgtatcactgaccatacccaagaccatcttatacatcttctttataattagctttcataacacatattcacaattttca

SEQ ID NO: 71167 - DNA, 204 bp, Glycine max
  unsure (1)..(204): unsure at all n locations
acaangaaagnacaangcaccaagcgggcctangcacaaccnnaggcgananacanggnnaacggagannaaagacaccncnaaagaaggananagccnngaagagaaangcancaagaaagaagcgcnngagggagaagagaacgcncgngcaaaaaccccgggaacacgaannggcgnngccacnncaaagcggggaaagaa

SEQ ID NO: 71168 - DNA, 162 bp, Glycine max
  unsure (1)..(162): unsure at all n locations
ggagggcaccgaagaagagcgagaanacgaggnacgacgaaaaccncggcggcnccaagaacgccccgcaggaagaacngaagaaggcggacaagaaagccgccannaagaaacaccccgacaagggcggngancccgagaagnnnaaagagcnggcgcaag

SEQ ID NO: 71169 - DNA, 291 bp, Glycine max
ggggaccaaacaaggaggaaaagctaagcctgagaagaaacccaagtgtgataagaaggaatacgacgaggttgacatggctaacattcagaagaaaaaggaagaggagaaggcgctaaaggagtggaaagccaaagcgcaacacaagggaagctttggaggttctgggctcaagaaaagtggaaagaaataagggctctttatcatgaatgtatacatacaatattgagccctgtaacttattaccatgataacattatggcttattgtggacttctttattgctctaat

SEQ ID NO: 71170 - DNA, 114 bp, Glycine max
  unsure (1)..(114): unsure at all n locations
agattcaacaggancagangaaaccccgagagcagcccactttggaggaangagcgacccnncgctgggcagnncccggccacaaacnacgganaaggcaccagcaagccgagg

SEQ ID NO: 71171 - DNA, 131 bp, Glycine max
  unsure (1)..(131): unsure at all n locations
aaaaaaaaggggaaaaaaaaaaaaaaaaaaaaaaaaaaaaaaaaaaaaaaaaaaaaaaaaaaaaaaaaaaaaaaaaaaaaaaaaaaaaaaaaaaaaaaaaaaaaaaaaaaaaaaaaaaaaaaanggggggg

SEQ ID NO: 71172 - DNA, 190 bp, Glycine max
  unsure (1)..(190): unsure at all n locations
aaaaaaaaaaaaaaaaaaaaaaaaaaaaaaaaaaaaaaaaaaaaaaaaaaaaaaaaaaaaaaaaaaaaaaaaaaaaaaaaaaaaaaaaaaaaaaaaaaaaaaaaagggggggggggaaaaaaaaagggnnggggaagggagagagggaaanaanannnaangnnnanaaaaaaaaaaaagggggggcggg

SEQ ID NO: 71173 - DNA, 250 bp, Glycine max
  unsure (1)..(250): unsure at all n locations
cgcacncncaacncnncacnngnnaaggcnnccggcngaaagnncnaaacncaacgcaagggagcnnagcaaagncacgnnagagaacncnncaaaannggagcagcaanggcncncgcactacgaagcancaaccaaaacgcgcanncncagcanngacggcggaggaaccaccgccanngncgccggcgccnccctcgnccaccncgaagaccagaaccgcgcccaaaccgccganccncacacgcaa

SEQ ID NO: 71174 - DNA, 245 bp, Glycine max
  unsure (1)..(245): unsure at all n locations
ccaccacagcagcgcaaaccggaaccanggngagcacctccggcacgaggaggcaaccgangaccagcacaagccgaaagacangccccaacggcggngaagcgcnnnnnggncngaaaaggggacgaggagggcgnggcacnngcaaggccgcgnacaaggggaagcncaaaaccccagaaggagaagnggagnnngaaggcccagangangncnncaacggggacaaggcagaggacgaaggc

SEQ ID NO: 71175 - DNA, 123 bp, Glycine max
  unsure (1)..(123): unsure at all n locations
gagagaagcgngagagccnnagncgnncaagattagagcnaagnggaagaagaagcgcacggggaggnngaagaggaagcgccgaaagaagagacaaagancnaagnaggggcccgagcagga

SEQ ID NO: 71176 - DNA, 268 bp, Glycine max
  unsure (1)..(268): unsure at all n locations
aaagaaccaacaagcggcggaacccncncagccaaaaaaaacaangcagacccaccagaacccncccacaccggannccgacccgcagcncccgcagaacaaaanccaccaccccnccnccccgcgccancaccaccccnccnccgccgccacccccacccccaccgccggcgcacgccgcaaaancggcgnggccgncgaccccnccgacgagagcgccnaccgcggccgcngggccgngcagcacnacanccgccccggggacgcc

SEQ ID NO: 71177 - DNA, 152 bp, Glycine max
  unsure (1)..(152): unsure at all n locations
aaaaaaaaaaaaaaaaggaaggggaaaaaaaaagaggaaaaaaaaaaaaaaaaaaaaaagaaaagagaagaaaaaaaaaaaaaaaagnagaaggaagaaaaagaaaaaaaaaaaanagagagggggggaagagagaaaaaanaagaggggag

SEQ ID NO: 71178 - DNA, 220 bp, Glycine max
attgcttttaaaaaaaatttgggaaaaaaaaaaaaaaaaaaaaagggggagttaaaaagaaaaaagggtaaaaaaaaaaaaaaaaaaaaataaaaaaaaagaagaggataaaataaaataaataaaagaaaggaaagaaaattattaaggaagaataataatagaaaaaaaaaaataaaatggggggaggattaaatataaaaaaaattaaagtgaaaag

SEQ ID NO: 71179 - DNA, 260 bp, Glycine max
  unsure (1)..(260): unsure at all n locations
ccactcaaaaaaaaaaaaaaaattttgggaanaataaaaaaaaaaaagggngggggaataaaaaaaagaaaagggggtaaaaaaaaaaaaaaaaaaaaaaaaaaaaaaaaaaaaaaaaaaaaaaaaaaaaaaaaaaaaaaaaaaaaaaataaaaaaaaaaaaaaaaaaaaaaaagtgaaaaaaaaaaaagggggggggggtttaaaaaaaaaaaattttttaggggggggtgtagaaaaaaaaaatttttttttttgaag

SEQ ID NO: 71180 - DNA, 71 bp, Glycine max
  unsure (1)..(71): unsure at all n locations
nagagganccaagcnnacgnacgcgngcangcgacgggagagcncnncnanagngncaccnaaanncaann

SEQ ID NO: 71181 - DNA, 359 bp, Glycine max
cccacgcgtccggctagggccgccctttatttttgtagtctgcacctaattatcttataggtcttcacgaagaatatgtatgtatctttcccgttttctgggtgaaatgaagaactgaaaggatctatcgatccatcccatattcaaccacacatagaacgagggaattgaattgggttagggttttgggaaagatgaaaaagaggcatgtggtccttaagcgagattacgccacgtcatcaccagcggtggggaatattcgatacggtgagtgccataagaatcatgctgcgaacactggaagttatgctgtggatggctgcatggaattcatggccagtgcccgtgaaagaacaaat

SEQ ID NO: 71182 - DNA, 216 bp, Glycine max
cccatgcttacaatgaggacgcttctctgtccttttaagatcgtccaattccaaaggcgggtgacctgtgcataaacgggagcgggcaagacgctctcttcaaagagctccacggtcattttcaccgagctcactaacgcgcattagctcgccgcaacctaaaacgcctacttgcttgctataacagcaaccgctaatgttaccgcatataatagc

SEQ ID NO: 71183 - DNA, 299 bp, Glycine max
gaagaccacgcgaccgccactcctacgatgtttgtgaatcactcagtaatgattactttaagaacaacatttaaagactaattggggacattcaataatatgattacattactttatcattaactgtctaagatgacattgccagatccgaatacaagaggagatcttataaatcgcattgctggaatgttgaatcctatcaatacagcatatttgaacagatatgatccactactttatactgtaaagagtatttcaaccctcatgcaatacactgatatataactaaatcgaaattt

SEQ ID NO: 71184 - DNA, 245 bp, Glycine max
  unsure (1)..(245): unsure at all n locations
ccggnccggacggcccgactcgacccactcatcctatccttctaaagcgccagcgttctcccttcatattacttttaccttactctgcagttttatttacccgtggtgagcaatttccctcctactttaactctaatacccactaacttttttactccaaatcttcaacaaacgctctaatcttttctcacctcccttcctttaaaacctctccacttctccttttaccaatgaatacactcatc

SEQ ID NO: 71185 - DNA, 454 bp, Glycine max
cccacgcgtccgcccacgcgtccgatttgaagatgaaggctacaaagaaaaagtatgaagaaatgctgatgcggggaatcaaggccaatcagacaattttaactactatcatggatgcatatggaaaaagtggagacttcgacagtgctgttcattggtttaaggaaatggagtctaatggaattcctcctgatcagaaagctaaaaatgttcttctatctttagcaaaaacagatgaagaaagggaagaggctaatgagctcgtagtgcatttcagtgaaaatagcagtttacctaaagttaatggcattgttaaacttgttgacgaagatgaagaagaagataattatgaatattttgatgcccagctcgcaagggcttatgaacattctacagaggtaaaagttgacgaatgtcaagtcctttgagacctaaacactcaaattttgtacac

SEQ ID NO: 71186 - DNA, 356 bp, Glycine max
cccacgcgtccggggatagtgtacaagaggtaaacctcatttaaacctcattacgttcggaacattattgtaacaacaaaaaggaataataatttattctttttctttttcacaacaaaaaaaaaaaaaaaaaaaaaaaaaaaaaaaaaaaaaaaaaaaaaaaaacaaaaaaaaaaaaaacaaaatattccaagccttctgatgactatgactctggtttcaacaagccatcgtatgagtcttctggcggtggctatgaaggtggttacaacaaaacatcttattctagtgatgagccagcttctggtggtggctatgaaggtgggtacaagaaaacaggttattcttggtgggca

SEQ ID NO: 71187 - DNA, 301 bp, Glycine max
  unsure (1)..(301): unsure at all n locations
gcgcgagataactagaaacagtgtgatgaaaatgaaggtccttgttttcttcgttgctacaaggttngtagcatggcaatgccatgcgtacgatatgttccctctccgaatgaacactggctatggtgcccgtactccggaggtgaaatgcgcaagttggaggcttgctgtggaagcacacaacatctttggctttgagaccattcctgaagagtgcgttgaagcaacaaaggaatacatccatggcgaacaatatagatcagactccaaaacagttaaccaacaagcttacttttatgcc

SEQ ID NO: 71188 - DNA, 293 bp, Glycine max
gcgccgactcttgtgctttttaactgattccggaatgaattaattaattttcttccctaaaaggaataaaagtaacccatcaccattggcagaagaactaatctagctttctcagaacttctttccaccattgattgtaaacatttactaacaacttttaacacttacatgtactactacaagtgctcaacacatatttgcttacaacaaaatcctagtacacaataacttaatattaaatacttgcatgtgcaacaacacttattatatccccaaacatttaatatcacctt

SEQ ID NO: 71189 - DNA, 322 bp, Glycine max
ctctaaattttgccatactgactagtttctccacataactcactacagatagatcagagccgcatcaactaatactgtgtaccattccatcttatcttcctttattaaagacaacaaacatgcagccaaacacttctagccactgctattgattgcatatttgtctctgtttctttcacttaaactcctataacacatatctcttgattttctaactataccaaataatttatcctttcatacttcatatgctcttgctacctcttttactcataacgcttcacataacctctaccatctgaatattcatcaacttcattaa

SEQ ID NO: 71190 - DNA, 245 bp, Glycine max
ccctcctccggataggcaccaagctttcttaggaccaattagctgagtgacggtcttaagggatgatgaacttaccttgcattttgaatcctctcacacgcctaggatttcctgcaattgcaatggtttctatatgaccgcctgcacataaaaacaacactacttctatacatattactacgattacgattggggttaaattatttctcaattattatacgaaaatctaatgaaggagtgttgtg

SEQ ID NO: 71191 - DNA, 329 bp, Glycine max
tatgacaataatatactttccgtacctatagctaatcgaaatactctgggtatctggggctcccaagttaatgcgggcccttattttgagtacctcttcaaattagccatttagatgaatgaataattttgcttttagaatttattgatagtaaaacttatctaagaactgtaaaaggttgagatatattcacataatggttagtgacaatgacgtctacaatcaggggaaactagcatggtatgaatattggtgatagtctaacggggcatttatctatatacttttactgcaacaaagcaatttccaggcattatttaaaaattaaa

SEQ ID NO: 71192 - DNA, 224 bp, Glycine max
catgcttgattggaaaaccaaatcaatgccactcaattagaccctatatgatcacctcatgactttagacacaaccaagcttgtgtaaatgatttcagtatccatttcaaactaagaacctgatacatcatctgttcaccattatccataattactaaatcaccacttaaaaactttcacagattttaattataaatgagaattttcgcccactgttcactctc

SEQ ID NO: 71193 - DNA, 284 bp, Glycine max
aacaaaacaatacaacttaaaaaccaatacaatctacacttctaaataataaaaaaaaacactggataatagaactataaaaatactgaagcacaattaaaattttcccaattatatcaattaaataaactataaacttttattgctattcacggcgctttctcattaataccgatcatattacttcaattttaactttctctatcttttcaattgctaccttataatataatctcattctctgtttcaaatactttccttgtttcataattccttatttatcc

SEQ ID NO: 71194 - DNA, 256 bp, Glycine max
ttccactcgttcgaataaaattattacaactttatacttcttataaaaaaaaatggcataatgtaaatattcggtgctccctattctaaatctaaccttttaccctctttcctttcaatcctcaaaacctttttaactttatacctaaatttcatcctcatcattccttattttctactttgtttcttatttatatctttcttttccattcttttttttcttatccttaccatttttctctttttctattatttct

SEQ ID NO: 71195 - DNA, 355 bp, Glycine max
gcggccagcagcacaccttaaaaaagttcccggctcctttcttgaatttcactgaagccataaagcctagcacatttactacaattggttattttattttcacaaatcacgataaaccatctccaattccttacgttactctgtgcttcaatggcgtccaaccacgagatggatcaagacgacgacggaggagcaaccgacctcagcaccagcgacgccgaaaccaccaccaccaacctcaatggagtccccaaacagcacaacgcgtttgaagaagaaacaacggggtttcaagtcttgccgctgaaaaaggaggagccaacatattcggacccgaacatggggattactcccg

SEQ ID NO: 71196 - DNA, 239 bp, Glycine max
attacatagcattctacaactacaattcccgacctaaacaaacccacaacgctctagtcatctttacttaataacactctcaactttaactgttctcctctttaatacatactgtactctcttccatttaatggaacatttcaagaatctgatcacttgctaacccaacttctcatatagactactaataatttaaccttaaaaatatactaaataccactctcctgaaccccccattc

SEQ ID NO: 71197 - DNA, 431 bp, Glycine max
gctagtttatcgtgaggagaatatgaagttgtttgttttctttgttgctgcagtagtttgggtagcatggccatgccatggcgcaggctaccaaaggttccctctccgaatgaaaactggctatggtgagcgttcttcggaggtaaaatgcgcaagttttaggcttgctgtggaagcacacaacatccgagcctttaaaaccattcctgaagagtgcgttgaaccaacaaaggactacattaatggcgaacaatttagatcagactctaaaacagttaaccaacaagctttcttttatgctagtgaacgcgaagtccatcacaacgacatatttatattcggcatagataacaccgtactctctaatatcccatactatgaaaaacatggatatggggtggaggaatttaatgaaaccttatatgatgaat

SEQ ID NO: 71198 - DNA, 308 bp, Glycine max
cccacgcgtccgcaagtagttgagaactaagaaggagaagcaaatggcttccgcaatgaggtcttccccagctgttaccactgtcaaccgtgccggtgccggcatggttgctccattcactggcctcaagtccatggctggcttccccaccagaaagaccaacaatgacattacctccattgctagcaacggtggaagagtgcaatgcatgcaggtgtggccaccagttggcaagaagaagtttgagactctttcctacctgccagaccttgatgatgcacaattggcaaaggaagtagaataccttc

SEQ ID NO: 71199 - DNA, 163 bp, Glycine max
  unsure (1)..(163): unsure at all n locations
ccacgcgtccgcatagaataatcanaaagagaagcattagcaaaatcaataggaactagtgtaaacagaaatggccggttcaataatagcatttttggccctcaaacctgccccttttacttgttaaaaatccttaattaaaagcctttccttccttttaaag

SEQ ID NO: 71200 - DNA, 59 bp, Glycine max
tattggttaagtatgaagttcatctagaaaatggaaagcttttaacaaagtctgatggg

SEQ ID NO: 71201 - DNA, 172 bp, Glycine max
cgaccacgcgttctccactctttattcttattgttgtacacatagagagaacatacaattaagggcaacccagtgatttccgcaagccccccaaagaacctcaaggctcacttcaccgctccgtctacctttcgtacacgtactgattagcgcacctctctccacccatctt

SEQ ID NO: 71202 - DNA, 304 bp, Glycine max
  unsure (1)..(304): unsure at all n locations
gggccgacggacgcgtacnnccacgcgttcgcccacgcgtctttattccatgtggagctgccttaaaaaagagagccagtgtataagacgggggtgaccccaccatacaaaggctaatcaagctacgaagttcaatcacacattcatatcaaatgtacaacattccaactgcatggatgcttgattctggaataatgagcgagataaagcatgcttacatgactctggtcaatacatacatgaaaagactgacaatggagcttgaatccattcggaattcagacagaaaatccattcaagattc

SEQ ID NO: 71203 - DNA, 359 bp, Glycine max
caacctccatggctgatgccaccaagtatgttcccatcgctggtaccaacgggtcttccgttctcaaaaccagaaaaacggtggctgctgcatactctttcatactcgccttcgtcgctttcactgttttcttagccttttccccttcttcaaacgcttcttcaccttggttcaccaacatattctctcccacatccaccaccgacggctcctacaagcctcaaattcctaacattttctctctccttttcccaaacactacttcaccctccaattcttctgatcccctgcataacaacactcactcttttagatctaccaatgccacttctttatctccttatccaaaaacagcctta

SEQ ID NO: 71204 - DNA, 339 bp, Glycine max
gccgacccacgcatccttaacctccattgctgatgccatcaattatcttcccatctctagttccaacgtgtcttccattctcaaagggagaaaaacggcgtctacttcatactctttcatactcgccttcgactctttcactgttttcttaaccttttccccttcttcaaacgcttctttaccttgattcaccaacatattctctcccacatacaccaccgacgagctcctacaagcctcaaattcctaacattttctctcttctttttccaaacactacttcacccctccaattcttttgatccccttcttaacaacactcactctttaatatctacc

SEQ ID NO: 71205 - DNA, 177 bp, Glycine max
tccacgcgttcgtccacgcgttcgtcttcgcgtccgaaaaaaaaaaaaaaaaaaaagggaaatagggaaaaataaaaggggaataaaaaaaaaaaaaatataattaaaattaaataaaaagggggggggaatactaagggggataattattttggtatcgggtggatgatatttttt

SEQ ID NO: 71206 - DNA, 280 bp, Glycine max
aaaaaaaaaaaaaaaaaaaaaaaaattttaaaaaaaaaaaaacaaacaaaaaaaaggggcgcttataaaaaatcccagttaacctacacattcatacaacataaaaaggtctcttcttttaaaacctccattcttccatctgcctcttttctactaacaaccccatctttaaactcccttaatttccccttcttgtccatctttcttcaacttcctactttgaaaactcccttcttacccaaaatcacccttctaaaattccttcccatcttctccactt

SEQ ID NO: 71207 - DNA, 247 bp, Glycine max
tccgatcaacaccagccttatctcctatcatttttttacaaaatcaccatcattataactcatgcaacttttacatataagggcggttaccccttacaaggttcacaaccaatttgagcagcaccaccaaaatggttattccaaatggtggtgtctgtcttagagcttaactcaactcatcacttgtcatatgcctcaacactgggctctcccttttcttgatgaggttcgcgttctttaactttca

SEQ ID NO: 71208 - DNA, 168 bp, Glycine max
  unsure (1)..(168): unsure at all n locations
tcgtaccgcaccacgtccgtccgcttatgtaacaaaaagtacaatcacaaatcagcaattantngaaataaacaaaaaaggaaaaaaaaggaaaaaaataaaaaggagaaaataaaatnaaaaacaaaaataaaaataaaaaataaaaaaaataaaggggcgcgggcc

SEQ ID NO: 71209 - DNA, 189 bp, Glycine max
gagcaatgtatataggaaattgtaggccattcttattgcttacgctaatcctatcacatcatacgctggtttgcctataattgctgctataaagttctacagatgaaactagaaaagaattcacggtgtaacttctttgaagattgattccaccaacactgttctgtaacatgtaaggagcatttaatg

SEQ ID NO: 71210 - DNA, 60 bp, Glycine max
cccacgcgtccgcccacgcgtccgacaatactcaaatgataaatcaaccaagattcggat

SEQ ID NO: 71211 - DNA, 300 bp, Glycine max
cacgcgtgcggtcttcaatcatatctcattccaagttatgaagatccctaccatactcatactctggggacttggggacatctacacggcactcctaccttcatccacctgttcaagtcgacggttgacatggaatgttacgatcctcaaaatggtgggaaacattttgtgttgccagtcatcaattcatcatatggtggaatcagattagccgtatctgtaatagaaaagatccccctcactgttttacaatctgtccatccgtttgttaacgagatttcatctattttttcaacccca

SEQ ID NO: 71212 - DNA, 110 bp, Glycine max
gcgcagtaatgagaataatcaaattagatttttaaattttaaaaaaaaaaaaaaaaaaaagaaatattgaaaaaataaaaaacacgtcagcctttctcaaacatccttcc

SEQ ID NO: 71213 - DNA, 409 bp, Glycine max
gccgattcttcaatcttatatagatttttatacagagacagagatagattcccttcgcatccttaaaagagtgcaaggggaatgccctatcctttcgttaactagatgtttgtgtaacccaaacactccttcaaattcaacctcgataacatctctacctcttccaatcataaagataatctcataacacacggaatcatgtatttacccaatatctcaatcgtctcatttgctaaaaatccagctatacacttcactacatttgatattcctacactatacatccatcttcaaaagtttaaccatcctatattttacttcatcatatccttctgtacatatctaacctctaatcccaaatgaccaacacataattcttttctcaatacacttattcaacatcttattt

SEQ ID NO: 71214 - DNA, 421 bp, Glycine max
gcgcggactccttggaagcatgtcaaattttcctcaacttgctaggcaggggagctggggttctaaagagtgttcccatgagaggtaattcacctgcatcattgagtcgacaaaaatctgggagtggcaaaccaactgagcaatctctatcatcatcacctgcctcttctcaatcactgctaaaactgaaaaaagatgcaatgaccaagaattctgaagccatggacttcagagtttggtgtgagaatgaatgtgcgaggctcattgggacaaaagatacaagtttccttgagttttgcttgaagcagacaacatctgaagcagagatatttctcacagaaaacctgtgattatatgaccatgatcatgaattcattgataaattcctcaattacatggacctactaccatcagatggttt

SEQ ID NO: 71215 - DNA, 425 bp, Glycine max
cccacgcgtcctcaggggtaaaattttaaaaaaaaaaaaaaaaaaaaaaaaaaaaagaaaaaaaaaaaaaaaaaaaaaaaaaaaaaaaaaaaaaaaaaaaaaaaaaaaaaaaaaaaaaaaaaaaaaaaaaaaaaaaaaaaaaaaaaaaaaaaaaaaaaaaaaaattaaaaaataaaaaaaaaaaaaaaaaaaaaaaaaaatgggttcctttaaacttttatttttttataaatattataaaaaatatatttaaaaaaaaaaatctttttttttttttttttaacaaattttataataatatatttcttcttctaaaaatatttttcctttataaaaaaaatcttttttttattcccattttttattttataaaatccctatattatatttttcttttaatatataatattttttttttttttaaa

SEQ ID NO: 71216 - DNA, 363 bp, Glycine max
ctcttctaaataccctgctgtacccacacatccgaacaaatcaaatccatatccaccttttcttctctattcttctctccatactccctgtccttttttaaaaaactacttaccaattcacactccattaataccaaatttttcaccttcaacatattcaacccattccaaccaaacattattctccaaaaattttctaatatttcatcctataatattttacaactcaccaaatttttcaataacctctttcccacctctttatctttctttcataccctttactcttctcaaatccacattttatacatcataaactctcaaaataaccatcattttcatacatcctttatatttaacatt

SEQ ID NO: 71217 - DNA, 63 bp, Glycine max
cacacatccgccttcatatggataaacaacaagtttttcataaccttttcatgtcacttcaat

SEQ ID NO: 71218 - DNA, 239 bp, Glycine max
  unsure (1)..(239): unsure at all n locations
tcacaacatttntcacaggcttcatgttgtatttcacaagaaggaggcatatcataatttttatcaccattcttgataatacaaatgggatcaccatttttaacacattattgagtacaaattatatcttcattgtgaacacaaagcttaagattaccatttttagcacataccatatcacaaatagttgttcctatacaaattcaatgacaatatccatttttagttcttctcctcct

SEQ ID NO: 71219 - DNA, 186 bp, Glycine max
cccacgcgtccgtttgcatttagctaaaacactgttttctgtttgacttgcttttgtcgtcattgtagctatatatgtgaccacatgctcatttcaacaaccatatcaattcataatgaaaagttttcaagagtaaaattacctgtgaactatatagctacaatgaaccaaaaagcaagttaaaca

SEQ ID NO: 71220 - DNA, 86 bp, Glycine max
aaatggtcattctattggcttttaacttgcctgttgtgatacacctgggattgtaagcctgctggattttaagagttctttgtttt

SEQ ID NO: 71221 - DNA, 217 bp, Glycine max
accacacgtacgtccactcgtcctaattaaaacaaaacataacataaaacttacagagaagacttataaaagctaacagtgacataaaaaaaataacttgcaaaccccatcaacctcacactgtgccacaaggccagcttcatctgtctctatccctgtctcctttaagactgtagctcttttctccaaaaagaatgctacaccttcaaaaaaaaca

SEQ ID NO: 71222 - DNA, 383 bp, Glycine max
accactcgtgcgtccacgcgtccgatagaaatcttcattaagggtttaatggtagtgcatggcgtgatcacatagccaagccaaggttcttcattcttatcacaaaaacaaattgatacaacaactagactcaaacaaccttcgacaattccagttctaaacaaatccaaacaaaaggaatcctaacacggttttaaattacagccagcatcaacaattgcaggcacaatatttacagtttctaatgccttggcgtcacaaccacaaccacaatttaaatccacatatctttaagaatagcaatatttagcttacaagtagctgatagtactcatcctccctaaacagctctgagtactgagattccttgagagccagcacca

SEQ ID NO: 71223 - DNA, 389 bp, Glycine max
tacctttttcgaatcccggtggacccaacgtccgcatttattcaaaacttaagtttattccttgtgtaatgctttcttcctcaataccaaacatttcgaacacatgcggcaacttcaactgcgctgacaagactagctgcaccaatggtaacagctatggtattattgtacagactgagaatacttacatctacactgacatcatggatgttccagcatctgagcatgatcagaagtgcaattgttgcactaactgcacttgcactgactgcacctgtggccattaatgaatatgtattaaaatgtaaatgccatgagtttgtcaatacaaatatccaaataatgtaatcttctatatgaatacactatcgtgcttttatcctaaatat

SEQ ID NO: 71224 - DNA, 311 bp, Glycine max
gtatctacatgtcaaaaacagggtttttcttatcacatcccttcttcaacacctggcggactcttatcgctctctgcatggcttcatcctccttcaaggtgtctaagagcaaactcgttaccacaccgatcacttgcatctcttcatgcaagatagtttcttcgcttacttgttttgagtcatatatcctggattctattcatctattgacgtttcaactttgaattctatcctatttgctcctatgttaccttctgattattctagcttaatctttcgatattaatccactctcctactttaaggaacac

SEQ ID NO: 71225 - DNA, 138 bp, Glycine max
tcaactataccgtcggagcagcgcgcagctatgagaagctcgtcgcccacgcatgcggcgcagcgcgcatagcccagccaagcgcgccaagccaccaagcacaatcgatcgacgcgctttggtgactgcgcacttcgg

SEQ ID NO: 71226 - DNA, 424 bp, Glycine max
  unsure (1)..(424): unsure at all n locations
cggaangaccgaggcgagcgaggcggcgaatcagccactggcactgaacaattttccattaacaagaacaacaccatcttaagggaggacagggtaatggacatggctctgcattcacccttgaacccaccatctgtgcctcgctcctcttctactactggaacaagatgcgcccacattccggcttggagctactttgattttgatgagctcgtacttgatgccttctgcactgaacgcatattatgattcttaattggacaataagaagcctctacttcttacctctgttcaagacacaccaaggggcctgttaacaactcctaatcaacgctctagtattacagtaggctcaccctaactctaaggatgcaacattggctctcaccctatcaatctctccaacttaggattgaacatggct

SEQ ID NO: 71227 - DNA, 215 bp, Glycine max
taccattttcattaacaacaccatttcaagggacgacgtagtaattaacatgggtctgcattcatccttgttcccaccatctctgtcttgtacctcttctactactgtaacaagatggcccacttcccggcttggagcttgtttgaattggatgagctcgtccttgattccctaagcacttaacgcatattattattcttaattgttcaataaaa

SEQ ID NO: 71228 - DNA, 456 bp, Glycine max
  unsure (1)..(456): unsure at all n locations
tcgactacgcgtccgcccacgcgtccgctcacgcgtccgtccacgcgtccgtccacgcgtgcgctaggttatcgtgaggagaatatgaagttgtttgttttctttgttgctgcagtagttttggtagcatggccatgccatggcgcaggctaccaaaggttccctctccgaatgaaaactggctatggtgagcgttcttcggaggtaaaatgcgcaagttttaggcttgctgtggaagcacacaacatccgagcctttaaaaccattcctgaagagtgcgttgaaccaacaaaggactacattaatggcgaacaatttagatcagactctaaaacagttaaccaacaagctttcttttatgctagtgaacgcgaagtccatcacaacgacatatttatattcggcatagataacaccgtactctctaatatcccatactatgaanaacatggatat

SEQ ID NO: 71229 - DNA, 399 bp, Glycine max
cccacgcgtccgaaattagttcattctctttgcgcagttccctacctctcctttcaagatgcaggtcttcttcaagaccctcaccggaaagaccatcacccttgaggtggaaagctctgacaccatcgacaacgtcaaggccaacatccaggacaaggaaggaattcccccggatcagcaacgtctcatcttcgccggaaagcagctcgaggacggccgtaccctcgccgactacaacatccagaaggagtcaacccttcaccttgtccttcgtctccgtggtggcatgcacatcttcgtcaagactctcactggcaaaaccataaccctagaggtccaaagctctgacaccattgacaacgtcaaggccaacatccaggacaaggagggaaatccccc

SEQ ID NO: 71230 - DNA, 405 bp, Glycine max
gaccacgcgtgcgggacaacaatggaaaaagacggatggaagaaataagatttgtggaaggaaagaaactagaaatgttcattgattgacaccaaatcgtgtgccctgcaaaaaaaagaaagaagggagagaagaagttggtggggtgagttggatcggatttctaatctaatctatacctctcttttttactatgctctgaaggcacaaaccctgctttctttactgttctttcttgttctgattgatattccttgcctacaccctttaaggaaggaagaagcgaacaactatactactattattcttacaaatgtgattattgcaaataatcattccattatagtgactgaccgttgtgataattcctcagacatagaaccaacgggcctctcctactactca

SEQ ID NO: 71231 - DNA, 215 bp, Glycine max
  unsure (1)..(215): unsure at all n locations
ccccctcccaccccccctccccctttcctcccccctcccccccccccttttttcccccctatcccccccccccctactcccccccttcccccccccctcttcccccctccttttcccccccccttcccccccccccccntaccccctcccctttctctccccctccccccccctcttcccccccccccctttccccccccccccattcccccccc

SEQ ID NO: 71232 - DNA, 126 bp, Glycine max
  unsure (1)..(126): unsure at all n locations
gcccttgtcgttgttcacccataatcttgtttcgtcaataatgaagttatcttttaaataaaagcaacatttgtcgtagtaaaatgttctgtagttttttaaaatctanattctcatttttattaa

SEQ ID NO: 71233 - DNA, 454 bp, Glycine max
cccacgcgtccggtttgttgtgagctataagcttttttatcgtgaggagaatatgaggttgtttgttttctttgttgctgcagtagttttggtagcatggccatgccatggcgcaggctaccaaaggttccctctccgaatgaaaactggctatggtgagcgttcttcggaggtaaaatgcgcaagctttaggcttgctgtggaagcacacaacatccgagcctttaaaaccattcctgaagagtgcgtttaaccaacaaaggactacattaatggctaacaatttacatcagactctaaaacagttaaccaacaagctttcttttatgctagtgaacgcgaagtccatcacaactacatatgtatattctgcatagataacaccgtactctctaatatcccatactatgaaaaacatggatattgggtggaggaatttaatgaaaccttatat

SEQ ID NO: 71234 - DNA, 464 bp, Glycine max
gcgaacagtgtgatgaaaatgaaggtccttgttttcttcgttgctacaattttggtagcatggcaaggccatgcgtacgatatgttccgtctccgaatgaacactggctatggtgcccgtactccggaggtgaaatgcgcaagttggaggcttgctgtggaagcacacaacatctttggctttgagaccattcctgaagagtgcgttgaagcaacaaaggaatacatccatggcgaacaatatagatcagactccaaaacagttaaccaacaagcttacttttatgccagagacctcgaagtccatcccaaggacacatttgtgttcagtatagatggcaccgtactctctaatattccatactacaaaaaacatggatatggggtggagaaatttaactcgaccttgtatgatgaatgggttaacaagggcaatgcaccggcactgcccgagactcttaagaa

SEQ ID NO: 71235 - DNA, 386 bp, Glycine max
gcgtacgcatatatatctcgtggatacttgcattaatcattatcagcaacaatggaactcatgggtgaaagggataaatcagatctggttcagaagaccactttcttcagagatggctatcttttacattacccatgacactcaaaggcatcctctacttcctgaattaaaatcttgaataatctgtactcaatgttctttgtctggtcctattagtggtgagttaactgtataaacatctgcatttccaattcattcaattgatcttcaattgtttctagtttagtccattcttctctgttagaaaattgtgacctaaactcttttgtttcaaacaacacaaatagcatttaatatcagtgcctcaattttactcttcctaatta

SEQ ID NO: 71236 - DNA, 465 bp, Glycine max
gacggctaggtttatccatctcattaatgagtagtacgtttattgcattactctcttgaaggctactcttgggaacagcgttcatacctactatgggttgttaatataaataaattaatagggcttaaatgtacttatatccatttactttgtttgaaaaaacataaaatcagctttacaattttatataatattcgctttccaaactaatttcattaattaatatatttttcatctttattgtaccatgcttcatattattaatatacatctttattgaaacattaaagctcttataaatgattttttaaatacaatataatatatattctatgacattgttattattgaaaatcattttttggaacatattatctaatctttttgaccttattttattatataaatgtactttttttaggtttgtgtctagaaacctgttctttttaaataagaattttctaa

SEQ ID NO: 71237 - DNA, 363 bp, Glycine max
ggaaggcgaatcaagcactttctctgaacaatttacccttaccaagagcacatgcatataaagggattaccgatgctctgacatggatctgaatccatactattaccaacacaaaatttcctgttccactcttactactctatacaggataagtccacttacacgatacattgttgatcttcatgtggaatagtctctggctcaaaacctaaagcaaacaaggcatatcattacatatgtacaaggctactaatagattatgcttctgtccactgatcaatacacacttatgggcctcttatcaactcctaatcaactctcatgattcattgagattttcttcagacatctacgatgcaccaa

SEQ ID NO: 71238 - DNA, 416 bp, Glycine max
  unsure (1)..(416): unsure at all n locations
cccacgcgtccgcccacgcggtccgctggctcgtatttgtggtcttacaatgaaaataagtccagactcctgtccaatacatgttggggggtggctcaccnttttttttttttctctctttttgtgcctttgtgtctggtttatatttggttctgcttggctgtgcctttttttgtttcctttgtcttttagtcttctttttgtgctctttttgtactttatttatttagtattctgggttttttttgattcattttttttctcctgttttttgcacgctttttggttctcttattactttgtgatgtatttcttttgtttttttttgggttttttttttatttttctttttttgtctctatttttttcgtcttctattatttttcgttttccttttgttttgccctttttttctt

SEQ ID NO: 71239 - DNA, 437 bp, Glycine max
gaaaagcttgacttctgttcttaaaagtaggctgtaaatggataggcaattgacagaatcagagagatgagatggaattgatgagagagaagctggctggtctagagttggcccaggaagagaccaacaacctatcaaacattgtgcattctgacaatgtacggctagagcatgatgttgccttcctcaaggctgttttagatgatacacaaaaggagttgcactcgacaagaggagttattgcaggagaaagagcaagggcattccaacttcagtttgaagtttttcatctcaaacaaagattgcagtcaatggaaaaaaatcgagcatctactactccgaggaaaccatttcatgtacaaggaagtggatgtttgaactttgaagtagcttatttcagttttttttttatgtttttagagaagcatatttcactt

SEQ ID NO: 71240 - DNA, 311 bp, Glycine max
aacaaacaatctttgatacctgattttataatatttatctactctaatcaaaaccaggctccatgtgtttcttctaatgctgcggcgtcaacgacaaatactacttcttgcattgttccaattacatatgtatcaagctatgcttcttaatgtataacgatacacattctacatttttcccagggtcaaaccttattatacaataattcttcgtcgccccattttctatgaatcaaccttacatactcaatcattttaattcatttcctttttataatttcacctaacatttacttattttttcgcccttt

SEQ ID NO: 71241 - DNA, 211 bp, Glycine max
  unsure (1)..(211): unsure at all n locations
aacaaaccaacttanatacatatattttaactcttttctacgagactcaaaccaccgcgttcatgtcaaattattactggtgctatgctaactaaacactatctaatttcatctaaactcccttttagtaatcacctatactatacatattatccactagttgtattttctctcttttttcacatctcattcacttactacaaaacttttt

SEQ ID NO: 71242 - DNA, 459 bp, Glycine max
gcgaccacgcgtccgaattatttgtgaaagccggatttaagaatataaatcatcttcttaaagcaagtgggtccgtataattggtcatgagattttggcaaatcgattgttacaacggttcttacatttcttacttaattattcattctcgaacgcacatggagatgtataaaatgctttcttacttattgtcttctctgtttgtgtgcgagactgtgagtgcatttgtatttgtgcacaccgatatgtaaatctggactgattattggcctgccaatgttttaagaagttcatgaactgttcactgattggaaaccttattttgatgcttccaattgcatttttatacatgcaccttcaagtagtcgtcaactgctttatgatggagagagatcgtactttaccaatcagcaatgtgctattagaaatattgcttttactgttcggaggcctactttc

SEQ ID NO: 71243 - DNA, 459 bp, Glycine max
ggaacgctaatcatccactgtcactgaacaatttaccattaacacgaacacgaacatttcaagggaggacatagtaatggacatggctctgcattcatacttgtacccaccatctttgtcttgttcctcttctactactggaacaagacggcccaattcccaggttgcagatagttcgaactgtaagaactagtacttggtgccttgtgcactgaaagcatattatcactctgaattggagaataaaaagcatctacttactacctctgtgcaatacacgcataagcgcctcttaacaactgctgaacaactctcttgtatcgtagaagctctcgtcagtctccaaggatgcaacattgactcttaccctatcaatctctacaacttggatcgaacatggcgcctacagttcactttttgctctgatgttctcattcttctgcaagctgatgctactct

SEQ ID NO: 71244 - DNA, 253 bp, Glycine max
  unsure (1)..(253): unsure at all n locations
gactcactaacttatcaacagtgtttttagcatttatgtacatgactccaacacttgttgcatgccaatattatactggcgattcgcntattatctgatgaagaaccatataaactccttctacgaatcaacttaagtctacgtttggatcacttgttgttgatttacaattgattctataacgcatccatttctttaaaactttactttgaacttgcgtttcatcatttttcaaattcacaatatgcatcat

SEQ ID NO: 71245 - DNA, 455 bp, Glycine max
  unsure (1)..(455): unsure at all n locations
cacgcgtgcgaccacgcttacaacaacacgtgagaccactctttcgaatattcattggcacaggcttactttaagctttgtgggctgctttttgaacacattgctcaatatcacacatactaaaaccatctattaattaaatcaaaccatacaatgactttttcttaacctgttacaagatctgtataatatctacctcacctcatatactcttaaaaaaagtctttgaactcttcgttgtacgaaacgaacccgggtcattcgaatcatatccatatcaaatttacgattcacatcttgttattctaaaacaagaactctttaatgtcttactgataggtctactcctatatattgtgcacgccttacgacatgttactggtataaatataaaatgtgcttttgttaatgataagattgccttacacaangttttactggttggcactgataca

SEQ ID NO: 71246 - DNA, 380 bp, Glycine max
  unsure (1)..(380): unsure at all n locations
tccgattctttctatttgttttaagcttactngtaaatacattaaattaagacatgtgtttacttgtcagcagggcttagattcttagagtatgtggtaagagtagcacaccatgaaatctgaatgcctattatcatgtttaacgttaattatcgcacgtgccactatgccagtatggtatataacttgaaatagataatcaagtattgtgtggtgcaaaaattcttcttaattatttcttaaaaaagcttcctttattataccctcctttataaacagcttttatcttaatatttccttttatcatttttctaatgctttctcttaatataatactcattataatcttaatttcttttcttataaaaattctaattttt

SEQ ID NO: 71247 - DNA, 245 bp, Glycine max
  unsure (1)..(245): unsure at all n locations
ccacgcgtacnactaaatttgtcatttccaactatatctttccatcaaagacacatacttttggttacatggtacacacaatggggcatatgcacccttcaaatactctaacttaacgtattactgtaaacattaatgtgtacacacacgtttttcctttactcaagtttctaactataaggaaacttgttaacaattaatccaacctccaccatttacttttagacaaggcaacatccaatgca

SEQ ID NO: 71248 - DNA, 447 bp, Glycine max
ctagaaacagtgtgatgaaaatgaatgtccttgttttcttcgttgctacaattttgggagcatggcaatgccatgcgtacgatatgttccctctccgaatgaacactggctatggtgcccgtactccggaggtgaaatgcgcaagttggaggcttgctgtggaagcacacaacatctttggctttgagaccattcctgaagagtgcgttgaagcaacaaatgaatacatccatggcgaacaatatacatcagactccaaaacagttaaccaacaagcttacttttatgccagagacctcgaagtccatcccaaggacacatttgtgttcagtatagatggcaccgtactctctaatattccatactacaaaaaacatggatatggggtggagaaatttaactcgaccttgtatgatgaatgggttaacaagggcaatgcaccggcac

SEQ ID NO: 71249 - DNA, 425 bp, Glycine max
  unsure (1)..(425): unsure at all n locations
gatcgagataactagaaacagtgtgtttaaaatttatgtccttgntttcttcgttggtacaatggtggtagcatggcaatgccatgcgtactatatgttccctctccgaatgaacactggctatggtgcccgtactccggaggtgaaatgcgcaagttggaggcttgctgtggaagcacacaacatctttggctttgagaccattcctgaagagtgcgttgaagcaacaaaggaatacatccatggcgaacaatttatatcagactccaaaacagttaaccaacaagcttacttttatgccagagaccttgaagtccatcctaaggacacatttgtgttcagtatagatggcaccgtactctttaatattccatactacaaaaaacatggatatggtgtggagaaatttaactcgaccttgtatg

SEQ ID NO: 71250 - DNA, 436 bp, Glycine max
  unsure (1)..(436): unsure at all n locations
ttcttttttgcactcaataattatttttttttattagcgtctcgacaacacgaatagattcctgtaatgataaagcgtgggccgctagancatgagattgatgggctaaaaagaagactgagagaagagagatgggcgtgacgaatgaagaagttgaatcattcttgaaggccaaactgaactcttttcatcttgaagtggttgatacatctggtgggtgcggtgcaagttatgtggtggagattgtattataactatttgaaggcaaatggttattttagaggtatcgtatggtgaattctgtcttatatgaggaaaatgaataaattcatgtttttttttataagaaagctgttttctcttactatttgtaatattatttttaattttatcaattttaattactgatttttaaattatatttttctgtttataa

SEQ ID NO: 71251 - DNA, 115 bp, Glycine max
acgcggaacgctgtgggcttgtacgcgtgaggcgtgttcgcgtgggacggactgcgtgggctgtgtttaggcgggaactcccgtgattgacatttttagttaatgcgcagcagag

SEQ ID NO: 71252 - DNA, 142 bp, Glycine max
acgttcacacttactataacgcttccaccgtatttaacatgatcatcaataatgaaattactgttacttttttatatgaggaggataacatccttgcctttacttacatacatccacaagctcttatatatataactattta

SEQ ID NO: 71253 - DNA, 184 bp, Glycine max
cccacgcgtccgacaacacgatcaaaaactttttacaaatccataatacttctaaaacagcgttttcaacctaacagtggggatacaactaactataaactgaaacttaatacgcttctactgcatcagcaacaactcaaattttaacgaataaccaactttccaaaacaaacctaaatattca

SEQ ID NO: 71254 - DNA, 389 bp, Glycine max
cccacgcgtccgagaactagaatgataatttttgacaaatccttaatcactagaaagcagagtccttagctaagaggtggggtcgctgcttgttatcagcttgtgtgatgatacttctactgctgcagcaacaattcatgttttatggaatgaatagtctgtctatacaaacctagatgggaatgatgacatagcgaacttctgcatctttcatcctaacccaatgttcatgaagcatattccaattccagtatataaacctgtaccaaatgacaactccatgtgataaacttattccaaatgctgtctcaattacagaggacatgaacgattccatgtccagggtataagcctattaaaaagccagttccagtgtacaagcctatacc

SEQ ID NO: 71255 - DNA, 56 bp, Glycine max
cccacgcgtacgacaaaacgaaagttctctttatctgaacccttatgaacacgtta

SEQ ID NO: 71256 - DNA, 82 bp, Glycine max
cccacgcgtccgaaaaaaaaaaaaaaaaaataaaaaaaaaaaaaaaaaaaaaaaaaaaaagagaaaaaaaaataaaggagag

SEQ ID NO: 71257 - DNA, 255 bp, Glycine max
cccacgcgtccgaaaaaaaaaaaaaaaaattatataaaaaaaaaaaaaaaaaaaaaaaaaaaggaggaataaaaaaaatgggagagcataggaactcctattctatgggtacctaacttccgtgcgcttgcttgcgactccatttttcttctttcgggtcgcctatttttattttattgtccgcttcttgacagctctgttgcttgtaaatccctgccttttcctagcataatgtcccttcagctcatacctctt

SEQ ID NO: 71258 - DNA, 296 bp, Glycine max
cccacgcgtaggttcccgccgatgaaattatcggctacaacatcttgttctgtcctcgggataataacccatgtgggtatggtgcggttcatttcgaccaattccgaaacaggcgtttggtggcgtctgagggtcaagaagattggttatgggttatggtttagaaaccttcataagccttaagagttaccttttcatatgtgtgtgacacaccttttgctctaaagtgatatatatgctcttacacattgtgagacacatgagtgagtctatataagcgctatactctgttttaa

SEQ ID NO: 71259 - DNA, 463 bp, Glycine max
gtgagctataagctagtttatcgtgaggtgtattatgaagttgtttgttttctttgttggggcagtagttttggtagcatggccatgccatggcgcaggctaccaaaggttccctctccgaatgaaaactggctatggtgagcgttcttcggaggtaaaatgcgcaagttttaggcttgctgtggaagcacacaacatccgagcctttaaaaccattcctgaagagtgcgttgaaccaacaaaggactacattaatggcgaacaatttacatcagactctaaaacagttaaccaacaagctttcttttatgctagtgaacgcgaagtccatcacaacgacatatttatattcggcatagataacaccgtactctctaatatcccatactatgaaaaacatggatatggggtggaggaatttaatgaaaccttatatgatgaatgggttaacatgggcgactca

SEQ ID NO: 71260 - DNA, 307 bp, Glycine max
ctcacgcgttcgcccacgcgtgcgaaagcttttctacatacgtaacttgtcttgtactgcgaacccttactcatcggacgggccgatttcattgttctactcaatgcttatgctagtgcctatgctgatccctaacttcaaactcatttgacagtaaccacgttttctcataacaacgatgaccacttattcgcctttgtagatgcctcctcgtataagcttcccttatcatatttatacaaccagcaaagtacacctatgtgctatcaaacactgcccacagtttatatctctaccttaagctctt

SEQ ID NO: 71261 - DNA, 337 bp, Glycine max
ctcaaacgttggactgttcatacgtgcgtgaatgctgatgatgcacacaacttgtatcggtgaagtttaaatagcagaggggatgcttccattgactgcttacatggattaaccctcggagcacttgctttgactattaaagtgctacacagaagacctttatgaacctgttatgcatggagtgacctactgtagagtatggaaatgctcatgctgcaatcgaattaattaatcattgcactgattgctgcagattttgcaaagcctatccaaggtcaacgttgcatttacagagatacagaagaatatactcagtatgtacttaaagttcgtgatg

SEQ ID NO: 71262 - DNA, 295 bp, Glycine max
cgcaggacctacctcgtgcactccttagtttttgccttcctctactggctctatgactcgtgatacttaattctaccaagggcacttccctgtgatattatatggccttatatcataccaacaataacaatattcctaattatgatttatattagacagactccaatcatccctcttcacacgacactttataagcttccgacctatcaacctatactttctagtatagcgctcactgtcgtgtaattgtcaatccatatatcgtatgtgacggcatcatctagagaaccattac

SEQ ID NO: 71263 - DNA, 413 bp, Glycine max
cccacgcgttcgcccacgcgttcgaaagcttttctacctccgtaacttctctagcactgcgaacccttactctgcgtgctggacaacatctgtgctctacccaatgcttttgctcgtccctgtccctaatccctaactccaaacccatcaccattgccgacgtctacctcaaaacagcgctgacgacctcgttgccgacgtcgctgtcacctctatctggtacacgtgtctttcgttcggaacaagaggaggacaccttaggtgacagcgactgccccaccttattcccctaccttaagctcttttttgccaattttcacttcaatttcgacagtacgctgcttgagaagctcttcaagagtgccgtgaatgtgcatgaggttgatgtcttcaatgactagactactgtgatg

SEQ ID NO: 71264 - DNA, 362 bp, Glycine max
atcacttgtgcgactgtgcgttccgtagtttatcatgatgcttcaccacatatgtacagggcgtgctcaacgatcgcaggtgctgctgccagtggatccgcaggtggtactaggggtggacttttcagaacacccatttctggtggcgagcatagagccacctaagctcacggtttacctagaccgcctttagcagtacggaattttatgtagcacgagagatttggtcatttgtgcactgccatgtgttgtatgcaccacctaccaccatgatctgcatttggtactctggctgatggttgaccatactcatcgagtcatacaatatctggatcatcaccacttgttacttacacaccgaa

SEQ ID NO: 71265 - DNA, 89 bp, Glycine max
ctcagacattcgagtctatgctggtccgttttagctacgcagtgcttagattagtacaagatattcttacatcctgggcgggccgatat

SEQ ID NO: 71266 - DNA, 437 bp, Glycine max
cccacgcgtccgcccacgcgttcgaaaccttgtctacctacgtagcttctctcgcactgcgaacccttactcttcgaactggacaacctctctgaacttcccaatgcttcttctagtccctctacctcacccctaacttcaaacccatttccattttcgccgtttttctcaaaacaaccctgtcttcgtcttcggcgttgtcgctgtcgactcgcttcgttccccatgtctatgtgtttgaacacgaggaggacactctttgcgacagagtactgccccagcttctaccgcgaccttaagctctttgtcaggaatctccccttcagtgtcgacagatcgcggctcgcttagctctttgagagtgctatgaatgtgtacgtcgttgaggttatttattataagactactgtgatgagcacaagcgcttggttttttac

SEQ ID NO: 71267 - DNA, 419 bp, Glycine max
cccacgcgtccggtactctacactcacgcgtcaagcatataaaacattgtggctatatgggggcttctggtatgcagttcatgcaacacaagatacagggacacctaactgcagtactgatctccgacgaggctgctgatggtgatggaaagagtgatagacttgaagcaggagatcctgcttttgctggacaaatagcacgtgataggcaaaggatggtttataaagctatatagtacgaacttgagactgtagcaaatgctgaagatcatatgactacaagacactgctgcagtagcaaacgggtagtagtcaaagatcatgataacatacattgactactcatacatggcggatatctacgagtgtttgtgctctgtataaaataaaggattgatggtgaaatatgaatgaaattc

SEQ ID NO: 71268 - DNA, 449 bp, Glycine max
cccacgcgtccgctacactacactcctgtgttgagcatagaagacattgctgggatgagggggtttctggatggtcattgagacgacgtcggatccgacgacacgtatcatacatactaatttcgtacgtaacaaacgtctttcctagaaagagagagagacggagaccatgagaaccaacttcgacttcatgaatttcaaaggattcggtaactctggttccgataatgagttagtccgagcctgaggcgcttacaaattccgaagttcatgttgggtggcagacattgcatgagtcggaaggtgttggagacaaagaacgtgctttcagttgccgtgttataccacatgcaccataataagccactcattgttagcgtatattaataaaggattgactgtgacatcatttaattattattggttgagtttatattattgctctcgtg

SEQ ID NO: 71269 - DNA, 287 bp, Glycine max
aattttgtacttcttaagagttttcaaacatgttattacctttcctttaaaaaaaaagagagaaaaaaaaaaaaaaaaaagaaaaaaaaaaaaaaaaaaaaaaaaaaaaaaaaaaaaaaaaaaaaaaaaaaaaaaaaaaaaaaaaaaaaaaaaaaaaaaacccaaaaaaaaaaaaagggggggcccttttaaagggcccaagtttaccaacccgggcctgccaacttaaaaccttttttagggggcccctaaattaaattcaagggcccggcttttaaaacccttga

SEQ ID NO: 71270 - DNA, 315 bp, Glycine max
cccacgcgtccgcttaagtacactcctgttttaactatagaatacattgttgacatgagcgtgcttatgattggtgattgggacgacttcagttccgacgacacgtaacatgcattctaattccgtaagtaacaaaggtctaccagtgaaagagagagagactgataccatgagaaccaactacgacttcatgaattacaaaggattcatggactatgggttcaataatgatgaactacgagcctgaggcgcttccaaagtaccaagatcatgtagcgtggcgacattgcaagagtcggaaggtgttggcgacaa

SEQ ID NO: 71271 - DNA, 271 bp, Glycine max
cccacgcgtccgggaggagctggtggtgattgtggtttaggtggtggatatggaggaggggcaggaggtggtggagttggaggacttggaggtggtagtggtctaggtggtggttatggatgatgaagtggtctatgtggtggaataggtggaggcatttacaaatgaataggtattgtaggaagcatttacataggaattggaattggatgaagcatttacaaaggcattgttgttagtgtagattctataattagtgattttattatta

SEQ ID NO: 71272 - DNA, 426 bp, Glycine max
atggtgtacttcttaagagttttcaaacattttattacctttcctttaaaaaaaaaaagaaaaattaaaaaaaaaaaaggaaaaaaaaaaaaaaaaaaaaaaaaaaaaaaaaaaaaaaaaaaaaaaaaaaaaaaaaaaaaaaaaaaaaaaaaaaaaaaacccaaaaaaaaaaaaaagggccccccttcaaaaagacccaatctttcccccccctcctttccaatataaaaccttttttttcgggcccctaaattaaattcaatggcccccttttaaaaaccttcatacctgaaaaacccttccctaccccaatttaatcccttttcaaaaaaacccctttttcccattttgccataatcctaaaatcccccaacctaatcccttttcaaaacattttctcacccaaatattctaattgaacccccc

SEQ ID NO: 71273 - DNA, 405 bp, Glycine max
actacgcgtacggatgtttaagatataactttttccatgtgactatctaataatgaaggggtattcttaaagtacttcgtggatatgttccttgtgttctataaatgagtggatgtgaaaaaacttttttgttagtaaaaaaaaaaaaaaaaaaaaaaaaaaaaaaaaaaaaaaaaaaaaaaaaaaaaaaaaataaaaaaaaaaaaaaaaataaaaaaaaaaaaaaaaaaaaaatatgggcatccgttttaaaggatcaaaggttacttacgcatctatctaactaaaaatttcttatttctgggttccttaaattaaattaactttgccagtttttataactttcaaattggaaaaaccttactcttacctaactaaatacacttgcaataaatctacttttcg

SEQ ID NO: 71274 - DNA, 258 bp, Glycine max
cccacgcgttcatctacactttctctatactaaactgattttttattaacattatagggattactaatagatattcttcatctataaatcgcattgaattttaccatatctctgagatacttttcataaataactatctaataactactttgattttattccgattcatatataagtcatactaagtaacaatctttttacatttttagtaccatttaatatcacaaatgtcatgatccaaaaacatttacttttgct

SEQ ID NO: 71275 - DNA, 326 bp, Glycine max
acccacgcgtccggccacgcgttcgcccacgcgttctcaattataagctgattttttatcaactgaatggggatgactcaaaggtgttgtgagcgatacaaccggtgcatcagaagcatgtcctgcgcgtcttagttcagagactctacctgacaatactatcaagatatcgggattcctacacaacagaggacaagctcactgggtctgtctctaaactaccgcttaatatagggaatgccctgatccaaatacgttcacttttgcttgtggagcctgagccgcaggcaactgtgactcccttcacgctctacgatttatcgcct

SEQ ID NO: 71276 - DNA, 326 bp, Glycine max
accacgcgtacatccatacacgctatagcttttgctcatgcactatctactaactaccgagtactcttaaatatcgtggtggatacatccattgtatcttatacatgacctgcactacaataatccatatcactagctaaaaaatactatcactatattcggattattacattaatacatgtaaatcatcactgggcttatctattaactattgttttatatagtgaatgtccagaatgatatataatcactctaacttgtggacccttagctggacgaaactgtaattccctacatgctctacgatatatctactactatttact

SEQ ID NO: 71277 - DNA, 147 bp, Glycine max
tttacactctcttcaacctaacgcagcatcgctatacgctccattccatggctttgcgcatggagcaaaccgtggattgccctagcttcacactcactatggtcagcgatggtggcacatggaagacaacctttgtgaataggcata

SEQ ID NO: 71278 - DNA, 391 bp, Glycine max
cttgcggggcttgatgctgagctatttcgtctataaaaatgaagcataggtttttgaagtagcttttttttttctctcttttttaaaccctaacctgtgggatgttgggttttgaaaggagaggagccttacataattttggccaggctctgctgcatgtattttgttactcatgcgctggctgccacctctaaaagatgtgtgtgacgaaagtgtcgcactacaaaaaagaagagtcatatgaccatgtgaaatgtatgtattggccctgcgcttaaacaatgagcatttagatcatgccttgtttctgattactgcacatatgcatgatagagctccctttagtcgaatttccttaagaatgtgaatcaatgaacaattgtgtggactg

SEQ ID NO: 71279 - DNA, 293 bp, Glycine max
cgctttctctccctctagtggaggatggtgtgggtgtggatgtaagatgccctcaacgacgttgacaaggaggaggacatcatcgttgagtcgagcagcagtggaaacctcgttgtagaagtcgatgtggtcgggcagtggggaaccttcttgctcttcttgccctttagtggtgccttctcggtccatgaccgtgacattgtaggcggcacgaagggcgggaatgacagctcgtggatggcaatcggcttcaccttcgacgtcttggaatagtcgaactgaaactcgaacgg

SEQ ID NO: 71280 - DNA, 232 bp, Glycine max
accacgcgtacgcccacgcggacgaacgcttctaggcttctcgtgagggcttcagatgagccggccccggcgggacctgccacggacacacccccagctgaagctgtagccaaaccaaaaccaccgccaactggtcccaagagaggtgctaaggagaagattctcaggaaggaatgctactggcacaaatgcactggttcagggggtgcaggtgatcatgaccccaacactc

SEQ ID NO: 71281 - DNA, 366 bp, Glycine max
aggccacgcgtccggccatctaaaatgaataatcagaatggtttggctgctgatctgaaaggcaagaaacaaggggaaaagcggaagcagaacttttattctgaagagagcttacaaaatatagatgaagaaattaaggaggtgagagaaaaagaggcagttggcagctcaaagatagacaaagcttcagagcattcaccctcgaaatcaacaaatcgaccagatgattttgtttacccagacgcagagttcagtgactttgacaaagacaagaaagaagggtcttttgctgttgggcagatttgggctatttatgatactatagatggtatgcctaaattctatgctgtaatcagaaaagttttc

SEQ ID NO: 71282 - DNA, 369 bp, Glycine max
gccacgcgttcgtccactcgttcatccactccttcgtcttctccttcgtgatctcttctatcgcaactattacactattctcattgctccaccattctagctaatgggtactcacagtgaaagaaccccacagatcacattggagattccatcattttcaatcacaagcaacaccacaacatctacataatcaagaaccagaaagcctttgacctcttcaatttcacacaagctacttttttcaccaacctcaacactgcttactacatgttgcattcatcactgcctggtctatactactttaccttcaatgatgggactctcaaaacatgtaaagcttgacagaagctagcatttaatgtcatcact

SEQ ID NO: 71283 - DNA, 418 bp, Glycine max
  unsure (1)..(418): unsure at all n locations
cccantnnttcnnngactcattggcagacgcttgggcaaaccatttacaattcaaaaacagggctcttaatatttgtcttgtgctcaccttatactccattattattctcttaacaacagtactaccctacactgtttcatccacctcaacactgaaaaaacaccaagttccacgcataatgtgcgatgagtgcaagcttccacctacacctactgctgctaaaccaatatagtgtccaccaccacccgtggttgttgaatgtacaccgacggcaaaaccacctatcagaggcggaggtattgactgcttactgcccaacttttcggaaacaccagacggaccccattacctactatcgacaccgggccttacgtcgacaggaacgctagaacttgatgacattacaacagctcaaca

SEQ ID NO: 71284 - DNA, 257 bp, Glycine max
cccacgcgtacagccacgcgttcggcataaagctgacctacagcacgggtgccgacttatctgccctggagaaaggtagcgcagctacttcattgcatcatgagcacacactgcctataatgggtccagagaggctgcaagaaataagatcatatctgacattaaaaactatggaggagatgattcggccatttgctatgcccgcagaagactttcctgcagcaacaccttgaacattctctggctatttctctaaa

SEQ ID NO: 71285 - DNA, 268 bp, Glycine max
taaaaaaaaaaaaaaaaaaaaaaaaaaaaaaaaaaaaaaaaaaaaaaaaaaaaaaaaaaaaaaaagaaaatttaaaaaaaaaataaaaaaaaaaaaaattaattattttatttttctatttttacattcttttttattctatttttttattttatattttttttttttaaattctatttaattctctttatttttctcaacttttttaactttaaaatttctttaaattttttaattttttttcttcttttttttctttatttccttt

SEQ ID NO: 71286 - DNA, 423 bp, Glycine max
  unsure (1)..(423): unsure at all n locations
gaggagctggngggnatggngaaggaggagcacatggnggnggatatggaagnggnggaggagctggtgatggtggtggtgcaagaggagagcatggtggtggttatggtggtggcctccactccctaagttgcctccactcaagccacttgcacctcttcccaaacttcctccaaagcactttttccatcaccccaaatggttcccagtaccaccttcttcctctcatccttaggctttatatattaatattgcagaggtagatgattactcttgttgggtctgcaaaatatgcatgcattttttctgtcttctttattgtgctttccgtatgatcaagtatattgaggaagtctatttgttgctaataaagccttggaaggatagggcatgtgatgagccggggtgagaatataataaaat

SEQ ID NO: 71287 - DNA, 353 bp, Glycine max
aaattgcataaagagatcgggccatacaaatgaacggatggggtcaagcctaaaaaggccatcatcacactggctaaagcttccaacagaaactggctcaatttgcacttcaaagaaaacaagctaaaaccaaatctctatctagagaaagacccaatggcaggaatcatggacatcatgaggaacatgtatgaggatggggaccaagagataagaaaaccattgcaaaagcatggactgacgctagatcttgaaaaacagctgaccctttaagtagctaccgttgaactaccagaaagaggatcagggcttaattactttttctaaggaaaaagatttgctctatttaatta

SEQ ID NO: 71288 - DNA, 181 bp, Glycine max
gtgaatcaaagctcacagcaaatacagcccaccccacaagacgcgtgagcacaatgagaaagacacacatgggtgagaagtgaatgtgtcatctcgcagcatggatacaatcatacagacattcacgccagctgctataaaagaaatggcaaccacaaaaccgaagggtgcccatgaaagc

SEQ ID NO: 71289 - DNA, 380 bp, Glycine max
gagataactagaaacagtgttatgaaaatgaaggtccttgttttcttcgtggctacggttttggtagcatggcaatgccatgcgtacgatatgttccctctccgaatgaacactggctatggtgcccgtactccggaggtgaaatgcgcaagttggaggcttgctgtggaagcacacaacatctttggctttgagaccattcctgaagagtgcgttgaagcaacaaaggaatacatccatggcgaacaatatagatcagactccaaaacagttaaccaacaagcttacttttatgccagagacctcgaagtccatcccaaggacacatttgtgttcagtatagatggcaccgtactctctaatattccatactacaaaaa

SEQ ID NO: 71290 - DNA, 267 bp, Glycine max
ttttctccttatcactatgataaatgacacacaataactttgggtggatatctcatatcacaaaacagattcacttcccaagtcatttgatcaaaaaccagatgaagaaaataagaaaaaaaaaccatcagttgctcataaacccatctaagacaaaaaacccgtacaagagtccaaagatgaagtttctgctccaacaccagctacctcaccgtccgagattgtgctcaaagtgttcatgcattgcgagggttgccctcccaaggt

SEQ ID NO: 71291 - DNA, 289 bp, Glycine max
acggtccgcccttttttttttttttttttttttttttttttttttttttaacctttttttttagaattttttttaatttggtaggacatatttttttttttttttttttttaatttaactatttttttaattaaaaatgttataaacatcctctattattaaatggaagattttaaaaactaatataaaaaaaaaaacaaatctcaatgacaatttattttaatcaaaaaaaagaaaaaaaataaaaacctaatagaaaatgtttttataaacatttatattggtatca

SEQ ID NO: 71292 - DNA, 67 bp, Glycine max
ggttttttttttttttgtggggggaccggcaatttttatgtgtacaatggaagcattttttcatgtt

SEQ ID NO: 71293 - DNA, 317 bp, Glycine max
ccccctaaccttatctttttatcatatactcaaccctgttttagtgaccgattataacacgggtgggagactaataaaagaaaccatattaacaacccatatcatatgataaaaaaccatatgaagaaaataagaaataaaaaccagcagcatctcaaaatccaatcgaagaaaaataaccagacctagattccaatttcttattttttaatacataaataaaaaaaaaaccgccgagattgtgctcaaattgttcattcattttgtgttttactcattaaaatgttttttttcttcctaaatttattcccaatttg

SEQ ID NO: 71294 - DNA, 249 bp, Glycine max
gaatatgcgggattgatctatgaaacgttttgtcaggagtcattatgagcgtattatttatgtatttattttgaccttatttttaagaaagacaatgaggcgagagtacaaagtattagtggaagagtggaatcagtgatctagtgttatgatggaatgtgtgatagacatcctctattagtaaatggaagaatacaatttttattagagttccaatgacaatgctgagtgccactttctcgtgattca

SEQ ID NO: 71295 - DNA, 97 bp, Glycine max
aaataaaaaaataatatattatttatttttttatattataataaattataatattacatactatttaactaatataattacaattcaataaaacttt

SEQ ID NO: 71296 - DNA, 178 bp, Glycine max
gaattattgaacgtacgtacgtaattccagatttgtgatgataattactaagattagtggttcattttcacagttatgggttgctattgttaatttgttttctttctaatgtcgatttgtaccccacaaatttaaataagttcaagtatgtactatatgcatgcttcattttgcgttc

SEQ ID NO: 71297 - DNA, 386 bp, Glycine max
acggcgcgtgtaactgcggacgttagattaaggcgaggtatgcacgcgcagtcttagcacggggctacataatccttaagggggctctacgaccagaccaatttgatgttatttataagcccgactgaccaacactagtggtatatatatgccgcaacctataccaaccgcacacccatataaccaagtttgagctcacgctagagaaccaacctaataccagcctcatgagcaataacgcgtagtgctagatatcgcctaccgttggagtctactgctgatactattgcaagcaattcaacggtggtaaccgtatcatacatattgacgacgaccacaacgattgccacatcgattgcgactatcgtttctgggtcttacacaac

SEQ ID NO: 71298 - DNA, 276 bp, Glycine max
ccaattcccaactggagccacgcatcacggcataacttctgctctatacacaagcatataatgatatactaactagctatcaaaatgtacagggtgaatgttgggctgtgttaattccctagagcttcaattatattgatataactgctgcgattattcactataattaagtaattcaacgtatattacactatttacttcattattacttcaatatacataattattcttttgatatatcatatttatgctgcactatacaaaataaaactctaa

SEQ ID NO: 71299 - DNA, 445 bp, Glycine max
gcgtctactaactgaattgcgaaattcattgatccggaggtcatcggttgagagcgaattccgggcccttgatccatcggcggaacgtgtaaccaatttcacatatccaaccctcatatacagcatctggttatcataccgcaactctaccgtgtaccttctgaaaagtcaaaaacaacccttctatgtatctcacttacaaacgtactctacgtacttcccattatataagaaatattggaaaaaaaaggatttactgctgatacaactgacagaattgaaacttttgttaaagaaaaaggatctcctttcggattatgctctagatgaaaccaccaacatcgtgctgcctcaaatcacaaagcgagcttatcaagcatcgaaagagcctcaaatattattcatagctccggaaaataccacgcattgataagtggttttgact

SEQ ID NO: 71300 - DNA, 433 bp, Glycine max
  unsure (1)..(433): unsure at all n locations
tcgcccacgcgtccgctggtggcagctttgacccattgggataacttggtttnntttatggggttgggtttttataagattgggttgggctttattttttaatggttttgattgttatatattgtttatgttatttgatgtgtttttgtttatttttgttaaaatttttaattattttaaaatttttggtatggggttatttttttttagaaatttgtaatttttctaaactattttaagcttattttccattgtttttggtttgatgagtagatttagtatttgaaggaaactgggtcttttttttttgggttatattaataaacttttttttggttggaatcctgtttgggtgttttttggtttttatattgggcttttttttttgtttttaaattttatattttttattatattttttattttattttat

SEQ ID NO: 71301 - DNA, 358 bp, Glycine max
accaggcgtccaatcgtacccaaccataccctaacagtcacgaactcgtccgtgcatcttgggatgcatcggacaggggaggacttagcttgaataacatatctatactcacatctgttgtgctccaaccataaccaccaatctctacaaaactggcacatgtgaataggaaatataactaactaaatacatcctaccaaacttagacaatactaattcatcacttacactgagtataaccgcaatactacagaagcaaccatctgcagggttggaaatacgatcaagccgaccgctggcaactagtaaacttcttaaaggcactagacgattgggtaagaccacgacagtctatgaa

SEQ ID NO: 71302 - DNA, 289 bp, Glycine max
gcgaccagccatcctctcatcctttacgtattaccgagtgaggtcccaaataatctaatggcctatcagctagaacattcctatatgggcttcattactcagcttttcatcgcatgcatggcatactcaatataatcccagctcagactgtaaacatgaatacgaaggacccaatctacaccgattttgcatatctagacctcaagcttgaataacatgcagttacgttcgtatacttatacactgaacaaactattacttttggtaaaattcataatcacattaaatg

SEQ ID NO: 71303 - DNA, 226 bp, Glycine max
tacacacgttcgaacttacatagagtatccaacagcttactcaatgttctggcactgggcagttccgactctctagcgcaccatcgccactgtggtagctacattcactgttctcaagatcatgacatggctagaggacctgcaactccatcagtggctttaattgcattgctcgcttcctttcgtaaattcactatatgcttctatgacacccattttgcactaa

SEQ ID NO: 71304 - DNA, 54 bp, Glycine max
accagccatgctatgatcatttatggattaactagtgacgttccaaagagtcta

SEQ ID NO: 71305 - DNA, 237 bp, Glycine max
accacgcgttcggccagacaatggaccaaagctaatgtctatgtaacttcttttttgggcgtgggtgagacgatggtcttaggagctggtgttataaagatatagtgtttgttatttttcttatttttatgttactagtactggttattctattccaatataagcaatattatattttgaaagcataaatgattaaactaaatgaatttaaatcacccttaaagaaggttatgatta

SEQ ID NO: 71306 - DNA, 281 bp, Glycine max
accacgcgtccgcacgtagaactaacgagcgttagaatcagcgaagataatattgcatgcaactgggcattatatacataaaagactgaacaccgacgattttaactgccagatctaaaaacagattgcaccattcccacaattgaaagtactctatagatcagccgctactgcgtctctattgacatagatcaaatggctattttctgatgcatcgatattccctaagttctcattctaattattcgacacgaatacgagtgaggaacatctttgatcca

SEQ ID NO: 71307 - DNA, 211 bp, Glycine max
ccacgcgtccacgcattcgaaaacatgttgataaaacgagatgttcaaagctgttagggatggcaaatccggcaccaggccactctacaccgccatgcttgataaccctcaactacgatgaaccttcattcccaaggcttaccccaatctcaccattcaattgctcactaacatcatcacactacttcttcgacaatttcgttctccccat

SEQ ID NO: 71308 - DNA, 344 bp, Glycine max
ctatattctatcatggtgaaactcaaactctcttgcctcacctcatatgtagaataagtgaatagggctttaactccattgcttcattacttcaacctccactcaatttttcaaaaccctagctaaaaaacactaccagttttcgagtaataataattaaaagaggagaatattttttgggttcttttttttctattgctttagggagggaaagttgagagcgatatggaattctacgagcaagaggagcatgaagaggaggaaatggtgatgccggaaccggcggcggtatcggcgccgccgagttacgactcgctcgggaactccggggcgatgtcgaaact

SEQ ID NO: 71309 - DNA, 358 bp, Glycine max
acctactgcgagccacgcatccgtgatcaaatccacagcacttttacatgcatgaatcttggatcaacaccgtgcattgtggtgattcatgggaactctagattgataaatgagattcgataagcagaaatttggacacattaatagaacatatagttacaaaatggaccttgaagataacctttacattcgctcacagactgcaacaactatcgtaccctattttactatacatattaaggataatttatcgaatagaaactgttaatgacataaacactactactcaaaagccacaaaacatcctgaatcatttacagatcaatttgacttgaattaaccataatacccctattgt

SEQ ID NO: 71310 - DNA, 419 bp, Glycine max
cccacgcgtccgcgagtgatatgcaagttaaaagggtatcatcatctatgagtgctgtgaatggaactaaagattttgttgctatgaatagaagtctaagtggtcgatcaaggataaggtcacttaccaaagcggatggttccaaatttgacctagagaaaaaaccttacaatcgacaacagagttccttatctcacgtaaggacattagagagaaatagaaggattcctaatgtcacacaactagaaggtacaggttctgtttattcagttggtacaaaacaaagaaatctccattctggtggaatgggtggcaaaagaagggacttcaatgcttcttccttgaacaattctattgtaaaaaataaacaagatggtcaaggagaaagagttattaatgttaatgacaattagatcaat

SEQ ID NO: 71311 - DNA, 265 bp, Glycine max
gtcagcgtacgacaagccaactgtatctgccatgatgctctcgacagctaacgataggaaacgcgggcttcatgcactgtcccttgttacacacgttaactaaaccgcgcgcgtgtgacactggcatgacaactttcacagtctagaaccccataagaacaacctcaggagaatcctgataaacaccaacatcacattggtaatctgtaactatactctatcagcgccagcaccactattaaacgtgatcatgaaccaaacttta

SEQ ID NO: 71312 - DNA, 389 bp, Glycine max
acgtccacgcgtccgcccacgcgttcggtctctttctctccatttttgcttcagaggacaattgttctctgaatttcgttttgatattttgacatcatttacattgctgccatcattccctgccactactgcgcttccctcaggcccaaatggttcaattccaacaactcacattctaagcctttatcgtacccactattaggactcctaggtttcaatgctcgttgcttttaccaaccactccatcattctgaatctcataacaaccataatctgacgttattttacttgaagcagtgtgctatatctattgcactggcattttgcgttactaacacgagatcctacattggatggtcccaccattgctcattcagctaatcctgtgt

SEQ ID NO: 71313 - DNA, 344 bp, Glycine max
gttttacgataccagggctctatctctctggagagtttgtctttcattggaatgactggtatcgcaacctctatgccttttacgaggatagtatctttgagctttacagctttagtcatgcagttagaccatggaccgcatattgaatgtctggatcatatcctctaattatatgtgtgattagcgccttttttatggctagaacttttaactgtgtttggggaggctgttcacgatttattgatgtatttcctatgcacacgcttgcaaactcattcgtcaagtattatgcactgctcttgccctctatagtcatcatggattcttcttaaccaaagatggaa

SEQ ID NO: 71314 - DNA, 419 bp, Glycine max
gtggctagtggaagtgtggtgatatccaggagagatatccctgggaagcaagggaaagggtttggaatctctatggagcctttaaatttggaggcttatgttaaagacaagttggatgaaatacagtcatctcttttggaaagggcaattgcatttcgagacagtaatattgtagatgtgagcacatatgatgatcttaaagcagcaatatcacaaggcaaatgggcaaggggcccttggtctgcaagtgatgaagatgagttaacagtaaaagaggagactggagcaacaattaagtgttttccttttgaacagccacaaggggttaaaaggtgcttgatgaccggcaatcctgctgaagaagtggctatttttgccaaatcttactaaatctgcaaggtttcttattctttgaagtc

SEQ ID NO: 71315 - DNA, 318 bp, Glycine max
gtcaattgcttcttcatctctctatgtgtgtcaaaccccaattatattcatgggaggggaatctggggacttatgacttatggcttgatacatatatcaagcatgcaatccgaacttaaagaccttgattctaaatcgacgaacggctacggtaacaacgctcgcgatgaccgttctctgatgaagccgttgactcctgcatccgacgacagcatcgtcgatatggagaaaaaattcgccgattaggtcctgaccgacacgttcgcaaacatcctactcaactagtaggctcccaaggagaaacttatggtcggctta

SEQ ID NO: 71316 - DNA, 443 bp, Glycine max
tcggaaaaatataatctttcgttctatccgattatttccatgacggaaaacgtcttgggagacctggactgaagtaggctttcttatgcttgacattcgtattcacttctgcctcaaagtagggtgtacctgttatcttgtcacacatatttcaagtagttttatagttttcgttgtattagatatctttgaatgttatgcttcgtagtctttaatctactatattttccactttttattatggcatcatacttatatgtctttctccgtatatgatactcatgcatcgtcaaaagctagtatctatgcttatagtatcataatatgcctttttaatagtgaatttttttggggtcggaatgatgcagtttccaattcattgcactttaaccctcttgagtgatgaatcagtacaaaatatcctttccttaatttgttttatg

SEQ ID NO: 71317 - DNA, 391 bp, Glycine max
gctagctgttcatttagacaaatgaatgattcttttttagggatcaatcaattgatttaataaaggccatttcaaaatattcaaacatgaatgatttttttttatttaatctctcccctaatgaaatgggcaaaaaagggaggtaaaatgaaagtcacaaatatattctctcttccccttagtatctttctgtcttcttcccatgtatcctctgttgtatggtctttgagactttgtccactagtgtacctcaaattatgtttgtgaccttcatttagtaaacgcttgatttccccctaatgaaatgtgcaaaacagggaggtaaaatgaaaaggaatgtattactgaaatagttggttgtgtatttttttaacgagatgataatattctg

SEQ ID NO: 71318 - DNA, 198 bp, Glycine max
atcatacctatggccactcctactacacgttgttccccatcattgggaatcaggttttatccgagtaaacgttctgatcctgtgttttttagctcttaaatgaactgcctcactatctccttatttaaatttctcataactctaacttcaatgcttatttcttcctcacacaactttttatcaatcttcatccattgt

SEQ ID NO: 71319 - DNA, 427 bp, Glycine max
cccacgcgttcgtccacgcgtacgaccacgcgtccgattcccagcaataaaaggatgcggctttcctcgccccgttccaaaacttttggaactttgcattaatggggttgaagggaatgctcacctaatccagtttctcaattctttaacccaaccaaatgtcccgtgttgatttggagcaagggaatgtgaatcatcgccattcggttgttggaagtgatgtgagtggtgaagggagcgtatgcttctctgatgctgatgatggttcttgctattcccgtttctactcaacaaatggtggttcatatgatgattacagctttgcttgtgtttctgatcctgaagttggaggtgttcctcattctgggagagcttcttcttcggcttctgagtgttctgtggacgcggaaactagaagtggcgttcc

SEQ ID NO: 71320 - DNA, 226 bp, Glycine max
gtgtaaagaacattaactatattgaaagagattgtaatttaccaaaataaaaaaaaaagaaaaaagtaaaaaaaaaaaaaaaaaaaaaaaaaaaaaaaaataaaaaaaaaaaaaaaaaaaaataaaaaaaaaaaaaaaaaaaaaaaaaataaaaaaaaataaaaaaaaataaataatttaaaaataattaaaagataaaaaatggtcattcttttataagaattaa

SEQ ID NO: 71321 - DNA, 239 bp, Glycine max
aaaaaaaaaaaaaaaacaaaaaaaaaaaaaaaaaaaaaaaaaaaaaaaaaaaaatctgggggatccgtacttacaagcgcatacatacaacgccataaaatctaatatacagaatcctaaattctatatcactgaatatcattttacaacatcttcaactcggaaaactctgtccttacccaacttcatttcctcgctcaacatcctcctttttcaagctgccgtaatatctctcactt

SEQ ID NO: 71322 - DNA, 468 bp, Glycine max
  unsure (1)..(468): unsure at all n locations
ccacgcgtccggtttgttgtgagctataagctagtttatcgtgaggagaatatgaagttgtttgttttctttgttgctgcagtagttttggtagcatggccatgccatggcgcaggctaccaaaggttccctctccgaatgaaaactggctatggtgagcgttcttcggaggtaaaatgcgcaagttttaggcttgctgtggaagcacacaacatccgagcctttaaaaccattcctgaagagtgcgttgaaccaacaaaggactacattaatggcgaacaatttagatcagactctaaaacagttaaccaacaagctttcttttatgctagtgaacgcgaagtccatcacaacgacatatttatattcggcatagataacaccgtactctctaatattccatactatgaaaaacatggatatggggtggagggaattnatgaaaccttatatgatgaatgggtaaca

SEQ ID NO: 71323 - DNA, 249 bp, Glycine max
gggaaaaaatgtcacttaataataaaaatttaatatcttcattccctcaaaaaaaaaacggccattttgttaaatgtggacagcaaaaccaaacacaataaatctcttcattccaataaccaacactaccaaattatccttttaccattccaacaacacaatgaaaatcaattctcacctctctatttttttaaattccaactttacttacccattcttccaaccttctaccttttttaactttccccc

SEQ ID NO: 71324 - DNA, 247 bp, Glycine max
catctccatttttcaccttatattttacacttttctactcaaaactttcctggggatattgttacatttcaacaaaaactactccatcaactactacttaactcattctcatactcctatccctacctctcttgacctacaaatccctacccattctcattataatttacatacttcattcttgaccactttacaataaaactaaatacacaatatctttactcatataataaacactataatctct

SEQ ID NO: 71325 - DNA, 271 bp, Glycine max
cacccacacatacagacaaggctattccattgttaagcctctctctcgcttcgggttcttgttaaaccaagtgcgtcctcccaaacccattcaaaactcattcagctaacacccctctgacacacactccattccacccactacttgccaaactatggtaccataagtgctgatcaataaactgactcaaccattccattaccttatactaacaaacacaccacatattaactctgatcttcaagacctactcgacaatctcgcactcctt

SEQ ID NO: 71326 - DNA, 470 bp, Glycine max
cgtcggcccacgcttccggttggtggttgaaactcgttcttcttctttggttgttctgtgttggtgttggtttttggtctcacctgaaaatgtcttgctgcggtggtaactgtggttgcggaagctcctgcaagtgcggcaacggctgcggaggctgcaagatgtacccagacttgagctacactgagtcaaccaccaccgagaccttggtcatgggagtggcacctgttaaggctcaatttgagggtgctgaaatgggtgtgcccgctgagaacgatggctgcaaatgtggaccaaactgctcctgcaacccctgcacttgcaagtgaggtgttgggagagcaagcttcaagcagagatagcccttaattaagaataatgataaactattaatgtgtagctaaaaacttatgtattatgtctgtgatggttttcgtgcactctggtgttttgtgttaaacaaacattct

SEQ ID NO: 71327 - DNA, 349 bp, Glycine max
cgcttttccttaattgccaaaaacaattcgtttcttttcccttccaactattccaatccaacttgcaattttgcttttctccattgacacccaacacaaattacatacatcgaattcctcggttttttcctttcccacatttcggttgttattaattatcatattattattcaatattcatggcgtcagttttgatcgatgtgaaaaatatcctttctttaacgcggccgaagaagttcaagaatctgcatacaggatggaatctacatatcaacatggattcatcaatgaaagatgcgtccagcccatgtaactgtgatgaactcctcctagatcttaaaactactct

SEQ ID NO: 71328 - DNA, 389 bp, Glycine max
  unsure (1)..(389): unsure at all n locations
tggaattaaaattcctgtttctacatttaatcattttnttccttccatggcggttcggttccctctcctattttagaaggcctttctttggaggattcattgtcgcatcttgtcaaatgggcatttaaagagaaagaagaataagaaaagtatcctcatttggtaaatattggcaaagaaattgtgaaaaaatgcagaggcattccatttccactgagaacgttatggagtttgctattttcaaaatttgatgcatatgagtggcaatatgtgagaaacaatgaattttgtaattttccaccgtcaaagatgacattttaccagcacttaaactaaactacaatctcttgcctatttgagacagcgtctttcttttgttgtccctcccc

SEQ ID NO: 71329 - DNA, 420 bp, Glycine max
  unsure (1)..(420): unsure at all n locations
aaatcccgggaccaccttttaacaatttggtggtttccaggagggtccggttccttttcttatttaaaaaggcctttttttgaaggattaattgccgcatcttgccaaatggccttttaaggagaaggaggaggaagaaaggtttcctcatttggtaaatattggcaaaaaaatggtgaaaaaatgcagaggcattccatttccagtgagaacgttagggagtttgctattttcaaaatttgaggcaaatgagtgggaatatgtgagaaacaatgaagtttggaatttccaccgganaagatgacattttaccagcacttaagttaagctacaatctcttgcctatntgagacagtgttttgctttgttgtccctcccctgtccaaaagattacttatttgtttaatgtatcccggtcac

SEQ ID NO: 71330 - DNA, 236 bp, Glycine max
acacccacgcgtcctattatttctttttttattaattattaactctaattttcctctgggactctgttaatattcaatccgaacaacatccataaaaaaattttaatttttcaatgatgttccaacattcactgatatttacaatattatatttcatcctttttacttaaaatgaactttttatcactctaatatcttctcttatcaatactcttatcccttcctttcttataatt

SEQ ID NO: 71331 - DNA, 245 bp, Glycine max
  unsure (1)..(245): unsure at all n locations
ctttaaaaaattactcctantcccaaccactccgctattttcatatttaaacccccctatccctctcaaccttcaatcccaactaatcttctacaactcatcctctatctattctcatacttaaaacaaaacatattcttcaaccatctcacaaactcacattttcattttcttcaatcattttctttttccaccctctatcctctcctatcttcttcattcatttttattcatccctcactttc

SEQ ID NO: 71332 - DNA, 277 bp, Glycine max
  unsure (1)..(277): unsure at all n locations
tcatctncttntaacttcaaaaaattactcctcttctcaacacctcggtgtgttgcaatatctaaaacaccccactttttctctcaaccttcaaatcccaacaaagcttcttcaactcttcctcttcctattctttgacttaaaacaaaacaaattctccaaccatctcacaaactcacattttcaatttgtaaatcaaatactaaaaccaccctccatgctctcctctctgcttcatatcatcttttatcatcccccacttacattcaaaaattat

SEQ ID NO: 71333 - DNA, 380 bp, Glycine max
  unsure (1)..(380): unsure at all n locations
ttcttctttcccccttttctcactcccactcttgaaacttggctcactctctcaccccccaaaagaaacgcgccaacaaacacttcaccaaatccccaacaaactcagttacttcattgcaagctctataagtctataacactgttaattccaccagagaaagaaacaatcacccccacgaagcaagcaaagcaacccattacgattcctgcttaaagcaccgattttgacactgaatcccaagacccagatggcgcaatagccagatccgtgattctcctcaaatgggtcactccaattcttcctcctcctcgncaccttccaagcgcggccacgcccttgggcaatggcggctcctggacttggtctccggcgtgttc

SEQ ID NO: 71334 - DNA, 391 bp, Glycine max
  unsure (1)..(391): unsure at all n locations
ggtcggccgacgcgtacacttattctttctttcaangatttcattataatttcacaaaataacaataacaactgtaacttgttcaactataaaattacgtgtcctacctttataaattacacactacaactattaaatcttaactttcatattctaaaccccacctgctcttaaaaaacttctaaaagcctcatctctttaaaatacttcaaaatacctcaaaccaataatattttcaatcctcactattaatcatattcttacaaatactcattataatctaccccactcttatttctcttttattcaattatttataacaattatatcctatcacttatgacatacattatttatttgtacttgatccttttatatccctgatcttatc

SEQ ID NO: 71335 - DNA, 99 bp, Glycine max
tattttttatattccaatccttttctcctaaagcttcaattttatttttttgtttccacaaaaatattttttatatatttttttttatatatatttttt

SEQ ID NO: 71336 - DNA, 375 bp, Glycine max
ttttaggatgaaaaaggaagaaaacgggttttaactgttgcggtgataaaattactgggccagtgttgattttttggtgataccagtgcttttctcctaaagcttcaatttttatttttttggtttctgaaaaaatgtggggtaggtggtggtggcgtgctggtggcggttttctgaggcaaagggtatcttcaattggtagtgttagccatggttatggggaaaagcttcatcctttggaccctcctttgttgggtttgaggggcgttgttgaagtgatgtgtggtggaagaaggacacctttatctgttgtgttgaaccaaatcaagaggggtgtatcaacttccacttgggaatggtggtgtcagcaatggc

SEQ ID NO: 71337 - DNA, 428 bp, Glycine max
cgtccggaaacagtgtaatgaaaatgaaggtccttgttttcttcgttgctacaattttggtagcatggcaatgcgatgcgtacgatatgttccctctccgaatgaacactggctatggtgcccgtactccggaggtgaaatgcgcaagttggaaggcttgctgtggaagcacacaacatctttggctttgagaccattcctgaagagtgcgttgaagcaacaaaggaatacatccatggcgaacaatatagatcagactccaaaacagttaaccaacaagcttacttttatgccagagacctcgaagtccatcccaaggacacatttgtgttcagtatagatggcaccgtactctctaatattccatactacaaaaaacatggatatggggtggagaaaattaactcgaccttgtatgatgaatgggt

SEQ ID NO: 71338 - DNA, 187 bp, Glycine max
  unsure (1)..(187): unsure at all n locations
gggtcggcccgcgcgtacatttaaggaaaccctctaccanatcttanctgttttcaatccctttaataatatggggaatgagcctattttgcttcctggcatcaacattaacaagttcacattctatcttgctggaactaatgtagaaaccaccactcatggtctatatttccttgatcagatttat

SEQ ID NO: 71339 - DNA, 196 bp, Glycine max
taaatccaaaagaaaatttgattcgggtaggatttctcgtctgcttgataaagaacctatgagtacattctgtatcaactatgcaaggctcactactgcttactcgtgtctctcatatgcaacacgtgacacccatctcaagctagctgtatgcttcaacatgacgctagtcttcaatgctatgttgcgccacaac

SEQ ID NO: 71340 - DNA, 331 bp, Glycine max
ggccggcccacgcgtgcaaaataaagggcttaaccacaaatttttatgattccattacacaacaacatcattggtttttttctatatttatgggggtcctctgcaatgatcaccttgtgaagatttgatctagacttgcttattttttttctgttgctctttgccatggtaatcagagtggtgcacttctattatcatggttctgcctactgtacttggtgctcttttttaatggtgatccagctaaatccttttttatgctcaaccacaatttatctatccatcacaattttatacatatcttttcctacatgtattttctttcttccat

SEQ ID NO: 71341 - DNA, 340 bp, Glycine max
aaaaaaaaaaaaaaaaaaaaaaaaaaaaaaattttaaaaaaaaaaaaaaaaaaaaaaaaaaaccgcaaattttaaacaaaacaaaacaaaaaaaacaaccctccccccttaacatttccatccttactctccctctcttcctacataacaattattttattatccccccacaattccattcattcaccacctttttacaactctccacctgtcaaaacccttccatcccccaatttaataacttttcatcacatccctttttccccaactccccaattctccaaaaccccccacccattcacccttccaaacacatccccaattataaacccaaataaca

SEQ ID NO: 71342 - DNA, 230 bp, Glycine max
aaaacacataaactcactttgcacaaagattgcattgggaggagaaacagcattgtttggggctggttatcgatacaggtgtgaaccttcatcacacccttatctagatgaacaagagtcatgatatcattcgaacatccgatatgcatatactgaaaaacttacacttttattttcttggatatggcgagtattgctatagaatccgcggctggggtctcatatatata

SEQ ID NO: 71343 - DNA, 332 bp, Glycine max
cccacgcgtccgaaaaaaaaaaaaaaaaaattaaaaaaaaaaaaaaaaaaaaaaaaaaaacgcaaaatttaaaaaaaaagaaagaaaaaaaaaaaaaaaaaaaaaaaattaaaaaaaaaaaaaaaaaaaaaaaaaaaaaaaaaaaaaaaaaaaaacggggcccccttttaaaaaatccaaatttaatttccttgtattacaaactaataattttttttaagggtaacctaaaataaatttactccccccgtttttaaaaacagtggcccagaaaaaatcttggtttacacaaattaatttcctttgaaaaaaatccctttttcccaatttgt

SEQ ID NO: 71344 - DNA, 349 bp, Glycine max
aaaacaaaaaaaaaaaaaaaaaaaaaaaaaataaaaaaaaaaaaaaaaaaaaaaaaaaaaccgccgaattcaaaaacacgggaagcaaaaaaaaaaaaaaaaaaaaaaaaaaacaaaaaaaaaaaacatacacccgccccccccccttaatggatcatcccttacaaccccttcccaacaactattttcttctatattgccaccccccaatcttaaaaccccccccgaagtctcacacctataccccttaaaaccccttcccgaaccacacaaaaaaacctgagcacctctacccttatccccaatctcttcaattcccgagagaccccctcacaaaaacctttcccta

SEQ ID NO: 71345 - DNA, 218 bp, Glycine max
gtttgttgatcgagataactagaaacagtgtgatgaaaatgaaggtccttgttttcttccgggctacaattttggtagcatggcaatgccatgcgtacgatatgttccctctccgaatgaacactggctatggtgcccgtactccggaggtgaaatgcgcaagttggaggcttgctttttaagcacacatcaatctttgtcttttagaccattccctt

SEQ ID NO: 71346 - DNA, 333 bp, Glycine max
  unsure (1)..(333): unsure at all n locations
ccacgcgtcctcaaaactcaagcattgcatccttcttgatttgtagtttgttttgttctttcgataaattttctgccacgagcggacnnnttttaanatcatantttgtgtttttcaacaatggctaagttctttgctgctataatctttgcactcttttccatttccatacttcaaacagtggtaatgtcttttaatgaacaaagatgccacttttattacaacaagagcatatattgaagttgaagtttcaatagttaccaattcccatttcaattctttagtgtatttatccagacccaataccacaagccctgcattttttttttgtca

SEQ ID NO: 71347 - DNA, 469 bp, Glycine max
tacgggtggaaaattcggggcgcgccacgcgtccgttgtactatggacagctcttgctccaatgctcctgctccagctcaacaagaaagaaaagcaagtgaatcaatatttgatgcttgccactgggttgattgcggaggtggctcgtgcaacaagacatccttattctcttatagttgcaactgtgatgctggctattacaatcttctcaatgcaactgccttaccttgcttcagagaatgtgctattggttttggttgctctaaccttggaatatcaatgacaaactcatccaccgcttcaccaccaccaccattaaatgagaatgctagcttgattctaaaaggaagctccccgtggctactcgtgctgattatattcatagctaatatgcagttgcagtaggaaatttggcacatgactttgcaatactgaactgtgtgctattttaagtgagaactggattttc

SEQ ID NO: 71348 - DNA, 79 bp, Glycine max
gctacttataattatgtatgtatgtttgtactctgttgtatgcttctgtatgatattcaggattggtactttgatgaag

SEQ ID NO: 71349 - DNA, 462 bp, Glycine max
  unsure (1)..(462): unsure at all n locations
accgcaacaattaacatacatttagtgagagaatttatcatcaaccaaccatgtctgatattcccgtntttgttgccgaagagtatgatataaggacaaatcattatatgaagggtggttctttctcttttttttttttttatttctatttcatttttctttcttattatctttttttgtttttctcatttcttttttttttcttttttactttttttttctttttttatctcttttttctattttcttttttttttttttttatttttttttttttttatcttttatttttttttttttttttttttttatttttttttcttgtttgttggtttctctttattttttttattttcnattctatttttctttattatttttatcctttatctttatttctttcttttttttttgtttttatcttttattatttttttttcttttttcttttattttattttt

SEQ ID NO: 71350 - DNA, 262 bp, Glycine max
  unsure (1)..(262): unsure at all n locations
ccacaaccttntttctcttctccccttttcttctggcctggttttgggtgtgttttgcggaacaattccataatacggacttatcnttactaattgttttcgcctatgcctatacatcttaatcaaaatcacacccaccccgtctttattacaagccattaagcctcttcttcgactgctcatctatcctacactatgctctgcaacccggatcatcaacgtcaaggaagatcttcctgccactgagaatcaaactacttac

SEQ ID NO: 71351 - DNA, 170 bp, Glycine max
  unsure (1)..(170): unsure at all n locations
accggtttaattttttaccctttaaaaaaaaaaattataaaaaaaaaaaaaaaaaaaaaaaaacgagaaaattttaatataaggggcggccgccctatctaaaaaaaccaaccttacntacccgtgcatccgacttcatatcttttctttaggcccacctaaattcaatt

SEQ ID NO: 71352 - DNA, 190 bp, Glycine max
aaaaaaaaaaaaaaaaaaaaaaaaaaaaaaaaataaaaaaaaaaaaaaaaaaaaaaaaaaacacgcccattttaaaaacagcgcccccccaaacaaaaaaattttaaaaaaaaataactaaaaattcaaatctttaccccatactcatccaaaatccacctacaaaaactctttttctaaacaaataaaa

SEQ ID NO: 71353 - DNA, 321 bp, Glycine max
cttccgccaacccttcccccaacccttccgacaaattttacttacctttacttactatgcctaccacgaaactcttgcccaccagttgggcccttcttctcctttctgacttaacattcactcatgcctattgcctaccacccactccatctgcaaagcccacaccaccaactccaataccaacaccacccacaccaaagcccacaccacccactccaaagcctacaccaccaactcctaagcccacaccacccacaccaaattccacaccacctactataaagcctagttggcctcctacttctactacttcaccaccat

SEQ ID NO: 71354 - DNA, 261 bp, Glycine max
  unsure (1)..(261): unsure at all n locations
caaaaaaaaaaaataaaaaaaaaaactaaaaatttaaaaaaaacaaaactaaaatcaaaacaccggaggctcttaacaaccgcggcagactncatactacctatgattaatctactaatttatatactccccaactatccaaactccaacaatcccaacaaaacccttatcatttccctcccctataccaattacaccaacataaccagctcaacatgaaaccaaagataacgtccctctttctctttttggaggttcagg

SEQ ID NO: 71355 - DNA, 121 bp, Glycine max
cccacgcgtccgcccacgcgtccgcccacgcgtccgcccacgcgtccgcccacgcgtccggaaaaccgcaattgaaacgtcattctgcatgctacctatgattaatctactagtttatcat

SEQ ID NO: 71356 - DNA, 473 bp, Glycine max
  unsure (1)..(473): unsure at all n locations
cccacgcgtccgaaaaaaaaaaaaaaaaaataaaaaaaaaaaaaaaaaaaaaaaaaaaaaagaaaaatttataaaaaaaagaaaaaaaaaaaaaaaaaaaaaaaaaaaaaaaaaaaaaaaaaaaataataaaaaaaatataaaaaaaatatttttaaataataaaaaattataaataatatttggctcatttttttaattttcatattttttttccaaaatatttatattaataacttttttatttgtgaacattatataaaatttatttcctcttttttaataaaataatatctttaaaatattttttttttctttcaatatttaaatgggtatttatccattttttttattatttgtatttttacaattaccactttccttcggcttttaaaataactactagtgcaattggtcctacccttttttttttttttnntttttttttttttcttttttttaattatttttttt

SEQ ID NO: 71357 - DNA, 361 bp, Glycine max
gtggtggaacctccgtccttcttctttggtggttctgggtttgggtttgttttttctctcaggggaaaatgtcttgctgcggtggtaactgtggttgcggaagctcctgcaagtgcggcaacggctgcggaggctgcaagatgtacccagacttgagctacactgagtcaaccaccaccgagaccttggtcatgggagtggcacctgttaaggctcaatttgagggtgctgaaatgggtgtgcccgctgagaacgatggctgcaaatgtggaccaaactgctcctgcaacccctgcacttgcaagtgaggtgttgggagagcaagcttcaagcagagatagcccttaattaggaataatga

SEQ ID NO: 71358 - DNA, 249 bp, Glycine max
aaaaaaaaaaaaaaaaaaaaaaaaaaaaaaaatttaaaaaaaaaaaaaaaaaaaaaaaaaaagagaaaaatattaaaaaaaaagaaagaaaaaaaaaaaaaaaaaataaaaaaaaaaaaaaaaaaaaaaaaaaaaaaataaaggggccgcccttttaaaaaattcaaattttacttccccttccttccaaaataaaaacttttttttagttcccctaaatttaatttaactgccccccttttaaaaacc

SEQ ID NO: 71359 - DNA, 293 bp, Glycine max
  unsure (1)..(293): unsure at all n locations
caatataaatggttccttttctggaatgggtaatgtaggttacaattgtacaaattctaaagttcgtgtcttcgcatatcatttcatgaaaagaatatgcatgtttcctaaaaaaaaaaaaaaaaaaaaaaaaaaaaaaaaaaaaaaaaaaaaaaaaaaaaaaaaaggnaaaaaaaacaaaaagaatcaaaggaacaaacccnagcataccaaaacgtagcctctctaataaagtcacctaaattcaattcattggccggcagaaaacaacgttaaaaaaagaaaaaaccgga

SEQ ID NO: 71360 - DNA, 367 bp, Glycine max
acgcccacgcgtccgcccacgcgtccgcccacttttccgcccacgcgtccgaaaaaaaaaaaccgaaaaaaaaaaaaaaaagaaaaaaaaaaaaaaaaaaaaaaaaaaaaaaaaaaaaaaaaaaaaaaaaaaaaaaaaaaaaaaaaaaaaaaacgacgccctatttaaataataaaattataaaaattcaaataacaaaccaaaaattcacaatatttgaacctaaaaaacaaataataaacctaatttaaaaaactttcaactctataaaaactctgcaaataccaaaaaaaacaattatgaccaaattattattggaaaaaaaattaaataaaaataaatcccaaatctaacttcttttttaaaa

SEQ ID NO: 71361 - DNA, 213 bp, Glycine max
gcggaagatttctaacatgttgttcttactttttttctgattccaaatactgtggcaacaagggggtctacaaacctcgattgataattcataatctgattgttcagcgcatagcctgtcacatattcgcccagcatcgagctctcctcatacttatacggatccaagctaaggtccataaccatgtccctatacgaactccagtactacata

SEQ ID NO: 71362 - DNA, 283 bp, Glycine max
ccggggcgaccgacgcgtccgcccactctttcgcccacgcgtccggataactagaaacagagagatgaaaatgaaggtgctgagtttcttcgttgctacaatttcggtagcatggcaatgccatgcgtacgatatgttccctctccgaatgaacactggctatggtgcccgtactccggaggtgaaatgcgcaagtaggaggcttgctgtggaagcacacaacatatctggctatgagaccattcctgaagagtgcgttgcagcaacaaaggaatacatccat

SEQ ID NO: 71363 - DNA, 390 bp, Glycine max
agcagcaaagaattgtatccataagctgctgatgcttatacctctattgtaagaatccgtgcgcatgtttttcaagggggttcactcacaccatttcatttccggacaacataaagatcaggcattttatcgaagacataaccgagtcctttaatttgtattcatagccagatgtgtggtagttgctcacgaacatgtgtaagttaatcaagccagctgacatagaatatatgtatttaggatcaattttaccctcaaaagcctattacgaggcttgttagttggtacacctgtgggtggatttttttttggtactgatgttgtaaactgtgggaggtaatttaatccaataaatttaagtctgagtagaaaatcaattgaattgatatt

SEQ ID NO: 71364 - DNA, 396 bp, Glycine max
  unsure (1)..(396): unsure at all n locations
ggggggggggggggggggggggaangagaggagggggggggggggggaaggggggggggggggggggggggagggggggggagaaagggggggggnaaagggaggggggggggggggnnnaaggggggggggcggggagaggggggggggggggggagaacaacncggggggggggggaggggaggagggggccagggggangggaggggggggggggagggggaaggggaggggaaagggggggggaagacgggaggagggggagcgggggggganncgggggggggggggggggggacaggaaaaaggggggggggagagggggggggggacggggcacgagggagggaagggggggggggggggggagcaagggaggggcagggggggggggg

SEQ ID NO: 71365 - DNA, 305 bp, Glycine max
  unsure (1)..(305): unsure at all n locations
gggggggggggagggggggggaaaggggggggggggagggggggggggggggagtgggagggggggggaggggagagggggggggggggggggggggggggggggggggggggggggggggagggggtattnccgggggggaagggtggtgtgaaggacaatcaatatgagaaagtgggggcggcgcgtggggaaattgcgtctggtgtgggattgacgttcaacaatggactgggggataagggggggggggacgacgggggcacgatggcggaagagggactgggtagggttgaggaactata

SEQ ID NO: 71366 - DNA, 153 bp, Glycine max
gacacgcgtgcgggcactcgtcatgacacgcgtacgttataatcatatgtatagcagcggcaagtgcaagttgtgcggtttcatttactaacagcttaggcgtgagtaaacactggcctatcgggtcttcgagctctcgtctgaacagtctca

SEQ ID NO: 71367 - DNA, 299 bp, Glycine max
cgacccatgcatccacgcgtcagcgggtagatgtgacgacattcacaaactccaatggcactcaagatgtacggggcatgggctgtcaatgcacggagagtctcttataccaccccacattatatgtagcattctctcccttactctagacgactcgtctctaactctctgatggaaattcgcatcaagatccacacgaatgcttcctgcacaaactctgcgtcgacaaggtcgtggaatccgtccagagccgcatggacctcggcctaggcaccggctccactgctgccttcgtcgtc

SEQ ID NO: 71368 - DNA, 368 bp, Glycine max
  unsure (1)..(368): unsure at all n locations
tcgtcccacgtcgtctcgtgcatgtgttctccatgtttctcctatctccatctgaagtcgaacccggtattttgtcctctcccntaatggccttctcaagttctntcttcaggcaccctgtttgcccccaagcctaagtttccctntcttcnttctcgtaaccgtggcgttaactttctagcggttccttccactcccaatttcatggccgttgcacctcccctcattgcttaagcctagntttcgtagtgaggagctgacactcatacctcgatggccggtcggtgaagccactcgaggactgttccttcggataatggctgaaaaagtttcgtgaagggcgaagccagaacaaggtttctggattc

SEQ ID NO: 71369 - DNA, 60 bp, Glycine max
ttttactacaaaaaaaagattaaaaatattcaaaaaaaataaaaaaaaaaagggaaaaag

SEQ ID NO: 71370 - DNA, 319 bp, Glycine max
gagagacatgaaaaaaaatgctttaatttatttaaaaaaaaaaaaaaaaaaaaaaaaagaaaaaaaaaaaaaaaaaaaaaaaaaaaaaaaaaaaaaaaaaaaaaaaaaaaaaaaaaaaaaaaaaaaaaaaaaaaaaaaaaaaaaaaaaaaaaaaaatggccgccctttttaaaaaatccaacttaacttacccttcaatccaacttaaaacctttttatttgggccaccaaaattaaataaactgccccttttttaaaaactattgcccttaaaaacccttgcctttcccaaatttaaatcctttcaaaaaaatcccct

SEQ ID NO: 71371 - DNA, 373 bp, Glycine max
gataactagaaacagtgtgatgaaaatgaaggtccttgttttcttcgttgctacaattttggtagcatggcaatgccatgcgtacgatatgttccctctccgaatgaacactggctatggtgcccgtactccggaggtgaaatgcgcaagttggaggcttgctgtggaagcacacaacatctttggctttgagaccattcctgaagagtgcgttgaagcaacaaaggaatacatccatggcgaacaatatagatcagactccaaaacagttaaccaacaagcttacttttatgccagagacctcgaagtccatcccaaggacacatttgtgttcagtatagatggcaccgtactctctaatattccatactac

SEQ ID NO: 71372 - DNA, 377 bp, Glycine max
acgagctgctaccctatatgcaccacgaagcgaattaatagattggagaggagaatgaggtaagcaaccgtgatctttttttgtctgtcacctttggtctatattaaacttttaaagcaccacttttattgacatggactattcgggtgggctgaacatgtttgcttcgcattagctctttggagtaatttgctcatgcttgtgcatggttacaccatacatgatttgtaggtggcagggttttgtttcctattgtttttaattttaatatagatgggatatgttattaaggttgcattgtttcttgtatttcatgcaatgttgttaatggctgatggtggtacatggcggaaagccaaaaatccgccataaaaata

SEQ ID NO: 71373 - DNA, 180 bp, Glycine max
gagaaatacagtgaacaagatatggtagctctcaaaatttcgttgcatgaatgtttattgtatttgccaaagaaaaaaggaaaaaaaaaaaaaaaaaaaaaaacaaaaaagaaaaaaaaaaaaaaaaaaaagaaaatacaaaaaaaataaaatgtaaaaagtgaaagataagctattaag

SEQ ID NO: 71374 - DNA, 398 bp, Glycine max
  unsure (1)..(398): unsure at all n locations
tcttcctctccacatcgtccgtttttttttttttttttttttttttttttttattaagggtnttttgaaaatttaaaaaaatttaattttttttttaatnaaaaaaaaaaaatatttttaaaataataaaaaaattttttaaaaaaatttaaatttttaattattaaaaaaaaattttataattatattaatattatatataatttttttatattttttttattaaaatattataaaaataaattttttttatatttttgatattttttaataattttaaaaaaaattaaaattttaaatattttgttattttattttttttatatatattattaattatttttttttattaatttttttttttttttttttttatttttttttataattattttttt

SEQ ID NO: 71375 - DNA, 422 bp, Glycine max
cctatcttttgtgggccacacacagtaatgatttagatgcttgatttctgctctttagtcaatctgcttcaaagttcttatttgaagtatggatttcttttgtttgttttatttcttggtgtgtagtttatgatcaagctggtcaatactatccttttggctataaggatctcttattcgttactatgctctggcattattctcttaatgcagtttccttgacgaaatataagtttctgaccgttcaatgcaaactcctgagcaagagttcaaagtagttgaatgctgtgaaagtatggttggccttcaattttccaagttcctaagaggagccaaaattttcaagttcagcaactcgtggcaggttaagttcttccattgagttcatggaaagttcaacatatggctaatttccttttatg

SEQ ID NO: 71376 - DNA, 164 bp, Glycine max
acgctctatgagatgtcatcattctgcattttaggtttctgttttcagactccgatggaagttaatggatcagaactaaaaaaaaaaaaaaacaaaaacacaaacaaaaaataaaaaaaaaccaaacacaagacaaaaaaacattactccaactccaaaaagac

SEQ ID NO: 71377 - DNA, 346 bp, Glycine max
gcacaacatgctggctctctttaagtgaataccttataaaaaccctgatacaattaagagttttcttgtttctcgttttaacatgtccatagtgtcatacaaaggcaaaagatcaaattgagttacaatgtgttaaaaaaaaaaaaaaaaaacaaaaaaaaacaaataaaaaaatccaaaataataatcatagaacaaaaaataagattgcaaaaaataatataaaataaaaaaaataaataaaagggggcgtcccttttaaaggatccaagtcttattaccctggtttccaaactctaatctcttttatggggtacctaaatttaatataatggcccgcttattt

SEQ ID NO: 71378 - DNA, 69 bp, Glycine max
  unsure (1)..(69): unsure at all n locations
tcccttttcgacccactcatcctcccactcgtccgatcagacttttttttttttctttnaaaaaaataa

SEQ ID NO: 71379 - DNA, 418 bp, Glycine max
cgcactcgtccgcccactcgtccgctttctcgtccgatcgagataactagaaacagggtgatgaaaatgaaggtccgggttttcttcgttgctacaattttggtagcatggcaatgccatgcgtacgatatgttccctctccgaatgaacactggctatggtgcccgtactccggaggtgaaatgcgcaagttggaggcttgctgtggaagcacacaacatctttggctttgagaccattcctgaagagtgcgttgaagcaacaaaggaatacatccatggcgaacaatatagatcagactccaaaacagttaaccaacaagcttacttttatgccagagacctcgaagtccattccaaggacacatttgtgttcagtatagattgcaccgtactctctaatattccatactacaaaa

SEQ ID NO: 71380 - DNA, 429 bp, Glycine max
ctagaaacagtgtgatgaaaatgaaggtccttgttttcttcgttgctacaattttgggagcatggcaatgccatgcgtacgatatgttccctctccgaatgaacactggctatggtgcccgtactccggaggtgaaatgcgcaagttggaggcttgctgtggaagcacacaacatctttggctttgagaccattcctgaagagtgcgttgaagcaacaaaggaatacatccatggcgaacaatatagatcagactccaaaacagttaaccaacaagcttacttttatgccagagacctcgaagtccatcccaaggacacatttgtgttcagtatagatggcaccgtactctctaatattccatactacaaaaaacatggatatggggtggagaaatttaactcgaccttgtatgatgaatgggttaaca

SEQ ID NO: 71381 - DNA, 383 bp, Glycine max
gggagttggagattgttcaactgcgggaatgtctccagatgagagggagaaattcatagcaatgttgaagcagaaagctggagaagagtaatatgatgatgatgatgatgccactagagcatagagaaaaaaataataaaaaaaaaaggtttcttataacttatgaataggtgcaactttatttggcattctaaatgccaaataaagttgcacctattcataagttataagaaaccttttatttttattatttatttctctatgctctagtggcatcatcatcatcatcatattactcttctccagctttctgcttcaacattgctatgaatttctccctctcatctggagacattctcgcagttgaacaatctccaactccc

SEQ ID NO: 71382 - DNA, 375 bp, Glycine max
gagaatcataccatatccattcagcctaacgcataggatctaaaagatctgagactttgggaatctaatagcgcgggaaacatcattttcttgtcttaatcattctatctacacactatcaacaccaatcttactattctatcagattattataacattatgaatattttccactatatttagactcataaatgttaattcaaatttaacatatttactttttttccgtttacataactcattattattttctgcaatatcttctattctcttcttgatcttaattattattgcttagattttactttagtcttataattactctttaattttttctttcttatttttatattattttttttttattattatttt

SEQ ID NO: 71383 - DNA, 336 bp, Glycine max
ctacaaactataacacaaagtcccttcattcatcgattccacataatcaaagcttctagtaccatcaacactggcaccactaaagcactcacaactatccttcactccaccactcctcactcttctcattcagatctacccaacacacacacactaattaattacataaaaatgcaactacaactcactctctccactctctacctatcccttctgttaacaataacgttaacatctccaacctttgcagcacaaatcaagcctaaagatctggtccaatcctcaagcgttcacgcacggtacccgcgtctagtcctgcgcaccctctttaactac

SEQ ID NO: 71384 - DNA, 378 bp, Glycine max
gatatttcgtggttaaaaaaaaaaaaataaaaaaaaaaaaaaaaaaaaaaaaaaaaaaagaaaaaggaaaaaaaaaaaaagaaaaaaaaaaaaaaaaaaaaaaaaaaaaaaaaaaaaaaaaaaaaaaaaaaaaaaaaaaaaaaaaaaaagggcgcccctttaaaaaaacccaatttaactaacccttctatccaacttaaaacctttttaatagggcccccaaaattaaattaattgcccttcttttaaaaaaattataactggaaaaaccctggcttacccaaactaaatccccttaaaaaaaaatccctttttcccaaattgcctaaataccaaaaagcccctaaccaatctcctttcaaaaaaatttcccaacct

SEQ ID NO: 71385 - DNA, 453 bp, Glycine max
  unsure (1)..(453): unsure at all n locations
cacaaagaatgtttaccaagtatgggagttacccatattattgaagcattgtaaaacagttcnttgccagtacatgtccggggactacctgctggtgactaattgttttacaatgcttcaataatatgggtatatttcattccagggataccgtctactaacgttcgcatttatcgtcccgtgtatttctttcttgttcttgctgtccttcctgtcttttcattatcgattcgtattattatttttttttattacttttttttattttttcattttctttttcttattattactttctatttattattttttttccttattcttaatttttttattttccttttctttttgtttaattatattatttttttttcttttttttatctttatttatttttttttttatgtattatatattctaatttttattttatttttgtttttatatttttt

SEQ ID NO: 71386 - DNA, 405 bp, Glycine max
cccacgcgtccggaaagatgaaagtatgtaaggaaagatgaaaacattgcatcactgacaaattagtgatttcattgattcttttgcaacctcaattgtttccttatttgatttggtttgattattatagaaagcatgtgtgtgggtacaacacaacaatcagtaaatcctttctacaatttgtttgctgcgcttttgggaagatacctattctatatttctctttaattaatttttcttactagaaaagttgttttgtagtttagataattgctagagtaatagaataataaaaaatatcttgtccttgtctattttaatgccttttataatgaactgagtaaatacaatccaagtgaaaaacctcaacataatgaaacaaaaggttgattaaatatcttcacg

SEQ ID NO: 71387 - DNA, 156 bp, Glycine max
tccactcttccgaaactacttaaaaattttcaaagacatgactaccactaagtcattcgtataatctataccggtaacttatactatccataaaataatactcaatcctatctcttattcattatatctaaagccactgtctctactcacttattc

SEQ ID NO: 71388 - DNA, 252 bp, Glycine max
aatccacacaaactaagggttgggcttttagagagagagagagagagagagagacagggagagagcatgggagggctggctatcccggtccatgatgtctctcttgtcaaccctaatctcctactctagcgccaacaagaagcgaaacaacttctcacgcgctgtctcaatcttggaatctctgctctaaattctaatcttccctccatagatgtcatctaactccttgtgagggatttggaaacgcatccg

SEQ ID NO: 71389 - DNA, 323 bp, Glycine max
gtgtagttcatcttctgctaaccctttttcataatttcaaagttcttcttccttaaagaggaggtttacctgtcaactgccctacaatgtcatttcctcacaactttcacattacattgccacacacttctccaacttacactgctaaatacttcatttcaacatatagactcctcaattcaatgcgaatgttttttgatatgaactgttacactaacccttacttctaccctcccctttacacaatctttattatgacattcttcttctcacctaacttttcattgtctaacaacaatttgtgctatttcaacctttctttt

SEQ ID NO: 71390 - DNA, 102 bp, Glycine max
ggaagctcttgatccttggcaactatttcttcctttatcttttgtataaatctatatggtcttcatttcttaccaatgtgcacagttgattgctttactgac

SEQ ID NO: 71391 - DNA, 118 bp, Glycine max
  unsure (1)..(118): unsure at all n locations
tccactccaaggaacatagcttcgatcaatctatcagatatntgacagtattcctctcacaatctgagtcnntgcaatgaagaaagattgtaagacatacaacactttttggttttca

SEQ ID NO: 71392 - DNA, 391 bp, Glycine max
gtagaaaccctagaaaggggattccttattaatgtgttttcagaaaggaagtgccccggcatgcttgcgggaatactcgactcctttgaagaactgtgacttgatgtgcttgatgctagggtttcttgcgaatacaccttccagcttgaagctgtcacatgagaagtaagataatacactaggatctacatcatcatctaattacttactaccttaatatatcactcttatatagtgatcctttgtaatacttcttaagcgtctaaaatcaggacacaattcttggcttatataccaatgacttgtgaaactcttaatatctatatattactaaggattgcttcatttatatatttgatagttaacatccagttaagtttccctgttaaat

SEQ ID NO: 71393 - DNA, 163 bp, Glycine max
atcgcatatcacaattccttcttcaatatctacccggtcccagaacacagggcccgagacaccctcctaatgagcttcgaccgctgcatatcaccaatcatcacccatgactaagaccaaccacaactgccacacaggcttctgccatcctccaaatcccata

SEQ ID NO: 71394 - DNA, 147 bp, Glycine max
ggggggggagggaaaaaaaaaaaaaaaaaaaaaaaaaaaaaaaaaaaaaaagaaaggaaaaaaaaaaaaaaaaaaaaaaaaaaaaagaaaaaaaaaaaaaaagggggggggggttaaaaagaaacaaagtaaaagaaggggggaagg

SEQ ID NO: 71395 - DNA, 136 bp, Glycine max
  unsure (1)..(136): unsure at all n locations
gtggagagtgctggtgaatgtgggaaatctaccaccccagataatgaggcttataagcttgcaccatgtgcctcagcagcacaagatgagaatgctagtgtttctcanagttgctgtgctcangtgaagaaaattg

SEQ ID NO: 71396 - DNA, 131 bp, Glycine max
atgtggacatggaagttgaagatatgaattcctcaggcaatactactgtcatcgatgtatctgttgcaaaggattccatgcacatagatcaactggttcagttgaatccacctgttgactaccattctgtg

SEQ ID NO: 71397 - DNA, 130 bp, Glycine max
cttgtttgcaaggcacagaagcaagaggatattgatgtcagcccaatctctcgccggttagctctaaccgtgctcattggtgctgctgctgttggctccaaaagccaacctgctgatccagcttatgggg

SEQ ID NO: 71398 - DNA, 205 bp, Glycine max
gtacccattttatgataaactttccttccatttttgttcctctagtaggcctagtatttccggcaattgcaatggcttctttatttctttatgttcaaaaaaacaagattttttagatacagaaaacaaagtaaaattctggggttttttattccccaattataatactaaattaaaaaaaagaagagtaatgagtataatcttt

SEQ ID NO: 71399 - DNA, 177 bp, Glycine max
  unsure (1)..(177): unsure at all n locations
caaataaataaaaaatgtgggttaagttttggaattcattcattcatagtatttaatacacgttanncngggcggaaaaataatagtaaacgaaatggaaacgaaaaacaaacagaaggaaggcagcaacgcaacggaagggagggaaatgtcatacggcgagtgagatatcaccca

SEQ ID NO: 71400 - DNA, 239 bp, Glycine max
aaaaaaaaaaaaaaaaaaaaaaaaaaaaaatttaaaaacaacaaaaaaaaaaaaaaacaaagaggcatacacaaacatacaccatacccaactctaaaatacaatcaccttactccacttcacttccctcacattcacaacttcctacctaatctatccatcacattacccatctaaaccttcaaataacacatctctcttcctccatcctacatcatatcaaatactcccttatcaaa

SEQ ID NO: 71401 - DNA, 443 bp, Glycine max
cccacgcgtccgcccacgcgtccgcaaaattgaatctctcttccgcacaaacaacctctcacgccccaaagccacacacaaaacatttaccttttccaacccttcaattccctaaacatttttcttttccttcgaactccaattccctcaccacaacctacaaattatgatctgcctaagacaaaagttattaaaccaagcagtaaaagtgttggtgttgaggctcctgcagtgcagatcaaaaggccagctgacccagctcctaaaaagtcatggaaggctggtccttcagttgatgaatttttgcggtcctggggtctcgaaaggtatctaatactttttcagcttgaaaaagtggatatgccagttttaattattttactggttgaaaacctaaaggttttggcattccaatgggaaccagaaaggagaatcctttaaca

SEQ ID NO: 71402 - DNA, 188 bp, Glycine max
tagaagaattataaaataaataatactaaaaaaacaaataaaaaaaaaaacataattacttaggagacaacaaaacatgtgtcaatgataacagtaaccctttcaaagaaagaacttgatacatcatctgtagggtatcagcctccattaccagctgaccaggtgaaggctgccacaaattttgatta

SEQ ID NO: 71403 - DNA, 390 bp, Glycine max
ctgagtcgtctaacaagcaatgtctctgacatcgtgtatgagaccaggaggatccatgagtggatcgatggactcaacaaagcactgagcttagagtcgggctttgagcgacatggtgagcattctgagcgaggttgaacaggccaaagagcatgtctacatgcataaatgcgagaggaagaggttgaagaagcagatgcagctgcatgagaaggtcaatgatatgaccgacaatgatacttacgctgatgctcataataaacctgatggtactcatgaggactgtgattatgactgacacaatctgtcacagtcactgtgaaggacactagcatggagattagcacacattgtccctgactgaactcctgactgaacatagatcgtggt

SEQ ID NO: 71404 - DNA, 183 bp, Glycine max
cttagtcgtaagtatttataggagtgcttattcaaatggttgtaaagtagttaggactatagaaaactcaagtttaatataagaattcatattttgatccaaaaaaagatccaaaaaaaaaaaaaaaaaaaaaaaaaaaaaaaaaaaaaaaaaaaaaaaaaaaaaaaaaaaaaacagcaaact

SEQ ID NO: 71405 - DNA, 230 bp, Glycine max
cccacgcgtccgtggttatagaggacctgattcacctgagcaccttatatccagtgtctcgacacttgcgcatagggtgcttaacgggttgttacggaatgacgagtctacaccggaaagttcgatgatacaggaggtcatgttgcaagatgttactgctcatgttacagacactaatgatcatgatgcttgatctcactggtacactagctcctacgtcgcgccaaact

SEQ ID NO: 71406 - DNA, 209 bp, Glycine max
tgccttttagctttcttctagagagagaaaagcgggtgtcgacaaggaaacaactttttggccatgtctactttttcacactaaaaattcaatcttgtcagtgtttagctcaatctggtttaaaaggtaaaaaagttaagcgtattaaggggaatcaaaaaactgaaaaaaagtttccttcgcaaaaagtgagaatgacaatttccggt

SEQ ID NO: 71407 - DNA, 118 bp, Glycine max
cccacgcgtcctcccactcgtccggtttaaaaaaaaaaaaaaaaaaaaaaaaacaaaaaaaaggaaaaataaaaaaaaaaaaaaactacataaaaacacaaaaacaaccatcattaaa

SEQ ID NO: 71408 - DNA, 162 bp, Glycine max
gccacgcgtgcgctcttatctactctatctttatgagaatattgctatgcttgtggctaggggcactgctgcaagtgcgactgcatgaacctcacatgcaacccaccatcattgaacattcaacccaaacgcaaactgcttacactttatctctttttaatt

SEQ ID NO: 71409 - DNA, 323 bp, Glycine max
  unsure (1)..(323): unsure at all n locations
cgtngaagaagcagcgatcgtttctacttcctacaccaccactactgccgagggacagggtctgttttaagagaacaaagcccaccttcttttgataaatcacaacatcgtgagccctccaagataaggagcatagtgcattacctgaccaaagcaacccacggaagagaggtgacacatctcctgtcattgataggttggccactcatcaatataggtctgactacactgatggtactagacggaaaagtaaaagccctgctatccctgcaagggaaccgaatcagggtggctatgatagccctaaacctaatggacatagc

SEQ ID NO: 71410 - DNA, 330 bp, Glycine max
ggcgaagaaaccactttcacctattcctccactccctaagtttacaccacttaatgcactccaaacttgtggcggagtttctgcacaggactttgtacattaccccaaatggtgcccacaaccaccttcttcctgtatgcttaggctgtatatattaatattgtataggtggatgactactcttgatgagactgcaaaacatgcacgcatattttctgccttctttattgtactgttcgtgtgaccaagtctatggagcaaccactatttgtttctaataaaaccttgaaaggatagcccatgacatgatcctgggtggagactttgaat

SEQ ID NO: 71411 - DNA, 414 bp, Glycine max
  unsure (1)..(414): unsure at all n locations
atgaggttcatgacgatgggttatggattatgtttcataaactctcatatgcatcangattaacgtctttcatctgcatgaagcaccccttgccctcaaaagacatatatgtactttcacgtattgagagaatgagtgagactaaatatatgcttcatgctgaattcaatgattgcacgtcgtaataaaataatcgaagcttatttttttgcggtgttatataaagagccctcccgatgatcaagtatattgaggaagtctatttgttgctattaaagccttgaaaggatagggcatgtgatgagcctgggttgagagtgtcaataaaatttaaactaaaatagagcgatctgctccccatttttaaaagacccatgatttatcaccgtgaatccccactgttattcttttttt

SEQ ID NO: 71412 - DNA, 317 bp, Glycine max
acccacgcgtccgctcgttcttcttcggcgttatcttcttcttttgttgtttgtgtgttggcgttttctctcacctgaaaatgtcttgctgcggtggtaactgtggttgcggaagcgcctgcaatgcggcaacggctgcggaggctgcaagatgtacccagacttgagctacaccgagtcaaccaccaccgagaccttggtcatgggagtggcaccagttaaggctcaattcgagagtgctgaaatgggtgttcccgctgagaacgatggctgcaaatgtggagctaactgcacctgcaacccctgcacttgcaagt

SEQ ID NO: 71413 - DNA, 258 bp, Glycine max
caccaaacaaagttcacagctttttttgttctttcacctcgattcacgaactgggtcatcctcgggaggtggattattggatttcattttgagctacaccacacccccaagactttgattttaaaccaaaaccagttggcaagtacctggaatttattaatgatttccccccaatttgttgtgtaacccttaagaacctaatggttggtgaaggtgaaaaacaccaatcttatgtttttttaagaaaattttattctt

SEQ ID NO: 71414 - DNA, 433 bp, Glycine max
ataactcattattattcactaacatgttgcatgtacgtaccatttttttatgctatatgctctggctatgaattttgctttaaattaaatttttactatatggtttcaggttatggcaacagattcgcctatcacttggatggaaggagttatggacctgagagtctaaagacctcacgtgagtaatcatactccatttttttgcacacttagttgtattatttgtttaccatgcttcatgaatctagagttgcttcagatttaccaaatgatctaatattttcagttcatttgctttctattatgtgaattaattaagtgtgatctaatgattaacaattctgaatttggtttgatatatcagagtgcccttctgaatgcacaagaagatgtagccagacacagtaccacaagccgtgcatgtttttctgcc

SEQ ID NO: 71415 - DNA, 169 bp, Glycine max
  unsure (1)..(169): unsure at all n locations
cccacgcgtccgcccacgcgtccgattccgtgtggtttggctgaataaattaaagaactgggctgttattccagtttgcatgcagttgcagtaatcttgtaatgttgtactgagacaaaagctggccttttgtccaatcaataaattataagaacttgcttnanaagaa

SEQ ID NO: 71416 - DNA, 311 bp, Glycine max
gaaaaaccgggcgagcgcacgcgttcgctctctcaatttttttcttaaaatgagttattttttggtgctcagtcaccaaactggcgcgcgcggttttttggttgtggcgtgattccaacaaattcacttttgatccacacacactttgtcttctggctttgttttctttttcccaattcctatcccaaaccttttttttgcttcttagattcaattcccccttttcgtttttacttctttaaaactttcctccccttaacctttcccatccatttcatttcactcaccccaaaaaaacaccctcacttttt

SEQ ID NO: 71417 - DNA, 400 bp, Glycine max
  unsure (1)..(400): unsure at all n locations
gggcgagccgcgcgtccganttcattcatttttatttcttttcttttctttttatttattattattatttttttgcgcgccgccatggtctttcttgctcttctctgcttcctttccctgacaatctcattttcacttcctttcatctctgagacccaaaagctgcttcttctgcttctcatttccccaaaaccattcactctcttgattcatcaaaaagctgttttatttcccttttctcctggcttctgattcagattcagttcacctcttttttttcttcattttttttcgcttttgttaattttcttggtgtcattgtgtttgcaaagagaattttatgtgtaccattgatttaaacgtttcacctttgaaattgaattcttgtggcgtgtgtgta

SEQ ID NO: 71418 - DNA, 337 bp, Glycine max
  unsure (1)..(337): unsure at all n locations
gggcaaggcanancacatatcaacgcactttaactgttctctccagagtccacaattcattttgcgagacattttttgtgtctgaagaatccctcaaggtcatgcttctttgtggttctgatctccttcttcttttagcattcctggattctggattcctgaccaggttaaaactatatgcaaagattattgagtattctgcattcccagggaaggacatgatgttgagaaaactatatttaaagattacattcttaatgagaataacgataatatcaaaattgttaatgaactttttccaaatcaatatcatcttaaccagagttaaggattgcat

SEQ ID NO: 71419 - DNA, 328 bp, Glycine max
  unsure (1)..(328): unsure at all n locations
ccacgcgtncgcccacgcgtncggccacgcgtccgttgttatgtcaagactattgaatctcctgctatattacgccgtttatgtgcctgaaaattgttctgctattgagatggaacctacaaagaattgattcctcccaaaaaaaaaaaaaaaaaaaataaaaaaataataaggccgtctcatctaaaaaaaacaaaaattacatacccgtgtatgccacgcaatactttttctaatattgcacccaaatcaaattcacttgccctttttttacaacaaacttacttaaaaaaaaatttaaaaattccccacctttatttaaatattc

SEQ ID NO: 71420 - DNA, 435 bp, Glycine max
  unsure (1)..(435): unsure at all n locations
tcttacanacctttntcntntaaacacttttttacactacgcccttctcccatatcacccgacctttttttaaaagcctacatccgcctcttcatacctacacccaccaaccataactctttctcttcactcaaaaaaacttcctccatacctttaattaccaaaacccttccattctacccttttcacttcttcaatccaccccactctataacttctaattaacaccctatcatactccactcttaattactcacttttatcctcattcaccaacactaaatcctttattttctctcctatcatttcaaaacattttctttttcataacttcaaccctcaaacccttaatcctacatccccacccatctattattctaaaaaaccctttaaattctaatccacaacacattctcatcacctctctcatccatt

SEQ ID NO: 71421 - DNA, 141 bp, Glycine max
cggggcgagcgcacgcgtacgggccaagccagtttagcacaaccaaagcttcactttcaaatggcttcagcttctgttcccatggcgttgttactgagctctgttaccaacaacaacaaaccttcatccttaacctttttt

SEQ ID NO: 71422 - DNA, 230 bp, Glycine max
cgggcgagactatctttatataataatataaataagattttaaaaataaaaaaaaaaaaaagaatctatggaaatataaaaataggatatatggaggtacaaatagtaaatcgaggtacccattttatgataaacttccttccattttttgttcctttagtacgcctaatattttccgcatttgctatgggcttctctttttctttatgttcaaaaaaaaccaaattttt

SEQ ID NO: 71423 - DNA, 186 bp, Glycine max
  unsure (1)..(186): unsure at all n locations
tatcttaatactnnnnacctacngagtttattttctccctacatgcagatcaantccccgcgcgatttttaccatcaaacatacctcccaaaaatatcctttaccaatcttcattcataatgataatacaaaactatcaccttttatccaacatttaaacaaaataaaactttttacttaacatac

SEQ ID NO: 71424 - DNA, 229 bp, Glycine max
  unsure (1)..(229): unsure at all n locations
tttttttttttttattttttttttntnaacactaaatttaaaaatacccgccttttttttaacagcgggggcgctttttttttttttttttttttttttataattttttttttttttaaaaaaaaaaatctctcctataaataaataaaaaaaacatttaatagctttttattttaatataaataacacctattaattttataaaaaaatattttcaaaattttataat

SEQ ID NO: 71425 - DNA, 392 bp, Glycine max
  unsure (1)..(392): unsure at all n locations
ccggggcggcgccacgcgtncgacttcttaaatttcattaccaaaccctattgttttctacctgtttgctcaaaataaaaacggcgggcactctctaaagctcactatggctcttanacatttacctattgcttcatcacaactcatatcctcttcttttcccatggcaacattctaaacttttacataaagaccactattcctatggcaagcttttaaatgaaaagccagcaaaaacaacaccttcaaagatatcattaaaaataaaaatttaaaaggctctttccaaaatctatacctataaataaacctatcacaaaattaattaaacctattcctataccccactataaccctataccaaaaccaaattccttggtaaagcctatttc

SEQ ID NO: 71426 - DNA, 339 bp, Glycine max
tgacacaattttttcacctttttctctattagtaggattcaaaggttgcagaaaatggtcaagattgcatcgtgtactttgatattatgagaaattccagataaatgtcacaatataattataattaaccaaaaaaaccttggttttacaactaaaatcatggtctttgactgttttgttttttaaaactttggtcgaattatatccaaagagtaaaaaaaaacatagaatttccaaacttcatgttaaaattaaaaatcttgatgttacatcaaaaagtatggttatggactgttcttttaaaaccttggtcgaattatatttgaagagtaacaacat

SEQ ID NO: 71427 - DNA, 421 bp, Glycine max
  unsure (1)..(421): unsure at all n locations
gcgtccgcccacgcgtccgggagacatgactttgacaactttgtttttttggtcgtttnncctctttttgcgctngggagcgtcgcgcgggtggcgccggaataaatgcaccaccagcaagatttttcattcctcttccacgtcatgccctctttcttgcatgatcatcactaccactctttcttattgcgagttgccaatgatgctgatagaagtgaagtgtcatctgatactgcaatcaagacatcgtattcagaagccgataagatggttgatggtatggactttggtgagctttgcaatgagtttgagtgcatcagcagtcccttggtagaatccactgcaagacaacttgcacgagatatacttgagctaagggagggaaatcgagcacttggaatctttgctgtttctgtcgcat

SEQ ID NO: 71428 - DNA, 253 bp, Glycine max
gaaaacccggcgcgagccacgcgtacacatttcttctcattacatacacaaaacccattttactccttctttcacaaaaaaacaatatccgcgtgctatttaccagactacgagcatcatttataaccatatctttctctaccaaattgcctttgtccttttattttcatccctttttatccatacatctttagctcacatagtttgtgacgaccctccaaaagaaatatgttgctttctcattatcttcatc

SEQ ID NO: 71429 - DNA, 261 bp, Glycine max
  unsure (1)..(261): unsure at all n locations
cgctcaatcttgatgcttactacaggcatcaaatgtttaaagagatgaaaaaaggttttaaaaaagccgaggcttcaaagcgcactgggttcaattattaanaacancgcatgcaataattgttgcaagctctgaaaagcacaaggaggaccaagtaatggcattgaagcactctatgcaaactggaatgccacacgcaatgaaagaccaaactcaacttagggaggaaatggtttaccattacaaccttgaaaactttaa

SEQ ID NO: 71430 - DNA, 60 bp, Glycine max
cgtaatatatatccttctctctaaacccccttttttattttctcttcttctctctctcaa

SEQ ID NO: 71431 - DNA, 365 bp, Glycine max
cgtaatttgtgtccttctctctaatcccccttcaacattttcgcttcttctctttctcaaatcccgggcttcaaaatttcaagattatcactttaaagacagattttttttttttgacaaaaaaaatgactctggtatggctgtttgtagtgctgctcttcacttcagtgctgctcgtagtagcttgagacctttggagaaaaccatttgcactgcccctttcttgaaggcagcatctgggtttgctgctactaacccattctttattcttaccaaacccaaattggttttttttggaactacaattaattcttcagtagaacctattttttttttgatggaagggaataaatttaagactgatc

SEQ ID NO: 71432 - DNA, 140 bp, Glycine max
gctgagatgaacccattcttctatggggaatatgggggtgtggatgtcctaagctcgactccaatgttactgtgcctgatgtcaacgaagatcattttctaatcaaacttgtttctgctgcttttaaccctgttgatccc

SEQ ID NO: 71433 - DNA, 336 bp, Glycine max
  unsure (1)..(336): unsure at all n locations
aatataaaacttttctcaccaacttttacttatatattcaacattccttncccgcaatatcgggcgtttcttatatttacccattcaccacnaaacatttttccataatttttaacatctaataacctccaatccccactaatttttactcctacactccccctgactaatcaaccacctcctcacacttataaccctttttctgactccgattttcatgcaacttggtctttacaatcacactcatatctgatacaaattaatatattacgcttctaaataaaactcctaaacaatctttttttttaaacatatataaaatacaactttttactt

SEQ ID NO: 71434 - DNA, 296 bp, Glycine max
cacgcgtccgcccacgcgtccgcccacgcgttcgaaccgggagttggtagcagtaggagctagctgttagatatctgatcctattttcaattctctagttattctctagatatgtgatcctattatactcgtgcaagttggaaaaaataagatgattttttttttagcttcccttccgtccaaaatggctgcaataacttgatttttgaccgaagggaaactgaaaaatcaaattattgcagccattttgaacttattttccactagaccaagaacattaaatatgattaagtttc

SEQ ID NO: 71435 - DNA, 384 bp, Glycine max
  unsure (1)..(384): unsure at all n locations
cccacgcgtncgataaatattctaggtgtgttctaagccagaattgatggcaagtgcttttgtgagccaggaataaaatcaagataacgatttactattatctaaagtattttctattcatccttttgagtaatttaaatgtcattattatatactccataatcattggtcatgagttttaaaacaaaaaaaaaaannaaaacatatattttcttttntttttctgcccctttattttttttcatttttttttttaccacacctcctcttccccggnctttctcttttcctcaactttttttttttttcattttcttctctaatcctcgccgggcgtttcttattgataaacaaataggattaggatgggtaattacctatgtt

SEQ ID NO: 71436 - DNA, 89 bp, Glycine max
gggtaagtcacctaagacactccacgtacctacgttgttgtctcttaccggctttaataagtcttctggccttgttccatatttaaaaa

SEQ ID NO: 71437 - DNA, 240 bp, Glycine max
cacattctgactattattcttctagatgctaagccatggctactagacgcaggcttaagggtgacgttgaactgaagtgtaacgcagacaattgctggcataccctcatgaactccaatgaaatatgccccatagccttcctgaatgatgacaatagcattgacgctctagacgttgatggcgaatcacctagttctatcccagacataagttacgttgaaggctcaacacttgtgaatt

SEQ ID NO: 71438 - DNA, 431 bp, Glycine max
gttgatcgagataactagaaacagtgtgatgaaaatgaaggtccttgttttcttcgttgctacaattttggtagcatggcaatgccatgcgtacgatatgttccctctccgaatgaacactggctatggtgcccgtactccggaggtgaaatgcgcaagttggaggcttgctgtggaagcacacaacatctttggctttgagaccattcctgaagagtgcgttgaagcaacaaaggaatacatccatggcgaacaatatagatcagactccaaaacagttaaccaacaagcttacttttatgccagagacctcgaagtccatcccaaggacacatttgtgttcagtatagatggcaccgtactctctaatattccatactacaaaaaaacatgatatggggtggagaaattaactcgacctgtatgatgaa

SEQ ID NO: 71439 - DNA, 245 bp, Glycine max
acgccacaagcgattttctaatctctcatatgtttcaccttttggatcttttcaattccttggctttctggtgaatttttaaatggcatcggcaactggatatcacctttcaatctcagtcctatctcgtaatgccaatgttctctaatatcatattaatgtcaatgatcattcgactcatgatcttgtataacgaccacgactagaactccttctttttctatgatattcacagcacaatccat

SEQ ID NO: 71440 - DNA, 173 bp, Glycine max
caaaaaaaaaaaaaaaaaaactaatttaaaatataaaaccacaaaaaaaaaaaaacggaggaagattaatatcaaatgttgcaaaaaccacccctctatttttcccaatcctctctcaaaaaccattacttcctaaaacctcaccccaaaaaacccagtccctaacccttttt

SEQ ID NO: 71441 - DNA, 239 bp, Glycine max
acaatggcatatttgtgacacatagtcattttattactctcaccatatctctcaaaacgagtggaattatttcaccttaattcattaaaacaaaaaacaatatccaaaacatataaaaaacaaaaaaaaccataaaaaaaaaaaataaaaaaataaataacaaaaaaatcatcaaagcaacaaaaaaaacaacttcatattctcaaaaaggccccccttctttaaataaacaaccctac

SEQ ID NO: 71442 - DNA, 273 bp, Glycine max
acgataaagttgatttcagtttagtttttaaatttaaaaaaaaaaaaaaaaaaaaaaaaaaaaaaaaaaaataaaaaaaaaagaagggaaaaaaaaaaaaaaaaaaaaaaaaaaaaaaaaaaaaaaaaaaaaaaaaaaaaaaaaaaaaaaggggcgccccttttaaaaaacccaattttacttccccttccttccaacttaataatttttttatatggccccctaaattaaattcactgccctccttttaaaaactttgtaactggaaaaccc

SEQ ID NO: 71443 - DNA, 88 bp, Glycine max
tctgtacactatggcaactcttacactacggcgtgcactgctactataagtagctcttctatagagcaacctaaactcatttcattgc

SEQ ID NO: 71444 - DNA, 79 bp, Glycine max
atcctctctttatgatccaatcttacttactcatgcatgcgacgacttatcaattcgggagggacacctaaattcaatt

SEQ ID NO: 71445 - DNA, 371 bp, Glycine max
caataacctatttttcaagcctgacatggaatcttttctaccaaaggtatatgatacatatatcttaaatacatttaatcaatcttaaacacttatgaattgttacttatattcttctcacacataatatatctatttcttacaatattttttttaatattcaaacctttcttcattttgtctttaataatcttttcttaccatactttatcccattttattttaatctatcctaataatatattttactcttttaattattaaatctatttctataaatatttctttatatttcaaatatattacttcttcttagtttataataatttatataataaaacattctaatacattttattactttattaatt

SEQ ID NO: 71446 - DNA, 130 bp, Glycine max
  unsure (1)..(130): unsure at all n locations
gacccacgctccttttttatcgcttcggccgctctatatatccaagctcacntctcctcatgggaggtttaactctgggtagtgcacctatttcaattcactagccgttcacatacatcctcctcaatgt

SEQ ID NO: 71447 - DNA, 405 bp, Glycine max
aatactgcacgttttagacagaaaaaaaatataaaaaagaaaaaagaaacactagggggggggtcatttttaaaccggtagataaaatagttataaaatcaacgattcaaattttctttctttctattttcttcttttccaatttcccctaatactcttcactctcaccccacaccctcccttcttcgcctcttccttcggtccactccgccgcctcctaacccaaccacgacggcggattcctctcgaacaaaaactgagcgcaaaaactcttattcgaattcgtgtgcatcgtcacgtgccattcatctctctaaaaccctgctcaagtgcgtgcgacagctgcaaccgcaacacttgtaatctcttccaattcaaagtagtttcattctctaaactgaactg

SEQ ID NO: 71448 - DNA, 317 bp, Glycine max
ctcaggcgtgcgctattggctggtttatcgtgaggcgtatatgcagagggatggcaccttggtcacggcacccagcgtgttatcaggtccattccttcgaacaagctaccaaaagctgcttccttcgaatgaatactcactatggtgagacagcaatactagggataatgcggacgctttttgctctatatgactgcacactacatctgatcctgtaaaaccataggtaaagagcgcgttgtaccaacacagtacttagctaataggagacaattcatatcatgcgctactacaattaagccacaagctttctttta

SEQ ID NO: 71449 - DNA, 398 bp, Glycine max
cagacgctcattagaaaggttcttgatctactcgtagctttgtgcatatataaatacatgtgcatcaggtgattttttaaggtgaggacgaaagcacttgtcttatataccttataaggccttggttcagttcttgctgccagcaatcgcatgggttgtgggttggagacttgtgaatgaggaaagtggacttaaaattcaatgcttgtggaagttaagagattttaaatgtggggttgaactcattaacaggatctctaatgttgttgaggcttttggccattttccaaatatctacttggagcaaccaaatcaaatcagaacataattattgacagcttccattggaggtttaactattaatgattttattgttgctgcaaagatagattatatta

SEQ ID NO: 71450 - DNA, 444 bp, Glycine max
gttgatcgagataactagaaacagtgtgatgaaaatgaaggtccttgttttcttcgttgctacaattttggtagcatggcaatgccatgcgtacgatatgttccctctccgaatgaacactggctatggtgcccgtactccggaggtgaaatgcgcaagttggaggcttgctgtggaagcacacaacatctttggctttgagaccattcctgaagagtgcgttgaagcaacaaaggaatacatccatggcgaacaatatagatcagactccaaaacagttaaccaacaagcttacttttatgccagagacctcgaagtccatcccaaggacacatttgtgttcagtatagatggcaccgtactctctaatattccatactacaaaaaacatggatatggggtggagaaatttaactcgaccctgtatgatgaatggggtaacaa

SEQ ID NO: 71451 - DNA, 383 bp, Glycine max
ggagaggtggttggagattgggtggcatcgagttgaaatcaaagatgctcgaacatgcataagcaggcgcataggcatgtgtggaagcggatcagagacagggaagctgggaaattgcgtgcaaaccatttcgcgaaccgcataaaatccaatcgcatttcgcaactccagttgtccaatcacaaagacattgtctcacctcacaaaggcgccatcaactcccttcaggttgattcgacagagggaagatatttgctatccgctgcctccgatgcctcggtagcagtgtacgacgtccaacgacccaccgtttacgaagcatgcggcggcggcggcggcggcatatcgaaacacagctccatatttgtcgttgacaagcagca

SEQ ID NO: 71452 - DNA, 161 bp, Glycine max
  unsure (1)..(161): unsure at all n locations
cccacacntccactttaccatatgtgtacttttaaagtcctcagcattaccttcggtcaggtattttttctaaggcaggggcgcctcttcaagatcactcctcaccattggaggatgtgtgcatggtgagataagcgttgctgttggcgtaggaagttatg

SEQ ID NO: 71453 - DNA, 328 bp, Glycine max
gctctagctcgagagcctacgctactcaggatccaactttacagtacacggcctttctaggccttaaaggggctattgtgactgctgagaagaactcactgaccggcctttcataactttcaaggctactacaacccatgtcagagacccaactcaaatggccgtagcaacacatacactgtcaacacttatcgaaataacgaagacagtcctaccagatcaacgtttcgaaccatttcgcaggctaagtaacgaataggacgcgcaccagatcgtcgacttatactgtgctaatgtcgatggttacacgcactatctaccactacac

SEQ ID NO: 71454 - DNA, 222 bp, Glycine max
ctcacacgtgcgctaatggctggtctatcctgagacctatactcagagtaacggcactttggacatggcaccctcctggacatgaggtaccttcattacaacaagcgtaccaattggggttccttggcatgataatcatctccccttaacaacaatacaagggatgttgcggacgctgttatgctctataagattccacactatatctgatcctataataaa

SEQ ID NO: 71455 - DNA, 72 bp, Glycine max
acgcccacgcgtccgcccacgcgtccgctagtattgttgttgttgttgttatatgatgtatgggtgaataag

SEQ ID NO: 71456 - DNA, 393 bp, Glycine max
tccacgcgtccgcccacgcgtccggaaatgtttataactttgtatgcaacttgtgagttgtgacaggttaaaaaatgaataagaaaatgtatttttaatgtgggtatttggtgattaggcttttggttaattcaataaccaaatttactatgatagtatggttccctttgcatgagtggatttgagtgtttttcagtggcaccgatgagttagaggtctttatgctgtttgtttttgtttacaataatatatgataatgtgccactgatgtgatgtctttagggtctttatgtttcccttagcaaatagcttgtgaaagatttaatttcatacagtctatagagtttttatactgtcatcaattaaaaatcacctaaattatgacttttatgt

SEQ ID NO: 71457 - DNA, 243 bp, Glycine max
tgaattacggtcccgacccacgcgtacgcccacgcgttcgcccacgctttccttaattatcatttcaaaaaaaacatctcctgggtcgggtcgattttaaggaaatcggagaccatgcttccttcatacctgtattataccactccttcctaagactaatactcattcctaaccaaccaatttagcaatattacccttccattaagttctacaaaactcacacacattacccgattcttgaat

SEQ ID NO: 71458 - DNA, 68 bp, Glycine max
acgacataatataaattcctatcaaataccctgacaaaacaaggatactaccctgctggggaggttcc

SEQ ID NO: 71459 - DNA, 285 bp, Glycine max
gtactcttatgctcggtggattatataatagtcattatcggttaaattcttctaaaaaaaaaaaaaagaaaaaaaaaaaaaaaaaaaaaaaaaaaaaaaaaaaaaaaaaaaaaaaaaaaaaaaaaaaaaaaaaaaaaaaaaaaaaaaaaaaaaaaaaaaaaaaaaaaaaaaaaaaaaaaaaaaaagccaacaatttaaaagtaccaaaacttaaaaaacccgttaatttaaaccaaaaaaacttttataatagtaaccccaaaataaaaacaattgcccaatttt

SEQ ID NO: 71460 - DNA, 152 bp, Glycine max
ctcactctctgtgtttgctgctgatgattttgaacgagttaccttcttcgtttctaccagagtttaaggaaacattggtaaggaaaggggtcacatcaacattgtcgtcattggacaatgtcactctgggaagtcaactaccactgttcact

SEQ ID NO: 71461 - DNA, 277 bp, Glycine max
  unsure (1)..(277): unsure at all n locations
cccacgcgttcgcccacgcgtccgcttaagtttcggatcaggtctgagcaatctggttgggagaacctttggtcttagagagtcaagttttatgtctgaattagacgatcaaattcctactgccttcgatccttttgctgatgcaaatgctgatgactcgggtgctgggtcaaaggagtatgtgcatattcgcgtacagcagcgaaatggaaggaaaagcctgacaaccgttcagggattgaanaaagaattcagctattacaagatacttaaagat

SEQ ID NO: 71462 - DNA, 280 bp, Glycine max
gccgcgctgtcaaatggaaaagaggagttagagaatggcaacgatcatggcggctcacgtggcgttcctggaggtgccaccggaggttacttcaccagcctcttgaacaacctatttcctgacctattcactggacagagcatggacgataggagggacgatcatagagatcacaatcataggaacatacttggaagattacgcggagccataagtcgccgcttaactgaacggtaaaacttcagatgaatctgttcacaccctacactactacatggat

SEQ ID NO: 71463 - DNA, 258 bp, Glycine max
gttaaacatacagtctggtgtagaacgatgacgagattgtagcagcagcttgactctgcatgacgatgatgcattgatcatacagacagcacatcatattatatctgttatatctagatatagcaacacctaatcacaagggctactttaacatctttcatgattctaaatgccgcaagctgatcaagttgacagaacaccatagactctaaactactaccaacgataccttctggttcagtaggagcatttatctac

SEQ ID NO: 71464 - DNA, 215 bp, Glycine max
cccactcttccagataagaaaaaaagcttgttcttaggtaccttgacacacagataatggtggtgacgacaaattagcgagtatgatcatttcttgtatggtggagattcctatttggagctaggtcaaagtggatccactaagcctactgaaatacttgatcgagatcgtcgatatgatgattggctctgttttaccagtcaatatcattatgt

SEQ ID NO: 71465 - DNA, 115 bp, Glycine max
gctacacgaacagtcagaactctatcgatcatgaaacctgagcacgagactgaagctgacgggcgatgagaagtaactgtacaacggctcgcacagacgatgcatatctacctga

SEQ ID NO: 71466 - DNA, 148 bp, Glycine max
cccacacttacggtttaaattctaattatctttaaacctgaacacaatccttgaactgaagggcgatgataataaattatttcttaaaccgcacagtatggtgtctctttaccttattatctaatacactgagcttacatcattcaaa

SEQ ID NO: 71467 - DNA, 196 bp, Glycine max
cccacgcttacggtttaaaaactaattatatacagacataacctcaatctttggtctgaatggcgatgatactaaaggaattcttaaaacgcacagtatgctacatctttaccttatcctcaaagccaatgactttactcctactgaacatacctacgtatatcagcatatcgtcctttccattacatgatctcta

SEQ ID NO: 71468 - DNA, 102 bp, Glycine max
ctcacacttacggttagaaaaacaactatacacatacataaccctacaccttgatggcaacgatgaccatactacatcaattcttaacacgcacagtatggt

SEQ ID NO: 71469 - DNA, 106 bp, Glycine max
cccacgcgtccgcccacgcgtccgatatttttctgcattgctttcagttattatattgttggtgttggattttagttgttgaagaaaatgtgtgaattaggcggct

SEQ ID NO: 71470 - DNA, 321 bp, Glycine max
gcacacaaaggcctaattctatcaccagtaaacactatctcaaagtgaagctctaagcattgtaagtatggagttcttcggctctttgagctgatataccctgcttatccatagctaacttaccagatcaatgaagcccgtacactgaacttctctccacactgactttaggctcggcacaacccagagagaatatctgacgagagacgttatgatggcgttgacattactgcgattacgaccataatcggcgttgctaagaagacgatcagatccgtgctttgcgactatgaaaagggatcttacgatatccattgatgt

SEQ ID NO: 71471 - DNA, 176 bp, Glycine max
cccactcgtacgcttagaaagatgattatccgaataccaatccgcgacactgagatccatgggcaaatacactgcatcgatgctttcaccgcttattacgttgcatccctgccttgacttataatctcatcactagaaaccgttcgacctcaacttcaactacccgagcgtcaatc

SEQ ID NO: 71472 - DNA, 178 bp, Glycine max
cccacgcgtccgtccacacatccgaccacgcttccgaaaaaaaatgcttactgacgccatgggtcacaaaactagaatgagcaagaagagccaatatccatcatttaacatagactgttactttacatagtgtaaacacccttcttgaattgcattaacgtaaaaaagttcatcgata

SEQ ID NO: 71473 - DNA, 182 bp, Glycine max
atttgttagctcaaactatttgttgtaggtcattatctcatctgagtttgattgtcactttgtttccaagtctcatcattgttacttttgtccccatagataaatgattatattctctcaatgaagctttcttgttttgtagcacattaaaaaaaataaaatgaaagaatgaacacatttgt

SEQ ID NO: 71474 - DNA, 313 bp, Glycine max
gccacgcgtgcaggagcgtacgttacctgaaaaaggcttgggtgtactttgccgagagactgtgaccttacgctaaagttcgatagcctggatagagcaacaccaactgactgaaactaaaatactaagctagcatcgaatactacaattctgcagaaaaaactatgctgtcttatatcctccctccgtaataagacatctggctgaacatgttactattgaattcgttgagggctacaaaatgaaaacccacaaggcatctgcagagcgatttacggtgaccggacaatgcaaaataacgcgtaggagagct

SEQ ID NO: 71475 - DNA, 186 bp, Glycine max
cccaagcgtacgatctgacctatgttcttactaaaatagctgagttactcacaactgggagggtgacaaggcatcatcaattctttgatcgcacactacgctgagctcctaaagcgtccacgatgactatgatccgaaaactttaaatgaccaacatgctacgcatgtagaagcgaatcttatatg

SEQ ID NO: 71476 - DNA, 160 bp, Glycine max
acaacgcattactccgatatcacttgcattctatccttattactcgagctttcattgctgctcataaaaaaaaacttgacttgaaaaatcgaaagacactattatcacaacaaaaacatattacattgcctagcaactaaagatctaaatctacatacca

SEQ ID NO: 71477 - DNA, 447 bp, Glycine max
  unsure (1)..(447): unsure at all n locations
gtttgttgtgagctataagctagtttatcgtgaggagaatatgaagttgtttgttttctttgttgctgcagtagttttggtagcatggccatgccatggcgcaggctaccaaaggttccctctccgaatgaaaactggctatggtgagcgttcttcggaggtaaaatgcgcaagttttaggcttgctgtggaagcacacaacatccgagcctttaaaaccattcctgaagagtgcgttgaaccaacaaaggactacattaatggcgaacaatttagatcagactctaaaacagttaaccaacaagctttcttttatgctagtgaacgcgaagtccatcacaacgacatatttatattcggcatagataacaccgtactctctaatatcccatactatgaaaaacatggatatggggtggagggacttaantgaaccttatatgatga

SEQ ID NO: 71478 - DNA, 459 bp, Glycine max
atcgagataactagaaacagtgtgatgaaaatgaaggtccttgttttcttcgttgctacaatgttggtagcatggcaatgccatgcgtacgatatgttccctctccgaatgaacactggctatggtgcccgtactccggaggtgaaatgcgcaagttggaggcttgctgtggaagcacacaacatctttggctttgagaccattcctgaagagtgcgttgaagcaacaaaggaatacatccatggcgaacaatatagatcagactccaaaacagttaaccaacaagcttacttttatgccagagacctcgaagtccatcccaaggacacatttgtgttcagtatagatggcaccgtactctctaatattccatactacaaaaaacatggatatggggtggagaaatttaactcgaccttgtatgatgaatgggttaacaagggcaatgcaccggcactg

SEQ ID NO: 71479 - DNA, 367 bp, Glycine max
accacacgtacgccctgtattatcataatggccctggctctggctgcttgcagtcttgcactgcacttgagtgctgataacaccttgagaccttttgaaacaaccaccgacttgaatgccctctataactagtatgacactaaaccatgacacatttgttacagaacaggattatcatcaccttcatcttcaggaataacattgatcgcacgatcaacaccagttactgttactgtggacgatggaaatcatcgagaggctgataccgttccaactcctgtagctatacttgatcaagactctgacccagatgctacttgagacgagataacctttggagatcgccttgaggctattcttgacacta

SEQ ID NO: 71480 - DNA, 336 bp, Glycine max
ctcaagcctaccactaaaccgctgctcacacaatcagagccacgttcttcatatctgtcagtgccataactcactcactatcttcttctctgatattaccaatggcatctactgcatcagcgatggccatgatcaacgcctaatgcttgaccccaaatgctacgaatctgaccaagctatcaccttctgaaccctacattcatatcaaccttgcaaagggcctcatagtctcacccgaaagcactgaacattgccctgcgacagcattcgcatgagcaatattcacaaccctatggacctgcgactccgcatgcgatgatcaacgtatctgcgaca

SEQ ID NO: 71481 - DNA, 334 bp, Glycine max
cccacgcgttcgcccacgcgtccgcccacgcgtccggatcgagataactagaaacagtgtgatgaaaatgaaggtccttgttttcttcgttgctacaattttggtagcatggcaatgccatgcgtacgatatgttccctcttcgaatgaacactggctatggtgcccgtactccggaggtgaaatgcgcaagttggaagcttgctgtggaagcacacaacatctttggctttgagaccatttctgaagagtgcgttgaaacaacaaaggaatacattcattgcgaacaatattgatcagacttcaaaacagttaaccaacaagcttacttttat

SEQ ID NO: 71482 - DNA, 288 bp, Glycine max
accacgcgtgcggcccgtcatgattaattgctgacttgagtaaccgtataagtaacgtaggattgagctgtgcttgagccttaaggccctgtgttgtacgtatttgcttttatctgcctttatgacgcatgcatgtgaaagtacagatgtaattactgatcacctgaatactgatgatgaggctttggattatgacgtatcatagatgcttgacatgactctgagaaataatagagtcagttatatgatagtgcatggaataaatcttaatgatcaaatctttacttg

SEQ ID NO: 71483 - DNA, 274 bp, Glycine max
ttccttactacaaacttgccactaatgtctccataatcgccatgatctccaaatcggggggggagagcagtcactaggtagacagtgatcggcgatctgcttctactgttactgcatatgctccgacgacgacgatactactttgcatcaggctcaatgtcatgagccataatatgctaccaaaacttaattgggtcccttacacattggtcgatacagacccttgacacataatactgcccatcatgctcgtatgagacaggattagctacga

SEQ ID NO: 71484 - DNA, 465 bp, Glycine max
aaaaaaaaaaaaaaaaaaaaaggaaaaaaaatgaaaaaaaaaaaaaaaaaaattaccaaaaaaggaaaaaaaaaaaaaaaaaaaaaaaaaaaaaaaaaaaaaaaaaaaaaaaaaaaaaaaaaaaaaaaagggcaagtatagggggtgttcgttttttaggttttactttttagaacgtgatctttttttttttttattttttttttattaaattctaatttcattttattgcccgtcattttaaaaaatcttgattggaaaaaccttgttgttttcaaattaattcccttttttgcaatttccttttttgccagttaggttaatagcaaagagctttttacccatttgctttcctaaaattttgaaaagttgaatgcctattggaactgcttttttaacctcggctttaagggtttcgggctttttggttactctaatcgttacctttttatttgcctttgtttt

SEQ ID NO: 71485 - DNA, 52 bp, Glycine max
gcccagtgtgcgatgggccatgcttggagcactaggatgcatcaccccagag

SEQ ID NO: 71486 - DNA, 360 bp, Glycine max
agttctagatctttatcacatacagaggaccattttagatctgtgaaaaaaaaaaaattaggggtgaaaataaaaacaaatatgacatctaattaaccttaatcctaactgatacacccaatcttgcgaatcgcatataacatatgtgatcgctccatcatgaattgatcctgacatcctggcacaacctcatctctgatcaattcgtgatcctacataacttatctagtctgcctaaaatggtctcctcacaccttaagctaatgacgaaaacaataaattgattttttacttacaaaccatcttcatgcatacattgataaaggaatacactatattccttatctttaattcctacac

SEQ ID NO: 71487 - DNA, 158 bp, Glycine max
atcacactctcaaagacgcgacaaatttgttagcacttgacacccaagttactactggaggggatgttcccattgccgtctcgagtatgtcagttatcatcgtcgactctacttcatacgcatcctctatgaaggccgtatccatcctgccacccaag

SEQ ID NO: 71488 - DNA, 235 bp, Glycine max
ctatttttgccgtgtaagcgtgtttacctatctagttggtgatttatatcacgaatctaggaaaggagaacaatgtgatatattctactactatatgtatgttacactaaattacttatatccctagtgtgaattgtgtgaaaaaaagaaataactgctaacctagaatactgtggatagagtgattgccctatgaatggtcataaaagcttgacttgactctcataaatagtaa

SEQ ID NO: 71489 - DNA, 403 bp, Glycine max
gaatattttgggatggaactttcaaacattgatttattgtctccaaattttgctccctgcgggggagagacgaagacgttgttgggttgacttgggtctggattggatttctaatctaatctataccttgcttttgactatgctatgaacgcacaaatacttgtcccttctctcttctttcttcttcttctcctgacccttattattattccttgcccttacccttcaggcaaaggaaggaagaaagaatctctatattattatctttattgtaatctatctttgtattataatcatgactataagtattgtggatattataacttaaatatggatttctcgagtctctccaacgattcggttgttggatttaaagacaaggagaccatggttgaaccctttt

SEQ ID NO: 71490 - DNA, 148 bp, Glycine max
gaaacatattggattgcacaccctatgatagctatatcatcagccctatgtgggcaatgagggccagcaacaaccatgtttgtgaattcacctcttgcataagaggaaaccttagcgactatgcacctaacatttgactatgacatgt

SEQ ID NO: 71491 - DNA, 427 bp, Glycine max
cggacgcgtgggcggacgcgtgggcggacgcgtgggcggacgcgtgggcggacgcgtgggcggacgcgtgggtttggaagcttcacttctttcttgtattacttgatgcccttttcccttctctccctccctcttctcttattctcattgtttagttacctaccgtggatcaaagtcaattccctatctcgcttctttttgtagttgatttcttttgggtttcgcagtctccccaaaagggttgtttttattttgttctaaaattttgtaatttttgcttggacttgtgataaaaaaaatttgattttttagatcgattcgttgatgggtcatgctggggtgttgttaattggtggaatggctaattgaaattctgttggtgatttgttgggaaaaaatgggggatcaaggtggtttacgtggtaat

SEQ ID NO: 71492 - DNA, 60 bp, Glycine max
cccacgcgtacgctaaggttttacctagaacattaggatctatgcatctgcatctatact

SEQ ID NO: 71493 - DNA, 267 bp, Glycine max
cccacgcgtccgcaaagcctacacctataaccctaggtgatatgattctccatatagactgcgtcgggtcccacgtatcatccactgcacacagccactgaccaacactactgcgcaccagaccataaggctgcatacaccccataaggatacctctgcgagccacactgctaagaaacatacattacgtctatgacccagacttatctgaacctgctgatcttacacactgaatcaatgctgctatgaacacagattttgttgatc

SEQ ID NO: 71494 - DNA, 338 bp, Glycine max
aaaaaaaaaaaaaaaaaaaacaaagcatttttttttttgccgcaatcaatcaataactgtcggcgacatatccgaatcaccgttgcagtctcacgtttcctctaactgtttttctcgggctccgagctcgccggagctaacattcacggcggcgcaccgtccatttcttcaccctcactcaaaatgcagtgccaccgcgtctccgccgtgctttttctaagcttatgctttagaattgcgctagtatacgcgcaaggagagcctcatctcactgctctggaccaacattggttcccgggaaccgccacgtggtacggcgacccccgaaagtgacggta

SEQ ID NO: 71495 - DNA, 455 bp, Glycine max
ctcacgcgtacgtccacccgtgcggacggcttccaccagcgctgattaattgatcttgcgattgcctgcaggactttcgctcgactttaactcttagcatcagacctcaacacataccgtggcccacagacgctgctgacgcaggtttgcgtcgagacctccttcggtctgacccgtgcatggatgtgcatggatggggaacgaatgacatacgagttttattgacacgggttgcggctaatgtgtgcctatgcttcctcattcatgagcttggattactgggtcaagctaatgaatagggtgtgcatgggcgaaagagctttgataagctgcagacaacgacctgatttgctcaagactcagatgaaggggtgaagacggctgtgcagaacctgtgaggagagttggtgaaacactatggggctctaaacgtgatgtaaagcatgctgatgatg

SEQ ID NO: 71496 - DNA, 221 bp, Glycine max
gatagagcgatgaattccttgtcactcatctttgcgaacaacagtatgcagctaactgtgagtggaaggggaaatgatctatacggctcaataacttcaaacatttaacgatggagtgtacttaacccataacttgttgacgcctgctgagactgatgatcagacaactacacatgcttaaggaggcactaattaatcaggaatcatttcctctggctgac

SEQ ID NO: 71497 - DNA, 323 bp, Glycine max
agtagttgagaactaagaagaaggaaatggcttcctcaatgatctcctccccagctgttaccaccgtcaaccgtgccggtgccggcatggttgctccattcaccggcctcaaatccatggctggcttccccacgaggaagaccaacaatgacattacctccattgctagcaacggtggaagagtacaatgcatgcaggtgtggccaccaattggcaagaagaagttcgagactctttcctacttgccagacctcgatgatgcccaattggcaaaggaagtcgaataccttctagggaaaggatggattccttgcttggaattc

SEQ ID NO: 71498 - DNA, 324 bp, Glycine max
attacctcgcataacattttctgctttattttacatttaaattttcttttgtaaatgacatgggagagggtttgatgtttaatcccttgtcatatgtacagtaagcatgaatgattccttttttgatattttccaccctttcattgacgggaactgtactgtaattataaaacatgtttattctcttttaagttttactattttcttcctaaaaaaaaaaaaactaaaaaaaagagcgggcggacgctctacaggatccaaaacttacttcgcgtgcttgctacgtcctaactcttttatacatgaacctaaattcaattcact

SEQ ID NO: 71499 - DNA, 358 bp, Glycine max
ttccaaccttgttagatgcaatgggtatatattgccgctaatggttctctgaaaatggaacgggctaactgtttcactcttatcaggttccaacttcatgtagcgttcaacatctgtctcatggctattgtatagcatccaattactgagcgccgaagatcctacctagtgtctcatatcacctgtgtcaccactaaataccgatctgtccatttaagatcgtagactttatgaatcgaggagcagccaaagagcttgggtaaggaccgagaaagcatataataccctgggggtgcttttaataacttcgtacactataacggccgatgatcattccgtcattacatttacgaagtac

SEQ ID NO: 71500 - DNA, 236 bp, Glycine max
cccacgcgtccggtcatcgttgatatcaaattttataaaatataaaatactataggtataatagggtaaaaaaaataaagcttgtcggcttggttccatataaatttgatgggtgcggcatcgtgatgtttttgcgttctttcatgttggtataatttgctgcatctcgtgctcttctgcaaattgttgtttattgcatgagttttccaaacgctgtgctgataattttgcagttt

SEQ ID NO: 71501 - DNA, 420 bp, Glycine max
cccacgcgtccatacacgcttaataatggcctcaaatggctccagggcggttctcgtaaccaggtaagattccgaccagcacctacgtctacccgttgatcatgcttagactgctattgctcctcaggcatccaccgccaccaccgcttacatctcaccttccatcaacacctccacatcggccaccacatatcatacgatctacaccagaaccttttcataggaatcatcctcaacaggatgccagcaaacatgttcacagcaacagactgaaacgtggtacgctcttgaaaacacattcacacatcttgtttaaggagcaggggctatagttgctatctcactatcacaaatgcttgcgagcgccataaactaaccatcattgcttccacagaatatggaggtgaatatgcctgtata

SEQ ID NO: 71502 - DNA, 182 bp, Glycine max
gcaagacgcatatgcaccttcagaagctagttcgacctactcgacggcgaaaacgtcacacgggcggtagaaacatatagctgcgcctcctcaatcctgaacgtcatcgctatgatcgacttggacaaatcattaccttacgatgaatacacatagagaagatgaacgctgtctatagacca

SEQ ID NO: 71503 - DNA, 278 bp, Glycine max
cccacgcgtccggataactagaaacagtgtgatgaaaatgaaggtccttgttttcttcgttgctacaattttggtagcatggcaatgccatgcgtacgatatgttccctctccgaatgaacactggctatggtgcccgtactccggaggtgaaatgcgcaagttggaggcttgctgtggaagcacacaacatctttggctttgagaccattcctgaagagtgcgttgaagcaacaaaggaatacatccatggcgaacaatatagatcagactccaaaa

SEQ ID NO: 71504 - DNA, 402 bp, Glycine max
cccacgcgtacgggggcgcttaagaaccaacgcttcttttctgcggaagtcatcattaccaggccttccggttggtggctagacggaacgctctgatgtacgcttgcgcgacgtgtcacaatgtcacgatatgtgacactcaccctctagggtgtgtagaatccttatgcgtactaataagctggagcatcactacacatgactccatccacgtactccctagcaaggtgacctcaaaagcaccgcaacatcatactcccggaccctcacatatctcagcccgcatctgtttctaatgcacgctagatggactacgcgtaccttacttcatatcatgtactcgacgaccagcaccactataatgtgcttcttgcgttgatagctaatgcttgattcttaggt

SEQ ID NO: 71505 - DNA, 110 bp, Glycine max
cccacgcgtccggatgtaaatcgctagcggacggtctagaggatccatgcatacgtacacttgcattcgacatgatatctctcatgatatcgtagctaacttcatattag

SEQ ID NO: 71506 - DNA, 87 bp, Glycine max
gctgagcttgccacacataatttctatgtctttactgactacaagctcaaacctgaagcccgggatacttatttatatatcgcgtat

SEQ ID NO: 71507 - DNA, 363 bp, Glycine max
ctcacgcgtccggaggagatcttgaaggtgtgtgcgtagtatgcatctgaagatgtggactcggcctgaagcgttgaatttggctgaatgcatatctgtatatgtagttgtgagatcgactgacataaagaggtctccgtaggcttattgaagctgccgaacgctcattgatgtaacgcacaagttgcgagccctttagagagccagtgatgagtggtaaaacctcgagagaggctgagctaattgacgagcttgctactgcatactttgacattaaatgtggtacatcgtgtgctagtactggctaacactcacgcattcacaacgccacgtgtatataagaggttgctagctagccaagct

SEQ ID NO: 71508 - DNA, 453 bp, Glycine max
ctagtttatcgtgaggagaatatgaagttgtttgctttctttgttgctgcagtagttttggtagcatggccatgccatggcgcaggctaccaaaggttccctctccgaatgaaaactggctatggtgagcgttcttcggaggtaaaatgcgcaagttttaggcttgctgtggaagcacacaacatccgagcctttaaaaccattcctgaagagtgctttgaaccaacaaaggactacattaatggcgaacaatttagatcagactctaaaacagttaaccaacaagctttcttttatgctagtgaacgcgaagtccatcacaacgacatatttatattcggcatagataacaccgtactctctaatatcccatactatgaaaaacatggatatggggtggaggaatttaatgaaaccttatatgatgaatgggttaacaagggcgacgcaccg

SEQ ID NO: 71509 - DNA, 241 bp, Glycine max
cccaagcatccggaggaagagcatgcacatgcttgagttctaaaaatgggaaaaggctactgcagggctgtctctgccgcatccttggctggcaacgagcttattctgggtgcatcaccccccatagtcagcagggtcagcatgaagaataccgttgcctagcgggccttctacaaaagcccatcgtgcgaaccattccgagtaccgtacttgagcgcattgtctgacgagcccccttcct

SEQ ID NO: 71510 - DNA, 448 bp, Glycine max
cccacgcgtccgcggacgcgtgggttgttgttgtaactcgttcttcttcttttgttgttctgtgtttgtgtttgttttttctctcacctgaaaatgtcttgctgcggtggtaactgtggttgcggaagctcctgaaagtgcggcaacggctgcggaggctgcaagatgtacccagacttgagctacactgagtcaaccaccaccgagaccttggtcatgggagtggcacctgttaaggctcaatttgagggtgctgaaatgggtgtgcccgctgagaacgatggctgcaaatgtggaccaaactgctcctgcaacccctgcacttgcaagtgaggtgttgggagagcaagcttcaagcatagatagcccttaattaggaataatgatcaactattaatgtgtagctaaaaacttatgtattatgtctgtgatggttttcgtgcactct

SEQ ID NO: 71511 - DNA, 452 bp, Glycine max
tgttgatcgagataactagaaacagtgtgatgaaaatgaaggtccttgttttcttcgttgctacaattttggtagcatggcaatgccatgcgtacgatatgttccctctccgaatgaacactggctatggtgcccgtactccggaggtgaaatgcgcaagttggaggcttgctgtggaagcacacaacatctttggctttgagaccattcctgaagagtgcgttgaagcaacaaaggaatacatccatggcgaacaatatagatcagactccaaaacagttaaccaacaagcttacttttatgccagagacctcgaagtccatcccaaggacacatttgtgttcagtatagatggcaccgtactctctaatattccatactacaaaaaacatggatatggggtggagaaatttaactcgaccttgtatgatgaatgggttaacaagggcaat

SEQ ID NO: 71512 - DNA, 337 bp, Glycine max
  unsure (1)..(337): unsure at all n locations
ctgctttggtctagtctagcagctttacaatttaattttacaaacattcttcttgaaagcctggaaacttatgtgcgtttcaatgccatacntaccatattttacactctccataaaacaattactattatgcccctactaagaaccttatttcgcaaaatgtatgctttatcttcaagtacacaataaatgcatctttgaaacaatacacaatgactgcactcaaacaacctatgaatacatcctcttcggacattatagatgtgactcatgctcattgatacaacattcttacttttatcataaactcctcgctatgcatccttactactcattt

SEQ ID NO: 71513 - DNA, 422 bp, Glycine max
cgtaaaccctagctccggaaagatcgtcaacctctgcctctaaggatcgcaagctcttcgccggcatcgcggaacccgtggttcggtcggagcgtcacgaacagatcatgggatcaatggaaaaggtgctgaatctcagacgcttaactgtcggtggcggcgcgggactcactttctgtggggtcaaggaagccaatagcgctcgcacatcgttctagaggctcctgtcttccattgagcgtaacgaaaaagcaaaaacgaactattgcgagtgcgaatcatgctaaggcgtacatactgctggcttcattggagcgacacaacatctggaatgatggtacttgagtgagtcttgtgcacactattcactctgttgtagctgtggaaaacactgtcttgtcctatgtgaccctaggggcgtg

SEQ ID NO: 71514 - DNA, 410 bp, Glycine max
  unsure (1)..(410): unsure at all n locations
cgagataactagaaacagtgtgatgaaaatgaaggtccttgttttcttcgttgctacaattgtggtagcatggcaatgccatgcgtacgatatgttccctctccgaatgaacactggctatggtgcccgtactccggaggtgaaatgcgcaagttggaggcttgctgtggaagcacacaacatctttggctttgagaccattcctgaagagtgcgttgaagcaacaaaggaatacatccatggcgaacaatatagatcagactccaaaacagttaaccaacaagcttacttttatgccagagacctcgaagtccatcccaaggacacannttgtgtcagtatagatggcaccgtactctctaatattccatactacnaaaaacatgaattatgggtggaagaaatttaac

SEQ ID NO: 71515 - DNA, 365 bp, Glycine max
cgcaaacgttcgtacacactagtacttctacctctgtctctatgtatcagcaagcagctttagtaatttacagtaacatatccaatggtcgcacgttcacgaaccaatcaacgtatcacaagaaaacgtgctcatcttcagccttcaaatttccaggaggggagtgatgttctctttaagagaggtcagtgcagagcaaaagggctggcacaccggattcaaaggatcctgtcttgcatcgtgcaggaggaaataggcaataccatcctttgctgatgaaaatcaacccattgagtacagaccgtcagctttatgatggcgacaacacatctggtgtgacagcatgatggtagacacatggacac

SEQ ID NO: 71516 - DNA, 244 bp, Glycine max
cttcaggccaagccaggtaagcaagcacaacacaaccccgaaatggcttctggttctggtccgatgggttttttggctgagctctgttatcaacaacaacaagccttcatccgaagcctttttaaggccattacccttacggcaaccaaagaggacccttttaacaacaaaggcagggtcaaactccaaggctaaaataaatgcatctttgaaggaaaaggcagttgcaggactaacagcagct

SEQ ID NO: 71517 - DNA, 430 bp, Glycine max
  unsure (1)..(430): unsure at all n locations
atcgagataactagaaacagtgtgatgaaaatgaaggtccttgttttcttcgttgctacaatgttggtagcatggcaatgccatgcgtacgatatgttccctctccgaatgaacactggctatggtgcccgtactccggaggtgaaatgcgcacgttggaggcttgctgtggaagcacacaacatctttggctttgagaccattcctgaagagtgcgttgaagcaacaaaggaatacatccatggcgaacaatatagatcagactccaaaacagttaaccaacaagcttacttttatgccagagacctcgaagtccatcccaaggacacatttgtgttcagtatagatggcaccgtactctctaatattccatactacanaaaacatgggatatggggtggagaaatttaactcgaccttgtatgatgaa

SEQ ID NO: 71518 - DNA, 132 bp, Glycine max
cccacgcgttcagatacacatcgtataactcctgtgtctcagatacaaccttacgggaccacttggaacactgatttggttatttatattgccacctattttcagtttcatttgcaccactctaaaagcatc

SEQ ID NO: 71519 - DNA, 299 bp, Glycine max
tgtgcctgtgctgtccatgcacaccgtgcattcaccactttccctcatcctgctcattaagaagctcatgctttgatgttgaacacacttcgaggatgtgccctttcaagggctcagagaagtgaaaaagtgaaatccctccctggtagatatatgcctgcaaatagagagacttcaactttgtgtcttaaactcggtttgttttaatccccgaattgtgaaagctcgagacattttggatgctaaaactggcttgtacctagtaagctatttgagtttatggaaagacatggacttct

SEQ ID NO: 71520 - DNA, 462 bp, Glycine max
  unsure (1)..(462): unsure at all n locations
cggacgacccacgcgtncgaccacgcgtnncgccacgcgtncggaaacagtgtgatgaaaatgaaggtccttgttttctgcgttgctgcaattttggtagcatggcaatgccatgcgtacgatatgttccctctccgaatgaacactggctatggtgcccgtactccggaggtgaaatgcgcaagttggaggcttgctgtggaagcacacaacatctttggctttgagaccattcctgaagagtgcgttgaagcaacaaaggaatacatccatggcgaacaatatagatcagactccaaaacagttaaccaacaagcttacttttatgccagagacctcgaagtccatcccaaggacacatttgtgttcagtatagatggcaccgtactctctaatattccatactacaaaaaacatggatatggggtggagaaatttaactcgaccttgtatgatgaatgg

SEQ ID NO: 71521 - DNA, 430 bp, Glycine max
aataagtgcagtgcttctatcggtatactttatagcaaattttgtcgtgccagggttctttggcaactctttcggatatgataagtcatcaaacgaagagcagaaggttgacgatgtaaatgcaatagaagatgaatagatagtcaaggaaggtcacgaaggaagaaacaggactacgtaaacgtgagaactgagctcatgatggttgaagcgctactgcatgggtcttttgtatctttagttcgcatttagattataataaaaacatccaagtgtcatttctgatgctcattactattacgtattctagacttggtagcgattacaatctcatgaaaccaaattgttcctgcccttgactcaagtggggttactactaccccaaaaaaaaatgttagttaacctcttgtgagtatagtctttatttaac

SEQ ID NO: 71522 - DNA, 138 bp, Glycine max
cgcccgtgtacggtgtacaccattggcattggatctggtgaaagattgatgagcgctcatctgatctaagcagctggtgatgctaggaagaaactgctgccaagatccggatgaaacgatgtgtgcacctggtttctt

SEQ ID NO: 71523 - DNA, 118 bp, Glycine max
gagagggggttggggaatttgattaaacaaattgaatttcttcaattaactggtgaaaaaggaaaagaatgaaatggagttttttgaaacatcggaaaaagtagtcgtttatatgaat

SEQ ID NO: 71524 - DNA, 434 bp, Glycine max
gttgatcgagataactagaaacagtgtgatgaaaatgaaggtccttgttttcttcgttgggacaattttggtagcatggcaatgccatgcgtacgatatgttccctctccgaatgaacactggctatggtgcccgtactccggaggtgaaatgcgcaagttggaggcttgctgtggaagcacacaacatctttggctttgagaccattcctgaagagtgcgttgaagcaacaaaggaatacatccatggcgaacaatatagatcagactccaaaacagttaaccaacaagcttacttttatgccagagacctcgaagtccatcccaaggacacatttgtgttcagtatagatggcaccgtactctctaatattccatactacaaaaaacatggatatggcgtggagaaatttaactcgaccttgtatgatgaat

SEQ ID NO: 71525 - DNA, 406 bp, Glycine max
cccacgcgtccgcccacgcgtccgatgcccatgccatgtgttatttcgtctgcggtgcgccgaacttcactcttctttctcacccacccccatttcatttcttcgtaagagaaaaaaaaaaaaaagaaaggagatggaaggcatcaccgccagcgtgtgcaggggcgtgaaggagtattggaggaggaaggggtacaagaggctaaacgggtcgggccggaggagaaggaaccgggtggagcttgggagcacccgaaccgggaagggtcggttctggaggtggaggatcagactcgcacccaagatccgaatcaggaaaatcccatcgccgaagaagatggtgctgtgggttcgggacgcgtacgtgaggatgatgctgggcctggccaactcgcggatcatgact

SEQ ID NO: 71526 - DNA, 382 bp, Glycine max
gacaaaatccgagttactcacaaccgagctcaaggtaatatcactaaccttcactactttggtggttcatatttaagaccttttcttcaatttgaatttcaaccgaaagctatctaaccaataagcttggtcgctttaaccccatcaacatgttgaatacccttctgtgcaaatgcatcactttcgcagcaacatcacgttaccctattttacaccactacccattaccattttctctgcgtttctacaccacaaccacttcaaattcacgctcctttgcggtatcctacctcatccacaattttgggttctcccctgaatctgctttcaaagtttctgaaaaccacaaaatttatttccgtaccccggaaaagcctgagtc

SEQ ID NO: 71527 - DNA, 343 bp, Glycine max
tcttcttgaaacgtctcccctcctcatgatgctatgaagtacttggacttgatcagcaagtgtagggacaaagaaaaaaaggaatctatgctccagaagatagttaagtgagagatctagttaatgggttcaatcatagtgcgcacatggatgaactgtcaggcttgctttgtcaatagatgtaaaattgttttttttttttttttttttgtgccagttcttctaaagcatatgtgtagggtttcttcatagttctgcttttgtgatctgggacattcttgttgaacatgtgtctgcctggtcttttgattaaggaagcaaaaagcatggataggatttggaa

SEQ ID NO: 71528 - DNA, 405 bp, Glycine max
cttttggacttttacttattggttcttaacggataaaacttaatggccgctcgtgaaggggctgtatcatatcattcttaaagatgttcaataaagaagttctcttttatcattttttcccccgcttctaatcttgcttggtatgaatgttaaccgaccattattttgagtgacaaggatgttacgccactttttgtcattccgcatgaaaaagaaagggaaaatgtggaggaaatattttcagaagatgcctttgttgtcttcatcaccacccctggacagctggctgctcttattaatgactcagctggagtgatagctacaaatacagctgctgttcagcttgcaaatgcacgccaaaaaccttgtattgcactattttgctctgaagagaaaggaaacaag

SEQ ID NO: 71529 - DNA, 322 bp, Glycine max
atattggaggctaatatggtaaaggtttcctgaatttatgcctgggtttggcccttggaatctctgctttaagtcccaccttaattatcaaggacttggctttccaaaagtcctatggtaactttggtttggcacaaacacacatgtttatcagcatagtttagatttattcacactatttcctgcaacttcttctatgctgctagtaaattagttaactttaggagagctgtcctagacatcaaagaagagtcctttatcaattttgaaaaattcatataaaatgatatctccctttctaatttcataagcatgttacatg

SEQ ID NO: 71530 - DNA, 394 bp, Glycine max
  unsure (1)..(394): unsure at all n locations
cccacgcgtncgcacaagccaagtgaaagtgagaaaaaataaaaatcaaagagcataatgcgagggatcatccacacgattggggagacccttcatgtgggagggcacaagaaggaggaggagcataatggtgagcaccatgctggagaatacaaaggggagcaccatggtgaacacagtagtgagtacaaaggagagcatcatggtgaacacaaagctggagagtaccatggtgagcacaagccagagcacatagaggggttcctagacaaagtcaaggacaagatccatggtgagggcggcgccgccgagggcgagaagaagaagaaggagaagaagaagaatgagcatggccatgagcatggccatgacagcagcagcagcaatgacagtg

SEQ ID NO: 71531 - DNA, 291 bp, Glycine max
cgaatgaacactggctatggcgcccgtactccggaagtgaaatgcgcaacgtggaggcttgctgtggaagcacacaacatcttttgctttgggaccattcctgaagagtgcgttgaagcaacaaaagaatacatgcatggcgaacaatatagatcagactccaaaacagttaaccaacaagcttacttttatgccagagacctcgaagtccatgccaaagacacatttgtgttcaatatagatggcaccgtactctctaatattccatactacaaaaaacatggatatggg

SEQ ID NO: 71532 - DNA, 315 bp, Glycine max
  unsure (1)..(315): unsure at all n locations
tcgtagaagacagtttgaccacnatctaagagagataattattcaaaagtgcagattggaatcgaggaaggaggcatcccatgtgcctcaaatggaaaagccaagagaattcaacaacattctgctaaatttcttacaggagcattcttgagtaattttttaaaagcattgttatatacattaggagcataatctgtctacatgtgaacgagaagtgctacaacaagcgaatacgaaaaccaaaactcgcatgctattgttagagngacctctaatattttatatatttctgcaattatactattgctttaactt

SEQ ID NO: 71533 - DNA, 267 bp, Glycine max
cccacgcgtccgatcaaatttaataagatttatttttttattggattaaatacgacaggggtgtaaattagttatgaggttggtttatccagagatatctgacacaatttgtgtgtatatttaccacatgatgatttaaagggatgatggcgttcatcaaaaaaaaaaaaaaaaaaaaaaaaaaaaaaaaaaaaaaaaaaaaaaaaaaaaaaaaaaaataaaaaaaaaaaaaaataaaaaaaaaaaaaaaaaaaaaaaaaaaataaa

SEQ ID NO: 71534 - DNA, 366 bp, Glycine max
cccacgcgtccgtccacacgtgcgcccactcgttcgattaggaacttccgttcaaacagaggacccggttctggcattctgaaaggctttgtatggttgatcacttggatattcactactgtctgtttcgctctcttgaccgaccatcctggctccttcctcattatgctgtctgtcattcacttcgcagttcgcctcagcggggtgtttttcctccgggagatacttgacgacgcctccgccgacgccgacgccgatgaggtaaagtatttcggcgtattcaacgtcgttgctatggcaatggcgcttcttctgttggcgtatgggttcattcacagccccaggatgttggagtccagagtgttc

SEQ ID NO: 71535 - DNA, 218 bp, Glycine max
cccacgcgtccgcacacgcgtacgaccacgcgtgcgcatacgcgttcggcatacatggcatgattcaccatgacagctagcatccttggcagaccagccgtcaccaaccgctcggctgttgaacccataggagatcactcgtacagaatgctggcaaagctggcgaagcagactacgtcagatatgcctatgacatggatggtagcacatggatggag

SEQ ID NO: 71536 - DNA, 340 bp, Glycine max
accacacgtacgctaaatccttctactttctcaatccgaaaaacttgcaacagacttggattcaatcacgtacactttcatattcaaacaacccatctctcataacacaaagcatctccttaattctaaccgatattatctgtactttttcacggattgtaaaaccatatacacagcgaatgctacgacagatgctgacgatacgccacaatctgttcctcgagcactgaaactacagatcaagctgctgctagagagtccatcgagtccataaattgcaggatctcgagacgtcactccaattcgtaatgacagacttgtgtaggacgaatacgatgtc

SEQ ID NO: 71537 - DNA, 271 bp, Glycine max
cccacgcgtccgttcaatagtttgaaattctcaatctgatcagttttttccggactggtgaccattgtagtaaactttcttacagaaaatactacattctcgtaggctatggcagctatgttaatgtacacgatcttatattatacagtaaccagtattgtacgacaatattcacaacgaatgaaccgagattatcgctgagacctacaatatctacatgaccagtgacatgctgaaagtgctcgttgacattattatctagatcatagac

SEQ ID NO: 71538 - DNA, 159 bp, Glycine max
cccacgcgtccgatcactagtgaacaacctagttcccttagtcattttcgattaataaggcaatggcacttaccaatcagaccactcgtaattccatcgatcgattggatttaaagtaatgattgtgctccgaagcagatagaaaatcattcccgttta

SEQ ID NO: 71539 - DNA, 145 bp, Glycine max
cccgaagcccctgaaggcttacagagcaatctgcgctgcagccttcgactagaccacagatgcaccaccagatactcaggctgaacctttcggagtcaccgcaccagaactcgacctaaacagcccttccccgatcttagggggc

SEQ ID NO: 71540 - DNA, 161 bp, Glycine max
ccaaagcgtccgataaccaggactgctttattaatcacatgaacgctcagatcactgagtcgagcatacatactatctagcagctctgaaaccgaatccggatattgaggttcaaaaccgtgatctgcatcgacgagaacacgagagtatccttggactgt

SEQ ID NO: 71541 - DNA, 123 bp, Glycine max
tcccgcgtccgataactcgttcgatttgatgaatcaaataaaataacatctgactggtgaccgaagtcgtgcactttgatatggctggcactcataggtccttactttacgcagtttcttaat

SEQ ID NO: 71542 - DNA, 141 bp, Glycine max
cccactcgtacaaaaaacgtgaaaccaattcatccattagtcatctttcattaatcaggcactcgggctttccattatggagagacgatatcccttccattaattgtctttaaaaacatgcctatcttccgcaccagatag

SEQ ID NO: 71543 - DNA, 317 bp, Glycine max
  unsure (1)..(317): unsure at all n locations
cggaannncccgggtcggacccacgcccgtccgccgcattggctagaataggaactttcgatggctcatttcattctacttttatccatatctcattctctggtgtgctcgtgtgcaggagtagagaccgatgctccatgcccatctctatcctgatggaatgattatttggtgaagacttgtttggccataacatctcaccatttcccaactgcatctgactagagccttctaatagcctcctccctgcagggtgttgataatcgatgaagctccctaagcaaatgtgatgatacacatgtacccaaaaacattct

SEQ ID NO: 71544 - DNA, 282 bp, Glycine max
acaaagcgtccgagagccaggcatgctttaggaaccagaagatcgatcagattactggtaagagcatacatactaggtggcaactgtgaaaacgatacaggaggaactgattcaaatcgcttgacgagacaagccggactaagacactttcactggcctgaaaggcaagcatatgcactaagggaggcaaaattcgaatatcacgatctgatgatattggagaactgagtgtccactctaggagatgatacgtatcttacatgtagaagctgcactgatgaa

SEQ ID NO: 71545 - DNA, 166 bp, Glycine max
caaacacctccgacgacctaatctgtttaagcaaacatactacacgacatgtgaatggtaagctcactcattacagcatcaaactctggaagactcgtgttaatacttgacgaacatcccaagcactgatcgactgggctaacaactatcatttgtcaaggactat

SEQ ID NO: 71546 - DNA, 346 bp, Glycine max
gaaacgcatcagttgacccaatcagttaatggaatcataataactgacttgtggttcgtaagcttcctggatcaaaccttgctgatcaaaatactgcattgagatcgaaagtgcgtagtgcacagtactttgacatattctacatacttacacttattacacagatctgcctatagaaactgggacttcaatcagctgcgtacgaactctgaaactgagagtgctaaccatttagtgggtggactaaatgagatctgcaatctattaaactgcaaactatagacatttaacgatctctctatctcatcacagtataatacacatacatgaggcttaatttatatgc

SEQ ID NO: 71547 - DNA, 253 bp, Glycine max
cacacacctccgtcgacccattcagttaaagcatacattatacatgacttggggttggtaatatccctgtctaataactcacactttaaattactcgttatactacttaaagatcttctcacacacagctcaacagtatcaacaactatcacttgataaggactatattctaacaacattgaggacttcttcaactgcgtacgtactatcacatcaagagtgataaccagtaagtacgagcgactaaacaaga

SEQ ID NO: 71548 - DNA, 189 bp, Glycine max
cccactcgtccgaaaaaagattaatgccattgctttattagacttctaaacagactaaggtgctgccgttttcccaaatctccatgacaattaccattcacattgagaaattacatccatgactagccgacggacgttgtttccccaacataaactcttcccccgtaggtggaccgtcagaagggctat

SEQ ID NO: 71549 - DNA, 316 bp, Glycine max
gcaatatcatgttttatggttttggttgatttaaaagtagttctgaactgaatcatgtactggattaatgcaagtcttagaataaaatgatcttttatggcccaaataaaaaaaaaaaaaaaataaaacatactaataaaaaaaaaaaaaaaaaaaaaaaattaatataaaaaaaaaaaaaaatataacattaaaaacaaaaaaaatataaatttggggggccctttaaaagaaacaaaatttccatccacttttttgcaattttttaccattttaatggggcaccttaattttattttagtgaccgtttttttaa

SEQ ID NO: 71550 - DNA, 337 bp, Glycine max
cccacgcgttcgcccactcgtccgcccactcgtccgtaaaaaaaaaaaaaaaaaaaaaaggaaaaaaaaaaaaaaaaaaaaaaaaaaaaaaaaaaaaaaaaaaaaaaaaaaaaaaaaaaaaaaaaaaaaaaaaaaaaaaaaaaaaaaaaaaaaaaaaaaaaaaaaaaaaaaaaaaaaaaaaaaaaataaaaaaatataaaaaaaaaaaaaaaaaaaaataattatattgggggggggggccctttaaaaaaataaatgttatatcacaggtgtggtaaaatataatatttttttaaatgtgaaaaaaaaaaaaaatatgcggggcgtttttttttat

SEQ ID NO: 71551 - DNA, 244 bp, Glycine max
gacacgcgtccgtccacgcgttctggtacaccctacgctacagttgacctgtggtgtgttctacttctatctctacaaaagtacatgcaatttatcttgactcagctgcatttcatactcctacaccgcttgacaatgccaacaactcttacacgaaacacacatgcttctttttaagttcttcatatctaaacctatggattgaatctgcaccatgaaccaataaccacaaactcgtacttgt

SEQ ID NO: 71552 - DNA, 403 bp, Glycine max
cccacgcgtccggtgagtttgttgatcgttataactagaaacagtgtgatgaaaatgaaggtccttgttttcttcgttgctacaattttggtagcatggcaatgccatgcgtacgatatgttccctctccgaatgaacactgtctatggtgcccgtactcctgaggtgaaatgcgcaagttggaggcttgctgtggaagcacacaacatctttggctttgagaccattcctgaagagtgcgttgaagcaacataggaatacattcatggcgaacaatatagatcagactccaaaacagtttaccaacaagcttacttttatgccagagacctcgaagtccatcccaaggacacattttgtgttcaatatagatggcaccgtactctctaatattccatactac

SEQ ID NO: 71553 - DNA, 326 bp, Glycine max
ccatcttcggttgttatgaatgagaaggacacggacacttacgcaattattttattaatagcctttatgcatagcgacattggtatagttaagctctgattactgaaaggaacaagctgctagttgaatttgagggcccacttgatagccaaatttgtgacgttcgcggcggaggaaccatgtcgagcgatagccttagccgaaacctgcttgatatcctttatttagaaacaaagctttttaccttgttgacctttcatgatgaacttgactaggcttgatatgtcctgtttgttctccaagcaactctttgaatcgttggtcct

SEQ ID NO: 71554 - DNA, 269 bp, Glycine max
ataatatattatttatatttttttattttatttttatttttattttttattaaaaaatttataaatttttaataatattaatatttataaattttattaaaaaaaaaaaaaataaataaaaaagatggaaattattttttaaaaaaaaaaaaaaaaaaaaataaaattaccattttataaacaaatattttaaaaaaatatataattacataaattttttattaaaagaacaattaaaaaataatatgttaaaaaaaaatatataaaaa

SEQ ID NO: 71555 - DNA, 141 bp, Glycine max
cacaaacatgcgggttctcacaatgctcatagatactgatttagtagaaaggacatgggatgcgagataaatattgcagtcctataatgatcactcgctgataatgcacatgctaattactggacactgtcagcttaagct

SEQ ID NO: 71556 - DNA, 329 bp, Glycine max
tcggaagctctaccgttcacgtgtaaagttttaagatacatgagagcaaacttgagatggggtttatcgctgtcttgacaatcactcttagagagatgattgacaaagatgaaaagacaactatacggtcctttgaccatgatctaagcttgaacttcatagagactgagattcacctcaactggcctgatcttgactatcgcatggaaactaacacgatcagtagatacaatgagttctataacaccagagagctgaggctcaacgttgagatcaaggaatatctaaataagaatcttactaatggatcaatctagaatactataact

SEQ ID NO: 71557 - DNA, 255 bp, Glycine max
ataaccagctagacccacgcgtccgcacgaacgtcctcacactccttttggtttatgatctattataaatcacataggatgcgacatttatattgccggaccctaattctcactcactgataatccacatcttatttactcaatactctaagcttaagctagactcacaaaacgcacatcatacttacctgactgaccatctacttaaatatcgattcatctatatatgataacatacatgactcactatatata

SEQ ID NO: 71558 - DNA, 384 bp, Glycine max
  unsure (1)..(384): unsure at all n locations
cccacgcgtccgcccacgcgtncgatcgagataactagaaacagtgtgatgaaaatgaaggtccttgttttcttcgttgctacaattttggtagcatggctatgccatgcgtacgatatgttccctctccgaatgaacactggctatggtgcccgtactccggaggtgaaatgcgcaagttggaggcttgctgtggaatcacacaacatctttggctttgagaccattcctgaagagtgcgttgaagcaacaaaggaatacatccatggcgaacaatatatatcagactccataacagttaaccaacaagcttacttttatgccagagacctcgaagtccatcccaaggacacatttgtgttcagtatttatggcaccgtactc

SEQ ID NO: 71559 - DNA, 177 bp, Glycine max
ctcacacgtccgcccacgcgtttagttactgcctcaattggacatagtatggggtggggtcacatcctaaatagccaagcgtccatgcttagatcgtagtcgaactgtacgtttcctatcgtccgatgatgcattatcatcaaatcgtaacctttctagagagagtcgacgtttgac

SEQ ID NO: 71560 - DNA, 280 bp, Glycine max
aagagtatcattttagggggaaggcatgaaacatgatgatgcctatcgcacaatgtggtctctatacaaataccagcgctctattgtgcgaacaatatacacctaaaatgcacagggtgcctgcctgccatatcatacctgcgcatcatcgcattaagaaccttgcgtgaagagtgcttttaacaaccacagagcctcatacgaccggatcggtttacatgagacacgtgaagacttacataatgtacaaacgtatatgctggacaccttataagcgatg

SEQ ID NO: 71561 - DNA, 434 bp, Glycine max
atcgagataactagaaacagtgtgatgaaaatgaaggtccttgttttcttcgttgctacaattttggtagcatggcaatgccatgcgtacgatatgttccctctccgaatgaacactggctatggtgcccgtactccggaggtgaaatgcgcaagttggaggcttgctgtggaagcacacaacatctttggctttgagaccattcctgaagagtgcgttgaagcaacaaaggaatacatccatggcgaacaatatagatcagactccaaaacagttaaccaacaagcttacttttatgccagagacctcgaagtccatcccaaggacacatttgtgttcagtatagatggcaccgtactctctaatattccatactacaaaaaacatggatatggggtggagaaatttaactcgaccttgtatgatgaatgggt

SEQ ID NO: 71562 - DNA, 397 bp, Glycine max
caaacacaaacagttgtgattgcattgcatcaatgggtgtctccttcctctcaactggcccttatctgcttccactcgacgctcatgattcaccaccctacgacagataccaacctcgttcagtgtccatttgttgtaataaaaccataaacgatgttagtgatggagagccattccattggagaatgatagatggtctcaaatgcgccggggcaaccgttggcctggaattaattggaagctccggatctcttgcagaaatggctaatgctgatgacctgatacagcgcatacagcattctgaactccaatctcagatttacgaaacactctttacagccatcatgggaaatgcagatcttattccatccttactgacactggctctaaatgatgc

SEQ ID NO: 71563 - DNA, 105 bp, Glycine max
ataactcgtccacccatacaatctttttatgtcagcattgtccatcggttcaggatagataaattaatatctatggtgacacacatacttataaccctaaactat

SEQ ID NO: 71564 - DNA, 328 bp, Glycine max
attactcgaaaggccttgctttctcattatattactattctttaagtgccagttatggctgaaagtataactatggtgtctcacttacttatactctaacaaatgggttctatccctatattggattccttactatacatagtcttcgatatcaaacttagtcaaaataccttgatgacaggcctgttcacatataaatattattatgcttaacatacctacaatatgcgatattagtactatgatatagcatatgcatcgactctgaactatactcttttacaggacatcgcattgatgaccattactagtcatatattttaaactt

SEQ ID NO: 71565 - DNA, 263 bp, Glycine max
cgacccacgcgtacgaaaaaaaataaaacttatgaaaaacttttatattacatcataaactagcataaaaacagagcgcggacaaaaaaagtgaagaaaagaaaaaaatcaaataacaaaaaaaaaaaaaagggcgaccaatttaaaggttcaaaacttacgaacccttgcttgcaacactatacctattataaagggtgactaaaatcaaattaactgtccaactttttaaaacttgtgaactggaaaaaccgtgtctttac

SEQ ID NO: 71566 - DNA, 333 bp, Glycine max
accacgcgtacgattgcgaaaacccttaatttgggactgtccgcattatagaggctagagctgatgtgttcgcactggacggtgattctacatcaaactacgactcatactataaaggtccaatggacgtaccttgaaatgcatgcatagaccaacttgctgatgaagagccttgccatagtagaatgatataatggctgaaatacgcaaagacaaccgtacgaccgggcttgcattgaagatcgtaacctatcgggctaaatgttactggaaattacctaatacagaacagacacgctgcctaattcgattgatcaagttacgcgagactta

SEQ ID NO: 71567 - DNA, 411 bp, Glycine max
gcgatcactcgaaacagtgtgatgaaaatgaaggtccttgttttcttcggtgctacaattctgggagcatggcaatgccatgcgtacgatatgttccctcttcgaatgaacactggctatggtgcccgtactccggaggtgaaatgcgcaagttggaggcttgctgtggaagcacacaacatctttggctttgacaccattcctgaagagtgcgttgaagcaacaaaggaatacatccatggcgaacaatatagatcagacttcaaaacaggtaaccaacaagcttacttttatgccagagacctcgaagtccatcccaaggacacatttgtgttcaatataaatggcaccgtactctctaatattccatactacaaaaaacatggatatggagtggagacatttaactcg

SEQ ID NO: 71568 - DNA, 409 bp, Glycine max
gtcaatctccatataaataacactggggccttagcattggaaggtgagctatgtttgaagtgtgctcggcttatcaattgtagctttgtcattcacatatgttgacgttcccatcagagttaatcctaggagggaagagactcgcaggtcattaactgataaattcaagaaaaacgttgacattctagagacacagagtcttattgtttgcggaaagatcactactacatgaattatatttcatgacacatgattgaagatggttgtctaaaaccgttgtgatgaaaaatgcagtgacattttgattaatagatataactgtttaaaaaacacttatttttgacacatccgatcaaagatgattttcataagagctgtcatgatttacgcttgtcatgatttttgtcac

SEQ ID NO: 71569 - DNA, 358 bp, Glycine max
cccacgcgtccgagcagtttcagacacagagagaggggtttgggattggagggattgacgctgcgtctcttcctcttctctttcgatccatccctcattcctaatcctccaatccaaccacctcagcctcacactcacatatacacatatctgaacgcgtatcgtccctcctatggcttcaaagcgcatcctcaaggagctcaaggacttgcataaagacccaccaacttcttgcagcgctggtccagtagctgaagacatgttccattggcaagcaacaataatgggtcctgctgatagtccttatgctggaggtgtattcctagtcactattcactttccttcggattatcctttc

SEQ ID NO: 71570 - DNA, 293 bp, Glycine max
  unsure (1)..(293): unsure at all n locations
gtagttgagaactaagaaggagaagcaaatggcttcctcaatgatctcttccccagctggtgccactgtcaaccgtgccggtgccggcatggttgctccattcactggcctcaagtccatggctggcttccccaccagaaagaccaacaatgacattaccttcattgctagcaacggtggaagagtgcaatgcatgcaggtgtggccaccagttggcaagaagaagtttgagactctttcctacctgccagaccttgatgatgcacaattggcanaggaagtagaataccttc

SEQ ID NO: 71571 - DNA, 308 bp, Glycine max
ctcaactcatatttccaacacgcagaacctacaatgtcgctcctattcaggcgctctcggggcacgtacgacgacaactacgacgtgcgacccgccgtttacgcctgctacggcttacaccttcgacaactgctcatcaatcttctacggtgtacatcagccagaagctcacgtggtccatgactccaactacaggtgctactccggtttctgagctccatcatgttcacataaccactaccatgactgcgttactaaccgaagctgctgccccgatcaccacacacgtcacaaccacccacggcgaa

SEQ ID NO: 71572 - DNA, 61 bp, Glycine max
cccacgcgtccgcctttgttctgtgtttggttaaattgaagcacggtttcatggtcaaagg

SEQ ID NO: 71573 - DNA, 412 bp, Glycine max
gtcacgcgtacgcataggctctttgccggacacaagggaaactataaagcaggatcgtggcgaacacctacatacggacactcatcatatacgtgagcatcctcttactaatactcgacctcctacttatttacactctttccagccatcatcaccacctgaagatcttctacaactgggagaatcaggtccgacagtccgccctgagtcgtctgaccatcggtatgtaggtgcttgtcaccggctgccgagtgcttaagagattcccactgattcctcattttcaataagcgcgagaaccgcgtcctcattctcgacaactttagtccatactactacctctcgctaaaactcgcactacagcacgtcgtgacgaaacaacgaatccgtatcatcgaagccgacctgaacg

SEQ ID NO: 71574 - DNA, 470 bp, Glycine max
gaaaaacagacttactttgcatcggcgacacacatggagatctccggcaccggtctccgggaggtcagatacgtctgcggctatggaacccacacgcggtcccgcggcctgactcctggttttggggcgaggatggggatgggttctggctactgagacgaggggcattagcgggattaccagaacaccagaaagggtctaaccccaaagaagaccttgacgctgctcacgggattgtacagattacggcttgcatcggatcccgatagactcgacatgtactatgatctccagcacaacatcacctatgatgctggacatgtattactgacagacatagaagccatgtgagtcgacgagaaggaagtgaagaacaaacggacacatgacatgaggccgaactcaaagctgccaagatgaattgtgaatcttcttcatcatcatcgaacgaatcaagtgacagtgattga

SEQ ID NO: 71575 - DNA, 307 bp, Glycine max
gaaaaccgtacgtcctattgacttgaggtatacactacgacatgatttttcggaaggtgggagagcagatctgtttgccaatgatcaaaacataagatggaaaccatcaagcttggaggaagttgatccaagagaattgtaagccgtctttaaacctttaagaccagatgttggtgagttgagattgttattctggaaggaaaatgtactattatcattactttaaatgcattatacaattgcttacactgcatataataaatagatagagttgtcattgactatgacttccagatcaagatcatcg

SEQ ID NO: 71576 - DNA, 362 bp, Glycine max
atcattctaagcgaaaaaaataggatcacattacctattagctgaacttcacacatgtacgagtcagttaatattaaactgggagtggcgttgactcgagtctcttcagtcttgtcgaacgtacttagatgtacgcatgctacatacttattgctagactattgactatccaacaattacagtgatactaatttgatatagcttatactgatttcaagctgtctggaaatactcatttcataacggcacttaaaatattttcagtaggatggaaaggctacttgtgtgttactgatttcatatggcttatactcaattggatggtatggctacttagcatgtactgtttgtatactatactc

SEQ ID NO: 71577 - DNA, 219 bp, Glycine max
cccacgcgtccgcccacgcgtccgcaaacagatgcctctaatttgtgcttaaacatgttggattgcttgtatataagttttttaatgtcgtcgaaactagtgagtttgttcttgtggagcaattatgagaagtctatatacacatatagccaaacagatgcctctaatttgtgcttaaacatgttgcatagtttgtcttataaactaaagaaatattca

SEQ ID NO: 71578 - DNA, 378 bp, Glycine max
ctcactctcttttcaactcattgaaacattcatcaaacaccttctcaaaatgggcaaagggggaaagctaacaaagctcaagtcagccatcaagagattgccctcattgaccaagctcagccgcaacagcagcagtgtctcttccaacaaaagggtctctggaggaacatcctcttcatccaaggaacacgaacaagaacaacaacttcatgcggtttatgtcggcaagtctaagaggcggtacctcgtgaactccgaagtgatcgaccaccccgtgtttcaagaactagtggacaagtcttgctctacttcttctcatgatgatgaacatggggtggttgtggtgtcgtgcgacgtggtgctgttcgagcacttgct

SEQ ID NO: 71579 - DNA, 394 bp, Glycine max
agcatgaatatgaacttcatgatgaatagatactgtgggaatgccctgattgtgagcaggggactcttgtccttgtacgtgaacataagacgttatgtatatgccttcaataacaataatggaagaattatcattgtatttagaatcaggtaccaagctgatctgattgaatgagaatccaatgttaacctcagacgaccatgtgtacttaacacatatattgtacatggatctatgactaactggtatcaatataagctacgtatctccgtacattcttatgacagctacaacatcaacatcgacattgccatctaaacggtcttacttgcatacatctactgcatgtgatggccgaaaatgttgacgatcatggacgacaagtctatcactc

SEQ ID NO: 71580 - DNA, 77 bp, Glycine max
tcgatctagaggatccggggttaggtacacgtgcatgcgaggttatagctcttctatagctgtacctaaatgtaatt

SEQ ID NO: 71581 - DNA, 221 bp, Glycine max
ccacatctaactaataactaccaaatataatcttatggctgattgattaatctggacatgcgctattaacactgcataccgaacccatttctgcatgcttacttcattcactcacctaaaaatcttagttctcttgactacccattaaaccaccaattacttaacttgcactattatcaactctattcaacagcaattcatacaggtgcagccaccagttg

SEQ ID NO: 71582 - DNA, 218 bp, Glycine max
ggcttgcatacgaacttattgctatggaaagatctcaccaaagcataaatctatgatcgggtgctcatgtgtttgacgtgtagatccagtatgcgcattgatgattgcaacgagctcattatgaccattattaataccggatcatcaaacatccggactaattaacctatggctaagggattttaaccactggttggcaaattcaatttacattaaat

SEQ ID NO: 71583 - DNA, 336 bp, Glycine max
  unsure (1)..(336): unsure at all n locations
gtaatgattttgtattgattattaaagctatattaatcatcaacataaatctataaccggggactcatatgttggacgcgtagatccagtaataacatttatctttgcaacgagctcattatggacaatatttcataccagatcatctaatcgatccgttctatacatctatctgcaactagtatattacctactgttggctaagtctaatgtacaaaacttccatacagctatgaactacattcatatcactctacaagcagatangtacatgcttatactttagtagaaatgtacggacttatctatgctatcgagatgaaaattgagttatat

SEQ ID NO: 71584 - DNA, 307 bp, Glycine max
ctcatgcgttcgactgtaaacacggcaggtttaaggtaactgactcattgtgcattgatgcatcacgcaagacatgtgctaaaacgacctgaatgggcctcattatggaccgaacgggtattgcctgaaacggcgcaaggcgtatagagtgaggagctacatctatgaaaagccatcaagctattcaaacctaaggatggtagcacacttgctagcagttggacatgtcgaaccatgtcaagcccagcaggcatgtctataggagacgagagactcaacactgacagaacagggcttacctctgggc

SEQ ID NO: 71585 - DNA, 263 bp, Glycine max
  unsure (1)..(263): unsure at all n locations
cttatgcctcccacactcccatctcacacacccctagcatccaacaatgtcactgaccatgggcctccaacatatcgaagcccgactccctccgccccaaactaagcccaaagctaaagaccgtcgccacaaccaccatcgactgcagcaccaccaacaacaacaacaacaacaacgcgtcctccgacctgaaggcgttctccgacgcgctggccctcttctccatcctactctccgnccctctccacgtcggcgccgacatc

SEQ ID NO: 71586 - DNA, 133 bp, Glycine max
ctcactcttacgaccttaacacattcttaatactaactctcatccattatcatggaaagggtttactaccatatgaccttgcacttagtatgctactttccattacacaatatattatactgctcgactaaac

SEQ ID NO: 71587 - DNA, 233 bp, Glycine max
accacgcgtacggccatgcataagagacgtttcatctaccagaacatgcacaattatatgggctgtggtcaataacatttaagcctccgtctatgtctatcatgagattgatgactcttaccagatccattgtcaataccttaaaagctgagattatacaccactgacgactcattcaactacataatgatgaaggctcatgtcactgctaagactatacaccatatgacatg

SEQ ID NO: 71588 - DNA, 200 bp, Glycine max
cccacgcgtacgaaaaaaaaaacaatcatattaaaaaaaatcaaacaatatcatcaataagggaatctaaaaaaaactataaagcataaaaataaaaaaaacctaaaaataaaaaaacaccaatcactaaaaaaactaaaactattagcaccctttcctcaataacacatttcacatctccatgctataacacaacaact

SEQ ID NO: 71589 - DNA, 329 bp, Glycine max
cacacacattcattccttctaaaatctcactaatcacatccaacctatggcaggagcaggcgtcacatccataacgactatgcttcagaccatggttcccaagaatgcaccgaatctcacctcctcgtgtaggtgtttccaacagcactactaagatctcatttgctggctcaagtaccgtaccatgcacccggattcagaggaacaggaatacatcttcttccattgtggcagctgcatctggagatgattcatctgatggcaccacttaccttgatgctcggaccattgctgaagctctcattggtacagctcttcccatcttctac

SEQ ID NO: 71590 - DNA, 461 bp, Glycine max
cccacgcgtccgcccacgcgtccggtaacatcataagatggcagtgttgtctcatgtttggagttgcatctcacactccactgtcttcacttcaactgcaccttcttcatctctatctgtttcaccaaccactttccttcaattgtcttcgttctccaccgagtcaacgtggaacaacattcgtagaacaaacctttgttccaacgttaattctcttcgatattctgggaagacccttttgcggcataggcataaatattacaacccttgttcttcaatggcttcatcgttggatgatagtggtaaacgatccaagagagtttggatatggaccatcaacaagcatgtcatgactgcagcagtagagagaggatggaacactatcgttttcccatcacaccatcgacaacttgctcatgattggtcttccattgcggtaatatgccctctttttgttaatg

SEQ ID NO: 71591 - DNA, 108 bp, Glycine max
cccacacgtccgaccacacttccgaccactccttctatataaatctatatctttcccccagaacattcattttcaaactttggattaaccaacacttctacacattat

SEQ ID NO: 71592 - DNA, 451 bp, Glycine max
gccaggcttgccgccagatgaacggtctctcgaagggtgtcaatgctactgctaagtcaggggctgggtgaatccctataggaatagtgataaaggcagcaacatcgggtcatctaccgaattatggaatagtattagtgagtctgggaagcactgatgttcatacttgttacattcagagcattattctatactattcttgcacttgacaatactaagaagagcgatgactatcgtcgcagcagtccctttgaactctgtgagctgctaacatcattagtacgcgcgtggtagcaatgagttgcatgtatcaaggcaccataatgtgtatgcatgtaaacatcactttacatcgctagtctacttgtactatctgctcgtatgaaaaaagtaagagtagatgtttactgcagccgaatcatattcaactgaatgtggatactattattac

SEQ ID NO: 71593 - DNA, 400 bp, Glycine max
cccacgcttccgtccacacgtccgtccacgcattctccgtcatacaaaagcatgggtatagtttactcacatagctcactgatgaaagctacctgagatgccttccggatggaaatctcttgcaaaccaagatccacaatattggggcaacgcttgttggtgttgataaatttggtaacaagtattatgacaagctcggagacacacagtatggaaggcacaggtggattgaatattcagagaagactagatataatgcctcacaagttccagctgaatggcatggcttgcttcacttcataaccgatcacacaggacatgagcttcttttacttgaaccttaaatgtatcgtgttgaacacaaataacatttttcttgggaaggttaacagtatatcta

SEQ ID NO: 71594 - DNA, 118 bp, Glycine max
cacacgcttccccttacaatttgttccactttggcgcctcatgcctaacacgctgcccaagcctcattctttctgtattctggtccatatatgacttcatctgctattgcactactac

SEQ ID NO: 71595 - DNA, 231 bp, Glycine max
cccacgcgtccttctatatcaagtatagtgttgactatacctaaccaattgttcagatggtgcatggcattatactgtacgtctatatctagattctaatttctgtcaactcataccttttttaatcgatacgtccattctctatacaattaaatcatctctcccattcggaaatggcgcttctttagatatatcacacatgcacgatgctctcattcgtgctaatccagc

SEQ ID NO: 71596 - DNA, 285 bp, Glycine max
cccacgcgtccggataacatttcttattcatcattcgtggaatttgatcaaggggctggtggagatataaatagatgtaatgcttctttagctgtgtctgatgtatatataatgacagcggctgacattactcacaatgtcggagcacatatatattcatatttaaaggcaacaagttactaaagagcaactatatttaagatcaatgaaggcaaacatccatgagcctcatatattgattcattcgcaggtagaggtccaaacaaaagcactccaaatattata

SEQ ID NO: 71597 - DNA, 292 bp, Glycine max
gccacgcttaacactgaatcttctgagtggttccacttcatctttcagctcttgcatcacggtaccaccacgtcgtattcagggccattagcttcaagtcattgatatacaatcacacctgttatgcttaatcaagttgtcaacaaccacagctactaacatcaagacactgtaagttactaatgatctcatatcattaagatcatctacttatatcatctctgatttataaaatttacagtcttatgattatgtatgctaagcactaaaattacgattattaagaggtgca

SEQ ID NO: 71598 - DNA, 284 bp, Glycine max
cccacgtgtacggtttagatcgtgagttacgcccttttttttatatttttttaggggtattttttttgtattaatgttatttaaattattataaaaaaataaactattaatgatagaaattttatatatttatatttaaaatttgataattctcatgaaaataggtaagcgactttatattattatataatctatttttttattataaaaaaaatttaatgctatggtatttgactttttttatatttagacaaaatattatgttaaaaattataagactattt

SEQ ID NO: 71599 - DNA, 301 bp, Glycine max
tccacgtttcatgtaagagctagttacgtttttcgttatcatgcctatgcatatgaactgggttcatgaatgtagtatcactgccacatggttggctgcgctgttagtgaagatgcagatgatcagacatatatctaacttcagaggctcatgctcaaaaaccatgtacacacttagtgcgagtgacctaatataatcaggtaacataaagcaatctattcctgcaagttcgagagtctaagacttgactagatacttcacaagagatcaacaataatcaataactatattatattgaagc

SEQ ID NO: 71600 - DNA, 144 bp, Glycine max
attcgacccacgccccacgcgtccggccacgcgtccctatcatactttcaaggcagaacgacaaacattttcaagtgtcggactgtgtagagaacaaaatctcttgatgccatttctgaaatacatcatctatttatatttaca

SEQ ID NO: 71601 - DNA, 371 bp, Glycine max
gctcattatcttcataattatagatagataacttaaatgtataggttgagtttgcatgtgaacagacaagttcaaggttgatgacaaacaaaacgcacgtttgaactatgaattcaatttttttttgcactaagctaactatatttattaaccaaatgttaattatcacgattgttgcatgggtaagaagatgaaatggacagcactttatgattcgcttttgtgcttacaggttaatattggtgcacatcacagactcttggacggagcaaccgttgcaagattttgcgacgagtggaagcaattaattgaaaatcccgagcttcttacgctgcatttgaaatgaaatcttcattacatgaatgaagaat

SEQ ID NO: 71602 - DNA, 318 bp, Glycine max
ggaatgttctagttacatgccactttcttgatttcatggagttgtatctggtggcttggttgacgtcaagcaaattataccacatcaagagctttctttcattaatataaaaacaaagtggtagccatctatcactgtattgctttccattgctattaccttatggacgctataagctacagcatatttttcaaccattaaattttgcacggatatcatctggatttatcttaaaatcctgccaatggaacccggaacttaaccttaaagggacccgaattaagaatgtgccttattcacattttttacacaattttt

SEQ ID NO: 71603 - DNA, 172 bp, Glycine max
gcgacatatataactgcttctaatcatttaaaactcactcggaacatatctccgaatcgggccatacaaaaaacaaaaacatggctgtcttcatcggtaacaaacccggtcctttatatcgcttatatcgagccgtcgctaccctcaacttttactgtatggactcagcgta

SEQ ID NO: 71604 - DNA, 280 bp, Glycine max
taaaaatacaataaatatactaacaaaaaaaataattaaaaaaaataaataaacaaaaatatagaacaacaaataaagacctaaatacacaaaatacttttaaaaatattcaaacatctaacagacttaacaaaattacttttcaaacataatcttatttcatatagaaaatatattctaatattcactataatacaatctatatcactcatatctattataataagctatctaaaaatttctttttactataactatgctctatctgatcttaacattt

SEQ ID NO: 71605 - DNA, 295 bp, Glycine max
atcacacgtcccagaagacacctccaggtttggacgaatgcgtacagattttgagccgctgcaactaccttgtctctgacgatatgtacgacaatgccatgtgctgcatgtcttaggaagttgcttgtggctgtactgagatcctcatgcgataccaggagttggacattgagattgatttacgtaattaatttctatatatgcttaatctactcgctaatgacttttgatgttgcatgttatctatacatttggatatgatcatgtgatatatggagatggaacgaccctgctt

SEQ ID NO: 71606 - DNA, 341 bp, Glycine max
cccacgcgtccgattgcagcatatggaatgattcttatacttacatgacgcatgcatttggtatgttcacttccagttgtatcttgtatgtttagataaactcttgctatttgacaaagaaaaaatgaaataaatttaaccacttgtggatacttatctggaacagggagccttgttcttttattgttttcctttggctaaaatgtaacttttgatcctctatttttgcaaatgtgtaatggtagtcctattgttgattgagacatttgtctccacttttaaaaatcctactttaggtcctatttttaatgaacatttgtcccacttttatatctggatta

SEQ ID NO: 71607 - DNA, 255 bp, Glycine max
taaaaatactaataataatataaaaaaaagattaataaaaaaattatatactacatcaatatagaataacaactaaagacttaaatacacaatatacttttacaaatcatcaaattctcctaaaattaacaaaatcactacacttactgaatcttattacatacataaaatatatactaatattcacctatctacaatttattttattaacttaaaatattctcagatatctaatactttcatacttctaatact

SEQ ID NO: 71608 - DNA, 233 bp, Glycine max
aaaaatacacagtgagctctagcttctagccctatggcgctgctaccgattttatctatgcggattgagtgaattgcgaaatgcactggaaagcttctgagaaactcattaggcactgaaaagtcgtcagaactgatcatgttatgactaataggatcaaagataaaggctagactggcactattaagcgagtcatatgctctcataatcgtgtcattggcgtaggtaaaaat

SEQ ID NO: 71609 - DNA, 291 bp, Glycine max
accacgcgtccgcccacgcgttcgtgttgatcgagataactagaaacagtgtgatgaaaaggaatgtccttgatttcttcggtgctacaattgtggtagcatggcaatgccatgcgtacgatatgttccctatccgaatgaacactggctatggtgcccgtactccggaggtgaaatgcgcaagttggaggcttgctgtggaagcacacaacatctttggctttgagaccattcctgaagagtgcgttgtagcaacaaaggaatacattcatggcgaacaatatacatcag

SEQ ID NO: 71610 - DNA, 245 bp, Glycine max
cccacgcgtccgcccacgcgtccgtgttgatcgagataactagaaacagtgtgatgaaagggaacgtccttggtttcttcggtgctacaattttggtagcatggcaatgccatgcgtacgatatgttccctatccgaatgaacactggctatggtgcccgtactccggaagtgaaaatgcgcaagttggaagcttgctgtggaagcccacaacatctttggctttgagaccattcctgaagagtg

SEQ ID NO: 71611 - DNA, 297 bp, Glycine max
gagataactagaaacagggtgatgaaaatgaaggtccttgttttattcgttgcgacaaggttggtagcatggcaatgccatgcgtacgatatgttccctgtgcgaatgaacactggctatggtgcccgtactccggaggtgaaatgcgcaagctggaggcttgctgtggaagcacacaacatctttggctatgagaccattcctgaagagtgcgttgaagcaacaaaggaatacattgatggcgaacaatatagatcagactgcaaaacagtgaaccaacaagcttactgttatgcc

SEQ ID NO: 71612 - DNA, 155 bp, Glycine max
gatacttctactactatacgatcctttgattactcactccaataagtacttacatctatgggacttcaccaaaggcctaaatacatcggttcttattcagttctttcattaatattcaactgtactcatttacttttcaactgatacttattcta

SEQ ID NO: 71613 - DNA, 167 bp, Glycine max
tcggatatgcgtcttacaaacatatctcttttattactcacaacgggacactactgtgtgggggtgacattgaaggatgatcgagcacgaggtgttcatctctcgttatgattaaatttaaaattcgtaattaacatcttttttgtatgatatgacaagagtacttt

SEQ ID NO: 71614 - DNA, 177 bp, Glycine max
gcgacaaaagcaatacactcaaagatctagaataatttaacgatgcctcactataacgataaatgcggcaatacccgcctctctgtactgcacttatctataacgactcgttccaaatctctggaacgtgccttcagcagatatggaagagatcggggtgacgatataaaacaatga

SEQ ID NO: 71615 - DNA, 154 bp, Glycine max
aacacgcgttcgtctacgcgttcgtatacacattctatcacgcgtgctaatattcacaggagttacaattaagattgagaagggagttataagactgatggaaatatgagcattattatacaatgctcatgaattttttatattaaatgatagt

SEQ ID NO: 71616 - DNA, 339 bp, Glycine max
accacgcttacgaaagacaccgttttattttgttaaaaatattcaataaaccgtggtagggctcttaacttgcgggttgcgtgaagaattgaaaattttcgaaccctgttctttcttatcttttaaaaaatgtgactgttatagtgagcttaacaaccttcggaactatatcgtctaaaaaaaccaaaaaaaaaagctttgaaaatggctcaagaatcactcttagaaacctccgatatatcgcccacttcgtctactgtacaatcgcaaccagatccatatctttcaatgaacgtttcttttaggcggctcaacgcacaagctccagaatttgtgccc

SEQ ID NO: 71617 - DNA, 138 bp, Glycine max
gcaagctacgaaaacattgttttggtgaaaaaatatctattataacgggatggttgaattagttgtagactggaaatagaattggctaatctgttaactgaacactacctattcgtttataatagtgtgactgtatta

SEQ ID NO: 71618 - DNA, 137 bp, Glycine max
gccactcaaacgactaccattctcatcttggtgagcttaatacaccaatcggggttagggctacaaattacggaaaggtacactcatttgattctatggcgactatcacaatttacattgaccatggcctctttgat

SEQ ID NO: 71619 - DNA, 344 bp, Glycine max
agcacgtctacaagtaccccaacctcgcattcttcaactaccattgtccacatgcacacgtgaatccaataaaatgagatcagattatctgaatgattgctccatctcttgctctctactactcttctaaccttcatattatatgctctcgttgcttattttctcaattattattattctaatggtaatcatatactttcacttgatattctaattgacctctatgtctcatgctattgcttggacactaactatgtaactctaactgcctccactgctcaataattacttatattgacgttccataaactataccattccttagtattcattcactgttcatc

SEQ ID NO: 71620 - DNA, 255 bp, Glycine max
agcatacacacttacacaccaacattgagacattcttatattgcagtggccacgtccttgggtcctgaatgggatttattacttacataccctttcattcaaaaagttgcagcattggatacaacgtatgtactacaaccatacgagaatggttgagtccttgatgatgatttttatggtaaaccaactgcacactattatgattctgaattatcactaatctcaagtggtattaaaattgcaaattacatatat

SEQ ID NO: 71621 - DNA, 244 bp, Glycine max
atatgctggcgaacacaggaacgtggagactttcaaatacatttgtagcatatggccatgagattcaaagctgattaataacaatcttactggacgattcgaaatcttgcattcttgatttcaggataccatctacttatatacgataatggtatttgacatgacagtgacaattcagaactattatacgcacattacaatgattgtctactatgacttaactagggatgctgttctaatgaca

SEQ ID NO: 71622 - DNA, 355 bp, Glycine max
gccacgcgtacgcaaactggtactggtgctcatttgtttgaccaaggactcaacattggggttggctgtcatttgagaaaactagctgctgcatttaagcatactgaggaaaaagtatgctgatttattgctagtagagaagatttaatctcttgggcgcaatcaaatgctactgcagctgctacataaatgatggtcaaaaatgctcacgtgacattcactctggtacgttatggataatgatactcgacaagatatttatgacttgaaatgtcaagatgtgagagtgttgaaaccacatatgggatgaataaacgtacctcggagtgagcacattctgaaatgtaatattttt

SEQ ID NO: 71623 - DNA, 88 bp, Glycine max
gccacacgtacgacaacgcgtactgctattcgtgtggataacgtgattctcaatgatggggctttaagcatctgtaggtggctcttta

SEQ ID NO: 71624 - DNA, 92 bp, Glycine max
accaaatcgaagaaaagggtgtatcattttggggaactaaatcaaaatctatacgcgggggttgttgacttcgacaagggacacacctttgc

SEQ ID NO: 71625 - DNA, 152 bp, Glycine max
acacgcgtacgagtacaggttcattgattatttcacgcacgctatgtcttatgggaagagtggtagatattctcaagggatgaatttgttgacggcttagagcaactagatatgctgacacttcaatttgtctgaataggctaagatttgga

SEQ ID NO: 71626 - DNA, 196 bp, Glycine max
cccgtgaaggtggttataaccgcaacggtggtggatgatgatatggtggcggtcgcggccgatatggatgtgatggaggttatactggcagtgggagagaccgtgaatatagctgtgatggtgggtcccactactctagaggaggcggtggttcgcatggacgaagctctaggaattaacattacgcgaattttta

SEQ ID NO: 71627 - DNA, 411 bp, Glycine max
aaaaaacatacgatgtatacctacacatttctttcaaaaaacgttactatattcttgtgggggggattcttaacaagaaccctcttgacctaaaaccgtccttgttttcaccccaacaccagcaagggcccactgtaactactccacgaacagcttctttcaaatgtacggtcaagctcaagggtcattctactttgcgggtacagactctgttactgcattttaccccagctctagcggctgtatctacccttctagcgtcagctctgaaggcactgctacaactcctgtgactactacaccaacaatgtgcactacttttacaactgaaactccatcaactagcaccgtctccggcactgtcaccggcaccaccactggtactacttcatacagcacaacacctggagt

SEQ ID NO: 71628 - DNA, 121 bp, Glycine max
ccgaaaaaaaaaaaaaataaataaaaaattttcattttaaaacataaaaaaaaaaaaaaacgcccggtttttaaaaaaaacacccccccctaaaaataattctaaaaatataatcctaaac

SEQ ID NO: 71629 - DNA, 62 bp, Glycine max
  unsure (1)..(62): unsure at all n locations
ttatttttaaaaaaaaaaaaaaatnntaaaaaaattaaatatataataaaaaatataataat

SEQ ID NO: 71630 - DNA, 154 bp, Glycine max
ttaataatttaaaaaaaaatttatttttccacacacaccaaaaaaaaaaacacgaccgttttttaaaaaaacgtagccccccctaattttattttttttttttacaacttacctatcttcccacccttctttttttctattctcttatcttcct

SEQ ID NO: 71631 - DNA, 419 bp, Glycine max
accacgcgtccgaaaaataaaaaatttttatttttaaaaaaaaaaaaaaaaaaaaacagaaggtataaattaaaaagaaggaaattatattaaaaaaaaaataaatattataaataaaaaaaaaaaaaaaaataatataaaattataatatttttatatcctaatatctataaaaaaaattaatctcacactaatttaatgatttgcatctcttcccctttttagatttatatatatttgcaaagatttataatcattcatttttttaaaagctcactttttttaaaatcttaagtttgatcatatatgaattttaacattaaattcacttctttattatttttatcacatttttaattttatttcttattgcccttttactatataatctaataattctccctcctttttttttttat

SEQ ID NO: 71632 - DNA, 146 bp, Glycine max
ctggcaaaatgggaaaatcggggggttgtttcagactggctgagcatttgtattggtgataggagtagctgtatgcagaaaaataaaagaaaatgaattacttgacattgtgtaaaaaaacatgacaaagccaactatgtattacc

SEQ ID NO: 71633 - DNA, 416 bp, Glycine max
cccacgcgtccgcccacgcgtccgatttttatttctatgaacagagtgatgagggtggaggtacttgttttctgggttgctacaattttggtagcatggcaatgccatgcgtacgatatgttccctctccgaatgaacactggctatggtgcccgtactccggacgtgaaatgcgcaagttggaggcttgctgtggaagcacacaacatctttggctttgagaccattcctgaagagtgcgttgaagcaacaaacgaatacatccatggcgaacaatatagatcagactccaaaacagttaaccaacaagcttacttttatgccagagacctcgaagtccatcccaaggacacatttgtgttcagtatagatggcaccgtactctctaatattccatactacaaaaaacatggata

SEQ ID NO: 71634 - DNA, 347 bp, Glycine max
cccacgcgtccgcttcaaaccccaaatcccctccacctccactttgtctcctccccggtgaaagtcacagaggagtgttgccgccgcatggagcctacactcttcgccctaagtcacacccaattcaaacaaccccaaaatcccaattcgcaagaacgactttgacggcagatttggggatgaaggctaatttctagcaaggatcacgatgattcgagaaaggagaatgcgctgccagtgcggcaacggtcttctatttatctgttattatcatgattttgcttgggttctcttttagatcttaagcaagcattgatttgggagagggcgttcctgtgttgggtcgt

SEQ ID NO: 71635 - DNA, 335 bp, Glycine max
cccacacatactataaaaaatcttttttttctcattctacactacgtctcaagcgggcatatattcacagaattgcgttcttcacaaaaataccatactctcttacatctaagtcacactcatgcagacagattaacaataactaataccaataaccaccttcacaacaaatcagcacttgaaagctataacttagcatgactcactactttttaacaaattacaatcccaaaccatctcatcaacaaaattatattatacacttaataccataattatccaattgatttcctttacatctttcactaccattattctcataaataactttataa

SEQ ID NO: 71636 - DNA, 394 bp, Glycine max
cccacgcgtccggttacatgggttgttttagtaccaacccataccctaacaaggggggaatgtgacacggaccggcttgagttaatttcattcagtgtagcagccagcagccataatcaacgtagcaattgcattaccaggttctgattcgttacatcagacaaaggaaggggtttgggtgagacctgacacaaaaacgttgcggaagcttctatattatcacctaaaaacgctaaccttctctttcacagacgacgacaccgccactaacggatctgattccgccttcaacagattcaccactctatctcgctgctgactctacttctcaacccaatctgacgatgctactgcaatcaaaaacaaggttgaagacataatgccaatcgctact

SEQ ID NO: 71637 - DNA, 420 bp, Glycine max
cccacgcgtccggtgagtttgttgatcgagataactagaaacagtgtgatgaagatgaaggtccttgttttcttcgttgctacaattttggtagcatggcaatgccatgcgtacgatatgttccctctccgaatgaacactggctatggtgcccgtactccggaggtgaaatgcgcaagttggaggcttgctgtggaagcacacaacatctttggctttgagaccattcctgaagagtgcgttgaagcaacaaaggaatacatccatggcgaacaatatagatcagactccaaaacagttaaccaacaagcttacttttatgccagagacctcgaagtccatcccaaggacacatttgtgttcagtatagatggcaccgtactctctaatattccatactacaaaaaacatggatatggg

SEQ ID NO: 71638 - DNA, 197 bp, Glycine max
aaatcttctccttccctacaatcttttaccgattatctatggggttggcagacatgcttgtgataacagagcttcacgacccatatgctcggaacgtaacatccgtatttaatgcacaatcttcattgcgcagactggacccttgggcaccatttgtcccatcttatagggtcacatatccatctagatgctgttgc

SEQ ID NO: 71639 - DNA, 244 bp, Glycine max
cccacgcgtccgcttaactttttatcacagaccttagttataacatgatcagtgggggtatttttttacgatggggggccattaccttagatgaactccatttaatggcaaacaaattgacacgtccatttccgactattgtcaatattatcacaaccctcagaaactataatatcgaaggaaatcaattatttggcaacattccatcggacattgggataatgactcaatttataaaaacata

SEQ ID NO: 71640 - DNA, 377 bp, Glycine max
gcctaccttccgactcgcgtcgcactacaaaccctgactctccaaacccgacggcgggtatgttctaacgagtgcgtctgcttacacctctccctcacacccaacatcaaactcacttccatagctgctgtttttctcaaaccaacaactctgtcgactcatcacttcattacccacgtcgaggcgtcaactgatttgacgcatgaggaggacaccttctgagacgcacacaggcacagcttcttatgcgacacttaagctctctgtcgcgaatattccgtgcaacgtcgacagcgcgcagatagacgagctctatgagagtgctcgtaatgagcatgtggatgacagcgatttatgataagactactgagaggagc

SEQ ID NO: 71641 - DNA, 351 bp, Glycine max
cccacgcgtccgattacgcgtaattttacgctttcggcgagatacattacatggaggggtatcactaagcagctcaggataatggcgctgctgagtggatcaactttctgtactacattcctttctcacaagaactttgggtttacatactcagcaaaatcttcctttgttggctgtaaattgccgcttacaaagctgacattatcttcttgccatcgaactctaatgccggcatcatccattattcgctggctgcaagagtatactactggtacccttgtcacataaaaagacctgagcttcacgtgcatcgaaaccaaaccgcgattcaaacgcatggacatttgtaac

SEQ ID NO: 71642 - DNA, 196 bp, Glycine max
gaggaactacctgggaaaccgactatcttttgggtgtctactgaagaaatgtgaaagccggttttattgccatgactgctgcgttttcaatgtcatccactagtaatagcactgttgaatgtacatatgtgtaaggctatggatctcaatggatattgggacttctctacgtattgaatttggaataaaatagaac

SEQ ID NO: 71643 - DNA, 287 bp, Glycine max
agcaccggcaccttgagatcaattttttgctccccgtgaaacacaataaatggcggggtttgatgcactggctgctgcacacatccatgtaacatatgctgctgaaatgtgctcattcacaataatgagtttattacaatctatttacttgccatacactatattgagtgtctgttaactcgtacaggtttatacatcactctcatgcatacatggacatgcaaaagtgcactttattgctattgatattgacaattgaaaaaagcttgaagatattgttccatcat

SEQ ID NO: 71644 - DNA, 107 bp, Glycine max
cgaaaacgtcttgtgatacaactttgtcggattttatatagaacttgaatttgagtgtgaggactacattatggttgaacatgttatgattattagtggtggttgcc

SEQ ID NO: 71645 - DNA, 280 bp, Glycine max
cctttaaacattcaatgttgcgtggaagagagattctatccatgcagttatcaaaaggagctggagtccctataaatcacatgttgcattctcaacgccaaccacagcctgtaaaagacacctctgatttttaacgcacatcactgtctgaaaaagacacccgtgaggcatttttgattgttgcaccgttgttgatgacagtgtcatttgcacctggtattactgtaccgggaggtctatatagctctgatgacccaaaccctaaaattagaggtactgc

SEQ ID NO: 71646 - DNA, 178 bp, Glycine max
taccggaacggaaggcccggaccgacccatccgtccactcatatgccaacccttccgatttatttggtctcgttccaaaccccccaatagggggtgttttactcgcaggcaattcacttcaagatattataatgtcagcagcacaagcgctaaacagataacagtacgtgtaccttgc

SEQ ID NO: 71647 - DNA, 411 bp, Glycine max
cccacgcgtccggagatttctgctttttctcaccttcctcgtcggtgctttcaggcgggtgtcgatccaaacttcggcttcttcttcttacccagtttgaaaatggattttatcgttttgtgcctgatattgctggtgagtgcgcaactgttctaccacttctacagacttatcaacattttagtcacgcgtttcgatcgcaatccttctaccaccaccgccaccgctaccgccaccaagtcctccgatcaagacgcgccttcctaaaaggactcttgaacaataattcaattccaccagatccgaaccgtcaagaagaccctctgatgtagacgcaaaaaactacggatccaatccaacaatggttattgtttgatgtatgatgttttacgttactacctacccattact

SEQ ID NO: 71648 - DNA, 74 bp, Glycine max
aacaatatgacggatgcgagtcaaccgctagaactactacttgaacacagtcagtatatggagcttaagaattc

SEQ ID NO: 71649 - DNA, 119 bp, Glycine max
gccactcttacacccacgggttcctcctctcctccgatatcaatttaaaacacatccctggtatcatatggaaggacccggagaaagagactctttttgaccatacaaccaccacttct

SEQ ID NO: 71650 - DNA, 124 bp, Glycine max
ggtatttgtacacactctacctgtgaacagtttcgcgacccgaaagcccttattgtgaaagtacttcaattaaatggctcttgtacatataaaattaccctttccttctacttgataagccctc

SEQ ID NO: 71651 - DNA, 105 bp, Glycine max
gttcggccacgcgttcgggcactcgtgcgcttaaaacctctgtcactgtcttctaaaagctatctgtgtccggtggtactaagtcttcaacaagcaaagtacatg

SEQ ID NO: 71652 - DNA, 263 bp, Glycine max
gacagcatactggtggcaccgtacttgaaggtagtgacactgaaagctatctgagcaacggcgcgaaccttcagagagtgggttcaggtcgagtaggcttagcgagacggccaggaattagggtgccacgatgctgaagtcgaactttgtcaacgtacttcaaggttatacatcatccagtttgaacaacgcccgcttaaggggtctagtatgacacatggtgcacgcgatgactcaatgcctagggtctatcggtggacatg

SEQ ID NO: 71653 - DNA, 127 bp, Glycine max
tcggccacgcgtccggccaaacgtacgctttaaacctctgtcactgtcttctaaaaggtatctgtgtccggtggtacgtagccttcacccagcaaagtacatggttgacttggaaattcaggtcccc

SEQ ID NO: 71654 - DNA, 320 bp, Glycine max
gtgaatcgtaaacccatgggaggttcatggcctaaggtaacgatattcgagtcattgttagtatggaatggaccgattgagataaaaagagtgttaatgaggattcaacgggtattactagatgtataactaagcagaatcgacagaatactcctagtcgattggaaatgagaaaatactgaccctcgcgttagcaaacatacaattgacgcagaaagccagaaatggatcaaattgaacgcttgcgtgataccctatgaaccaaagaacttcacatgattcacgatctatcttacttatctatatagatcgatctatct

SEQ ID NO: 71655 - DNA, 293 bp, Glycine max
  unsure (1)..(293): unsure at all n locations
tgctcgtactcggtctcggacattcccgggntcgactccacgtcgtctcgtccccttctctccaaggaatggcgttatgttgccacatcggaaatgcaagatttcaacctctttattcgctaaaatnttgcaatgttctcaatgtgggtatgttctatctttgcctcttcttgcgacccgggacctgatatatcttgtacaagtctttcaatcagagcgaaccactcaattcgcctagtgtttaacatggaaaagcggaattttgtctctatcagaaaaagcgatttatattg

SEQ ID NO: 71656 - DNA, 85 bp, Glycine max
acacgcgttcgaccactcgttcaatcaatattaattttacccctcctaatacctcatgggacatggcattaacactcgtgggtgt

SEQ ID NO: 71657 - DNA, 382 bp, Glycine max
cgagataactagaaacagtgtgatgaaaatgaaggtccttgttttcttcgttgctacaatcttggtagcatggcaatgccatgcgtacgatatgttccctctccgaatgaacactggctattgtgcccgtactccggaggtgaaatgcgcaagttggaggcttgctgtggaagcacacaacatatttggctttaagaccattcctgaagagtgcgttgaagcaacaaaggaatacatccatggcgaacaatatatatcagactccaaaacagtttaccaacaagcttacttttatgccagagacctaggagtccatcccaaggacacatttgtgttcagtatacatgggaccgtactctctaaattttccatactacaaaaa

SEQ ID NO: 71658 - DNA, 240 bp, Glycine max
  unsure (1)..(240): unsure at all n locations
cccacgcgttcgtatattccagggacaaagatggtgtgtaccggtcttaataaaccttaggaacgtgcatatcgtattgcatatgttatagaattcactgcataaagattaaatggtcatacatgcagttatgcactttactgtcataggtgtggagatttaattctcagacattttatactgnggtgcaatgaatactggatcaacatattgagtagactggattgacttgcaacgcta

SEQ ID NO: 71659 - DNA, 221 bp, Glycine max
gtcacgcttgcgagtactccaacaatgaacctacctatgctagatcttaacgagacatgggccattagctgctgctcatgcagaatatcttaaattcaaagggccagagacgtactgacttgcatccgtcatgccaatgacatgaaactcttccactgtcaacgacgcagccataatctacatgacagctaacacttacgacctcaatgaatgacctagta

SEQ ID NO: 71660 - DNA, 216 bp, Glycine max
ctcacgcgtacggttacagtttgggaaaatcatgtagcacttgaaaggttagtcgcaacggttccaagagtagtcaggtgaagaaatcctggatccctttgccagcaaaaactcgatcagaaagatcggccaaaacggcattgacgcttgaaccaataataacgctgaggacatcgcccgcggtacccgaacaacatagtcgataggagataaagg

SEQ ID NO: 71661 - DNA, 314 bp, Glycine max
cacgaattctaaaggagctcaacaaatgttgcccactatatgtcatagacctctatcctgatctggttccttagaacgtagagatgttgaggaatctcgctcatacatgagctcttctcctaatctagggtttgctgtcaagcagctgacacctactgatttgaggagttcattgctatctggaagaaatgaaacaggaagcaatcctgttgagtctcctgttcaggtgaaaaggaaccttggtagtcatcgcaattcacgaatttgtcatagttacttccctgaaggacacatatttgaaagaataacatact

SEQ ID NO: 71662 - DNA, 185 bp, Glycine max
cccacgcgtacgaccacgcgttcgttcactcttaagtctacgcttccagatacgtcatcggtcatggttttaacaatcatggggagtactgtaattaatgctataaactgcaatggctccattgacagataataacctcttcttatttagatgatacatgaatccattctcgtcattaccacctt

SEQ ID NO: 71663 - DNA, 204 bp, Glycine max
cccaagcgtacattccaaacgtggtcatttgcagttactccctaattataggggacctggcaaattccatttgaggccggcggaaatatcgcgatcgacactttttccgttaagattatcttgtgctcatgatacgttgacgcgcacgaagatcttatccggaatgggatacctattcacgattatgactgccgatattgatga

SEQ ID NO: 71664 - DNA, 247 bp, Glycine max
gctttcttctccatgatcatgcatcaccatgcatgatggcctattaatacactaccctatgcaccaacaccccaaagatctcttcctcttcaaactacatggaaccccgctcgacctccctcagacgaagatacagcacttcctgcacgagctggtaaattgactattgtggcattcctagaggcccccgaggatgccgatgttcggcacctgacggtgacgatggccaaggaagcctcatatgact

SEQ ID NO: 71665 - DNA, 270 bp, Glycine max
atcgagataactagaaacagtgtgatgaaaatgaaggtccttgttttcttcgttgctacggttttggtagcatggcaatgccatgcgtacgatatgttccctctccgaatgaacactggctatggtgcccgtactccggaggtgaaatgcgcaagttggaggcttgctgtggaagcacacaacatctttggctctgagaccattcctgaagagtgcgttgaagcaacaaaggaatacattcatggcgaaccatatagatcagactccaaa

SEQ ID NO: 71666 - DNA, 181 bp, Glycine max
gacacgcgtacgtggatatgtactttgaattcaaatgtactattaacataaccggctccggtattagtttactgagcaagaccaacaacagagtggtacactatacacgcatacactgactagggggactgaaagctatacatcacgaagactctttacatattccgatgagcactgacaa

SEQ ID NO: 71667 - DNA, 149 bp, Glycine max
gtttgttgggagctataagctagtttatcgtgaggagaatatgaagttgtttgttttctttagtgctgcaaaaagtttggtagcatggccatgccatggcgcaggctaccaaaggtttcctcttcgaatgaaaactggctatggtgagc

SEQ ID NO: 71668 - DNA, 200 bp, Glycine max
cccacgcgtacgaccacacattccttcactatacactacgggctgactcattccttatggggcaacttgtgaacatggatggccactactgtgatcattgctgacactagctctgtacctactaaagctcatgaccttgtcttatatcagtatcacaggtacccaccctgaccttaaccaccggccgcctacacgccaat

SEQ ID NO: 71669 - DNA, 460 bp, Glycine max
acgggaaggcctgcacttgcaccaatcaagataatcgcttttggctggcatgctcgggttttacaacacgagtgtgatcacttggatggaactctgtatgttgataagatgctacctagatctttcaaaactgttgacaacatggaactgcctgtagcccaagggtgccctaaacttgctcctcgctaaaagtacactgcagctagttatgataacgcattacatggcggtatctaatgcattttagcgaaccattgacatttggagatcctaaaatggaaggcagattctttacattctagaaataatcttaacttaagaaaaaatgaatcttccttaattttcaatggcactatttcgtccaaaattggcattgcactacttctgaataattcaattcatttaagcttcaatggtcgaacttatactcgaaaaaaggaatcagaagtgtggactattg

SEQ ID NO: 71670 - DNA, 124 bp, Glycine max
gtacgctttcgaccacacatgccatggttattaaaaacggactaagccatttcataggtgccatgatctacgcatgcataggcattactattattcatggtgattctatctatgtcccgtttga

SEQ ID NO: 71671 - DNA, 328 bp, Glycine max
cccacgcgtacgaccacgcgtacgatgtttatactatacgtcttgaccaatacctactgtgcgagcctaaaagcatgcatgggcactactgaactgcatggtgactatatttatgtacctgatcaacagcttaaccattactccatgatagtaccgcatcagggtaaactttaacaagggcaagcagattggtaacgggacgtggtcaagcatcaaggctttcgtcagagtagaaactccagcatgctcgttaacagcgacatgtaacacatcaatttgatcaagtcgaggattcaactggggaaaggatcagttgacaaggacactt

SEQ ID NO: 71672 - DNA, 214 bp, Glycine max
cccacgcgtacgacaatgcacgctttgttttacaatatcgtactgattatggtgctagagggagggatcagatcatgcagaggcactactgacaatatagctgattctattgagatatctcttgaacgtcttcaccatagactaaagctatgggaagatacggatgcaaacattgcagacaagtctgagcttgcttgtcctacactttgaatac

SEQ ID NO: 71673 - DNA, 318 bp, Glycine max
gtcatgcattcaaaactcaaaattaacagatctacactaaagcagagacatacacagcaggtatactttttctgattactttgtttttatttttattcattttactgcttaatttaatttctactgtcaatgattgctcaaaaagggtttctgttaggcttatgcactacatggtctcgttgtatagcactagcggactagtggaagttcataaattgttaaactagaacatgattgtattgtaccaagaataaacattacttcttcaaataaaaacagggcggccggtctaaatgatccaatcttacgtacgcctgc

SEQ ID NO: 71674 - DNA, 76 bp, Glycine max
gtttgctgttgtaactcgttcttcttcttttgttgttctgtgtttgtgtttgcggtttcgctcacctgaaaatgtc

SEQ ID NO: 71675 - DNA, 427 bp, Glycine max
gccacgcgttcgctttaatggtatttggcattggcactcttattctcgattgccgggaagatttcttgccattggttgagaatctttactgttgggacctttaagctctatgtcttacccgcctaccgatgtcttcgttagcaaaaacttcttacaccggggatggcaacaactttgattgattattatatcaacgtcgagctttgagcggctggattgctacaaggaatcaaacttaatcagctcaattctgcggattgttctgcttgtctgccttggaagcatcactacatctgcctatattgctgtgcactttctgaagctgtcatatcaagaatctttacaggatcctatgtattatgctctattgcggaatccacatgggaacgggacagcacctcaaagaaagcattcatctatcgtgact

SEQ ID NO: 71676 - DNA, 213 bp, Glycine max
gccatacttatggagactagcaatttatatcccatagactccctgaatttctacaaaagtgcaatgatttatgcatgcatggggaacactgacttggaatgctactgaatttatgactcgatcttactacatggctattgcttactgagtgtctaagatatcaactctacgtctgactactgtattgagataggtaatgtgactggacaagaa

SEQ ID NO: 71677 - DNA, 188 bp, Glycine max
attaggcctgcatacttgtaaagagactatagtagcatatgaaattgaataccgatgtgctcttgaggaaggagcatggcctgtagtcagtgccatataagccatatcttcattgcccaaatttaataaatggatgtattttatatgacacttaaagagaagtacgcttcctttaattactaaataaa

SEQ ID NO: 71678 - DNA, 334 bp, Glycine max
aaaatacacacaattaactacttttactttctatggctatcaacaaacttcaggacaaggtttatgagctttgagtgcactataacccaacaataaataatgccatttgcccaccatcaaatgcttctcaaaagcccacaccaccaactgcaataccaacagttcatcataccaattgaccacaccagccactcgaaagacgacacgacctactcttcagcacactcaacccacaccaaatcccacactcacctactccaaaacctacgtttccatctcctatgctttcttcatcatcatcaaacaaagcctcatgcccaacagacacattaaa

SEQ ID NO: 71679 - DNA, 308 bp, Glycine max
gccacgcgtacgattaaattatgggacatttatcaatggttagtgcaaaacaggaaagaggaaagctggtgcacggttactgatgaatctagaaagacactacgctaaacctgatttggtaatgtacactacaagcatttattgcttatgcaaaaataaacttctaggagatgccacgagatttgtactcttagatgattgataatggaaattccccgaatgttctcacctacactactctgatacatggatatggcatcatgggttatttgaaagaagcattttcctagttgaatgaaatgaacctg

SEQ ID NO: 71680 - DNA, 236 bp, Glycine max
aacaaacgttggagtacagagtcacatgttaaaaaaaaaggagtaactttggcgatagatgcaaagagctacgcattcatagggggtgctttattggactggaaccggaccaactgccttcttccaaggtcttggcggttgctcaaatgaatctaatgcaattaattatcaaactaccatgtgaattataatccgtgtgtgaaaattcctggaagtcaacctctttaagcgattta

SEQ ID NO: 71681 - DNA, 59 bp, Glycine max
gttacgcgttcgaacgagtgatatttaaattgtaaagcctgaatctggtttacggtgaa

SEQ ID NO: 71682 - DNA, 53 bp, Glycine max
ggatcccggtcgaccacgcgtccgccacgcgtccgaaaaattgatatttaatt

SEQ ID NO: 71683 - DNA, 286 bp, Glycine max
  unsure (1)..(286): unsure at all n locations
tatatggaaaaaacccccaactttcgtgaacttaaaaagggcccacggtctattcaccatcccanttanacacaacctctcccattccccaccatctatatctgtttacataagcgcaaatcacttcatatctttctttctttacattttccaaattttaattttccttttcacttgttcctcttatattttccataaacataaattcaccttctttcttaattataatttcttgccttttatccttattacatatcttaatatcttctgtaatttcataatttta

SEQ ID NO: 71684 - DNA, 351 bp, Glycine max
  unsure (1)..(351): unsure at all n locations
ccacccctcctaaaagcgaaagcggtcttccattgaacaacctnccccttttctccggcggtttctgacaggccgaccccttcantctttctcngctcttcattcaaacaaaccctctcactctctgcttcgcccctcttctaacaaaaacagaacctttttctctttcacttcgaatctgaggtgtgacatcaaaggctttgacttctatagccaccgttgttggaccatctagcgcgtctccgacatgagcaaagactccaccaattctcacaccaacccttcttctccgttgctctccctcttccctgtcacctcctcctcccaattccccaccaaaaatgccaaaaa

SEQ ID NO: 71685 - DNA, 276 bp, Glycine max
cacaatctctttcacttttttgctttcttgttaggtatcttagctgtctttttttttttaaactttcttttgccatatttcatattcaaatttgcgtcggcaggtagtgttttcattgggctttaccgttgtccatcacaagtgaagtactttactttttgatttattgaaataccctctcctattactactacaactttttatagattttgagtcccatttgatattttactggatttaccaagtagtacattctcaataaattgaatgaggatt

SEQ ID NO: 71686 - DNA, 321 bp, Glycine max
ttttagaatttcctaaaaataacataaattttaggggaaactaatttagatataaggtattctaaacatatacttgtaaagaaggaacgatgtaacgttctagtgaaatattttatactctaaagaaatagctatatataatactttgaatttaattagaatataaatgacattcaacatgattgatagataactgagcttttaaaatatcttgtagaagtatgcttccttttttcggttaagggaatatccttcgaaaaaaaaaaatatgaatttaattgtatgattattgattttttaaaatattttttttctaaacca

SEQ ID NO: 71687 - DNA, 396 bp, Glycine max
  unsure (1)..(396): unsure at all n locations
caacctttgaagatggtaaccactgatatgacgaccttgagccaatttacttttgcaatggggtttgtaatcaggggccggttaacggtancagttctgtgtgttaattataactactgtcccacttcctgctcggcatggggagaagttgtatttctaatgttgatcccatagtactaggtgattgtggaaagtaactaggacggccaagaaacatcagaaactcaactaccactgttcggtttagttgtagaaagacttactgcgtttacattatatgcttatcttgggatcgaattgaaggaaaacaaaaagagaaaaaaaggttntaaaaaataataaatttaatattttttattatatataatttattattttttataataatttattttt

SEQ ID NO: 71688 - DNA, 195 bp, Glycine max
tataccttaccctttctttcgcataacctatgcaacatataacaatcgcgccccattcaaagaacaatctccactccaaccaaccaaacgaatcaatatcaaactatttcttaactctctatctccacttccacttagcttcttttcatcctaacacaattactatccatcaactcatgacctcactctactcaa

SEQ ID NO: 71689 - DNA, 254 bp, Glycine max
gagcaataccctgacaaaaccaactgccaaaaactctgctaggaacttcatctaagggggctatactcctgggggacctgggaacatacctccttttttctaaaaatcatcttcctcatctctaccaactaatgctccaaccatctctaaacataaaatatatattcccacaatctataagttcataaaatacctgtgccaaatgcatatacattacctatacccatataacaacctttcgaatcattcatact

SEQ ID NO: 71690 - DNA, 236 bp, Glycine max
agccatcgtactctcaagtggcaagcgttatctgcctgactatgtgttaggcataaggggtggataatcgggggggtgtatgtcattgtcgtatttctcatctgttcttatgttttactatgtgatgtgcgattatggatttcagaacattgcgcgttattttctttgaagacaaatatgaaaacacttcaatggacctcccaaagaaccaacaaaaaaaataaaaaaaagaaaaa

SEQ ID NO: 71691 - DNA, 269 bp, Glycine max
ttccaacattttctccatttgcctttattttttcatttttataattttccactgcggtcttttaatggagaagcgcttttatactattcccatttcttcttccactttgtccatcactgctgcgaacccttgtactcttcctagacccgtcatctcattttataagaaaactgccactaacctctaactcctcgccaacgacgtcgtcttctccccttccttctccacttccttaaactgctccacctttctctacctcatccatcact

SEQ ID NO: 71692 - DNA, 402 bp, Glycine max
  unsure (1)..(402): unsure at all n locations
ggttgtgagctataagctagtttatggtgaggagaatatgaagttgtttcttttcttgggtgctgcattagtggggggggcatgcccatgccatggcgcangctaccaaaggttccctctccgaatgaaaactggctatggtgagcggtcttcggaggtaaaattctcaagttttaggcttgctgtggaagcacacaacatccgagcctttaaaaccattcctgaagagtgcgttgaaccaacaaaggactacattaatggcgaacaatttacatcagactctaaaacagttaaccaacaagctttcttttatgctagtgaacgcgaagtccatcacaacgacatatttatattcggcataaataacaccgtactctctaatatcccatactatgaaaaaca

SEQ ID NO: 71693 - DNA, 349 bp, Glycine max
  unsure (1)..(349): unsure at all n locations
caacaatggcgcacatattagcaggggtgatcccatccaaaatccttctctncccatcatcactccacaccttacctttcttccaacccccttctccatccttctcattnctttttttactctcttctcttcttaaaatctatncaacacttatcnccatccccatcccnaataccntcccaacataantncctcctaccttnatntttttcatttccatttatcaataattaattnacttcttcacttccttcttaacantattattttttattcttttccaattnccttcctcattacaacatctatcancttaataacaatccaaaattcattttcttaccacaac

SEQ ID NO: 71694 - DNA, 236 bp, Glycine max
ccactcctacacccactcctccggctctttttttatcgcatttactattcttcatggggggataataatagggatagtgctacctcactttatacctctatatatatatctttttttttctcatcaaaaaaacccaaaaactctatcaaacaccaaacaacacattttttttaaaaactaaccataaaacacaaactcctcaccaacaacaatcacaaatccccttacatcatcac

SEQ ID NO: 71695 - DNA, 383 bp, Glycine max
  unsure (1)..(383): unsure at all n locations
aaatnaacntgctttttttcttcggtgctacaattttcntagcggggcaattccatgggtgcgagatgttccctctcccaatgaacactggctatggtgcccgtactccggaggtgaaatgcgcaagttggaggcttgctgtggaagcacataacatctttggctttgagaccattcctgaagagtgcgttgaagcaacaaaggaatacatccatggcgaacaatatacatcagactccaaaacagttaaccaacaagcttacttttatgccagagacctcgaagtccatcccaaggacacatttgtgttcagtatagatggcaccgtactctctaatattccatactacaaaaaacatggatatggggtggagaaatttaac

SEQ ID NO: 71696 - DNA, 316 bp, Glycine max
  unsure (1)..(316): unsure at all n locations
gctgaacttgatagctaccctggccttatatccccatcatagcctcccncatttggcgggcattttaaaccggccaccggttccttaccaactttccgtggcccattttcatcatccgcatcctcattctcctcctttcccttgcccgttttgtccgtgcctattttaacaaacaaggtctcctcaccctctacctcttctgtattgctcttctcatcgccctcctcctcctccttctcgtcttcgcattcgtcgtcaccagacccgattgagcctattatgtcccctgaagaggctacaaagagtacaggcttca

SEQ ID NO: 71697 - DNA, 248 bp, Glycine max
attaacaataacctcactctcatcaacgtttttctctacactaataattcctctctatcgggtccatattaaaggtactcttgaaaacatatatcaaaaatctttatacatatattattctctagaccatttcccaataaatatcttcaacttactctaaaacctttttttaatgatccaaagccatcatactgatatcactcaaccctttactacacttatttttccaacacctcttatattctata

SEQ ID NO: 71698 - DNA, 192 bp, Glycine max
  unsure (1)..(192): unsure at all n locations
ttccaacattttctccatttccctttattttttcatttttataattttccaattcggtgttttaattgagaagcggttttagactattcctatntctgcttccaccgtgtccatcacggccgcgaaccctgggactcttctgagacctgtcatcgcaacttataataaaacttccactaacctcgaactcct

SEQ ID NO: 71699 - DNA, 191 bp, Glycine max
cgtaaaaaattaaaatccatttttaaaaaagtatttaaatatataatttgctgattttaaaagagggtattttttaaaattttctttaaatgtatcttacgataatgtgcaggcgcgtttggatactacgaggttaaggagatgcgctacctgcattcttcgatttcggagacgatgacgttgtaccctcc

SEQ ID NO: 71700 - DNA, 450 bp, Glycine max
  unsure (1)..(450): unsure at all n locations
gtccgcccacgcgtccgctttgttcactcttgttttcttgcggctagggttttagcgcancttggggtacatttaagggggatgggtgaggaaaaggttcacatcagtattgtggtcattggccatgtcgactctgggaaatccactaccactggtcacctgatttacaagcttggaggcattgacaagcgtcttattgagaggtttgagaaggaagctgctgagatgaacaagaggtctttcaagtatgcctgggtgctggacaaacttaaggctgagcgtgaaagaggaatcaccattgatattgctttgtggaagcttgaaacaacaaagtattattgcacagttattgatgcgcctggacatagggatttcattaagaatatgattactgggacatcccaagctgactgtgctgttcttatcattgattcgaccactggtggtttt

SEQ ID NO: 71701 - DNA, 402 bp, Glycine max
  unsure (1)..(402): unsure at all n locations
actcaaagatgtnattcttcntggcggcctttttagcggcgtgatcagcgtaatctcctctnntaaaanttaanggaaacgtggctcagtgcgtatgggctcctatccttgtggtaaaagtgaagattatgtctaaaaaatgtatgtcaaacacaccttgataattaaaagtgctacaatctttaaatgcacctttcttactagcatttcttgacctttcccaattatgaattccaattttcaaacattttatcttatggattttcttctttttattcattaacaatttataactctttaattattcaacttatttattcttattttgttaaaattgccattttaaaacacaaaaaaatttaaatcattgctttaattgctcgtcttttcatttttcttctt

SEQ ID NO: 71702 - DNA, 224 bp, Glycine max
  unsure (1)..(224): unsure at all n locations
tcattcatatatacctncaaccatattcaaatattctttcttaatctttcttctcctttctttaatctattttttttatatcaaatactaacaaaaaaattaacaaaatcaattcttattccaaactttccttatttttcttcatactatcactcttcttcatcatcacaactactttcaccaccaatccttctttatattcaatcaaatttctcattttttcc

SEQ ID NO: 71703 - DNA, 250 bp, Glycine max
ggaaaaccccggtcggccgcacacgtccgataactcttaaccttctttcaactgcttatacctacacacaaacaaacgaaaacaagggggtattttcaaaggggtgcggactcctacaaacaattaaacattaaaattagcccttcacagcatccacacacttcccaatctatatttcataatcaaaatccttttttttcaacatcacctaaaacctctcccatatctacacatcttctcacacatttta

SEQ ID NO: 71704 - DNA, 274 bp, Glycine max
tctatataaataccctaaccttattccactcccttcgaaaactaacttatgggcctcttacaaaggcggcttccattaacaaccttcaatacctcatccacataaactacttctttttcataagcaatcctcctccgcctttgtatttctacactttcttctctttcgactattaaaacaactactcttcatacctcaaagagcttaaccatcttatacaaaaatttaactcctataattaatactccattctttaccctctccattaattcac

SEQ ID NO: 71705 - DNA, 180 bp, Glycine max
tcactcctactctttttactactgtgtattcccacaatcatttaaactaatttactgtggcattaccaaagggctgtgtaccatttttcataataaaaatcccaaatttcccaatatttgattccacacacattaccacaaaattttttatattacattaaattatttattcttcataac

SEQ ID NO: 71706 - DNA, 306 bp, Glycine max
cgtccgcgtgaatcatgttctctaaggtgtaaaatggcttggtatagcatgctttgaaattcatggcgttcggtcatgtggtgtcggcagatctctcattcatgtcttgacatacttctgtaatttttactccattgagggaagcatcttaagaaatgtgttgcatcgttgatacccatgagaaagtgggtgactgaatgtatacttgagtgtgatatctgtagtactttggtttttgttatcaactcttgcttggtttacctgatgaacataatgatatcctttttcaattctttttgacagaaa

SEQ ID NO: 71707 - DNA, 433 bp, Glycine max
  unsure (1)..(433): unsure at all n locations
gataactagaaacagtgtgatgaagatgaatgtccttggtttcttcgttgctacaaggggggtagcatggcggggccatgcgtacgatatgttccctctccgaatgaacactggctatggtgcccgtactccggaggtgaaatgcgcaagttggaggcttgctgttgaagcacacaacatctttggctttgagaccattcctgaagagtgcgttgaagcaacaaaggaatacatccatggcgaacaatatacatcagactccaaaacagttaaccaacaagcttacttttatgccagagacctcgaagtccatcccaaggacacatttgtgttcagtatagatggcaccgtactctctaatattccatactacannaaacatggatatggggtggagaaatttaactcgaccttgtatgatgaatgggttaac

SEQ ID NO: 71708 - DNA, 307 bp, Glycine max
  unsure (1)..(307): unsure at all n locations
ccactcctcccatttttgttgtggattttctaactagtcagaantattttttttggcggaaatcttgactggggtggtggttatatttttttcctnactgcatancattgttactcttttttttttctttaaatgttttaaacatgttttatgggcttctttttatccctttatttgtcataaaaatttctgctctgctgggtcgtatcatacatctaactattggttacttgatgctcttctaaccaaacctttataattcccaattgtcaaaagaaataaaataccttcttagcaaccgatctat

SEQ ID NO: 71709 - DNA, 429 bp, Glycine max
gtccgcccacgcgtccgcccacgcgtccggtgtgttgttgtaactcgttcttcttctttggtggggtgtgtttgggggtggttgttctctcacctgaaaatgtcttgctgcggtggtaactgtggttgcggaagctcctgcaagtgcggcaacggctgcggaggctgcaagatgtacccagacttgagctacactgagtcaaccaccaccgagaccttggtcatgggagtggcacctgttaaggctcaatttgagggtgctgaaatgggtgtgcccgctgagaacgatggctgcaaatgtggaccaaactgctcctgcaacccctgcacttgcaagtgaggtgttgggagagcaagcttcaagcagagatagcccttaattaggaataatgataaactattaatgtgtagctaaaaacttatgtattat

SEQ ID NO: 71710 - DNA, 438 bp, Glycine max
cgtccgcccacgcgtccgcccacgcgtccgaagcaaatggcttcctgaatgatctcttccccagcgtggaccactgtcagccgtgccggtgccggcatggttgctccattcactggcctcaagtccatggctggcttccccaccaggaagaccaacaatgacattacctccattgctagcaacggtggaagagtgcaatgcatgcaggtgtggccaccagttggcaagaagaagtttgagactctttcctacctgccagaccttgatgatgcacaattggcaaaggaagtagaataccttcttaggaagggatggattccttgcttggaattcgagttggagcacggtttcgtgtaccgtgagcacaacaggtcaccaggatactacgatggacgctactggaccatgtggaagctgcctatgtttggttgcactgat

SEQ ID NO: 71711 - DNA, 236 bp, Glycine max
  unsure (1)..(236): unsure at all n locations
cccattcctacaatcacacttccatactcattcatttctttaaccatccttttctctgtggctctcacaggagagagccacgtccatccatcnctacctccattaacattatctcagaagctttttctcctaacactcccatacccactgcactgacataacttctaattcctctacctgcagatagatacatcgcataactccctaaccacattgatgatacacaatacccaaaa

SEQ ID NO: 71712 - DNA, 234 bp, Glycine max
  unsure (1)..(234): unsure at all n locations
cttcattcatatttttgtcatcaagcgtactcttgcacgctaactaacnccatatatgtgttcttatcttgggggggcagactttctcntcatcattgaccttgctgtaatgaggtgtttaatctgaaatttgtttgaccaaattcatggcggaactgatattttctcgcttgtacagctgctctaattgtataaaccatgtctcactccatgatgatattatttccaaggctt

SEQ ID NO: 71713 - DNA, 329 bp, Glycine max
aaaaaacaataaacaaaaaaacaaagttgttctcacacatatataaaatacaaaccatgggggtcaactcaaaaaaggggaggcttctacttaatataacacaaaaaaataataaaatcacaaacaataataacaaaatcacccaacttataaatctaaaaaccaccaaattctattttccatatataaaataacaccaactttggctctctttttctaaacccaaccttttactttactacacttctcccgcctttcctcttatattctccttcaccaaacatttttaatcccttaaatataattaatatttctttgataaaacatta

SEQ ID NO: 71714 - DNA, 158 bp, Glycine max
aaacccggggggcgcaggcgtccgtatttccaaaactttgttgcatgccatacaattttatatgttgcttattgtctatttgctgttgctaaagtttgctaccggaattttgagtttaacttctgttctagttgaaggcaatgtgatgattgttaatt

SEQ ID NO: 71715 - DNA, 261 bp, Glycine max
  unsure (1)..(261): unsure at all n locations
tttctttcaacttaccttgtgtctcaactgaacgattatctacaccgggagtgtctaaaacgggtactcctcntaaaacttattattacacctatacacaccaacatcatcatcacaaccaccataacccaatcccttctacattaaaaaataatttataattattgaacttacctcagtggtccataacacattcaaattccccgaaaacatcttctaactatatactaataaggtcaacaacatatgcctatataccat

SEQ ID NO: 71716 - DNA, 203 bp, Glycine max
  unsure (1)..(203): unsure at all n locations
tataactggttttttttttatgaaaatgaacntccttctgtggttcttttatacagtgttggtagcatcacaatcccatccctactatatgttccctctcctaatgaacactggctatatttcccttactccttatgttaaattctttttttatatgcttgcttaaaaaacacacaacatctttttcttttataccattccta

SEQ ID NO: 71717 - DNA, 361 bp, Glycine max
  unsure (1)..(361): unsure at all n locations
cgtccggtttgttgtgagctataagctactttagcgtgaggagaatatgaagttgtttgttttctgtgtggctgcaggagtggtgggagcatggccatgccatggcgcangctaccaaaggttccctctccgaatgaaaactggctatggtgagcgttcttcggaggtaaaatgcgcaagttttaggcttgctgtggaagcacacaacatccgagcctttaaaaccattcctgaagagtgcgttgaaccaacaaaggactacattaatggcgaacaatttacatcagactctaaaacagttaaccaacaagctttcttttatgctagtgaacgcgaagtccatcacaacgacatatttata

SEQ ID NO: 71718 - DNA, 359 bp, Glycine max
  unsure (1)..(359): unsure at all n locations
cccactctttctcccactcctccggctgctaacacggaagactgtaaaatcaaagggcggggtcttacaggggggcatgacatcaaccatancctttnttcattaattttttctctttcttttctcatttgtatttttgtgtagtgttgtgttgggcatttggtattacgatatgatacgtgcactgttatgtgagcctcaaaatcaaacagtggcacttcacttttatgctttaatcttatacatccaaccccatctttcaaaaacccatcatccttacaaatatacacatagttcagggtccgctatcacattaaaattataaaaagtgacatacataggtaacgtgaaaaatttaa

SEQ ID NO: 71719 - DNA, 405 bp, Glycine max
gattgtttgttgttgtaactcgttcttgttgttttgttgttctgtgtttgtgtttgttttgtgtctcacctgagagtgtcttgctgcggtggtaactgtggttgcggaagctcctgcaagtgcggcaacggctgcggaggctgcaagatgtacccagacttgagctacactgagtcaaccaccaccgagaccttggtcatgggagtggcacctgttaaggctcaatttgagggtgctgaaatgggtgtgcccgctgagaacgatggctgcaaatgtggaccaaactgctcctgcaacccctgcacttgcaagtgaggtgttgggagagcaagcttcaagcagagatagcccttaattaggaataatgataaactattaatgtgtagctaaaaacttatgtattat

SEQ ID NO: 71720 - DNA, 348 bp, Glycine max
  unsure (1)..(348): unsure at all n locations
ccactcctccncccacccctccgggcactcttcctcccacgcgtccncttacaatttggtgtatactttaaggggtgagactgctccccncataangcaccctttattttttatacctttttcatatgctttaacacttctacttctgtttttgccctcaatcttattctctaatttttatttaatacacaataccttaaatttacagcttttttttctttcctattcttacaccccccactccatttttttgtatcctaacctcttttttttattcaatctttctccttctttctttatcaaaactttattcttcctcttttctaccctaataactttttttttttt

SEQ ID NO: 71721 - DNA, 396 bp, Glycine max
tttgggctgatttagtgcttggaaaagttccttacattctttaaacccccaagagtatcattccgcctgtctctccctgatcccgcgtttctatcctacggacattcattcctagttattgtcgacgcggcgtcggatacggacggcaacttctccggaaatggccggtaaaacgaacaccctacgccgttagccataagaggaagtggcggcggaacagtatcagtcgtaatcggaaacgaaagacgtttcgcaatcgctgcgtaactctataccgagtgtgccaaggggcacgtggtaatccccagagtcttaccttattctttccccactgtagaaagttccttcccgatgaccctacctgacaatcccgaagcgccattgtggcgcgctttt

SEQ ID NO: 71722 - DNA, 294 bp, Glycine max
tccaagacctactactacctctacatccatttttagctccaaccgacaccccaaaagtatacgggttttatatccctactcttcgaatactacctatcgtctacgaaccgtttcactacactcgacacgctcccgcggcaaaaaaccgcccacgactccaaagatcgccacatctaaataaaaaccacaaaccctttctcacgcctcccccaaaccgccggacccccagaaagccaccgccctcagccacccgcacccgtaaaacccaatactatagcaaccaccaaccgcccc

SEQ ID NO: 71723 - DNA, 417 bp, Glycine max
ctctatgtaccatggtacatgaaaaaattaataacactagtttaagtagaaattaggtgtgaccattataatcccatagcacctaataatttcttattagtttacatgacaagaagaatatgttcttttgaatgatgtcttgtgtattcttttatgttcttttggatttgttttaatgtgcagggtttatggattggcctgatttgtgggttggcttgtcaaactgggactctctcatttttggcatggcgtgccaaatggactaaactgaatgtctccttggacagagattaaatccaaacaccatctgcttaacttgatgcttgctaatattggtcaatgaaaataatccacggagtctactatttttaaattcaattgcttgcaagaaaatggaaattgggtggacaaattttc

SEQ ID NO: 71724 - DNA, 234 bp, Glycine max
cttacggaattcggcgggccacacatccgagccatgacgcttacattcacacgtgcaaccaacgtcccttaaaccactgtgacccgactgtttacagtgcaattacaaggctgcatactttgccacacacaataggtcacataaccctacatctgtgcatggcaatggacatgactaacggtctcatgttctgctatatagcactacgcaggcatctgacaacatcacaactca

SEQ ID NO: 71725 - DNA, 442 bp, Glycine max
tttgggctgatttatgtgcttggaaagatacagataaccaagagaaagcggctgcgagtcagtcgccctccgggtctcagggtgtcgtcgttccgccggttagcctctctaccctcccgtagtaaaggtattacggacttacgcaccctaccttaccgggccctactccctgccgctcccgcccatgccgtccggcttcggttgttaatccacttccgacggtccaaaaagttcctccaaaaggatgttaaatacgaatattccagccggctctggggtcccactactacccatagctagcctacccgtcgttccgtcgttaaaaccgggccggaaggttcctcccgaggaattaaccacgtcaaccgtacccgctccgccaggaaggaactctgaatagagagtcaagaccaaagtagttagcgacacgataggatcctcc

SEQ ID NO: 71726 - DNA, 394 bp, Glycine max
ggacctttgggctgatttatgtgcttgtggaactagtgcgggatgcgcttcggcctcttccctttagtgagcactccgggcccaaggtgaacataggacttggaattgacaaccgacctgggtatggcgacaatttggcctgcggagtttgcccataatgtggcgagggaggagcctaggaagtaggcgggaggtatcatacctatgagtaccggagttcctgacatgcgccccgcgaaaattcatgaaatctcggtgttgttaaccatgtcgtatcctgaggggccggattcgaaatcgttgccggaaaatagtccgacttatagtagtgtgggcctgtcggtgcgctccgtaacggtggtcgtatttgataacgcgaatctggcgccgaatg

SEQ ID NO: 71727 - DNA, 145 bp, Glycine max
aaaaaaaaaaaaaaaaaaaaaatttataacaaaaaaacaaaaaaaaaaaaaacagaaggaaacataaaaaatgacaataagtacaacataaaatacaaaaaaacttaaaaaattgaaaatgcttcctttaacgatgacaataact

SEQ ID NO: 71728 - DNA, 281 bp, Glycine max
  unsure (1)..(281): unsure at all n locations
tttcttggtcnncttgactaaannaaatcagaccttctctttatcacggctgtcgctatcatctcgttgagaaatgcccagcctanttcttgcagacctaagcaaggggattacagtgtgattggatgccctgtcatcggtgccttttgagccaaagcatggtnntatgataaaccagcgaatcccaaaaagggtttattattcannatccacttaataagttcctgtacctgcttgaaagttcaaaggaagaaaaccaagttattgaagctttgtgtaca

SEQ ID NO: 71729 - DNA, 228 bp, Glycine max
cgcacgcgtccggttagttggtttttctagcacaagatggcttctagggttcttcggctggcgcttcttggtgcccttggttgcaccattgatgcaaggaagcttgggagtgaaaagggttcgtttagggatgagaagaacttcttccatcgtccagggtttggaggaggtgtaggaggaggaggtggaggcggctttggtggtggcggaggaggaggcttaggtggt

SEQ ID NO: 71730 - DNA, 295 bp, Glycine max
attgattagttccatcataagttcgcgactggaactcgatttattgcgtggcgttccgttgtctatcatttttggcgccccatacgtgtctcatgcaaaccttcgagctcagggtcagagccacctttccactcaaacgagtattcgacaattccaataagaagtctgacccggctaacggagcgtctcccacggcggcggtcagcctcggctacaccagactctccggaatacccccaagacatcccaagaaacacgacgtcggagataccctttatcaccgatctaatccagc

SEQ ID NO: 71731 - DNA, 447 bp, Glycine max
  unsure (1)..(447): unsure at all n locations
tttgggctgactgtatgtgcttgtttgatctagactcgggcgtccctcgccccgatagtaccgcactaagagtcggacgaaagangaaacgaaaccgagaaccgggagcattagtggaaaaaagaagacgattcgtaaaaaagaacactcgaagcctatctaagtgcctactactccgagccgaccgagaaggtcaggactaaagcctagttatcgtacggatctgatactaaatgggtgactgtcggtatcctcctaagggtcgactccgacactttagaactcgccggctcgtttatcttactcgtggttaagacgctgaggccatgggaattcgaccttggtagatgcggcaagaggaaaactcagtcagttaaatacagaacctattccgcgcaatagctagccccagtcactagtcgcaaggcaccccctctatacgcatct

SEQ ID NO: 71732 - DNA, 326 bp, Glycine max
cgcacgcgtccgatcacccaacatgatcctgttgaggacgcaaaagagaagaagccgtttgacttcatgctcaataggaggcaaaagggttcttcttcttcctccccagctccgtcaaatcctgatttgctggccatccccggtgtgggtcccagaaatttcagaaagctcgttcagaaaggcatcgctggtgttgcgcaactcaagcaactctacaaggataagttctttggaaaatctagtgacaagatggttgagtatctacagaattccgttggaataatccacaagaaccatgctgaaagtataactactttcattaaaaa

SEQ ID NO: 71733 - DNA, 299 bp, Glycine max
cacgcatccgcggacgcttgtgcttactcgtgggattaatctgactcggacattgcagtttaatgggaccgttcataaaaattattagtgtttctacctcagctgctatgactccattaacattgaatacaaggttcatcagtcatcatcatgtgcataaacgacccataattttagcttttaaaggaaataaatcgaataaaaccacttttgtttcacctcaagataaaattcctctacccctataaacagctataaaacaccataaaagagtatgaaagactagtgagtcacttaat

SEQ ID NO: 71734 - DNA, 183 bp, Glycine max
atttaactgtttggcccttcgtgtatccaaaataaagatcaatatatataacagccaggtaaaaaaaaaacaaagcacaaaaaaaaaaaaaaaaaaaaaaaaaaaaaaaaaaaaacaaacagagagagaagaaaaagaatccatggttgccaaagaaagcatccttgagaaacgaacaaaaat

SEQ ID NO: 71735 - DNA, 457 bp, Glycine max
tttgggctgattgtagtgcttggacgaagggcgaacaaccagtagtccccctcagccttggcgctggcgcggtcgcccaggctcgcccaaggacgctaagggccttaactaattagggcgacgttaatggtcttaattttcctgtcctgcggggctaacctgcggaccccttctctttcttccttactcttggtcctccttttggtccggaacctggacctggacctgtactacttgcgaatatatgcgcggatcggagggagatctttagagtgtatgcgcggaagtcggcgtcctttggtcctcttaatgaggatgcgtcggccgagtcttaagatgagaaggcgtcttaagctagtgcggagagtggtaatcctgctatgaggcccaaggcttttgataatggcaattcagaataatctaaagttaatacgtgctatggggcctctgccgctat

SEQ ID NO: 71736 - DNA, 310 bp, Glycine max
agcatcccccatttcctcgccaagatttacaattgtagttgccgtcatgccgtgcagacagataggaagctacttagcactgatagttataattaattaaatacaaataaaagaaacagacagagagagaagagaagaatcgttggttgccaaggaaagcatctttgagaaacgaacagaatgatgatcgactaaatgggaccttcacttccacttccactcgctgtgttcaaatggctttagcaacaacaacaatcaccaaccatgaacctctgcctcacgctcactctcggatctcagtcgcagatcc

SEQ ID NO: 71737 - DNA, 354 bp, Glycine max
ctccccaaaaaaaccggggttcatttaacccccccaacaaccgccacatctcaccttctaacaccaccttcattaacttcaccgcggcccagatccctccccaccacttcttctcccactaccccctccccaccgatacctcttacatccccgtctcccctgccaccaacaacacccacaacaactactttatcccccttaatccaattaacctcctcaccaacaacacaccacccgcctcctcacccaccctttaaccctccaacaatcctcacacctcctcccccaacctcctcccccccccactcaatccctccgccccccacactacactccccctcactacatctcccc

SEQ ID NO: 71738 - DNA, 284 bp, Glycine max
taacgtgttattcatcctcagtaattcgatgaggccgcaaatgaggcggagaagtcggaaggacgccggtgaaagtcggcgacggggaaggactcgggggcaaacgggacgccaacgggccggaaaaggaggcacctttaaaggagacgaccgagactccgaagaagaacaccgacagggagtaagtacctctcgaagttaaatcccggggagaaaatcggaaggaaaagacatgactcagttagtagaaactaaaccttaacgcaccaagactccttatacgc

SEQ ID NO: 71739 - DNA, 356 bp, Glycine max
ttatgtgcttgtatatccgtccaccgtcgtcgtcgtccccctcgtcggggcggtgaccccaactaacaggttaccttcatcgtcttcgtggtcttcttcttctcctcctcctcctcccatttccctcccctctctatggctccccctactatcagtaaaatccgaatccggaacctgaaccgttctaaaaaggaaaatccgtactctagctacacgaggacattcctaatctctgcggaagcgtcctcggcatccgtaccgcctcgccgcagttcacggatagcgcggactactattatctcccgttaatagatgaatgacgaaccctgattctatagcgctactactattcaacc

SEQ ID NO: 71740 - DNA, 272 bp, Glycine max
acgagaaggggaatacttcggcgcccgcttacctataagacaaacgcgacctctcacctaaagacccgacaaaatacggtcacttccgttccctatcttacggggtgaacgactagatcgattgggagctcattaccatcgaccccaagagtaacgctcgtaactccccgacagtaatgagtaccgtcgtcagaggctcacacgcgaaggagtcccactcggccgcgaatcccgacgctttgaattatcacgaagatcacgcctactgcgcc

SEQ ID NO: 71741 - DNA, 255 bp, Glycine max
ggaactttgggctggttgtagtgcttgtaaatcttcattcccaatcgttatatatctctctctcttatttcttaatcgtaacggtgcctttccttactcttgtgtgcctccccctctctttcgtttaaaattatcatcgttactctctcctctctttatcatttcttcctatctctctactctgttgtttaagatacctcctccttaattctcctatattctcctgtctctttataatttttacccccgtactgg

SEQ ID NO: 71742 - DNA, 394 bp, Glycine max
acctccctactccccccctctggcatgatgtccactccacaagactcccctaaaaccgacgacgaatacatatatccacacctccacacatcttattacaatcctctcctacctatcacccctatataagtaacacactcgatcccctacccaacttacccctacatcatcccccaataaccactctttaatataacacttcctacacaccgtataccctccataatactcactatcaccaacaccaccacccccactttactatacaccccttattcatattatcactcaaaattttccactcctattattattattacccctatcaacttaccccaaatacccacatttccctcctctccccccttcaacccccaactccccaccccccccc

SEQ ID NO: 71743 - DNA, 392 bp, Glycine max
tgtctcgtagttcttaacctcctcgttaccctcgtgactaccgacgaccattccgagaggggatagctcaataaggagaccgagcgataagaagaggccagtcatcatcggagtaaatcccgtaagagtacatattgcggaacctggcagccgtaagcctttcgagaatcctatcggccgttaagactccgttaaataaaagaaagcgttaccttccagcgatgacccggagtccgaacgtgaaggaaaggataaacataagcgtggcctcaacgcccctcggaaacggcgaaaggaggtaattccccacgtttaatcgtgaaccacctgtcccgtgacgcattcaatcgtccgaacacacattacaccccctcgtaccgtccctagccacc

SEQ ID NO: 71744 - DNA, 274 bp, Glycine max
ccacgcgtgcgcgcattgcttcacatagactctttatctcaaacatgcctgtcatgaagaccagggagattggctccgtctctcacagcatactatgacgcctaatacggtcacctctccatcattctcgatgccatcgacccaaataggactcttatggacgctccctacatagagagactccactagaacctcaaaatgctctcactcacttccatcacaaatgatgttaagaatactcccacaaagaatgatctcattcacaccattgaac

SEQ ID NO: 71745 - DNA, 388 bp, Glycine max
gggcgggacccgaatatcccccaaaagaccgaagtcgtcggcaaaaagaggcaagacggtaatgtaccggcgaaaccgggtaaacacgtttgggtcctcaagagacatgaaaagggagccaaacctacagagcacgacattcttcctagcgaagaccgacaagaagtaagtcaaggcgccgaaggctctgcgcaactcgaataacgtagtgcgtaagtcgaagccgaaggatcataaggaggtatagaagtcccgtatcaaagcgccggaaaccgaaagtgggaacgccaaggttccgcataggagagtctacgttaatacttagtcggtcgacccagacgcggtcgactaagataccaagaaagtatccgagaccgacttcaacaat

SEQ ID NO: 71746 - DNA, 350 bp, Glycine max
gttgatcccgcgaaacttagtccctttgctgaaattgctcctttctctctctctctgtctgtctctctctctctctggctcgctctctctcttgccgtctgtctgctcatgcctaaatgcgattttcttctggaattttttacccactctcttcagatacgcgattgtttctgtcgtttcagtaatggtttataatttgtgccttttcaggaagatttggtccattttgaattatccatctgcaaattgtgttttaaagtctgaatttgcagttctagacttctcatggcaaggtgacatgaactttcttgtgaggtctaaaaaccctggtcctgggtcaaaagggccca

SEQ ID NO: 71747 - DNA, 342 bp, Glycine max
agaagaacaagtagttgagaactaatatggagaagcaaatggcttcctcaatgatcgcttccccagctgttaccactgtcaaccgtgccggtgccggcatggttgctccattcactggcctcaagtccatggctggcttccccaccagaaagaccaacaatgacattacctccattgctagcaacggtggaagagtgcaatgcatgcatgtgtggccaccagttggcaagaagaagtttgagactctttcctacctgccagaccttgatgatgcacaattggcaaaagaagtagaataccctcttaggaaaggattgattccttgcttggaaatcgaattgg

SEQ ID NO: 71748 - DNA, 244 bp, Glycine max
tttaaacacagtcagggatggacatacgatccttctaccatcattccccctaagccatcatatccccctataaacatcgacgttttctcctcacccatattcactttactaatacaatccaccaatttacataaccaataaatacaatgattatgcttattgtaatctcaataatatccctcaatgaatgacatttacactactacataattatatctcatcctttcttttacttgttatttaa

SEQ ID NO: 71749 - DNA, 402 bp, Glycine max
ataactagaaacagtgtgatgaaaatgaaggtccttgttttcttcgttgctagaatgttggtagcatggcaatgccatgcgtacgatatgttccctctccgaatgaacactggctatggtgcccgtactccggaggtgaaatgcgcaagttggaggcttgctgtggaagcacacaacatctttggctttgagaccattcctgaagagtgcgttgaagcaacaaaggaatacatccatggcgaacaatatagatcagactccaaaacagttaaccaacaagcttacttttatgccagagacctcgaagtccatcccaaggacacatttgtggtcagtatagatggcaccgtactttctaatattccatactacaaaaaacattgatatggggtggagaaattt

SEQ ID NO: 71750 - DNA, 435 bp, Glycine max
gggtccacggcggacattcaggtatttccccatgaggaagggtgcagcaagtgatgaaagctccccccaagccgaaaacaagtgcatacttggggacctttgacacaggctaattccctgaatcgtcgtcgaacttatggctaggtaagagataattcggcgaatcgaaatactccagcagttagaggaaaagaaagtaaaagtgacctttgcagcagtggtgagtgaaacgggagtagttcaaattgcgaaaatggggccgcgggagagtcacataagcgctgcgtcgtcaggtgaagtagtagagaacgtcgtatttcagacggtcagagcttagcagttgaaagtactatcagtccatgtctcgatttcagcagtacggggtatgcggaactttgcgcgaactagtaaggattattccgtaaagtcaaacat

SEQ ID NO: 71751 - DNA, 371 bp, Glycine max
attatttttttttttttttttttttttttttttttttttttttttaatttttttatttttttttatttttttaaatttttttttttttaattttatttttttattttttattttttttttttattttttttttttattttattatttttttttttattttttttttttttttttttttttttatatttatattttttttttttaattttttatttttttttttattttttttattatttttttttttattttatattttttttatttttattttttatttttattattttttttttattttttattttttttttttttttttttttattttatatttttatttttttatttttattttattattttttttt

SEQ ID NO: 71752 - DNA, 221 bp, Glycine max
tcaaccaccctacaacagcattcccctaatattaactcgatcatcatatacctattccccctctcactcctctcccccaaaccttccttccccttcccccacctcctctcctcaactactcccctaaccctatagcccctcacactctttaattaacttactaacctcctaacccaccatacaaacacgcattcctcttcccatatacccaatccaaaccc

SEQ ID NO: 71753 - DNA, 324 bp, Glycine max
cttaccttttggaaaagctgactttttagtttacgatcttgttgtcaactttcctagcgtgagttataacattgcaatgccaggcgacctatatgttctcatcttctaatactcaactaactgctcacatatgctcatccatggtgaacttcactcagcttaaatctcactgagatacttcattacatacctccatcagaatagaaccctcacatgtaaatgttcgcttggcctcaatcatctatcctccgtgccattgtgacatcttgccaaatatttattcaaaaatgttaccaaaattacatacatgggattgcatctctc

SEQ ID NO: 71754 - DNA, 384 bp, Glycine max
cgcggtttggtgcaaccccgcccgcgttggcgaaaaattcaaataagcagaacgaaggacgaataacatggatttggttgaagaccatcttcatcgccttcgctccaatctttcttctctgctccttcagattgacgaggttgtcgtgcaagccattgaagtgaattacaagaacaacaaaaccataagcaaagagggcaaaacgcaaatcgagtctttctcccgtgtcctttctgacatgctctcttctttgaagccatggcttcccaaaattcaaaatgcccttaaccctcaagacataatttctgacgattaaaccaaaatgccaccggtccaaaccccgagagaccaccttaaaattaatatcttcttcaacccttgtgt

SEQ ID NO: 71755 - DNA, 367 bp, Glycine max
cccacgcgtccgcttttttgtccaactaatttagtgcaggcttagtagagtcaggggtgaacatttggcgattcattgtcacaggaaagacattctgcatactcatgagcacaaacctcaaaatataattgagtgctatggggattcccatacgaagtggaaatataaaaagacaaaatgaagcaatgaggctcaccctagcaacctttgttggagttgtttttggcttctctctaggagtatcatttccaacactggcattgactaggatgaaccttccatccagccttttaccatctattgatctaacttatgttgatgacaattactcgaaaatttcaaccaagtctttgtgggatgcttgggc

SEQ ID NO: 71756 - DNA, 79 bp, Glycine max
tcgacccactcgtactcccactcgtccgaataaaaaaaaaaaattaatttttaaataaaaaaaaaaaaaaaaataataa

SEQ ID NO: 71757 - DNA, 427 bp, Glycine max
ggaatacgggggggacgcacgcgtactcccactcgttcttcttccatcatccatcttggctcactcaaacacctgtacctgggcaagaatcatctcaggggcgggagtccctaagacttttttaatctgggcatgcttagcctcatgttgcttatccttaaccatctaaccggtataataccactttctgtctccaagatttaccggctttctgacttagacttatcctcaaaccggttattctgttcttttcctttttaactctgtacaattccggttctatccacacttaatttggatagaaactctttatagggcttaatttcttctagtttgttgatttatgggtgtattttcattttgaaccttattccaaactgttttgaaggctccataccctatttgttcatttcacacttgtatttca

SEQ ID NO: 71758 - DNA, 410 bp, Glycine max
cacttaattaatggtttataggtatgcttcaaaatcagcttatgcggtcgtaggattggcattttttgacggggagcaggggattcaaatctaatcctcgaaacgccgtgctcatgcttaacttattgccacgccttagtgtctctggtgcattcccacacgaaacatcgcgatatctaatataacaggcatctatcctacatcagcgtgaacaccaaaaacctactgtatcttctcctaatactatccagatactatctcttttacaatcacctcttcttcctctaactgaattactcccttaccacactttttcaataacccttcttcatcaattaacgagggcctctttttaaaggcataaaatttttctatcaccacccaggaaacgtttattatcttcctttgcc

SEQ ID NO: 71759 - DNA, 169 bp, Glycine max
aacaggcttcctggtgctggtgctttacattctagtagcgtgaagtacgtttcggtgcgctgcgttcacattcacgggtgtgttaatgctcttacgacctttaaactttaaggacactttcgtcttcttcactctcaacctcaaccacattgacgacgttcacatcagt

SEQ ID NO: 71760 - DNA, 396 bp, Glycine max
cccacgcgtccgtccactcgtccgaaaacacttattccttctaaaatctcacttctcacgatccaggatctcttgccagcaaacgatggcatccattactactatgcttcataccatggttcccatgaatgcaccgaatctccctcctcgtgttggtgttttcaacaacactactaacatctcatttgctgtctcatgtagggtaccgttcacccggattcataagaacaggaatagatcttcttccattgtggttgctgcagttggagatgtttcatcttatggcaccacttaactttttgctgtgccatttcttttgctttcattgtaacatccttccccatcttcttttcccgcaaagacacatgccctttattttattgagcacgttttttt

SEQ ID NO: 71761 - DNA, 346 bp, Glycine max
tgcgagttaacggtcagtaaaccctttggcgcaggaagctgaataatctgtgaggacattttttagtcggggggactaattatgaatgcttttgttgattcatttggttagaattgaagttgtgtttgcctttcatttatgtgtattttagtgtattcatgttacattgcaactacttttaatttccatagttaattaaagctcaaaaaataaataaatttttataatttattaatattatttatatttttatttatatagaacatttaaattgggcggccgttttaaaggatccaacttattacccgtgctgcaactttttattttttttttgggcacctaattt

SEQ ID NO: 71762 - DNA, 116 bp, Glycine max
cttctcttccactaactcccttcacattccaaaatctccacaccctataccctagtcctagatctcgcaccttcatgctttcttttcaaccactttcttccgccttcgcacacacc

SEQ ID NO: 71763 - DNA, 416 bp, Glycine max
cgacccagcgtctctcaaacaataagttatagtcgacttggtcttatcatccaacctttattcccgggcaaagtctatataagtccggagctttttaaactttttactaattacatacactttgcaattaattttcacatataatttcctttcatttatatatatctattaaatttatttaataactttacttcccttatattcttcattataaatatactattattatcttacatattatcatacttacattaattataatatacatctttcaattaagtttctttctcttatgttcctattttcttataatatttcctaccgtctttttttttatttacttttattatttatttttttcatttaattttttcaaattttttatttattttttttcaatttaaatatcatctttt

SEQ ID NO: 71764 - DNA, 353 bp, Glycine max
  unsure (1)..(353): unsure at all n locations
tcctccctcaaatccttaaccatcaaaaacctttcttcacaaatgtgcttggctctttacagccctgaccctcccacgctattnatcctacaccctcctttcttaccctagcacctatccccaaaccctcctcctccaattcccctatcttcccacctgcctgcaccactcgccgaccccgttcgtcttctccacgtttaggctcctgagaaaatcaccaagctcgtcgactaaattgccagactcactctcgatgaggccaaaaaccttgtctactttctacatgacaagctcttcatcttcgcatccgctttcgccccttattcattcttcgtgtttgcctaccactcttt

SEQ ID NO: 71765 - DNA, 353 bp, Glycine max
ctctatcaacactgttaccagatttctatattctctaatgctagctagagagtgatgaagtcaaaattgatgttcggaaggaaaaaaaaaaaaaaataaaaaaaaaaaaaaaaaaaaaaaaaaaaataaaaaaaaaaaaaaaaaaaaaaaaaaaaaaaaaaataaatataaaaataaaaaaaattatttataaataaatatatataaaattaataaaaaaaattatcattatattataaattatataatcaatttattatattctaaaattaaaattatttaaaataaattatatatatatttatttcttgtttattttataaaattaattatattataaatgttaattttat

SEQ ID NO: 71766 - DNA, 190 bp, Glycine max
atccactagtaacgggcggcagtcgtgctggaattcgtcctttctagcggacgaccggttagatactgggctgctcagtcgtcagcaacgattacaccgtaactacgcgcatgacatcactcgacctgtatacagacctagctggttaatcataaaccgatactcattacacatacttgctataccaact

SEQ ID NO: 71767 - DNA, 214 bp, Glycine max
cataacatcactcatcatatcattctcaaatctaacatgaccaatgttaatcatctcttataacctccacattccacaaccaaatcttctatttttaaagcttatcttactcaatattcaatctttaattaatcccctaaacttttcacctattttactcatatatcaactcctcataaattcttacttcaataacacttatacaaaaattatc

SEQ ID NO: 71768 - DNA, 436 bp, Glycine max
cccacgcgtccggaatttttgttaataaataattatatcagcaacaaccaatgggctatggtgtgtaagcaattcacaacttccgtccttcgttctaagcaacactctcaattcgtatataataaaacctctttctttatattctcttcacgaggaacaccgacacataattcctacataaaactaaaacctgtttctaagttctagtctttttttttccatgtatagctcaaagttcagaaacctgttttgttccgtgttgttttcatggctctgttttggaggtttggccatggcagctggtgggagtagaagcggttccagagacctcgaccagacaccaacatgggccgttgctgctgtctgcactgttttcatcttgatatccatagcactcgaaaagagccttcacaaaattgggacgtggcttgtacaa

SEQ ID NO: 71769 - DNA, 346 bp, Glycine max
gaataacggggcggacgcacgcatccggtgagtgatatcaaattattgtatttgtttcagttcgagttttgaatttaaccgtggcgtgaatactactaggatggctgcaaaaaaaaaaaaaaaaaaaaaaaaaaaaaaaaaaaaaaaaaaaaaaatataataaaaaaaaaaaaaaaaaaaaaaaaaaaatatataaaaacaaaaataataaaaaaaatttactctataatattttaaaataattataaaacatattttcattttaaaaaaaaatctaatttttaaaaaattatatctaaaataattcttaattttttttttctctatatttttaaagatataaata

SEQ ID NO: 71770 - DNA, 418 bp, Glycine max
cattaccgacgcgaccgacgcgtacgcttgttcacccttagcatgtaagccaggattcagcacattatattaattccactgcggctagtatcaattgaaaaacatgttggagcacattgatgtgtccgtatacatgatcattccataccactacgtacatgtgtatggtcatgcagactaaaatttacataatcaagatttttagttttagaaaaaatggtaataacacttgattatgtatcatgtgaagaatatttatgtatcataatgatcatgaataatataacagtttgtcgtcagtacgatttattgtatagtaattaataagctatgtttaaagttgttttctttggtgcatggatttatcattaatgagatcaatgttaattatgtttaataaaataataaaaaggtcttg

SEQ ID NO: 71771 - DNA, 370 bp, Glycine max
ttggggatggaacaagggcagaagaaaaataatgaatagacacaggtaggtgtcagagagagagtaatggctgaggaaagaggaagaataaaaaaaagagtggagttggaagtttaacacaaaggtgacactagggaatatctaaagggtggggttgttgggtttggtttcctcttgttaatgtaattggcgatttgtaatgttgttgaccagttccttgtgaaatgtaatgtgctatcctatctgtttttctttaataaaaaaaaatttaattttatttaattattatatatattttaaaaatatatttatgtttccttactttttgttttatttatctttcttactttatttattttttattattttt

SEQ ID NO: 71772 - DNA, 354 bp, Glycine max
cccactcctccttttctagatctcaagcggtcgacacttgtcatacacatttcataataagaataattctaacattgagggggcattaaaagagaaatacatgatgcataacgatgtccatgttactggtatactccggtacagcgtaacatgccactcacttagaacctgatgattaattaaacaactattttgagtaaggaatccaaggacacaccttataagctgacacaaagtgtatttaatttaatattataatatgatgtcctacaatgtttgttaatgaacgatgtgaggcttatcgaaatcctctagactgttcgatctaaaccatgacttatcctacaactcatc

SEQ ID NO: 71773 - DNA, 362 bp, Glycine max
cccacgcgtccgatgtatccactctgatacactgtcagactttcatgaaatatgccgggatcttttcattggacggggagagaagtctattaaagttgaacagcccccttcctcatttctgcaagccatggaagagtatgtcaaacatgctccccatggaccaatacttcacaaggatctggctattgaaaacaaataaattttggcttactaattagaatttggaggatcctgttcctgctgctgcagaatttgaagagaagaatgcatttgctttaaccattgtccccgttgctgtttagcaacaacctcttgctgcttcaaatcaaacaaatggaactacatgatgggaattggcactt

SEQ ID NO: 71774 - DNA, 428 bp, Glycine max
gataactagaaacagtgtgatgaaaatttaggtccttgttttcttcgttgctacgaattgtggtagcatggcaatgccatgcgtactatatgttccctctccgaatgaacactggctatggtgcccgtactccggaggtgaaatgcgcaagttggaggcttgctgtggaagcacacaacatctttggctttgagaccattcctgaagagtgcgttgaagcaacaaaggaatacatccatggcgaacaatatagatcagactccaaaacagttaaccaacaagcttacttttatgccatagacctcgaagtccatcccaaggacacatttgtgttcagtatagatggcaccgtactctctaatattccatactacaaaaaacatggatatggggtggagaaatttaactcgaccttgtatgatgaatgg

SEQ ID NO: 71775 - DNA, 386 bp, Glycine max
attagttcattctctttgcgcagttccttacctctcctttcaagatgcacatcttcgtgaagaccctcaccggaaagacggatcacccttgaggtggaaagctctgacaccatcgacaacgtcaaggccaagatccaggacaaggaaggaattcccccggatcagcaacgtctcatcttcgccggaaagcagctcgaggacggccgtaccctctccgactacaacatccagaaggagtcaacccttcaccttgtccttcgtctccgtggtggcatgcacatcttcgtcaagactctcactggcaaaaccataaccctagaggtcgaaagctctgacaccattgacaacgtcaaggccaagatccaggacaaggagggaatcccccc

SEQ ID NO: 71776 - DNA, 395 bp, Glycine max
ctcctatccactagtaacgggcggagtcgtgctggaattcgcccttcaatcagccctcctgctcagggccagctcaagagactccatgctaccgctacaattcctagcaaccagcctcctagactgaatatagccctaggcgacattgacaagcctctctcttacctggtacattcaccttactaatcatggtttattgaggctaacaccagatacacccgtaccttgactgtagataccacatccttattcagtaattcaaaatcaccttaaactctatctaatgccacacatgatgacctttatgacagactatatactcaacaagctgttaaccactttctagctgatacattacttatacatagcatatctcctgttacatccagacttga

SEQ ID NO: 71777 - DNA, 184 bp, Glycine max
cccactcgttctacaaattctatcaaggtagccatatcttggtattcaaattcccaactgggatggtgtctttttccctgaggggagaagactgaaaaaatggatcacaatgccgattctcaacccactgaccttattaccattacccgttttctgcttaacgaaccatctaatcacccaaaat

SEQ ID NO: 71778 - DNA, 155 bp, Glycine max
actcccacacgaactatactgccagcaataaatctatgaacagcagatgaagatcatgggaacgaataaacttaaagatccggaagaaacacgaactttattacagttcacaatttttactactcaacatgaactaaacctaatgataaagaatg

SEQ ID NO: 71779 - DNA, 309 bp, Glycine max
gcgtacgagactcattcattgttatataaaccgctttcccttcgtctacgatccactcccttctcttggtggggattttaccctggggtattcccgcttactcttcttttgcttcctttactcctatcttcttaactatctttgcctattcactttctcgtaaccttctctctatttcatgtattcattatcattaattccagcagctctctcagcactattgtacatctcatattaaacctctatacattgttgttggatctataaataatattttaattctctcttttacatcctaatattactatt

SEQ ID NO: 71780 - DNA, 331 bp, Glycine max
tactcgttcatcccgacatggtttgcttttcttgtttgctgcccctctttctcgggccggtcttcaacatcctccgtctgtgtcttccattttatcatggggaaaatctatcggcttttcgcttggtagtacaggaaacctgatagggctcctcctgcatgtcctttcatgcctccagcctacatggctgatgcagattgttaaccatttccagcacatcctgttaagcctggaaatgcatatctcaagcaagatttattcttgcttacctatcgtataatacttgactttcacaggattaacaatgtatgataacattctgatgggctta

SEQ ID NO: 71781 - DNA, 59 bp, Glycine max
gttttaattacgacccagacccacgctttctcccactcttactaattaaaatattaatt

SEQ ID NO: 71782 - DNA, 274 bp, Glycine max
tcgcccactcttacttttgtctgcaactatgagcattttttatttaatcatactatctctccttcttgccacttttcttgcaactgcatcttctttttcttctttattcttcttttatcttgggaagtgctatttccatctcatattgtcttccaattatcacattcacatattcattgactaatcctaatcagttattttccattctctctatcacactaagccttcttcatttttatctttttaaccaacaattatatcttatttaaatttt

SEQ ID NO: 71783 - DNA, 415 bp, Glycine max
tggaaatgaataaggtctccaaccacggattaatcttcagggatatcttctatttaaccggataggtgcaataaatgagggggatgatcaaatcccatttgctcatgttatgggacttatttcttattaactatatacttcacttcatataaattgtaaaggatagtttgaaaatttatattccagaattgagttgtgtattattagatctaatcactattattagttccttttttgtaataatatctttctttattttgtaagtgtcatatttaaatcttcattccttcttttttatcattgttatctttattttgagtatttttatttgtattaataatttttaattttcttttccatatttacttttttttttatgtatttatcattcttatcataatattttttttttttt

SEQ ID NO: 71784 - DNA, 279 bp, Glycine max
cccactcgtcctcccactcgtcctgtttttaatcaggcctgattttttatacggaagggtattttattaaaggggggcggattttattctgcgttttgtccctagtaatctctgctatagtacacaccttaattatcaatgtcttgtcttccaaaagtacctattttaactttgtcttgccacagacacacattcttatcatcatagtttaaatttacctacactattatcctcaactttctctatagcttctatttaaataattaactttatgatatc

SEQ ID NO: 71785 - DNA, 189 bp, Glycine max
  unsure (1)..(189): unsure at all n locations
gttctgaattccctgcccgacccactcatcctcccactcttccgtataaaaaaattaaattttctaaaaaacaaacatatactaaaagaaaagcccaatataaaaagatgaccagctcttacacacaccctatacaaactttaaccccaactaaaaacaaaaanaaaaacataataaaacctatttttt

SEQ ID NO: 71786 - DNA, 420 bp, Glycine max
cccacgcgtccgcttctaatttgtgttactttggtgggtaagggggaaaagctgcaggggacctcattctctctttctgctgctccatatttcatttcatctctgattgcgctactgctaggctgtcttcaatatttaattgcttgatcaaaatagctaggcatgtatattattattcttttctcttggctcaattaaagatgcaattttcattgtgaacacagcataattattattcttattatttttgtatagcctgtatgcaagaatgacttgtccatccaatacaaccgtgattgtttaatataaaattttattattttattattttaattaataattttttataattatttttttaatattataattttaatatttatattttttttttttattttttatttgtttttgttatta

SEQ ID NO: 71787 - DNA, 261 bp, Glycine max
aaggcattgcgtcgtacaattgtgaaagctgcactgcactctcatcaactcagagttgcatagaaatttgcctatattttcgttattaacactcctatttgtggacttttaccaactatattgatcccaacgtgcaagatgttcaaagtgagcgtgggactgttgctagtggggttggacgtctctgactagcatgatgtactgttgcagcccaagatggctatggaccattgcatacacgagagagcacgcctctaactc

SEQ ID NO: 71788 - DNA, 269 bp, Glycine max
ataattcttttttatttgaaataatgtccgggatcatccacaagattgaggagaccctccatgtgggagggcacaagaaagaggagcacaaaggagaacaccatggtgagcacaaaggtgaacacaaaggagaacaccatggtgagcacaaaggtgaacacaaaggagaacaacaccatggggagcacaaggagggacttgtggataagatcaaggacaagatccatggtgatggccatgacaagggtgagaaaaagaagaagaaggac

SEQ ID NO: 71789 - DNA, 259 bp, Glycine max
cccacgcgtccgcccacgcgtccgaaaaaaaaaaaaaaaaaaaaaaaaaaaaaaaaaaaaaaaaaaaaaaaaaaaaaaaaaaaaaaaaaaaaaaaaaaaaaaaaaaaaaaaaaacaaaaagaaaaaaaaaaaaaaaaaggcaattatgggggaaggatttgaacgtaccataattacgttggcggggggggaaaactaaaaagattcgtaataaagaaaaaaaattgagatactctggttttcctttttaaaggaataa

SEQ ID NO: 71790 - DNA, 245 bp, Glycine max
aaaaaaaaaaaaaaaaaaaaaatttttttttgttcctttccccttttttttggggcccggggttttttaaattattatatataataaccccacattataaaaaaaggggggcccgtttaaaagttccaaacttaactaacccgtccttgcaaattaaaatctttttatttgtgtacccaaaattaatttaatggcccgccgtttaaaaacttgggaccgggaaaacccctgcctttaccaaattt

SEQ ID NO: 71791 - DNA, 321 bp, Glycine max
attagagaatttgagggtggggggtttgtcacgctttttgtcttgacggtggtctgtggacgaggatgttggattttggttttgattctttgaggacacgacgagcagaagcaacaaggtggtgactacagatctcgttaatgtcttgctcttgcgtaatgctatcacggaggatgaacaccattacaaaaatactaattgtgatttaaccatggcttcaatgaatgacaaagaggaaaatgcggaatgcgaaacctaactaacagaagaaatggcggagaagttgggagcagcagaagagagctctaattcaaaggcttt

SEQ ID NO: 71792 - DNA, 332 bp, Glycine max
accacacgttctgacactcgtacgcttctccatgcatgttgctcgaatgtacttatttggacgaggatatacaattttgtgcattgaaaagaagatgacaaaaagtggtaagggggagggcggctccccttgctaaaaaaaaaaaaaaaaatcttgcgtaatgctatttcggctgtttaacaccatcacaaatatactatttttgatttaaccattgcttctatgaatgacttagattataattcggatttctaaatctaactaacagatgatttgtcgtgtaatttggtatgctacattattaagctttattcaaaaactttttattttta

SEQ ID NO: 71793 - DNA, 212 bp, Glycine max
ggaaaagaggtaatcaagtttttatttttaccaacttgtttcttgactcgcctaattttgttcgatcttattctattgtgctactgtcggacatactgccatctgattttcctgttaaatatctaccatttatcatataattttttgaaaaaaaccaaacaatttataaaaaaatattatttaaatttttatatgggggggccgcttttaaa

SEQ ID NO: 71794 - DNA, 127 bp, Glycine max
gcagagggaagttctacacttttttgtttggattgatcgagtgtactttttcttttcgagattggcttggtgtgcagtggaaagagggtggaaaagagtggtaagggggagggcggcgccccttgct

SEQ ID NO: 71795 - DNA, 319 bp, Glycine max
caaacaagttctctgcctataacaagtttgtggaagcacattcacttacactatcgtgcgctttttccttttcctcttcatcctccccttttctcaaatgctccttaaattcttccccgaagcgaaaaataatcagcttcattactgcttcgtggcaagaactctctggagttttactattctcctcgattcctttcacttgccttaaagctatatctaataatcccctaagggagtctctttataagaaaatggatgagagaaatacatttgctgtaaaaaactcttctacattcaatgccttaaccgtcaattccct

SEQ ID NO: 71796 - DNA, 282 bp, Glycine max
gtattctattattttcccaaaaaaaaaaaaaaaaaaaaaaaaaaaaaaaaaaaaaaaaggaaaggggaattaaacaaattatattgagtaatgcattggacaaaaaataatgttttatagtgttacgctaatggaactaaattggcctttatatgataacaatctaaatttattaaaacgggggggggccttttattaggatcgattgtattttccggccctttagactgattaacttttttttatgggtcccatacacaaattacatgggccccgatttaa

SEQ ID NO: 71797 - DNA, 341 bp, Glycine max
gtcttacaaaccagaggagttgatgaaattggtgaaggaatttgaaggggaggtttcgggaaaatctttatatgtttattatattatataattttattggtcatttctttttttataattaattcttttttattatctttaactttaatttttttataattattttatttttatttattttaattatattttttttatttttttattataatataattattattttttttatttatccttatttttttcttttattttaattttttatattatattgtttttaattttttttttcatcttatttttttatatttttattataaattttttatttttttttt

SEQ ID NO: 71798 - DNA, 422 bp, Glycine max
cccacgcgtccgcccacgcgtccgtgcttgtggtaattatcccttcaacagagagcctcaatgtacaaaaggataaatactgcttgtggtaattttagtttacagttagtgactgtgagaggtttcttttggcctttggctatacaaaaagtgttatagagcactgagattcactatttttttagagcataagcatatttaagcagggatagatgagataactattttttgttttgtatccttggcaattctaagagagataaagttgagtccggatactcgttgggggtatcaaggttatttagatattgctttagcatttatttgcgtctattgtattttatgggaagtgttggaccaaaacaacagtaaagaaattattttgcaacttgtgactagtatatatgatattgtttcacccc

SEQ ID NO: 71799 - DNA, 422 bp, Glycine max
cacaagccaagtgaaagtgagaaaaaataaaaatcaaagagcataatgtcagggatcattcacaagattggggagacccttcatgtgggagggcacaagaaggaggaggagcataagggtgagcaccatgctggagaatacaaaggggagcaccatggtgaacacagtagtgagtacaaaggagagcatcatggtgaacacaaagctggagagtaccatggtgagcacaagccagagcacaaagaggggttcctagacaaagtcaaggacaagatccatggtgagggcggcgccgccgagggcgagaagaagaagaaggagaagaagaagaaggagcatggccatgagcatggccatgacagcagcagcagcagtgacagtgattaaactgctgcatcacctatatatttaaaaggtttatg

SEQ ID NO: 71800 - DNA, 418 bp, Glycine max
accacacgtacgacttgatcggtggagtgcaactctcactaatgaggtgaacctttcggatcatacaaatacgaaattcatactaacttgctgtgcaacggatgattgatgatgctaattaacaaaatatgccaacatagaagcacaccttcgagaactcataactgtgcctaattaccctacgagcagcatgcttgtgataggagaacttaaatacttgatcgttatgatcgactcagtgtacatgaacaacacacatgagcttgtgctagactgaatgaaaaagattcacgtgtctgagcgccttacccgtaaaattctgaatgcaacaaaaaattcgattccacttgtgggagagtttgctatcttctcagatacacagcctagaaatcatccaaccataattaaggtaatatgg

SEQ ID NO: 71801 - DNA, 432 bp, Glycine max
atcgagataactagaaacagtgtgatgaaaatgaaggtccttgttttcttcgttgctacaattggggtagcatggcaatgccatgcgtacgatatgttccctctccgaatgaacactggctatggtgcccgtactccggaggtgaaatgcgcaagttggaggcttgctgtggaagcacacaacatctttggctttgagaccattcctgaagagtgcgttgaagcaacaaaggaatacatccatggcgaacaatatagatcagactccaaaacagttaaccaacaagcttacttttatgccagagacctcgaagtccatcccaaggacacatttgtgttcagtatagatggcaccgtactctctaatattccatactacaaaaaacatggatatggggtggagaaatttaactcgaccttgtatgatgaatgg

SEQ ID NO: 71802 - DNA, 53 bp, Glycine max
aaaaagaaaaaactgtaagttaaagtttctgtctcacatacattaattgctgg

SEQ ID NO: 71803 - DNA, 404 bp, Glycine max
cccacgcgtccgatatatatatatatatatatatatatatatatatatatatatatatatatatacatatatatacttttttccctttacatattatctctttcttatgtgtaaaactataataaaaaattaagtaaaaatacaattagtctatgaaaaaatagtgacgaaggtttattaatcattgccttctaataccaagttaatagtgactatttggaatctcaattgactattgaaaatgattagtgagcttttttttttttgttaatttctatcatcgtatttttttttttttgaaaaaatgagattgatagtgagaactttaattttggttggaaggtatttttaagtgcacaagataaagtcatttactggtataaattgaatttaattagaatgta

SEQ ID NO: 71804 - DNA, 334 bp, Glycine max
tcaaacatacaaaacacataacaaacaaacaaacaataaaaataacaataaaatagaagggggggggccatattaagacgaaaccatattaaatccaccgccacataatgtaatctgtattctaatgcgaatgtgaacgcggtttcgatttacatccatatacatggggattcgctttaacattgaagaccaaaaccacctttccatctccgattacaacgcgaagcctaaacctgcaggtaatgaatatggccctccattggcttccatgaacatcatagatctcccctaatgttctggattcacccacgtttatatttttacctactcggag

SEQ ID NO: 71805 - DNA, 291 bp, Glycine max
tgatgaagctataatttggatcagattcctttgaatttaaaaaaaaaaaaaaaaaaagggaaaaaaaaaaaaaaaaaaaaggacaaaaaatatagggggatcaagattaaaatacacatgcctgcggcgcctgtgcttccctattgtgttccctttcttgcgtccctgtgcctctgttttttggctgcgggaccggaatttccttggcgtggcctaacttattctccttggagtaaattcctgctttgccggctccctttttatgcgaagaggcaccgtcctattgccctt

SEQ ID NO: 71806 - DNA, 315 bp, Glycine max
ctcaagttgacagggctacctacatgctgcttgtaacattagaagagtttgtgccgtataaatcccataggccaacgaccccggaaaggccagaatctggtccccctatgtactaggctaatgagcgatcctccccacccatgatgaacatgccgcactacacccacctcttatctctatcctacatcatgcaactgagccagagcctcatccgcactcacaggttacgcatgatttctaggacctgatagtcgatgcacctactgcacatgatcatagcaaataaattgcctttctcactctttgctgctgcac

SEQ ID NO: 71807 - DNA, 411 bp, Glycine max
gttggaaccgagattgttatagactcttgttgtgcaacctttgcggaggtgcagaagagaggcgaggatttctgggctgaatttgaattgtacgctgctgatcttcttgttggagtggttgttgacattgctttggtgggtctgttggcaccatatgctcgaattggcaagccttctctgtcaaaaggtttgcttggacaaattcagcatgcttgtgctgctcttcctagcagtgtgtttgaagctgaaaggccgggatgtaaattctccacgatgcagcgcattgccacatacttctacaagggtgcattgtatggatcagttggctttggatgtggtattattggtcaaggaattgcaaatatgatcatgaatgccaaaaggagcattaagaaatctgaagatgacata

SEQ ID NO: 71808 - DNA, 288 bp, Glycine max
cccacgcgtccgcaaacggataaagagatgagtaaatccgtctcaatgagtcccacaaggcacagacactcaaaaaaatgaaatctgaaatagtatctagcaaagtatcgggtgtggcacactgtcaagctgcttcaccttatccaactaaaccctgtcatctatggtgttgtgaaagtgtgaaagccaggaatcaaccatcttaatgttggcataacccgaacaacatttcctaccacttcctcaacttagtatttatttcataaaaaaaaaaaaaatagaaaactt

SEQ ID NO: 71809 - DNA, 200 bp, Glycine max
cattgataaaaaatcagaccgctttagtaggtttatcggcttggataactcaaaatttgaagaggtacaacaaatcaatttgaagcggtctcttataaattttccttcttaatttcttattcagaattatgatttatttaaaaaaaaaacaaattaaaaatattattattaataaataaaaattttaatttgggcggccg

SEQ ID NO: 71810 - DNA, 128 bp, Glycine max
ctgacgcgtggtcggacgcgtgggttaattttgtaactactaggaataggagtgacggggcaccccatccagccctccctccttaactacaatttccccttcactccatcaccttattaaaacccatc

SEQ ID NO: 71811 - DNA, 437 bp, Glycine max
ctagaaacagtgtgatgaaaatgaaggtccttgttttcttcgttgctacaattttggtagcatggcaatgccatgcgtacgatatgttccctctccgaatgaacactggctatggtgcccgtactccggaggtgaaatgcgcaagttggaggcttgctgtggaagcacacaacatctttggctttgagaccattcctgaagagtgcgttgaagcaacaaaggaatacatccatggcgaacaatatagatcagactccaaaacagttaaccaacaagcttacttttatgccagagacctcgaagtccatcccaaggacacatttgtgttcagtatagatggcaccgtactctctaatattccatactacaaaaaacatggatatggggtggagaaatttaactcgaccttgtatgatgaatggggtaacaagggcaat

SEQ ID NO: 71812 - DNA, 391 bp, Glycine max
cccacgcgtccgaaggaatgccgtctattgtaattaatcctttagaggaggaacgtgatgcagacgaacaaattatattgccatcagtaaatgcagaagttgatatggctgtattagctgccttaccacaatcaatgcaacttgatattcttgcacagcttaaaggaaagaaaaccgaaggactagtaaaggaagttgacaatcagaatcaacatgatgtcaattatcggggcaagggtaaggggattctgctcattgaagctgacatggtaggttgtagctccagacatgacaatgttacatcaaggagtgacaatcaacactcaattgatgaaatgttagctgcatctattgctatggaggaaaatgaagagttagtaaataatacatc

SEQ ID NO: 71813 - DNA, 263 bp, Glycine max
  unsure (1)..(263): unsure at all n locations
ggatgtcttgtgcttatagggaagcgaccacatttacttcataaagggggtaaaaacagatagggattatcacttatactggactcataatatgcaacatcttttttcactgnnataactgtctttcccctaacatttcacctttattttcttgctcaacttaaaggaaatattatccttcgactattaaacgaacttaacactcttaatcaacatgatgtcacttatctgggctagggcaatgttattctgctcattgaaac

SEQ ID NO: 71814 - DNA, 264 bp, Glycine max
acgtgagttacccttgcaggtgcgcttgcgcttctactaattgaaacgttgatgagggttgtggaccatccagaggcatccccaggaccccatgattctgattacgcgtttagggactttgcataactaatgattcatgagaaaaacaagaaatcccaaccccaaatatcaacagtgtatagtttgaatgcataatgcttgaagctgacactgcgaggaatagaaattagctaaaattttagtgtgattgtcaagtactgatcg

SEQ ID NO: 71815 - DNA, 413 bp, Glycine max
gactagaccttcttcgacggtatcttcttcttttgttgtttgtgtgggtgttttgtctctcacctgaaaatgtcttgctgcggtggtaactgtggttgcggaagcgcctgcaagtgcggcaacggctgcggaggctgcaagatgtacccagacttgagctacaccgagtcaaccaccaccgagaccttggtcatgggagtggcaccagttaaggctcaattcgagagtgctgaaatgggtgttcccgctgagaacgatggctgcaaatgtggagctaactgcacctgcaacccctgcacttgcaagtgaggtgttggagagctaaagcttcaagcagagatggcccttagaaataatgataaaaactatatgtagtttcaaaacttcaaaatatgtagtatgtattatgttgc

SEQ ID NO: 71816 - DNA, 225 bp, Glycine max
  unsure (1)..(225): unsure at all n locations
tncgccacgcgtncgcaagatactgcagcaccttctgtgaacacaggcttcctggagctcttcagacaacatgatttcaatattgacactgcaggtggcattaattcaaatggggatgtgcatggcttatgtttaagggtatcatctattatccttaatgatcatctagaagaatcatacttcactcctgaatcaaacagaataccctttactcttaactcaatc

SEQ ID NO: 71817 - DNA, 237 bp, Glycine max
cccacgcgtccgaaaaaaaaaaaaaaaaaaaaaaaaaaaaaaaaaaaaaaaaaaaaaaaagaaaaagggacaaatatggcgttggtgtgggaggatcatactgaataaaaccattgcgtgcgtcgacattcctaattttttttgggcggcgaggcccaattttttgtctggtgtctgtgccccttcacgtctgggaaagccctgtctttacccaccttaattttgttgtagccctgg

SEQ ID NO: 71818 - DNA, 428 bp, Glycine max
attgtttgttgttgtaactcgttcttcttcttttgttgttctgtgtttgtgtttgttttttctctcacctgaaaatgtcttgctgcggtggtaactgtggttgcggaagctcctgcaagtgcggcaacggctgcggaggctgcaagatgtacccagacttgagctacactgagtcaaccaccaccgagaccttggtcatgggagtggcacctgttaaggctcaatttgagggtgctgaaatgggtgtgcccgctgagaacgatggctgcaaatgtggaccaaactgctcctgcaacccctgcacttgcaagtgaggtgttgggagagcaagcttcaagcagagatagcccttaattaggaataatgataaactattaatgtgtagctaaaaacttatgtattatgtctgtgatggttttcgtgcactc

SEQ ID NO: 71819 - DNA, 148 bp, Glycine max
caatattttgtggttaggataaggtgggaggttgtagaaagcataggtgaacaagagctgtggtgtgctgaggaataattaattactaataaaccacatgatggattcctgtcgaccaaattaatggtaaattggggacccaaaaatg

SEQ ID NO: 71820 - DNA, 136 bp, Glycine max
aaaaaaaaaaaaaaaaaaaaaaaaaaaataaaaaaaaaaaaaaaaaaaaataaaaaaaagggaaaaataaaaaaaaaaaagggcgtacgatttggggggtcctgggttgcgttcccgtccttgccccgttttactt

SEQ ID NO: 71821 - DNA, 81 bp, Glycine max
aaaaaaaaaaaaaaaaaaaaaaaaaaaaaaaaaaaaaaaaaaaaaaaaaataaaggaaaagggaaaaaaaaataaaaaaaa

SEQ ID NO: 71822 - DNA, 76 bp, Glycine max
gcaataatctgttgtggtatttgtctcctctttgttagatgtcatttaattatggcaatcttaatgcacttcctct

SEQ ID NO: 71823 - DNA, 76 bp, Glycine max
gcaataatctgttgtggtatttgtctcctcttcgttagatgtcatttaattatggcaaggttaatgcacttcctct

SEQ ID NO: 71824 - DNA, 288 bp, Glycine max
cccacgcgttcgcccacgcgttcgcccacgcgtccgaaaaaaaaaaaaaaaaaaaaaaaaaaaaaaaaaaaaaaaaaaaaaaaaaaaaaaaaaaaaaaaaaaaaaaataaaaaaaaaaaaaaaaaaaaaaaaaaaaaaataatataaaataaatgggggcctgttttaaagaataatattttacatacccttgaatacaaaataatatctttttttataataaactaaaattaaattatatttccgtttttttaaaaattgtaaattagaaaaaacttggacttacca

SEQ ID NO: 71825 - DNA, 417 bp, Glycine max
cccacgcgttcggtttgttgttgtaactcgttcttcttcttttgttgttctgtgtttgtgtttgttttttctctcacctgaaaatgtcttgctacggtggtaactgtggttgcggaagctcctgcaagtgcggcaacggctgcggaggctgcaagatgtacccagacttgagctacactgagtcaaccaccaccgagaccttggtcatgggagtggcacctgttaaggctcaatttgagggtgctgaaatgggtgtgcccgctgagaacgatggctgcaaatgtggaccaaactgctcctgcaacccctgcacttgcaagtgaggtgttgggagagcaagcttcaagcagagatagcccttaattaggaataatgataaactattaatgtgtagctaaaaacttatgtattatgtct

SEQ ID NO: 71826 - DNA, 266 bp, Glycine max
cccacacgtccgaccacacgttcaactacgcattcgatgacgcatcgggcgagggtttggaactgatttgtgctagtttgcaagggaagctcattgattgtaaactgttaacaggcatggcaagctctttgacaacattagccattacctattctcctgtcaacaatggttccaggggtttcagaaagtctgttaatgcttctaaaggaagatgttgcataaaagcaatgacgatagagaaatccttggaggaattttacaatgtg

SEQ ID NO: 71827 - DNA, 336 bp, Glycine max
gatcgagataactagaaacagcgtgatgaaaatgaaggtccttgctttcttcgttgctacaattgtggtagcatagcaatgccatgcgtacgatatgttacctatacgaaagaacactggctatcgtgcccgtactcccgaggggaaatgcgcaagttggaggcttgctgtggaagcacacaacatctttggctttgagaccattcctgaagagtgcgttgaagcaacaaaagaatacatccatggcgaacaatatagatcagactccaaaacaggtaaccaacaagcttacttttatgccagagacctcgaagtccatcccaaagacacatttgt

SEQ ID NO: 71828 - DNA, 246 bp, Glycine max
ctttttccaaactctaaaaattgttagttccacaaaaccaaaccaaaatggcagcagcctggggctcatccaccatgatatcaacaccagccttatcttgacgcacaagcattgataagcaccatcatacgaagccttgccacgtgcgctgttaaggccttagacccctcacaaggctcacacacaaagagagcagggctaccaaaagggttattccaaagggtggagtcggtgttagagctgaac

SEQ ID NO: 71829 - DNA, 192 bp, Glycine max
ggcctttaaatatgtccggaaagaatagtgctaaactttttatgttgcagaaggacgataaatttaaatgtttgcattctcttttttgtcttttttttccccttgttttgcaaatgttcatttgcttcagttggacaatgttcactggcgtgtactgaagggcgatattaattttattgttggttctcttgg

SEQ ID NO: 71830 - DNA, 250 bp, Glycine max
gtgaatgagacacgctggctaacaaccctgcaacggaccatgggcagactcttagctgtatgagggacaggcatactgagctctacagacatggaagtctctgacaggaacagataaccatagtggtacacgtgacacacagaacgcggtgactactggtctgctgaagcctgcccattagagacagcctagaagcatcgttcgaagtctgctgagcatgcctagattgtcatactcagcaacactgatg

SEQ ID NO: 71831 - DNA, 210 bp, Glycine max
aaaaaaaaaaaaataaaaaaaaaaaaaaaaaaatcaacaataaaaaaactaaaaaaaaaaacaaaaggttacgcttactattatataaactaattcatctataaaatacacctatcaaatatctatctcccattttaactccatattctccaacttctactaacccttcttcttcttaaactaacattctacttacatatcaaacacttt

SEQ ID NO: 71832 - DNA, 181 bp, Glycine max
cccacgcgtccgaccaactttgtatccgttgttaaatggcttgacaatttcaattttgtttgttgtttgcatctgaaaaaaaaaaaaaaaaaaaaaaaaaaaaaaaaaaaaaaaaaaaaaaaaaaaaaaaaaaaaaaaaaaaaataaaaaaaaaaaaaaaaaaaagaaataaaaaatgaaa

SEQ ID NO: 71833 - DNA, 308 bp, Glycine max
tacgaatttctaatagatgaagctattcttgactcatgcagtggctgcttacatggtcgtacgctaggaggaatatctttgagccgtgactatgaaacgaccggtggttctggtacctgattacctgatatgcttagaatcgaaagatggtgatgcacaagcccgtgaacgaagttttggagctgcacgagagcacataggtgcatggatttgagaaccgtgacaaggtgaagcttatgcgagatttgctgcaaatggctatctgaaatgctgccgagatcatctgatccaatataatgtcttgatga

SEQ ID NO: 71834 - DNA, 155 bp, Glycine max
tctgtccttaattcccgggtctactccactcttcctaaaaaaaaaaaaataaaaaaaaaaaaaaaaaaaataaaaaaaaaaaaaaaaaaaaataaaaataaagttcattttaaaaatattaaaaataaaaaattaaaatacaataataattaaaa

SEQ ID NO: 71835 - DNA, 234 bp, Glycine max
gctataccaatataatcatattactcacatagatccatctttcactgatacacctatactctgggccaaagagctacttctactcattgactgagaaaattacatccacccaaaattaattccaccatggacaattcttttatccaactatattatttaatcacttacacaacatctttaactcccacaaccgaaaccttttcacaaacgaattcctcaatcgtaacaattatt

SEQ ID NO: 71836 - DNA, 232 bp, Glycine max
gtttgttgttgtaactcgttcttcttcttttgttgttctgtgtttgtgtttgttttttctctcagctgaaagtgtcttgctgcggtggtaactgtggttgctgaagctcctgcaagtgcttcatcggttgctgaggctgcttgatgtacccagacttgtgctacactgatttaaccattaccgagacctttgtcatgtgagtatcacctgtcaaggctcattttgagggttc

SEQ ID NO: 71837 - DNA, 281 bp, Glycine max
cccacgcgtccggtttccgagtctgcgtttgtgtttgtttcagagagagagagagagagagagagagagtgttgatttgttttttttttttcttttttaaattaataaattaattcagaaagggttccttcccttccttttccactcttgtcttatgattcttcttcattcttccatttgccctagattagatctttctcttccaatctttaattatattagatttgattttccttaatccttcccctgctttttcattccggatttttctgcatcagtct

SEQ ID NO: 71838 - DNA, 218 bp, Glycine max
cccacgcgtccgaaaaaaaaaaaaaaaaaaaaaaaaaaaattaaaaaaaaaaggcgcacactctcggggatagggcatcttacatacacgtacattcaacaaaataatctcttatatagtgacacctatattcaattcactgtccttctttatacaacgtcgtcacttaaaaaaccctgattttaccaaactaaatctttttacaacatatccctttt

SEQ ID NO: 71839 - DNA, 427 bp, Glycine max
gccctttgtcaagttttagtcttcatttaccatatttttcatttttggttttattttctgaaaagagatgtattatagtaaatatgagactagatatcatctaataaaaacttaggccttaatttgtcatgttataaaattaaaaagaccaatctcttttgttatgtcaattacaccaaatttgctaaaatgcatggtatggttagtgatatgatcaatggtggattacgctacggttagcatgattgcatgaatcaacggtggagattccccaaatgaaaaagctagatggaacagcgtgctaacgtgactccaatatagaagaagagagccacactttcttttccaccattgacattctctctctcactctttccttaacatttggcaacatttgtcaactctcttcttcctttctctaactttt

SEQ ID NO: 71840 - DNA, 387 bp, Glycine max
gcgccatgaactgagtttccttgcttacaaagattatggaatcggtagtgcttggatacatctggggtgattgggtctacctgatacctatgtgcttaagtctagcaagaaggagctagctacagacattgaatgactgaacaagataattactggaactgaatagagtggccgtggcaggtcttagagggcaagagcaaaaaaagaggatctttgtgtaaagtgaatggcttgccagattggccactgatggccattatagtagagcaaatggaatggcagagagatttgatcactgagaaaacagttttccatcttaatgatcaggcaattaaaaatggttactcttgggacataatggtcaccgtttgggggtgcttattcttt

SEQ ID NO: 71841 - DNA, 344 bp, Glycine max
tcggagaatatcatagttgaaatttaagtgttcctttggtacttgattcgaacagttgttattcggaagctaagatttgatttaaaaaaaaaaaaaaaaaaaaaaaaaaaaaaaaaaaaaaaaaaaaaaaaaaaaaaaaaaaaaaaaaaaaaaaaaaaaaaaaaaaaaaaaaaaaaaaaaaaaaaaaaaaaaaaaaaaaaaaaaaaaaaaaaaaaaaaaaaaaaggggggcccttttaaaagaaccaaagtttaataaccgggaattgaaaattaaaaccttttaaaaaggggaccaaaaataaaataaaggggccgctttttaaaaaattgagaatgggaaaa

SEQ ID NO: 71842 - DNA, 156 bp, Glycine max
aaaccaacaccttacaaaattcaaacatccttaatctttttttcccccaacgttgttcctctttcgctacggtgattttttcccatgtctccatgtcctctaccaacttgaatgcccctcactcttcatctctttactttactatcactttttcta

SEQ ID NO: 71843 - DNA, 139 bp, Glycine max
tcgtccacgcgttcggagctgacttccataaactactaccccatgtgcgttcacccctttgattaccaggcacatcttagacttatgtctacgaaactcacattccgtcaagcttaacaccgtcttcaatatgcgagat

SEQ ID NO: 71844 - DNA, 334 bp, Glycine max
gagaagtgtccttgtgtgctacatgcacttgcagtcttacatcctgacatcgaatattcagggatcaaccaacaaccacatctcattaagatatactatctgtggtagatatcttgatagaggatccattcatctacatatgatgagctctagaatagcagatctatcttgagacacatgtacatatccaactgtaccaatgtgcacttctatggcacgtgctgctgatgataactatgtattatgctatgatcacaacgcttgaacctgaccagcagatatagcttgtacaataagctaaacatctagtctataggaaccatctggcactatg

SEQ ID NO: 71845 - DNA, 329 bp, Glycine max
cggacgcgtgggcggacgcgtggggtgagctataagctagtttatcgtgaggagaatatgaagtggtttgtgttctttgttgctgcagtagttttggtagcatggccatgccatggcgcaggctaccaaaggttccctctccgaatgaaaactggctatggtgagcgttcttcggaggtaaaatgcgcaagttttaggcttgctgtggaagcacacaacatccgagcctttaaaaccattcctgaagagtgcgttgaaccaacaaaggactacattaatggcgaacaatttagatcagactctaaaacagttaaccaacaagctttctt

SEQ ID NO: 71846 - DNA, 265 bp, Glycine max
aattgaaattttaaaaatgactgggataaacttaagaattcaattattgaaattgaataagtaaacaattgaattggattggtcgaatggtatcaaaaaaatggagtactaactcccatttcttatttattattgaattaaccgatcaacttgctttgttatcgaacatttctttttgatttcaaaaattttccggaaaaaatttgaatctatttttatatgcgaatcaatcctactacttctggtcctgaggtttctgcgcttg

SEQ ID NO: 71847 - DNA, 74 bp, Glycine max
tttttggtcaaaaaaaaaaaaaaaaaaaaaaaaaaaaaaaaaaaaaaaaaaaaaaaaaaaaaaaaaaggaagag

SEQ ID NO: 71848 - DNA, 356 bp, Glycine max
aagtgagttttttatcacaaatttgcatataatccaataccttagtacatacaataaggggataagagtcaatttagataggataatctaatcacccatgcaatgctaagacaactacaatactataagggccggccctttaatagaacgttacttgactatctacaaaaaaaattgacattgagctttgcaatcttacatcaagcatttgcactgcccaatttctacaaactgcgtacttggaaaaaccccggctttgcccaccttaaccacctgacggacaaccccattttccaatgttacgctctctgtaacaaggcattcaccgatggacttgcccaacatacccccaccct

SEQ ID NO: 71849 - DNA, 286 bp, Glycine max
attttataagtgatttttttatcacaaatttgcatataatccaatacattgtacatccaatagaggagaagattcaatttgatgggataatctttcacccaaagcatgctttgctaatccgctactatgttcccagcacttttaataaaagttacttgactatctacaaaaaaaattgacattgagctttgcaatcttccagcaagcatttgaagtatataagtgcagcacttccaacttcttggttccattcattgaacacttgcaaattatcaattccaaaaat

SEQ ID NO: 71850 - DNA, 101 bp, Glycine max
taactatctaaaaatgaagaattattcatgaagtactttgtggatacgtgttccttctgttctataaatgtgtggatgtgaaaaatcttgtgttgttaatc

SEQ ID NO: 71851 - DNA, 206 bp, Glycine max
ctttctaatagtcctgaacaatttggatatttccaccatattctccataaatgaattccttatgagcttgctttcagagaaaagaattgctgaaaatcaattgccttcaaaagctcctcatgatgaaactcttgagcattatgaaattgctgcaggatcatcaacaatctgttgctcaatgctgcaatgtctgagtatgttccaac

SEQ ID NO: 71852 - DNA, 203 bp, Glycine max
gcattgccattctcaagtaatggcgctactacgtcttgcttgcttaccttcaacaaatcaagtatccactcatccccattcccattccctatccacctctttctcttttcttcgcaaaacgccccattctcaacccatcaatttcagtctctcttcctttcactttccacgcctaaccacgaatgaagaatatggaataaagg

SEQ ID NO: 71853 - DNA, 290 bp, Glycine max
cccacgcgtccggggagagacacatgaaaagactttcacaatctatacaaattctatcgaatttggcgccagagcttctatttaaatctaataattctgcaattctgttaccatcatcagcaaccttgccaatatggcaacccaccgttcatccttgttaatgattcggtgtgcaaagtcttgccgattgcattgaaagataggaatgattgtgaggaattggcctttacaactctggttagtggtaatttgaaggaattaaatgcatgtaacaccttcagtgaggaaag

SEQ ID NO: 71854 - DNA, 319 bp, Glycine max
gcgaacactctaacattagacttggcatcagattcagatcctccgtcgccatcagccctaacctgggggggctttctgtagcccatagactaacagcagcacctcaccttcagatctaaaaaaatgagcagcaacagtagcagaaccgaacccatagcccaaaacatcatcaaactcatcagcaatctctgcttcttcgtctttggcttctctgtcttaatcttcaccggcatagccataacctaccatgccccagacccatggctcgagtccaaccctggcctaaccaacctcttgaaccaatcacaaaatgccactt

SEQ ID NO: 71855 - DNA, 301 bp, Glycine max
tcggatcgagataactagaaacagtgtgatgaaaatgaaggtccttgttttcttcgttgctacaattttggtagcatggcaatgccatgcgtacgatatgttccctctccgaatgaacactggctatggtgcccgtactccggaggtgaaatgcgcaagttggaggcttgctgtggaagcacacaacatctttggctttgagaccattcctgaagagtgcgttgaagcaacaaaggaatacatccatggcgaacaatatagatcagactccaaaacagttaaccaacaagcttacttttat

SEQ ID NO: 71856 - DNA, 388 bp, Glycine max
tgaagacatagagcacaatgttgccggaagtccagacgacaagctgcagcacaagtttggagtgccaaacaaacagtgattacttacgaaagccttctgagatttttcttttctacaagatggaataataagagatggctgctggagattcattgagcattgctggttcgtggttgcggccccatataaatttaggggggaaaataataaagaagcgatttaagggtacaaggatagtgcatagtagaaaattaggaatgttcataggctttgatatggaaaggctatttcttggttaattattgctgtgtggaatgaaaatgtacagtttggtaattaatgatttacgttatcgtttccaaaataaattccatacttcttaaaacat

SEQ ID NO: 71857 - DNA, 173 bp, Glycine max
cccacgcgtccgcccacgcgtccgtccttttccttttcctcctctgtcttggagtgatgaccaggaagcttctcttttatcttttctaatatacctttcttctccttggcctctccttcatgatgcatacttaatttactttattattgtgtatttatctcttccatttacaa

SEQ ID NO: 71858 - DNA, 180 bp, Glycine max
ctgagattatccctcttataacaatccacacccaaattctagggttccgaagtggacgctggcggaaagatcaagaagggcgccagaggtagaaagggctgctgcccaaagaagaagccggtttcaaggtccgtcaaagccggtctccaattcctcggctgaagaattggccgttatttg

SEQ ID NO: 71859 - DNA, 163 bp, Glycine max
gagacgcatgcgtatacggacaacaccgagcggcttacaggacaagatgatcggacggggccagaactaatctatgcgcatgcaacagggccgagatctacccaggaagaggcatcatacttcagagaggcaattgtgagggttgcatgtttgcagactcaaa

SEQ ID NO: 71860 - DNA, 186 bp, Glycine max
tggaacggactaagttagaaatgctaatgacgtcactacatggaaaggatcagctgctggttcttgtatttatgatttataactgtgtgtgaactgtactgaattttcaactccaacgatattcactattgcgaaaagacagctgactatgatgtcgaggtcaaaggggttgaaatatctgctgat

SEQ ID NO: 71861 - DNA, 300 bp, Glycine max
tcttggaggaagcatggcaacatggaaaggaatcaaaacttaagagttcatcagtgcatgcagaataatctaggaaatcaggatcagagaaagagaaaaaggggaagaagtcatggaaaagttctctgtcttcatggtggaaggcttacaagaaaagcatgcttagtgaaaaaaccttcaactattctaaattaaaggattctggtaataagcattctcattcttctggtccaatgtatagattctccttaagttctgtttgataacactttctctcatcatttggttctttttttagtc

SEQ ID NO: 71862 - DNA, 190 bp, Glycine max
gaacaagtagttgagaactaagaaggagaagcaaatggcttcctcaatgatctcttccgcagctgttaccactgtcaaccgtgccggtgccggcatggttgctccattcactggcctcaagtccatggctggcttccccaccaggaataccaacaatgacattacctgcattgctagcaacggtggaaga

SEQ ID NO: 71863 - DNA, 183 bp, Glycine max
cccacgcgtccggctaccctaaccgtttatagcactgccttgcgattgatgcgttctgtactagcattaccacaccttaaatttggatatttaactacacctcctgtgtgagcatcaattgcatctcataatgactgtaaactatcagaactccttttggatcatgaatagcttcatcagata

SEQ ID NO: 71864 - DNA, 381 bp, Glycine max
gtggtctttggtaattataccacagggcatctaatatagaaaattcacgtcattcttcacggtgtaaaatatagaggccatatataattttcttaagttcaaattatcttgtgctctagaacactgcacatgcacttctcattttgtaatctagctgcagataattctttgtagttcaaaaacactttggatatatgataacgaattcttaccgtgtatgatatgaaaccatagcaatcattattattgctgagtaaaggtgtcaaacagcagtgtgttagcctgtacagaaccattggggagcaaattctgatgaaataaggaaaaggattgatcattttgttaacttaacctaattcctacatatctgtgtaaaccatg

SEQ ID NO: 71865 - DNA, 144 bp, Glycine max
tgccacgcgttcgtccacgccttcgcggacgccttggttcttaatttcaagttgaatttggccaaaattcccgattttcatacccttggtaatgattttctgaattagctttaaaaacctaaaatttaaagttcttaagccaca

SEQ ID NO: 71866 - DNA, 139 bp, Glycine max
gtgtgcagtcgatccctcgaagaaaaagcgaaaatgccgtcgcacaagacagggagagggaagaagaagttggcgaagaagatgaggcagaacagtgcctatcctgtactggatccacatgaggaccgacatcactatc

SEQ ID NO: 71867 - DNA, 78 bp, Glycine max
ccatccactacctcacacaagcatcaagtgagtctgctgtgatttgaatggagcgaagaggatattgcgactgcaatc

SEQ ID NO: 71868 - DNA, 130 bp, Glycine max
aacactcttccgcttggttttgcagcattatttgttctttgtatgaacaactgttattcggatgctatcaattgattccaggaaactgtaattcccatttatgaagcggatcctcttcttctgtttttca

SEQ ID NO: 71869 - DNA, 185 bp, Glycine max
gctaccaggagctccctatctacagtgtttgcctctctttctctctctctctctgcaaaagctacgaagctgcgttctgatccttcaaattaggtactctattgatctcttcctactttgccctcttgcaattcttcccttaccaacctgtgttctgtccataacccttcaagtttaactctttt

SEQ ID NO: 71870 - DNA, 91 bp, Glycine max
gacacacggagctacatatctacagtgtttaactatctttctatctctctctctcgaggagctacgaagctgcgttctgatccttcaaatt

SEQ ID NO: 71871 - DNA, 81 bp, Glycine max
cccacgcgtccgaccacacactagtacagagtgagcgtgaaagatgccttcggcgaggggatcaatgtcaccaaggctcga

SEQ ID NO: 71872 - DNA, 64 bp, Glycine max
tcctcctactgtttgttgttgtaactcgttcttcttctttcgccgttctgtgtatatgtttatt

SEQ ID NO: 71873 - DNA, 98 bp, Glycine max
atcattcgtatcgagcgtcgacgtacagattaacaatcccactagtataaggaacagaagagaaagggtgaagctattcttatcaccttgtttaggat

SEQ ID NO: 71874 - DNA, 70 bp, Glycine max
cattgatttgttgtttggaccatacagagttaaggacttgtgacccttcttagctcatacccctttatac

SEQ ID NO: 71875 - DNA, 66 bp, Glycine max
acaaagctactaacggtgaacacttccgggttctgggcttctgaatctcggatggttgaccctaat

SEQ ID NO: 71876 - DNA, 182 bp, Glycine max
ctcacgcgtacacttacgcgtgggcagacgcgttggatgactcgaacattccgtgactggttcgtactgtcgacccagcttctcttttcaccattttcttggcaaccaaacaccctaatcaatcaataaattcattttttttaattcgcagtatgaattccttttctctgatcgggatctgg

SEQ ID NO: 71877 - DNA, 87 bp, Glycine max
gaccacacatggatcatacatggcgtgggtaatggcagcactctggctcatgacgcgcaggtcgatttcggaagtgcacacacggac

SEQ ID NO: 71878 - DNA, 196 bp, Glycine max
cctagccgttcccatctgagtgttgaacagagtagtaggcagatgccaatcatggattgcactttagtgtcatcttttattccgatgtcaactgctacacactccagctttcatgaaaaacttcgtaaccctcataagaagcctcaaaatgaggttcctactactacaactaggactcccacaacaacttcttttt

SEQ ID NO: 71879 - DNA, 99 bp, Glycine max
gaattatcacttaacctgcaagttgatcccattagtatgacgaagtggcaggtgttccggcctatggaccagtcttttaagattcaccgtatttataga

SEQ ID NO: 71880 - DNA, 78 bp, Glycine max
  unsure (1)..(78): unsure at all n locations
gcccccgaagntctcagggtcagcatgattaagacctgcaccattcatgcctgctccgggatcccattgtactgccca

SEQ ID NO: 71881 - DNA, 332 bp, Glycine max
attccctcggcgagccgactcctacggctacaccttcaaatggtacattagtgttttttatgcacgcagcgtaacttctaacttcgtgggatactgccctgctgcagattctgtctccgagccctacattgttaactcaccacttaatacttgctcatggtgcatcagccaattgctccctgaacagatacgaagctcatcacaaaggacaaattgtatttaccatagctactttcctcgttgaaccaaaatctaatattgatgctaatcgcaatgcatcaacgctagctcttgactgtattgttggcttgattgcttatcccattacattt

SEQ ID NO: 71882 - DNA, 180 bp, Glycine max
cccacgcgtccgaataccattcgcccggaaaaccgtacgcccactcactgacttttgcagaaccggtttctgatcttacattcattctatggacctctttctctttctctcttctctttcctaagctctcttggaaattggaaaggagccagggttctttttcggccttaaagaacaagg

SEQ ID NO: 71883 - DNA, 185 bp, Glycine max
gccgaaccttcgtctaggctataccttgacagacaaatcatcgagtgggaacattaggattttgtgtatgctagagatgcctattacgagcttgctagaggtggatccactaaggatactgagatacttgatcggagccgtagctatgatgatcggagtattgttacccttcagttacatgatgt

SEQ ID NO: 71884 - DNA, 147 bp, Glycine max
gaccattattggctacaagagacagagtgatgtaatgttctaattcgtttacatgcgtgaggacagtgatgccagtaaattcatgcgaatctctatatagctggtacttatggattgacttggatacttcgttaacgtctacgttat

SEQ ID NO: 71885 - DNA, 181 bp, Glycine max
tcgtccacgcgttcgggcaccaaccttgaatggttttccttcttcttctctaagactaagagtcgaattggcctctcttcttcactcgaagcttaaacaagcacgcttttcggtttcggcggtctcgctttaaaaccctacctttcggcctggtatctggagagccttcgagtcacccaac

SEQ ID NO: 71886 - DNA, 185 bp, Glycine max
gtttgttgtgagctataagctcgtttatcgtgaggagaatatgaagttgatgcgtttactttgttgctgcagtacttgtggtagcatggccatgccatggcgcatgctaccaaaggttccctctccgaatgaaaactggctatggtgagcgttcttcggaggtaaaatgcgcaagttttaggctt

SEQ ID NO: 71887 - DNA, 431 bp, Glycine max
ctagaaacagtgtgatgaaaatgaaggtccttgttttcttcgttgctacaattttggtggcatggcaatgccatgcgtacgatatgttccctctccgaatgaacactgtctatggtgcccgtactccggaggtgaaatgcgcaagttggaggcttgctgtggaagcacacaacatctttggctttgagaccattcctgaagagtgcgttgaagcaacaaaggaatacatccatggcgaacaatatagatcagactccaaaacagttaaccaacaagcttacttttatgccagagacctcgaagtccatcccaaggacacatttgtgttcaatatagatggcaccgtactctctaatattccatactacaaaaaacatggatatggggtggagaaatttaactcgaacttgatgatgaatgggtttacaagg

SEQ ID NO: 71888 - DNA, 191 bp, Glycine max
gaaggattggtgctccaaattccatgttgcagaagcggcagtagagaaagtcattgaagaacggttcaagaaaaactaccaccctgcttgggctgctgcttacattcttgaccctctttatttggttagggacacgagtggcaagtaccttccaccgtttaattacttgacgccggaacaggagaaagacg

SEQ ID NO: 71889 - DNA, 186 bp, Glycine max
agcaagctcatcctagagttttaaaaatggcagcagcctcctccatggctctctcttcgccatccttggctggcaaggccgtgaagctgggcccatcagcccccgaagtcgggagggtcagcatgaggaagaccgtcaccaagcaggcctcctccggaagcccatggtacggcccagaccgcgtca

SEQ ID NO: 71890 - DNA, 277 bp, Glycine max
agcacacgtcccgtgttgcatctatgcaatgtagaactataatgcacataaagaggatcatggcgatcatatatcttgtccaagtgaactactttctgggatatggtgagataagagcaagagtggtcgacagagacgtgagcagaactcttgtcgagcccctgatgtgataagacaaagaaatgtaccaggatgtcagtaaggatatcagattgacattctgagggtcttaagaaaataacctgtctaaacatcgggatgacgaccgcagaccaag

SEQ ID NO: 71891 - DNA, 434 bp, Glycine max
agtagttgagaactaagaaggagaagcaaatggcttcctcaatgatctcttccccagctggtagcactgtcaaccgtgccggtgccggcatggttgctccattcactggcctcaagtccatggctggcttccccaccaggaagaccaacaatgacattacctccattgctagcaacggtggaagagtgcaatgcatgcaggtgtggccaccagttggcaagaagaagtttgagactctttcctacctgccagaccttgatgatgcacaattggcaaaggaagtagaataccttcttaggaagggatggattccttgcttggaattcgagttggagcacggtttcgtgtaccgtgagcacaacaggtcaccaggatactacgatggacgctactggaccatgtggaagctgcctatgtttggttgcactgatgct

SEQ ID NO: 71892 - DNA, 450 bp, Glycine max
  unsure (1)..(450): unsure at all n locations
cccacgcgtncggccacgcgtncgatcgagataactagaaacagtgtgatgaaaatgaaggtgcgtgttttcttcgttgctacaattttggtagcatggcaatgccatgcgtacgatatgttccctctccgaatgaacactggctatggtgcccgtactccggaggtgaaatgcgcaagttggaggcttgctgtggaagcacacaacatctttggctttgagaccattcctgaagagtgcgttgaagcaacaaaagaatacatccatggcgaacaatatagatcagactccaaaacagttaaccaacaagcttacttttatgccagagacctcgaagtccatcccaaggacacatttgtgttcagtatagatggcaccgcactctctaatattccatactacaaaaaacatggatatggggtggagaaatttaactcgaccttgtatgat

SEQ ID NO: 71893 - DNA, 411 bp, Glycine max
  unsure (1)..(411): unsure at all n locations
cccacgcgtccgggttatgttaaaaacatatgcagacacatctgaagtgtcacaaatgcgtgacttgaacagccaataccagagagacattgactcaagtgtgaaagaaatagatttaaatttcagttcaagcttttagggacaataaagatgtgtctggttatgttaaaaacatatgcaacaaaaatcattctcaaaagaaaatatgtttataaactatgtatatttttataatcagaaagaaaaaaaaagtcaagaatagttataatacaccttnnaaaaatgaaaaaaaaataaaatagaaaaggaaagaaatataaaacatccccctggaagaaaaaaaaatagcaagtgcctggtcagaacgggcttaccccccttcttgggtggtgttatacaaaaaaagggggg

SEQ ID NO: 71894 - DNA, 295 bp, Glycine max
gcagaaagcaagctcatcctagagttttaaaaatggcagcagcctcctccatggctctcgcttccccatccttggctggcaaggccgtgaagctgggcccatcagcccccgaagtcgggagggtcagcatgaggaagaccgtcaccaagcaagcctcctccggaagcccatggtacggcccaaaccgcgtcaaggacttgggcccattctctggcgagcccccgtcctaacttactggccaggtcccaagtgactacggctgggacactgctgggctttccgccgacccaaaaac

SEQ ID NO: 71895 - DNA, 55 bp, Glycine max
cccacgcgttcgtccacgcgtccgaaaaccttatcatctccgaatttcattttca

SEQ ID NO: 71896 - DNA, 310 bp, Glycine max
gccacacatacccaaacatatagcctgctcactgtttctcaccgagttactcagtgagcgcataattacatatacatttacttatacatccactcccagacacaaccctgttgaattccctatcaaattggaatataaaatggcaatttgaggatcaacgtacacttacccactctaattcctaatcttgaacccttgccttaaaaattaccctcaaaataaaaaatttctaacacaaaattcaactcattcttcaatccaatcttaaaaccttaaatacaacctcaaaaacttcaaaaccccccttaaa

SEQ ID NO: 71897 - DNA, 431 bp, Glycine max
  unsure (1)..(431): unsure at all n locations
gtttgttgtgagctataagctagtttatcgtgaggagaatatgaagttgtttgttttcggtgtggctgcagtagttttggtagcatggccatgccatggcgcangctaccaaaggttccctctccgaatgaaaactggctatggtgagcgttcttcggaggtaaaatgcgcaagttttaggcttgctgtggaagcacacaacatccgagcctttaaaaccattcctgaagagtgcgttgaaccaacaaaggactacattaatggcgaacaatttagatcagactctaaaacagttaaccaacaagctttcttttatgctagtgaacgcgaagtccatcacaacgacatatttatattcggcatagataacaccgtactctctaatatcccatactatgaaaaacatggatatggggtggaggaatttaatg

SEQ ID NO: 71898 - DNA, 184 bp, Glycine max
ggttaccatatcaagtcttcctcgacaagcttctttaccatttcgctgccggtgaataggaaaaccgttctcttcaaatgattgaagcgacttactcatcgcgaatgtttcgcggtgttcgtttcgttctccgtggcttcaatcccgtcgccgaaaatcagatccggttcaagcttgtgaatgg

SEQ ID NO: 71899 - DNA, 80 bp, Glycine max
tgggtaagtcctaatttaaatggctggctttcatttttttatttttttcaggcttgcttgatcgttcaagcatgcaaatt

SEQ ID NO: 71900 - DNA, 93 bp, Glycine max
cccacgcgtccgggagttatcaactgattcttctcaacatgttcgctctgcactggcttgtggtataatgggtattggacccgtgttagggaa

SEQ ID NO: 71901 - DNA, 214 bp, Glycine max
gtttctgctaggcttaacaaacctctcataacaaaaaaaaaactcactctcacatactcgcgttttcaaaaaccctttacttctctattttctttctaattccttatccaatattatagtacccttttatcccaaattatttaaagttaaaacctttattactactcatatttgttttttgtttgttaaattttaaaaaatggaagcacattct

SEQ ID NO: 71902 - DNA, 253 bp, Glycine max
aaaaaaatctcaaaataaaacaaccaaaccacacactttacaccctcttcaaaatcgctggcaaggtccaggacaagaagaaaccatgtcttggttcaatctaaaatggtggggtcctaaaaccttcctttccgaccctccaatttcttcggttgtctaacctttaagtcctacaaaccactcatcctctacgctctaacacaatagggctgaaacaaccatgtcggagaataaaacagttactggtacaggg

SEQ ID NO: 71903 - DNA, 107 bp, Glycine max
ctaataaaaaagacacggctcccccaccttcatccaagcccgccaagtctggagaaaggaagcataagaccccacaccgcagcgaaggaaagcccaaggagaaggcg

SEQ ID NO: 71904 - DNA, 420 bp, Glycine max
  unsure (1)..(420): unsure at all n locations
gccacgcgtncggaaataactaaaacagtgtgatgaaaatgaaggtccttgttttcttcggtgctacaattttggtagcatggcaatgccatgcgtacgatatgttccctctccgaatgaacactggctatggtgcccgtactccggaggtgaaatgcgcaagttggaggcttgctgtggaagcacacaacatctttggctttgagaccattcctgaagagtgcgttgaagcaacaaaagaatacatccatggcgaacaatatagatcagactccaaaacagttaaccaacaagcttacttttatgccagagacctcgaagtccatcccaaagacacatttgtgttcagtatagatggcaccgtactctctaatattccatactacaaaaaacatggatatggggtggagaaatttaact

SEQ ID NO: 71905 - DNA, 443 bp, Glycine max
gtttatcgtgaggagaatatgaagttgtttgttttctttgttgctgcagtagttttgggagcgtggccatgccatggcgcaggctaccaaaggttccctctccgaatgaaaactggctatggtgagcgttcttcggaggtaaaatgcgcaagttttaggcttgctgtggaagcacacaacatccgagcctttaaaaccattcctgaagagtgcgttgaaccaacaaaggactacattaatggcgaacaatttagatcagactctaaaacagttaaccaacaagctttcttttatgctagtgaacgcgaagtccatcacaacgacatatttatattcggcatagataacaccgtactctctaatatcccatactatgaaaaacatggatatggggtggaggaatttaatgaaaccttatatgatgaatggggtaacaagggcga

SEQ ID NO: 71906 - DNA, 66 bp, Glycine max
ctgatataaaaaaataacaagcatttgcaagcttgcaatttatgattaataatagtcatttctagg

SEQ ID NO: 71907 - DNA, 335 bp, Glycine max
gtagaaaatggcattcctacgtctacaccttcaagtgatggagatccaaatgttaatggggaaaatgttcaagcagcatctacgggcaatccagcaccagcaccagctccaccggaggcccccttatcaccagcaggggtttcagagactactgctccaagtccacctacagttcctatgagtgatccctttatatgattggtatacctaccacattgttgacataagcacttggaaaatgaattcatttataattcatgttttattacaggtgtaaagaaatcattttaagagatgaaagaaatctagtgtattagtttgtgacaaggttaaac

SEQ ID NO: 71908 - DNA, 399 bp, Glycine max
  unsure (1)..(399): unsure at all n locations
cccacgcgtccgctggctttgtaattggtgggaagcaactatttgtgatattggtggcgcgcttatcatcctgcccacagtttggttggacaactttacaatgtcataaatatagaaactatattccactaaacagtgagcagaaaacgtgagtcttcatagtgctcgtatgaataaaacatgtctctgcaccaaatgattagccagccatccttctcaaaatcttcacaagctttttatctaccccagaattcaaggcggtgtattttgattatgttggggaaggtattatagttagtttttaattagttgaaaaatttatttgattattttataaataaactcttttaatagtttttagcatttctttaaaaaaaaaaannnnnnnnnnnnnnnnaa

SEQ ID NO: 71909 - DNA, 246 bp, Glycine max
cccacgcgtccgcgagataactagaaacagtgtgatgaaaatgaaggtccttgtgtgtctgcgttgctacaattttggtagcatggcaatgccatgcgtacgatatgttccctctccgaatgaacactggctatggtgcccggactccggaagtgaaatgcgcaaggtggaagcttgctgtggaagcacacaacatctttggctttgaaaccattcctggaaaaggccgtggaaccaccaaaggat

SEQ ID NO: 71910 - DNA, 415 bp, Glycine max
agaaacagtgtgatgaaaatgaaggtccttgttttctttcgtgctacaattttggtagcggggcaatgccatgcgtacgatatgttccctctccgaatgaacactggctatggtgcccgtactccggaggtgaaatgcgcaagttggaggcttgctgtggaagcacacaacatctttggctttgagaccattcctgaagagtgcgttgaagcaacaaaggaatacatccatggcgaacaatatagatcagactccaaaacagttaaccaacaagcttacttttatgccagagacctcgaagtccatcccaaggacacatttgtgttcagtatagatggcaccgtactctctaatattccatactacaaaaaacatggatatgggtggagaaattaactcgacttgtatgatgaat

SEQ ID NO: 71911 - DNA, 231 bp, Glycine max
gattggtgcaagtgcatatgcttgcttattcaaacttagcaagaagatcattgggctgcgtgagcgttaatttttgttggttcatacttttttcaagaacaactgataagatttatcaagaatattttattttaatcaaaaggcagcaaaagaattgtgacgctgacggcaccaggttccttgtaacaggatctctatgtattttactgacattcaaaatattttactgac

SEQ ID NO: 71912 - DNA, 98 bp, Glycine max
cccacgcgtgcgaaaaaattaaaatttaaatttaaaaataaaaagaaaaaaaaaagggaaaaggaaaaaaaaaaaaaaaaaaaataaaaataaaaggg

SEQ ID NO: 71913 - DNA, 269 bp, Glycine max
atcgcatcaaaaaaaaaaaaaaaaaaaaaatttaaaaataaaaaaaaaaaaaaaaaaaaaaagaaaaaaaaaaaaaaaaaaaaaaaaaaaaaaaaaaaaaaaaaaaaaaaaaaaaaaaaaaaaaaaaaaaaaaaaaaaaaaaaaaaaaaaaaaaaaaaaaaaaaaaggggaggattaaaaaaaacaaaaaagtaacaaacaaaataagaaaaaaaaaaaatataagtattgaacaaaaaagattataaaaaaaaaagcccggataaaaa

SEQ ID NO: 71914 - DNA, 236 bp, Glycine max
gccacgcgagcgaacacattcacgatcagattctctattaactgaataaagtgatggttgcatgaccagtaaggagactcatttccgatttgtggaacctcacgctcacctgttgcagcttcaacatcagcatcaactgaagcgtctttaacctcattgatgaagcgacattgtctaagaaaagtcgcgtactcggtgaggagttgtcagacggcgcagtggatccagtccgcaac

SEQ ID NO: 71915 - DNA, 446 bp, Glycine max
  unsure (1)..(446): unsure at all n locations
cacctttgttcactcttcttctcttgcggcttgggttttagcgcagcttcttctagatttaaggaagatgggtaaggaaaaggttcacatcagtattgtggtcattggccatgtcgactctgggaaatccactaccactggtcacctgatttacaagcttggaggcattgacaagcgtgttattgagaggtttgagaaggaagctgctgagatgaacaagaggtctttcaagtatgcctgggtgctggacaaacttaaggctgagcgtgaaagaggaatcaccattgatattgctttgtggaagtttgaaacaacaaagtattattgcacagttattgatgcgcctggacatagggatttcattaagaatatgattactgggacatcccaagctgactgtgctgntcttatcattgattcgaccactggtggttttggagctggta

SEQ ID NO: 71916 - DNA, 309 bp, Glycine max
attgacggatcgatccacagcatatctgtaagcttattgaactaaactgtttaactttaatccaaaataagcatatcgcatgagaaggtgtcccaagaaggaagacagaccctcaggcacgttataattaaaaaaataaattatcgtcctattaataattgatttagcgagtgagtgtttcttttttttctctctctctctgaacttgaactcaacccttacttcgttccgcgacaacgatgaccaactacggcacaattccaacctccttcttgcctttgaccaacctcgacttcatctcacgcgcca

SEQ ID NO: 71917 - DNA, 263 bp, Glycine max
cccacgcgtccgcccacgtttccgcccactcttccttttgaatatagacaagaacacagagagagaccttcaaatagtggtagagaaagggtcacagctcctaaacaaggccaaagctgagctcgttgattttacaagctatgcagatgtctcaaaccagccagttcaagacccccaagtgcactaacaacccggttcgtttgtaaatttttagtgaatgcaccattcaaacatttcgcattactgcttatatatagttcaat

SEQ ID NO: 71918 - DNA, 451 bp, Glycine max
  unsure (1)..(451): unsure at all n locations
cccacgcgtccgcccacgcgtccggtttgctgngagctataagctagtttatcgtgaggagaatatgaagttgtttgttttctttgttgctgcagtagttttggtagcatggccatgccatggcgcaggctaccaaaggttccctctccgaatgaaaactggctatggtgagcgttcttcggaggtaaaatgcgcaagttttaggcttgctgtggaagcacacaacatccgagcctttaaaaccattcctgaagagtgcgttgaaccaacaaaggactacattaatggcgaacaatttagatcagactctaaaacagttaaccaacaagctttcttttatgctagtgaacgcgaagtccatcacaacgacatatttatattcggcatagattacaccgtactctctaatatcccatactatgaaaaacatggatattgggtggaggaattt

SEQ ID NO: 71919 - DNA, 398 bp, Glycine max
cccacgcgttcgcccactcttccgcccacgtttcctctcacgcgtccgcacgccatggctgacatcgccaccttccccttcaaactctctcactttccgactctcttctcttcttctgattccaaactcttcggccttcccctctccaatccctattccctcaaattcgacccttcttctctctccactacctctctctcctacgtcaaagcccgctactacggcagctgcagctgccctacccgctccctcaacgacttccgcttcctcaagtcctcctattccgactacgactataaagctctcgacctctccactctcatgtcagataccgtgaggcttattgatcagagccagaatattgtcggagtaatgtcaattgatgactccattcatat

SEQ ID NO: 71920 - DNA, 247 bp, Glycine max
aggcatgcgtccacgcgtccgtatcgagataatttgaatttgtgtgatgaaaatgaaggtccttgcttggttcgttgctacaattttggtagcatggcaatgccatgcgtacgatatgttccctctccgaatgaacactggctatggtgcccgtactccggaggtgaaatgcgcaagttggaagcttgctgtggaagcacacaacatctttggctttgagaccattcctgaagagtgcgttgaagca

SEQ ID NO: 71921 - DNA, 66 bp, Glycine max
gtattattaaaaaaaatttaaagtaacattacattttaacatagacactaatctagatggcaagat

SEQ ID NO: 71922 - DNA, 383 bp, Glycine max
attagttcttaatttgtttcctcttgcttccttctccttctaaattattattactagtacaacttatcatatatatatatatatatatatacctctggttatagcagcaaactaggctagcttagcttgcactttgaaaatatatatacacagaccaagtacaaccccaagctctagctagctagggacatgtctagccgaagatccagacaacattcagggtctacaaggatctccgatgaccaaatcatcgaacttgtttccaaattgcgccaacttggtcctgagattcgcaataggcgaactgacaaggtttcagcgtccaaggttctacaagagacctgcaactacatcagaagcttgcacagaaaggtgagtgactt

SEQ ID NO: 71923 - DNA, 460 bp, Glycine max
gtttgttgttgtaactcgttcttcttcttatgttgttctgtgtttgtgtttgttttttctggtcaccggaaaatgtcttgctgcggtggtaactgtggttgcggaagctcctgcaagtgcggcaacggctgcggaggctgcaagatgtacccagacttgagctacactgagtcaaccaccaccgagaccttggtcatgggagtggcacctgttaaggctcaatttgagggtgctgaaatgggtgtgcccgctgagaacgatggctgcaaatgtggaccaaactgctcctgcaacccctgcacttgcaagtgaggtgttcggagagcaagcttcaagcagagatagcccttaattaggaataatgataaactattaatgtgtagctaaaaacttatgtattatgtctgtgatggttttcgtgcactctggtattttggggtaaacaatcattcttagaata

SEQ ID NO: 71924 - DNA, 296 bp, Glycine max
atttctctcttcttcatcttgctcttacattttgggtaatgtttgaaacttgggggtagctgagctgtttgacaaaaatgaatattgcacaagttacagcatggcagcctgggatttgtgtgaaaaatatatctcagttacacaggcttcaatcaaaaccatgtgttttaccaaatagttttgagccttgcttacaaagcttaagagcaacacaatcggttagctcaaaatgttggcccatgttacaatctcggaaacctcttcatatttgcttaggccctgggaaaaggatgatg

SEQ ID NO: 71925 - DNA, 290 bp, Glycine max
caagaacttggggagaagaacactttggattttggaaagtccataagtatggaaatagcagaactggtgagagctgggatatagttgtagacgaggaaacttattatgaggccgaacctcattatggatgggcggatgttgtgggtgattcaacccaattactttcaattgagcctcgggagaggcctcctggtgtcttgcgtaatttagactttggttcaccttcatcgtctgaagctcatgatgactcacctgatgaagattattcctcttcacaatgaagataaaca

SEQ ID NO: 71926 - DNA, 164 bp, Glycine max
attgaaaaaaaaaaaaaataaaaaattaaatttaaaaaaaaaaaaaaaaaaaaaaaggaaagggaaaaaaaaaaaaaaaaaaaaaaaaaaaaaaaaaaaaaagcaagaaagaaaaacgaataaaaaaaaaaaaataacaaaagtatgacaaaggaggaaacaaa

SEQ ID NO: 71927 - DNA, 210 bp, Glycine max
gattgtttgttgttgtaactcgttcttctttttttgttgttctgtgtttgtgtttgtttgggctctgacctgaaaatgtcttgctgcggtggtaactgtggttgccgaagcttctgcaagtgcggcaaccgctgctgaggcttcaagatgtacccagacttgagctacactgagtcaaccaccaccgagacctttgtcattggagtggca

SEQ ID NO: 71928 - DNA, 277 bp, Glycine max
acgaccaccgcgcggcaacaagcgagatagccgtttctagtatcagggactggagggagcatggcttgattcacaccgtgatccgtgatctcctgattggtcactcgaatgtcttaagcaggccttgatttgcgattgccagggctgtagcaagggctacactgccaactactgatgatgcttacttcattcatgatgatgcataatgagctttcaagatggcttagggccaatctgcatgtgctacaatacaaatcagttcgatgctggacctgac

SEQ ID NO: 71929 - DNA, 471 bp, Glycine max
cgtctcggactcctctgtccttcatctctaacacgttcacctttgtaacgggttctacactctccgttcgcctcgacactccaactcactcctcctcgtccacaagctccacctccccctcggcgacaagtggctcgacgagtacatggacgagacctccaagctctgggagacctctcacctcctcaaatccgccatctccaacttcgaacctttctactcccagggcttcaaccttctctcctccctcgactcatcccacccccaggtagtgagggctatatcagggtgcagaagggaggctttgggtttggaggagcagaaccgcgctctgatggagactcgggtccacacgcttggtctgcgtctggacgagagggtatccgtggagtccaagctcaacggcttcaacggcttcaggggcgttctctacgcaatggaggacgtgagttcgatgcttttaatgatcct

SEQ ID NO: 71930 - DNA, 399 bp, Glycine max
tccacgcgatcggtgggagacctccatactgttaggacaaagggtacttggtggattgtgctatggagtatctggaaatgccagatgtgatgtcatatgtggtggattctgagtggatacattatgaatatgatgacctgataacaatatgtgaggtgattactatcatcatgaatcctgatgactctatacgtgcatcaattcatgcattatgcactatatgcaagagcaaaatgcacataccattaaatgatggagctaaaggcattatcactgactgtgcgatgaactagcactatggtcataatagatctaattatacttagctaacttaacatgcactatatctgaagcatgcagacctataaccattaatacttctgtgactacacatcttat

SEQ ID NO: 71931 - DNA, 173 bp, Glycine max
cccacgcgtccgcctcactcaaacttgggattacagaaaccaacaacagttcttgcactgaggtttcacgatgttgctggaacttgcacttggtttgtttgtgttagctttgtttctgcacttgcgtcccacaccaagtgcaaaatcaaaagcacttcgccaccttccaaacc

SEQ ID NO: 71932 - DNA, 258 bp, Glycine max
gccatgagccacacatctactggactgagttttcagttttacagttactggcaggcaaacagcgaccaagagtccatgctgtcagatgaaacctgcccacgggccgtgtgcgacaactttgagcttgcaaaagcgtgccataccaagagcaaaatgatgagcacttttgtcaccatagcaaatgttgcaagaccaaagccgcgtctgacattcattggccaccttcacctcttaaaagataaacttcacacataaatt

SEQ ID NO: 71933 - DNA, 123 bp, Glycine max
tgaacacgaagcaggatcaccagggtgctccttaaatttctccaaacatgcacggctagcgtggtccctgtttggttcatgcctatgcatcaagatgatggagatggtacgctctcacaggat

SEQ ID NO: 71934 - DNA, 347 bp, Glycine max
gagagagcgagcagtttcagacacagagagtggggtttgggattggagggattgacgctgcgtctcttcctcttctctttcgatccatccctcattcctaatcctgcaatccaaccacctcagcctcacactcacatatacacatatctgaacgcgtatcgtccctcctatggcttcaaagcgcatcctcaaggagctcaaggacttgcagaaagacccaccaacttcttgcagcgctggtccagtagctgaggacatgttccattggcaagcaacaataatgggtcctgctgatagtccttatgctggaggtgtattcctagtcactattcacttccttccgatta

SEQ ID NO: 71935 - DNA, 62 bp, Glycine max
gagagagcaagctgaagttgacacagttagtttgactctgtaatggcggaagagacgacgcg

SEQ ID NO: 71936 - DNA, 300 bp, Glycine max
aactatttaacaccatagtaactttgaactactctatagttatctatgggaatcgattcttctttatggtgctaatgaccaatgcacactgaaccgatacagtttttatcaccatcatcaagttgaacccttaacatgctatcatgatgctggagcatgaagctagcagtttactcgatggagaactacaatttagcaaagctggtacgaaacacgatacgagaatacaatctttgcagtgaaccgtttaccgtaggacggcttatgaaagtgacaaagaagcctgctatgttgacatct

SEQ ID NO: 71937 - DNA, 163 bp, Glycine max
cccacgcgtacgccataacaatggtctatggcgcgatagtcagctttggttctagatccttgtcattggtaggattgagcaagatactctgtgccgtgcactgtgacaacagcttcatgaatcatcatccataggaatataccaggttgtatcaatatccatc

SEQ ID NO: 71938 - DNA, 265 bp, Glycine max
acggtcacacgaacgggactctcaacgcttacctgtaaggacatttgatgctaactggattcctcacactcgcttaagggaaaccaccgtactcagatcaagatgccagtctttcatggcaatatgcacttcttatgagaccacaaaccttgatgcatcatagctgaccagcattaagcttgcagtgaaactgactgctaggtatgaaacgacttatgtctaaaaattacatgaagacttgttattagtgcatgaaatggcattc

SEQ ID NO: 71939 - DNA, 221 bp, Glycine max
gaaggacgttcgaactaataacagggtaactgctgcatgaatgatctgctaccgggatgttaccaccgtcaaccgtgccagtgccggcatgattgctagatgaagtttcctcaggtccatggctggctttcatacgctgtaaaactgcaagtgacattaccgacattgaatgcaactgtggatgagtgcattgcaggcatgagttgactgatatcgtcaag

SEQ ID NO: 71940 - DNA, 311 bp, Glycine max
atgaatgtgcatcatgatagaaactcaaatggacattttatacgaacgcgactcaatccaaaagctggctaggttatcaatctaaccgagagtgcataaacaactgacactgatttgttagcacttgcattaaatgagtaaagagccatgacatcttgcttatagatagagctatagatgtcgttgccaagtcgagtgttcgtcgggctagatcttgatacaaacaccatgcattgtgaatactaatggtcgcatcgaccaaacttactagcgctaatagcagtactgtctaggtcatgtatcatatcgag

SEQ ID NO: 71941 - DNA, 397 bp, Glycine max
ggagtgttcggggtagacgtacgcgtacgctagaaacagtgtgatgaaaatgaaggtccttgttttcttcgttgctacgattttggtagcatggcaatgccatgcgtacgatatgttccctctccgaatgaacactggctatggtgcccgtactccggaggtgaaatgcgcaagttggaggcttgctgtggaagcacacaacatctttggctttgagaccattcctgaagagtgcgttgaagcaacaaaggaatacatccatggcgaacaatatagatcagactccaaaacagttaaccaacaagcttacttttatgccagagacctcgaagtccatcccaaggacacatttgtgttcagtatagatggcaccgtactctctaatattccatactac

SEQ ID NO: 71942 - DNA, 374 bp, Glycine max
cttccatcaagatcagaataataatgtaactaggagtgatggttgctacggttttggtagcatggcaatgccatgcgtacgatatgttccctctccgaatgaacactggctatggtgcccgtactccggaggtgaaatgcgcaagttggaggcttgctgtggaagcacacaacatctttggctttgagaccattcctgaagagtgcgttgaagcaacaaaggaatacatccatggcgaacaatatagatcagactccaaaacagttaaccaacaagcttacttttatgccagagacctctaagtccatcccaaggacacatttgtgttcagtatagatggcaccgtactctctaatattccattactacaaaaa

SEQ ID NO: 71943 - DNA, 200 bp, Glycine max
cccacgcgtccggccacacgtacgttgagcttaaatcataaccgctcttgtatgggttcttcacttgggctacaatcatcatggcgtaatgacatcaggttggaaatgtcttgaggcaaggtgctattcgcagcacacataccactgttgcgtccatgcttaattacatccgacgcatggattgatgcctgctactcatt

SEQ ID NO: 71944 - DNA, 261 bp, Glycine max
gtgacggataatcgtaagtggcctatcgtccatgttgccaccatccacggatattaagcacgcgtcattacgatctgccggcaaaggatcctaccacactcttgatggtaattgctcttcatggcctatcgtactcttattcaggataaccagggtcattcatcgccactgtgcctatcatcacccgagctgtgatactggttatggccaaacaatccgagtacgctctcgaagatcttcgcacattgtctaacttgaaga

SEQ ID NO: 71945 - DNA, 258 bp, Glycine max
gccacagcgtatcgtaagtagtctagggtccaagctcccactatccactgagattcagccctctgtcactttgattcgcctgcaagggattataccatacgctcgatgggaattgcccttaaaggcgtctcatacgactaatccgcctcaacagggtcaccaacggcacgtgcctttggggagcctaggcctgctactgcttatcaacaaacgaaccgactacgcacacatctgatgtagcccctagtcggacttata

SEQ ID NO: 71946 - DNA, 438 bp, Glycine max
ggtaccgttccggggttcgacggcacgcgtccggccacgcgtccgaaacctggctcctttttttagctctttccttatttagccttggacactccaaactgtgaaggccatttttagcaaaggaaaaaaaagtgagccagtgtgagagagagtggtcatcagtcatcaccggtgattgattaagatgcagcaatcaaacggctctgattcgacgactacgatggagcagagcgcgccgtcggcttcgaggcaatcaccggcggtggctaggcctcagcagtgggtgccgatgcattaccctgcggcggctgctatggtaatgccgcaccacatgttgccgtctcagcattatgcgccgccggcgtacgtgccttaccaccaccaggtcgcggctcattctcagcaccaggaccagaacggatcctgcggtgagaacaa

SEQ ID NO: 71947 - DNA, 347 bp, Glycine max
acgcgacgcgtccggcgacgttttccctccattggatggagatggcaacatgagatggttcttggaagggtctggagtggattagcgctgatcagatgaaggcggcgaaagagcaaggcaatctgaaagtaggatcttctttaagaaatgctgtcccacattcgtaccggtaccaccagactggagatcgcctactacggactaaacgatctcagtctccggcctcaaggcaaccatatactggtgcatatgaccgactacgtaaacgtgcacgacgctctgcacgactcccaacacgtagacgtcgacgttgacaccggctactgaagccacaggaccatgcctta

SEQ ID NO: 71948 - DNA, 408 bp, Glycine max
gatagagataactagaaacagtgtgatgaaaatgaaggtccttgtttggtgcggggctacaattttggtagcatggcaatgccatgcgtacgatatgttccctctccgaatgaacactggctatggtgcccgaactccggaggtgaaatgcgcatgttggaggcttgctgtggaagcacacaacatctttggctttgagaccattcctgaagagtgcgttgaagcaacaaaggaatacatccatggcgaacaatatacatcagactcctgaacaggtaaccaacatgcttacttttatgccagagacctagaagtccatcccaaggacacatttgtgttcagaatagatggcaccgtactctctaatattccatactacaaaaaacatggatatggggtggagaaatt

SEQ ID NO: 71949 - DNA, 388 bp, Glycine max
gccacacatgcggcttaatcatctgtaaagtctactgagatgtcttcatgagttggttcatcccagggtctagcttgaacaatccccaataagatccaatataggatctagaatgcttatcactgcatagaattcttttgaggatgtgagcgacacattcgtacctgaactaggatgctggagatctacttcaggtgtctcaactagcacttgtgagtgcacaacatgatctagatattgacattgatccaggatttcttgaaagtgcttgcaattatgctcaactactaacacgtagacattcgactttattcaccgtaaacttatgcacttgaccttgcccggacgcaaacattactgagacctaatgaaccacttgattagatct

SEQ ID NO: 71950 - DNA, 171 bp, Glycine max
ataacacatgagcgaagctctagacattatctacaggtgtgggtcccatgttcgggttctcagaattcgaggaagtgcacctaaatctgtccgagcgaatccacgatatgttcgtgtaaacactgagacaaaataagggcggccgttatagaggatacaagcttacgtacg

SEQ ID NO: 71951 - DNA, 155 bp, Glycine max
aacacacatacgtccacccatcattatatgcatccacttatttaaaaggctaagggacttttgcttactacgaagatcttaagacttacacttcatctacgctaatcctggtaactcatctcatattactacgataacacatgttgtcactttac

SEQ ID NO: 71952 - DNA, 120 bp, Glycine max
ctcatactgagtccgaggagaagatattattacagtcagacagcttctgcctagagcactcttcatcatatcattccaaacagagctctttagtttcatccagcatcaattgctttctca

SEQ ID NO: 71953 - DNA, 320 bp, Glycine max
cccacgcgtccggttatggtctaatgcatcatagacacttagtagttgagccattttttaactcgttgtattcagtaacaacaatttcattcagttaagggtgcaaagagagttatggatgtagcatttaaaaagtgcatgatgctgtgtagcatttgcgtgattgtcttgaatgatgtaaaggtttgtgaatcatacgaggaattcattttgagtctgactaagcttcttcagtgtaaaagctgaccttttgtgtgttgtctgcgcattgatcatggatttgactgcggagcttggtgcccgtggttcgaagccgttta

SEQ ID NO: 71954 - DNA, 84 bp, Glycine max
cattggcttaccctctagtcattccatttgcagaggccgtcaatatcagggctgggaccttgatggctgtattggccatacaca

SEQ ID NO: 71955 - DNA, 391 bp, Glycine max
cccacgcgtccggcattttccctgatttaatttggtaatataaggttaacttgcatgtaaattttgctttcaaagacaaagcaaagaggtagcagggcgtccgaattcattaatctctaaagtctcgagtctgaaactaaagacaaccaagtgttagtgttacacacacagacacagcatccaatatccatcgagagatgttggaggcgaagtgtctgaagaaagcagtggttccttccactctgattgaggacccttctcctggaagccttcagtgcacacgtcttgctctccgtgtttgcgaggacccaagttcttgttttgtctacatagcctccggtccccacatttataagctccacattgctctgggagaatcttcagtcagcga

SEQ ID NO: 71956 - DNA, 61 bp, Glycine max
accacacgtccggacacccagtagagtttctgtctgcttacaacgtgcgcgacggggctta

SEQ ID NO: 71957 - DNA, 68 bp, Glycine max
aacacacatacatacaaccttatgtaaatgaatgctcatactttatatggtaagggacttttgctaac

SEQ ID NO: 71958 - DNA, 317 bp, Glycine max
gtactactcaactaaggccagcaacatatgttcaagcatttgtctgaggcttgtacgatcaagaaagtctcttcataatcatcatcatgtgtcaccatcgtcatcttggtcgtcaccttcttcatcgtattcatcttcttcttcgtggtctttggcgcattataataatcataatcataactcatcgccctcactttgcatgagagacaaaggtcgaggtcaaggacgaagaagcagcaaacacaacaaatgttctaatggacttagaggctgctatccctatggcaacatgaggaacgcacatgtaagccatggta

SEQ ID NO: 71959 - DNA, 186 bp, Glycine max
cttacgcgtacgaacatctgatttcgtttctgtcttccattgtctcaagggagggttacatcaatggattccgactgacttgacattcgttttaagctactattcttaattccaggttatgcacatgtactatttgacatcttcctatattcacttgattttccgtgtaattcgtaatgatttact

SEQ ID NO: 71960 - DNA, 122 bp, Glycine max
ctactactcatttaatgccagcttcatattttgaagcatatttctcaggggtgggggatcaataatgggtcttcataatcatcatcatgtgtcaccatctttttcttcgtcgtcaccttttt

SEQ ID NO: 71961 - DNA, 219 bp, Glycine max
gccacacatacgtccacacattcgaaatttaaagcgcttgcatcatagggctccgaacacatgcttatgtgaaggactgaacaatgcttatcacttcactcactgccactatattctttagcctctctatagtaaatagttaaacatcaaaacggtatgctttattaggcatatccattagagaattatcctttattgcaccctattaatagtctataa

SEQ ID NO: 71962 - DNA, 341 bp, Glycine max
gagatacctagaaacagtgtgatgaaaatgaaggtccttgctttcttgggtgctacaattttggtagcatggcaatgccatgcgtacgatatgttccctctccgaatgaacactggctatggtgcccgtactccggaggtgaaatgcgcaagttggaggcttgctgtggaagcacacaacatctttggctttgagaccattcctgaagagtgctttgaagcaacaaaggaatacattcatggcgaacaatatagatcagactttaaaacagttaaccgacaagcttacttttatgccagagacctttaatttcattctaaggacacatttgtgttcagtat

SEQ ID NO: 71963 - DNA, 359 bp, Glycine max
ctgtggttggaacttaaaggccttggcaattcgatttggtttatgaagatttaatcacccgtaattttgggttcccgtgttccgactttaactggaagttaagggatgagacctaatgaaaaatagaaacatcgaaatccgtatcacactttgtgtgtatgacccatataaagctgttaaattgaagcaatatcattactaaaagttctgagtgttcaagacactggggggcacttttaagggagaccaatttaaaacccctgacttgaaacttaagaacttcttatatgtgtagctaaaactaagaccaatggccccactttttaaaatctttagatggtaaaaaccatgtggttccc

SEQ ID NO: 71964 - DNA, 364 bp, Glycine max
ctcatacgtgcgatttgatgtgtggctgagtgaagtgatgagagatgtgaatggtgttggacattttcacggaacatcctacgaaggtgttaccattcatcagctaagtctctaacacagtatcacctacacgggcttacacgcgatcatgtcgatttcgagcttttgctcggcttcagcagataatatgtgtgtatagctctgactactttcttgaaactagtctctgatggatatcatgccatggctgctgattatctagtatatattgaactgctagatcaggaagtacaatttttgatgtctcctttattttggatctgatgcttatatgattactttgatcaatgcaggaccttgagca

SEQ ID NO: 71965 - DNA, 289 bp, Glycine max
ccggctcgtgctagtcaatgatctgggacctaactagggttgtgtcatgaaatttgataatcattggatgtggaatacgaaatgtcaattatggctgaaacttctattagtacttcagatctatatgtatatatagcatatgatgacaactgtagatggaaaaatgtgggctggagctctagatgatccatacttacgtacgacagcatgccacattgtagatctaatatagcgtgacctacatacagttgattcattgtcagaatacaccgtaagggactgatgaaag

SEQ ID NO: 71966 - DNA, 337 bp, Glycine max
aacaaccatcaatcataaacccatgaattctaagagagaaacgtgagagggctttgaaaatgtgaaagtttatgtgaacttacagtacttctgattttgctcactttggagtactactatcctttttcttggttcacatttggtcttttcacttgcatggtgtgtctccatattatttttcctttctgtattatagggacccctttctttttttctttaaaccgcttatttttgatcgggtgtaattgatgattttcatgctttttactacttgattgattcatatatctatctttatgaggtttctatcatacttttttttatttgtgcttttttt

SEQ ID NO: 71967 - DNA, 280 bp, Glycine max
cccacgcgtccgaattaatcttgtggacaattaacatctcaaaaaaaagaaaaagaaaaaaaaaaaaaaaaaaaaaaaaaaaaaaaaaaaaaaaaaaaaaaaaaaaaaaaagaaaaaaaaataaaagataaaaaaaatgaaaaaaaattataaagcaaaaatatattaattcaattgaccgacttaatacaaattaattactgtctaaataatagcatcacgaaagtaaaaccctttacataacataatttattggcattgtagaatattacctattaaa

SEQ ID NO: 71968 - DNA, 66 bp, Glycine max
acaccgtttgattgttagtttgttctgtgccgttgggatcatgcttgctatgtcgattaagtttaa

SEQ ID NO: 71969 - DNA, 358 bp, Glycine max
cccacgcgtccggcttcacgtaatcactggcttagtgcggtcaggggcggagactcctaactcacatgacacaacacatccattcttaagccagcaccaccttctcatatcttacaatgatcttccaatcgtgatatatgatgtctgcaactctgctattatttgatatagcgcattgcgtgcatggtagactatcaactgtcacacgctgataagataagcattttgccagggcaggcatcattcaaattgcattgatatgctggttacattaccatggaggactagcagaagagagtcttgtactactactttgttgaagcttacgtggaaccagcttcatagccactagttctat

SEQ ID NO: 71970 - DNA, 390 bp, Glycine max
cccacgcgtccggttggatgttcttatattgctggttattgctggggctgaagtgccagagttactcacatatatgcatccttgcgtggaagactggcagtggtgatagatgacattgatagcttaatgctgtgttatgatgtatgtctctttgctcttaattgacatctcgcaatgcgacctgcaaagttagagagtaccagacgcagctatgactagatcttggctattgcatgctcataggcaaatgacatcatgtatgctaactgcatccaatggctcgattatgacatgatagtctgtgcactacacgttgttatcactgaagagagaccggcgttagcgtcgctatctctaaggatctatgcagaacgcgtgctgtaagatgaa

SEQ ID NO: 71971 - DNA, 426 bp, Glycine max
atttctctttctttctcaaagctattataattgtaaaacatacgggaacagtaaattttaataaaagttggattatcaaacatatcatactatcttattaattcctacactgtctttctctttttcttttcctttatttttctttttttctgttacctttcttctttttttttttctctttttttttttctcttattttttttcttttcttttgttttttcttttttcttttttttcttttttttttcttttctttattcttcttttttctttttttttttttttttttcattttttcttttattctctttttttttttactttattttttatttttattctttttctttttattttttttctctttcttttcttttttcttttttgtttttttattttttctttttttttttttctttttttttt

SEQ ID NO: 71972 - DNA, 76 bp, Glycine max
aaaaaaaaaaaaaaaaaaaaataaaaaaaaaaaaaaaaaaaaaaaaaaagaaaaggaaaaaaaaaaggggcgcccg

SEQ ID NO: 71973 - DNA, 284 bp, Glycine max
cccaattcgaccacacgtacgaataataatcaagaatccacaatatccttacaattcaaatacaaaatcgtacaagacaacaactaaaagagcaactaataaaacaaccatacaacatatgataagatcattgcataccaatgatatctatctcctatcacgccataatattcgaaagcactacctttaaacttcctaaatccatagactacaatccttaatccctttatctttcaacaatctatctttctcttatatatctatatataatatatttctttcaa

SEQ ID NO: 71974 - DNA, 401 bp, Glycine max
atttaaggtgctttctataatctacatacactaataaagaagtgtgtgggctagcttaatactaaagctttatgagagcaattaacacacaacaaaaacaaaaatgacagaatagccaaaaattgaccaaagccaagagatacaagaccaagcgggggctgcttgtggctgatcccactttccttgcacgttttttaaagcctaagtcctttttacgggagtacttaattcaattatgctgcccagacttttacctctcagattggggaaaacccgtgcggtacccccatttactcgctttgagtgattgacctttatcacatcttcggttattaccagagagcccgggctgatacgcttttgctaacgttggacgcgtctcaagggtgatgggtcccccc

SEQ ID NO: 71975 - DNA, 245 bp, Glycine max
gacaaaccctgctgatgaggaatgcaaagtttatgaatagaggagagctgctttgctaacgtatcatgtgaaaaagaaggaaattgttcagacagtctatctgaggagagattttcaaagtttatatttatttgcagccaataataagttttggcgtgactgaatgaatatcacccatatattgattgatattgaatttctgaattcttgtaactgatttgcaattcttcgaatcttttaatcaa

SEQ ID NO: 71976 - DNA, 289 bp, Glycine max
cccacgcgtccggattaacataataagcaagcaattaattaagaagaagagaagagtgggatggttgtggtgatttctcttcctttcataatcttctgctttcatctgggttttggatgttacttcttttgaagagccatatgattgaaattggttcaaaccaacctacatgtatttttgattcctattccaccttcatgttctgtttcatctaacacctatttttcctttttctccatcaccctactcttactctttgctatatctctcttatatttcttgattttta

SEQ ID NO: 71977 - DNA, 415 bp, Glycine max
ctgaactttacaactgataatgttggttatgttcttgcaatatcacgtgttgctattgtgggcttccagcttacactgtaccgatcagttcaaaaagcttgtggacccattaatctagtacgcataacacgtgtgttatccatacctctctagcaatgatttcccttcatgacaatgttgtcaggcttcacactggacatagtgatcaatattgcctccattctgaagaatgttatgattgagacaatttcaactagtttattacttctgctaaataaagctttgtaacaacattcaaggggaacagctaatagtttcgctatgaccggtatgtcaatattcaaaacaattctgtccttctagtgccggttccttattattttggtcacaaaagcttataaatgttttttttctg

SEQ ID NO: 71978 - DNA, 153 bp, Glycine max
cccactcgtccttccacacgtccttaaacagtgtgatgaaaatgaaggtccttggtgggttttttgctacaattttggtagcatttcaattccatgcgtactatattttctctcttttaatgaacacttgccctttaacaagaaaatctttta

SEQ ID NO: 71979 - DNA, 226 bp, Glycine max
ggttattgtaggtcaaaattccaattaaagtaggatataacgcaattaggttatttcgaatgtgtttcaccaaccacaacattgaaggagtaaatagtattttgttactgttttttgttgtctctaaggagtggcagtactgatggtttttacattctactgtaatagaaatttgtttacaatgaggtgcagagatgttattgattggggcagatgattgctgtgc

SEQ ID NO: 71980 - DNA, 199 bp, Glycine max
cgttgatttaattgatatcacccgcaatgcttggcacggatatggatgctcgttcgactgctactttcattacgattgtgagtacatagatttctatcaaccataaccggctcccaggaaggcctaatccctcgctttcattatcaaatgtattacgtagactaggacatgccgtgccaagattccatagcaagattac

SEQ ID NO: 71981 - DNA, 53 bp, Glycine max
cttacactctcttttatacgatcttttttacaatctgtactaaacaaccaaaa

SEQ ID NO: 71982 - DNA, 450 bp, Glycine max
cccacgcgtccgttttttttttttttttttttattttttttttattttttataggtgtttttttttttaaaatttttttattattataaaataaaaaatatttatataaaaatataaaattttaatattttttatatttaatttaatataattaatatattaaataataaaatataatttattttctatatataaaaaaatttattttttataaaaattatttatatataaaattaatattttattaatataatctttatttatattatttataaaattttaaataatattatattttattatttattatattaatttatattatttttaataataaaattttataatttattatattttaatataatattatcttattttattttaatttcttttattattattttatatttttataaaataaatataatattttataattaaattatt

SEQ ID NO: 71983 - DNA, 270 bp, Glycine max
catagatttattacatcactattgtaatggagggaacatgaacggaaacacgatcgaggggtactctcattccgagttagacatgtaacattttcatgcatgaaaaccctaactcctcaatcccttgcgcctctaactcttcctcttaagaattgcttaaacaagtccaagctgtcttaaagcgccatcactccttcgctactacgcaattgcataacttgaggccaaagcgcgccatgttggctctactaaaggccactaacaagctcg

SEQ ID NO: 71984 - DNA, 356 bp, Glycine max
ttaaaacaaaacagacggaattacaatatttagcattctcacccaggaactgcttctgggagcttcattggtatttttattctcgggagtttttgaatttgagcaactcacatacatctacgcttctatttccgattcccaatctcaggttaaagaacctatttttgggaagaatttaccgtctcaatttgcacatgtatgtaacaaaactgttgatcatacatttacacctatgatcacgtcttttaacttacgtttattgctcaaatgttatgagtgatttcatttttaggaccatctcttgttattttgattttaaatcttacatctcttggtcctattttttgccttatttt

SEQ ID NO: 71985 - DNA, 177 bp, Glycine max
tattttacaatctaaactactcatttattcaatccaatcttttttttttctttctttttcttttcttccatcccttataccttatttcattttattatattattttttatatttttttttcttttatttcattttttaattatttatttcttatcttttttacttttcttctttaaa

SEQ ID NO: 71986 - DNA, 137 bp, Glycine max
cccacacgtccgcacaaattgtatttttctgcactagcgcaccagtttatatgatacggtgatcatgtttaaacgctctaatattataagttttacctctatttttgttaatatacacatatcattctgctttttct

SEQ ID NO: 71987 - DNA, 102 bp, Glycine max
ctcacttgtacactctaacaattttcttttacacataacataaactatccatatgagggctttatttcaacatccaccacatagtttactttttaatattct

SEQ ID NO: 71988 - DNA, 208 bp, Glycine max
cttcaaacttttaacccattaactcataatctatgcctaatcccatatcgaattcgcgtgcgatcaaattaacaacatattcactcaatttttttgcacttgctatataactctactgaaatctttactcatcgcctactcacaatgattacaaaacactctatcttcttctccttcatttcaaatcacctgtctttatccctctata

SEQ ID NO: 71989 - DNA, 149 bp, Glycine max
  unsure (1)..(149): unsure at all n locations
aaaaaaaaataataatttaaatatttttttacnntaaaagggtctaacgttctagggggttcttatttacgatcgcgtgcactcagcatcctcgctcttgctatattgacacttaactttcctgggccgcgccgctaaaaacaacaact

SEQ ID NO: 71990 - DNA, 350 bp, Glycine max
cccacgcgtccgggccaagccaggtctgcacaaccaaagcaacaccccaaaagggttgagcttctgtgcccatggcgaggccacttaactttgttaccaacaacaaccagccttaatcctaagccttcttcaggccactacccttacgccaaccaaagaggacccttttcaccacgaaagcgatgtctaactccacacctcaaatcaatgcatctaagaaggagaaggcaattgccggacttacagcaccttctgtgacagcatctatggtggtaacggatgaggcacatgctgctggatatgagttcttgctttatgtaaagaactatctactcaacatcttttctggt

SEQ ID NO: 71991 - DNA, 231 bp, Glycine max
cccacacatcacatttaatctcatttttaaactcacaaacacatacttatacttgagggtttataacaatgaagccaattctatcatactttcttcatctataccttcccctcattgcattcaccatgtatcctcccatttttctttcccttcatatctctcactatcgcatattataaaatctattttactacctcatattaccaattcttttaaaaaatattaactcta

SEQ ID NO: 71992 - DNA, 229 bp, Glycine max
ccgaacccgtcgaccactcccactactcttagttttcgctctaccctttgggtctaaagccatgaccacgtctttacttaacatcaaccatcaccactatctcaaaatctagattatcttggggtcaactacaatgcacaacgctcccactggacttcgcggccttacctccatcaattggcacaaccgcaggaccactgctcatcttaatcacatttccacccacaat

SEQ ID NO: 71993 - DNA, 246 bp, Glycine max
  unsure (1)..(246): unsure at all n locations
ccgacgcgtcagnctacacatccattctagtaacatcatagtatacgcagatgacgcgtgtgatgcacaagctcggtctgcacgtcatcttcatggatctgagaagcaagctctctgtacttaggctgacacggacgctcgcccccgggatgcatcttatgcgaagcaggatcactttactgatcgtgttcttcaagtccaccccgatgaggtcgcaagcatctctcagtatgcataggctggctt

SEQ ID NO: 71994 - DNA, 375 bp, Glycine max
ccacgcttccgcaagattccggaacttctagcatcgtcctattcacaatagctggctgtcattaccaaaaactctctgaacaacacactctacaatctctgactcaactatccaacaacttctgcagtaaccatcaaatgccctcggttaacatagtttcccattgcgactcccaagccaatcccttactatcaaacctacatctatgacctttacagtacctcttcaaagcaaaatattgctgaactcaaaatgcctacaaaaactataaatgaactctactatgaggttgctagtcacgtctatgaacttaaattcaaactatattttccacggccttcaaaaacgtcacattgcggttaataaaaataatct

SEQ ID NO: 71995 - DNA, 129 bp, Glycine max
  unsure (1)..(129): unsure at all n locations
gcatcttattacatataaatactttcaaataggcgcactaacttcactttatntgttttcatttatttctcaacatatcactataaacatttctacattaattcttcccaaccttttcatttatcattc

SEQ ID NO: 71996 - DNA, 286 bp, Glycine max
ctacctcaatccattatatgtccaatacactcactgatcactttacatccatgtgcaggctcaaaactttctttcacttgatcacctataaattaatgcactaaattgaatccaccaattctataaattacattaacaatcttcttgcttaatattaccaatatcatgattctactactcataataaattcatcatcaatatacaacaaatacaaaatattgcttaattcatttatttattattaacattcttattaattatcaatatgtctaaactttaaaccat

SEQ ID NO: 71997 - DNA, 210 bp, Glycine max
aataactagaaacagtgtgatgaaaatgaaggtccttgttttcttcattgctaggaggtttctagcatggcaatgccatgcgtaccatatgatacctctcctaatgaacactggctatggtgcccgtactccggaggtgaaatgctcaagcttgatgcttgctttggaagcacacaacatctttggctttgagaccattccttaacagtg

SEQ ID NO: 71998 - DNA, 321 bp, Glycine max
cttaacccccgcaccctgcttcttaggaaaaatcggaagcatctgattagaatcgatggcatattaagggtgatgggctgcctttaaaagatacgccataggatcttgtcacctatactatccgcatagtaccaaacattacgttacatacataaataaatactactgcagttcagaggcactttatcatgcacgatgctcttggaatgaaaagaggacatattgatgctgcaacaaaccatggactgaaatttgacacaataccacgtgatgagatcccaaagtaaacatcatgtgctgaaatggtcatatatctcatcg

SEQ ID NO: 71999 - DNA, 322 bp, Glycine max
gtgggttgcttgagtactggacgtaggcacgggttgtggccgaaccagtataaaacggtgtttgcattctctcttcccttatcttgtttatgttattgcaatcaattttgccttgcatgtttatagaacattattaaattgattgttgttgcttcttctgcattctaagcctatccctcttaagattattgaggccacaaggtccaacaaaaacaatagcaccaaggtgttgtgtctatgaaagaataaacatcctatttgatctgctgcaagactaaaccttaattgataaattttggttatgtccaatattctttaaatg

SEQ ID NO: 72000 - DNA, 204 bp, Glycine max
cccactcattctattaaaatttattatatcactgtcatttattcacatccatatgcactctctattccctcctcctccctttgcctctttcgcttttgctatataggttttctttttttttttttaactagctcattctccttgtcgatgcctgtaaaaagaattaagattctttgtggccttataaaccacttcagctaacat

SEQ ID NO: 72001 - DNA, 294 bp, Glycine max
gttgctgcagtagttttggtagcatggccatgccatggcgcaagctaccaaaggttccctctccgaatgaaaactggctatcgtgagcgttctttggaggtaaaatgcgcaagttttaagcttgctgtggaagcacacaacatccgagcctttaaaaccattcctgaagagtgcgttgaaccaacagaggactacattaatggcgaacaatttagatcagactctaaaacagttaaccaacaagctttcttttatgctagtgaacgcgaagtccatcacaacgacatatttata

SEQ ID NO: 72002 - DNA, 121 bp, Glycine max
cataaactgaaattactttttatttttccacctcgatcatactgtggtcaaggggcacgtttatatctaagggtcttgaagcacattctattacattttcaattgatttaattatttgttt

SEQ ID NO: 72003 - DNA, 470 bp, Glycine max
ctcacacttaataatctaagacttttttaaaatatcatacaaactcttatacaggtgggcttatattaaattatcttccaactcccttatttacacttcaccaatcctcctcctttcctctaaaatactatacacactttatgctatctcacatattatcaaataaaccatcctatcaaatcatttatccatctcacctttctatcccatcatataaaactactaataccctatttacacacatctctttatttacatgacacttattccatcctattttaatacatttactcacatttatcccatgtctaaatatttttcaaattttatttaatctatcattatatttaatattatccaatattattataccctatctctctataataatattattattttaatctatatttaattttatttaaacatattatcattttatcttcatactataatcatattatattatt

SEQ ID NO: 72004 - DNA, 301 bp, Glycine max
  unsure (1)..(301): unsure at all n locations
cggacgcgtgggcggacgcgtgggaatgaatcatcaccacatgccctctaagcgagnagtttagttgagttcaattttgatcatttgtcagaatatggcttttttatactacaattaaatcatgttcttaacacagttttcaagtggaaaaaaaaaaaaaaaatttttacaccctttaaaaagataaatacaatacaaatagaaaggaaaaataaaaaaaaacaacctactggtaagattatcaatggcaaaaaaactaaggggtttcacttataaaaanatggggggcggccttttaaag

SEQ ID NO: 72005 - DNA, 122 bp, Glycine max
gtttgttgtacttaaactacattcccatttgtttttgctttatgagatttcatcggcctgtatttttggtttctgttttcggacttcaatggaaattaatggatgagaactaatgaataaaa

SEQ ID NO: 72006 - DNA, 322 bp, Glycine max
aggaaaaaccgaaggaaaaattgccattaaaaatgaaaactttgccgggggctcttataggcatgacggtaaccatcaacgtcaccatcaacaacgccatggccaatgttaaggacaagattcacgtcacggcgggccttcatccggagaatcaccccgggaagcacctcggagagcaactgacacatgcacggaccatcatccataacgacatacacattgatttaacccttaatcttcgtctcaggcttattgatcctatcattaagcctttcgttatggcatacgctcacgactacattaatgacaagatgatctaccc

SEQ ID NO: 72007 - DNA, 467 bp, Glycine max
gttagatatttaaataattaaagtaaaaaaaatattcagccccccttttgatggggtcgtggatttgtcattgatctcgacgattctaagaggcgttcccctgcaacaattttgaaaaattaagatctagttgtcttattgttgcatatataatgagacattaattatgtgtgtgtgagtgaacaaaaataaaacagtgaaggaaagtagttgatagcataaactattgcattggagtttgcagggtaaaaaaaccctaacaccaaatcaagagaccaaataagggaggaacaaaggaagatcaggacaagagattaaaggggatgaaatgagtgaaagacatgagacaatgtaaagagagaaggaatatgtttatattatttttttagttattatgttattgatacaaaattcattgattttattaaaatagtaatttcgtcaaataacctaattaatcatttttg

SEQ ID NO: 72008 - DNA, 70 bp, Glycine max
gaaaatatataatttggaaaaaaaatatatataaaaaaaaaaaaaaaaaaaaaaaaaagaagataatatt

SEQ ID NO: 72009 - DNA, 421 bp, Glycine max
cggacgcgtgggcggacgcgtggggaacaagtagttgagaactaagaaggagaagggagggcttcctcaatgatctcttccccagctgttaccactgtcaaccgtgccggtgccggcatggttgctccattcactggcctcaagtccatggctggcttccccaccagaaagaccaacaatgacattacctccattgctagcaacggtggaagagtgcaatgcatgcaggtgtggccaccagttggcaagaagaagtttgagactctttcctacctgccagaccttgatgatgcacaattggcaaaggaagtagaataccttcttaggaagggatggattccttgcttggaattcgagttggagcacggtttcgtgtaccgtgagcacaacatgtcaccaggatactacgatggacgctact

SEQ ID NO: 72010 - DNA, 416 bp, Glycine max
  unsure (1)..(416): unsure at all n locations
tctagatcgcaatcgcctcaggaattcaagttatcaaacaaaatgagaggcagaaagactgccaacttcaaatagatagctcaatgaaattaattgtagttctgctgtatttcatttttggtttacctttgtatcttcggaagcattacaattttatttgaaatgtaaaattttgtttttccaaaaaaaaaaaaaaaaaaaaaaaaaaaaaaaaaaaaaaaaaaaaaaaaaaaaaaaaaaaaaaaaaaaaaaaaaaaaaaaaaaaaaaaaaaaaaataaaataaaatcccactaaaaaaataaaggttggggtaaaaataaaaaaaaatttttaataaaatataaaaaaanggggggggggcttttttaaaaaaaaaattttttttctccccgttggggagaaatatttttttttt

SEQ ID NO: 72011 - DNA, 260 bp, Glycine max
aaaaaaacccaacccccccttttaaaaaatcaaaatttacttaccctttcattcaaaataaaattttttttatagttccaccaaaattaaattcattgcccctcttttaaaaaccttttaattaaaaaaaccctgccttaaccaaaataaattcctttaaaaaaaatcccttttttccaaatttgcaaaaaaaaaaaaaggcccaaaccaattcctttttaaaaaattttcccaatctaaattgtaaatggaacccccct

SEQ ID NO: 72012 - DNA, 451 bp, Glycine max
  unsure (1)..(451): unsure at all n locations
attgtttgttgttgtaactcgttcttcttcttttgttgttctgtgtttgtgttggttggttctctcacctgaaaatgtcttgctgcggtggtaactgtggttgcggaagctcctgcaagtgcggcaacggctgcggaggctgcaagatgtacccagacttgagctacactgagtcaaccaccaccgagaccttggtcatgggagtggcacctgttaaggctcaatttgagggtgctgaaatgggtgtgcccgctgagaacgatggctgcaaatgtggaccaaactgctcctgcaacccctgcacttgcaagtgaggtgttgggagagcaagcttcaagcagagatagcccttaattaggaataatgataaactattaatgtgtagctaaaaacttatgtattatgtctgtgatggttttcgngcactctggtgttttgtgttaaacaaaca

SEQ ID NO: 72013 - DNA, 484 bp, Glycine max
cgaaatcccggggcggacgcagccgtccgcccacccttccgccaacccgtccggtcctttgccattgaaatctctccaaaaccttgggttagtcgctttcaattttgcgagctctgtttcgagttggaagaagaaaacgagtccagctgcagcgtcggagtcggaggcagaggcagaggcgtttgcgtcggctctggcgagcgggaaggaagcgactttgttggagttctactcccccaagtgcaggctctgcaattccttgctcaaatttgtctccgaagtcgaaaccagaaactctaattggctcaacattgttatggctgatgctgagaaccccaattggctacccgagctccttaattatgatgttagctatgttccttgctttgtgcttcttgacaacaatggaaaggccctggcaaagacgggtgtcccaaatagccgtttacatgttattgcaggactctcccatcttctcaaaatg

SEQ ID NO: 72014 - DNA, 455 bp, Glycine max
aaagtgaacggcagctgggaagctaaacgacggcgtggagtgatgatattggaggagaggtgttctgcagcagcagtagcagtagccagcagcttcaaccatttgaaaatccttcttccaatctactccttctctctggccctccttcttcgtatttcctctctctgaaaattgaatatgacatgacttgtttcaattcttaatgatccaattttacgttatacagtgggaagacttctcttcttttccaatttgcattcaatgtagcactgcactccgactcaaataacaaagtcatcttcatttgcaaccgccataggttggattccaaacccccttttctttctcagggtattgacccctcttctcatgtattccaccgtatacagatgaagtacgtgaatgatgatgaagacattcgcaagtactttgctgctttccacctgtatgataca

SEQ ID NO: 72015 - DNA, 428 bp, Glycine max
  unsure (1)..(428): unsure at all n locations
gtctaaaaataaaagaacagctcggtaagtcgaaaacccgaaagggcggcttaggcaggaatgagcgtctcggtgggtcgaaaacccgaaagggcgacccaggcaaaaattagagacatcaaacagaaaataattagcctgataggtcgaaaacccgaaagggtgatctatgcaaaatttaaggatcaaaagacaaagtaactgcatcgagaagatcttcgttcatttggggcacaatggaatgtcaaggagaccctgaatctgaagcatccaaacagtggaattcaaggttgtcagagggaacaacggttattgtgttcaatgaaccttcgatttatatttaccattntccaaactttgtaagatcagtggagccatgccattggcaggtcaccactctttcaaaataatttgagcctgttggcttt

SEQ ID NO: 72016 - DNA, 51 bp, Glycine max
aaaaaaaaaaataaaaaaaaaaaaaaattataaaaaaaaaaaaaaaaaaaa

SEQ ID NO: 72017 - DNA, 323 bp, Glycine max
gtgtatttccctacctctcccttcaagatgcacatcttcgtcaagaccctcaccggggggaccatcacccttgaggtggaaagctctgacaccatcgacaacgtcaaggccaagatccaggacaaggaaggaatccccccggaccagcaacgtctcattttcgccggaaagcaacttgaggacggccgtacccttgctgactacaacattcagaaggagagtactcttcacctcgtcctccgtctccgtggtggcatgcagatcttcgttaagacactcaccggcaagaccataaccctagaggttgaaagcttcgacaccat

SEQ ID NO: 72018 - DNA, 320 bp, Glycine max
acgcgccggccggaattcccggtcgccacgcgtcgctagttctaatcgagcgggaggcttcaatttccaattaggtttcgcttaagaccaattaccatgggagtcttcacctttgcgtcgaaatccggcccaatggacccagcaacattcgcgacatcagctcgcactcactacactaaagaagctcggcaccgtctcgcgtgattctcgggggcagcctcttttccggtctctactcgtggttcaggatagggggggctgatcgtggagggcgtgtctgtcactgacctcagtgtgtgtgactgatctgtgactatctg

SEQ ID NO: 72019 - DNA, 487 bp, Glycine max
  unsure (1)..(487): unsure at all n locations
agaaaaccgggcgcgacccaacatccgatttatcaaaagtttgcacattcttctngtcaaatataccaaccattatcccccggccgttattatttaaaattacttactcttacacactacttaatatctcaattctattgtctcctaaattccatatactatccatactttcacaactctttttacttattaaaccctttcatttccctacctatataccttccaacctaaccctctctttcctgcttacttataatctaatattcctgttccctacatcctttccattatcctctcattctcaacttctaaactaacacaccctttaccgtaccatatatctccgcttttcttttcatttacgctctattcaactctctttattatccatatctcttactcctatttcctctcctaacattcccttccttctttatactaattttctccttctcttttaactttataatctctccttctttttttt

SEQ ID NO: 72020 - DNA, 443 bp, Glycine max
  unsure (1)..(443): unsure at all n locations
tgcactcataatgcaagagatctctaggaaatgtgcttgggaaacatccaagggcgttcgtaaatgctgtatactgaaacatgtgagaaatatcttccttttttgctaaccacttttcattgtgattgtgatgtgacataacatacaggtctaggcattagagatacattacaatgccattttggaagtaccggtattgcaaatactttttctttaaatttccaaaatatttcttttgttacagtaggagattttgggcagtgatgggggaataagagacttggtgaaagagagctaaaagtcacatggcaaatccttatgggattttaacacaaatcctacagaacctcaaacctatggtaaatcctggtgaggtgatgctgtangatctactctaagattcaatgcctatacttctcaattctcattccattttggcttgg

SEQ ID NO: 72021 - DNA, 421 bp, Glycine max
cccacgcgtccggtttatcgtgaggagaatatgaagttgtttgttttctttgttgctgcagtagttttggtagcatggccatgccatggcgcaggctaccaaaggttccctctccgaatgaaaactggctatggtgagcgttcttcggaggtaaaatgcgcaagttttaggcttgctgtggaagcacacaacatccgagcctttaaaaccattcctgaagagtgcgttgaaccaacaaaggactacattaatggcgaacaatttagatcagactctaaaacagttaaccaacaagctttcttttatgctagtgaacgcgaagtccatcacaacgacatatttatattccgcataaataacaccgtactctctaatatcccatactatgaaaaacatggatattgggtggaggaatttaatg

SEQ ID NO: 72022 - DNA, 52 bp, Glycine max
acaccatagacgagctatgacgtggcatgcactcctacatcggcttggatcc

SEQ ID NO: 72023 - DNA, 151 bp, Glycine max
agaagagctgtgacgtctcaagcactcctacatcagcttgcatcctgtagagcgtccgccctatttcagcacactggcggtcgatactagcgcatccggatcatgcgcaaccataatgctcaactagctattattcgagatactaccacct

SEQ ID NO: 72024 - DNA, 219 bp, Glycine max
cgaccatgcgtccgatccaaaactctaataccttcaaagaacctagtagtgaatcagtgatggcacctaaggcagagaagaagccagcggagaagaagccggtggaggagaagaagtcgacggtgggagacaaggctccggcggagaagaagccgaatgccggaaagaaccttccgaaggagggaggagccggcggagaaggggggaagaagaaaaaga

SEQ ID NO: 72025 - DNA, 107 bp, Glycine max
tgatgcacgcatgcgtcatctagcatcctgtagagcggacgccgtgtttctattctctacatgtacagactaaaactagctcaggcagctgttaccatacttgacta

SEQ ID NO: 72026 - DNA, 267 bp, Glycine max
ttcagtgttgaaattgaagcggtggcactaatctaagaattatgactgctctaacgcaagaggagcttcttgcgcaacaccttgaacagcaaaagatccatgatgatgaacctgtcgacgaggatgatgatgacgaggaagtggatgatgatgatgacgatgaggatgatgaccatgacgaaggactatgaacgtgatgcatctggtacgtcgaagcataccagaagtgaaaagaagagtcgcaaggcaatgcttatacttggaatg

SEQ ID NO: 72027 - DNA, 132 bp, Glycine max
agaagagctgtgacgtctagtgcaatggtacatcggcttggatcctctataacggccgccgtattttattaggactggagagacgtattagtgaaaacaccaattaggaagcgcgtattggtgctacaaggc

SEQ ID NO: 72028 - DNA, 89 bp, Glycine max
ccagcacactgtccgtcagatgctaggaggacgcccgactaccgaatacttcataggaccacgatgcatgatccatcggactagcttct

SEQ ID NO: 72029 - DNA, 154 bp, Glycine max
tacacgagctgtgacgtctcatgcgaccatacgtcagcttgcacgctctagaacgcgtgccgtatgaaagaagtgttgtgggcggaaagaggcagaggtgcaatcaccagtgtggaagcacgaaacggtccttcccggctttacattttttcta

SEQ ID NO: 72030 - DNA, 210 bp, Glycine max
atgcgtccgcccacacgttctagaacggtcgctgcaccactgattatgcgggacatgctgtacctgtcggtgccaaccgaaccgtggacacacacatacgagccagacgcagcaccgaaaggaatgacctacatgttggaacctcagctgacttgaatagggtctacatctttacaaagggaattcatcttattatgggacacataaagg

SEQ ID NO: 72031 - DNA, 197 bp, Glycine max
acgctctagaacgggtggagactttgatccatatgaagcacagtaatctcttgtaatatcagatgctaattaggataaggcggaaggcatgagacatacaatagatgcagatatagctactatactaactatgacacgagtagaggctatcaatgcgatttcataactagctgatgcgtacgaatatctgaataact

SEQ ID NO: 72032 - DNA, 174 bp, Glycine max
aagacccgggacgacccacgcgaacgggccaagccaggagagcacaaccaaagcaacaccccaaacggacaaaaccacgggacccaaggcgaaagcaccgagcgcaggaaccaacaacaacaagcccgcaaacgaagccaacaaaaaggcaccaccccaacgccaaccaaagag

SEQ ID NO: 72033 - DNA, 108 bp, Glycine max
acgctgaagccctgtacttgtgatatggtactctagaattcgtacctatctgacgggactcataaggtgcaccaaaactatttgcagtatttgttttactgaactctc

SEQ ID NO: 72034 - DNA, 214 bp, Glycine max
cagcacactggcggtcgatactagtgcatgcgtactgcataacaaaactgacttaacacagattgaggttatcgcccaacttgccatgtgatactgcaaatgctaaacccttatataacggctgctcataccaaattacagcatacactataaaaaacacgatgatgatggttgatgacccactttagacaaaatcttgaagcatggtatgcct

SEQ ID NO: 72035 - DNA, 151 bp, Glycine max
actgtgacctctaaagcactcctacatcagccagcagcctctagagcgtccgccctattcctacacactggcgaccgttactagtgcatgggcaagggcgaatctttcagacgcgcacacttactcattcttgccctgtactatttaaccg

SEQ ID NO: 72036 - DNA, 83 bp, Glycine max
gcacactggctgccggtactagtgtatggtgttaaacaatgggaaagggttgagcatcgtaggtgatgatgatgactttggtg

SEQ ID NO: 72037 - DNA, 95 bp, Glycine max
cacactggctgtctgaactagtgtatggtctcaatcaatgggaaagggttgatcatctaaggtaacgatgatgactttgctgaagctcgatggtg

SEQ ID NO: 72038 - DNA, 134 bp, Glycine max
cagcacactggcggccggaactagtgcatgcacatgagcgaatccgtatggcgtgcacactaggtcaatcttgccatgtagcatatgagcgcgctacgacatatgcgacttgaaaccagggtttgaacacgccc

SEQ ID NO: 72039 - DNA, 269 bp, Glycine max
cagcacactggcggccggaactagtggatgcacatgatcgaatccgtatggcgtgcgcactaggtcaatcttgccatgtagtatatgagcgctctacgacagatccgaggcgaaacagggacaagattaggcccgaactagtatatttccataatgcttccggcttatcgtcttttcgagcaagtgtatccatgcgactgccgaactcttcgaaagccttgatgctttctggatcataaccgcccacgaactgatgaacaccgcaagca

SEQ ID NO: 72040 - DNA, 81 bp, Glycine max
cacactggctgcctgtactagagtatgatcatatacaatggtaaatggttgtgcagttttggtaatgagaatgactttggt

SEQ ID NO: 72041 - DNA, 143 bp, Glycine max
gagctgtgacctctagaggcatgctacagcggcctggatcctgtagagcggccgcccaatttcagcacactggcggtcgttactagtggatcgtaattcattaacgggccaaattgatcaatatggtcagcccagcaaccgtt

SEQ ID NO: 72042 - DNA, 164 bp, Glycine max
agacgagctatgacgtctcatgcacgcgtacatacagcttggagcctgtagagcgtccgctgtagttcagattcgtgacacttggggaccagaggatcctattgataatcggtagtaccgcgacgggcgcgttcgttgctactggccaggattgtgacttatag

SEQ ID NO: 72043 - DNA, 305 bp, Glycine max
agattattgatacaggagtctagtatttattattgataattggttggatcgagatgatcgctttggtaaatcattacaacgattggagcttaaagcttctgtacgatagaataaaagcccataacgtatcagctcatgcatagctatatgaaacttgacttaagctattccattctatatatacttttgaaccatgattgtttatattcatataatttcaatctattcgatggtctgaatgttatacctgatgtggtgattgcctattaagaaaaggaacatatattattgttctaataattttt

SEQ ID NO: 72044 - DNA, 159 bp, Glycine max
cccacgcgtccggaaatatttgattacttgaaaaataaaaaaaaaaaaaaaaaaaaaaaaaagaaaaattaaataacaaacagtgtaaaacaatacaaacttacatacactaacatccaacataaattactctacctatagtatcacctaaattcaatt

SEQ ID NO: 72045 - DNA, 314 bp, Glycine max
tctcataataatcgtcaccctcaatgtgacgactattcaatacttaatgggatctcatgcaaaatttatagaatgagatgttttggtgcacaaaaaaacaaaaaaaaaaaaaaaaaaaaaccaaataaaaaaaaaaaatataaaattaaaaataaaaaataaaaaaataacaaaaataaaaaaaaaaataaaaaaataaaataaaaaaaaaaagggccgccccttttaaagatccaaattttacttacccgtccttcctacttaaaaccttttatttggggcccccaaattaaatttaattgccacttttttaa

SEQ ID NO: 72046 - DNA, 465 bp, Glycine max
cccacgcgtccgaaaagcaccgcacaacgctttacgaaccttaccttacctctctctgttagacgtttatcacagtgagtgaccgctatcaacggcatacacagcgcgagtttgtttatccacattccgcaatgagaagatgatgacgacgccgtttcagcaaccgccccaaaccgtacggagactggtggtggaagtggttgacgcgcgcatcctgcttcttatagatggccaatgcagctcgagcccttacttggtgtgcttgacttcgactgtcatattatgcttattttttttctgtttaagttgcttgaccttttttgtaacttgtttttcttttttattttttttgtttttgttttctttttttttcttgttttatattttttctttttttttttattttttttgtttatttttttatttttttttttttttttatttttcttttttatttattttttt

SEQ ID NO: 72047 - DNA, 319 bp, Glycine max
catggtggggaaaacaatttcatactatgtgttattttctgtagcatctttcactttagatagtagggtttatatcatccaccgatactgtaaaacactccctcgatataagtactcctgtttaaagcccaattttgagtttctgtctgttgaatgttgttatcattgtaaattaatatttccatctaattcagctttccaaacaataattggtccttctctaaaagatattcgtttggcaaatcatcttgcatgtttctaagcttgtaataagcttcatcaatattgttccttaaattaacattttttttcattaatt

SEQ ID NO: 72048 - DNA, 421 bp, Glycine max
cccacgcgtccgggagaatatgaagttgtttgttttctttgttgctgcagtagttttggtagcatggtcatgccatggcgcaggctaccaaaggttccctctccgaatgaaaactggctatggtgagcgttcttcggaggtaaaatgcgcaagttttaggcttgctgtggaagcacacaacatccgagcctttaaaaccattcctgaagagtgcgttgaaccaacaaaggactacattaatggcgaacaatttagatcagactctaaaacagttaaccaacaagctttcttttatgctagtgaacgcgaagtccatcacaacgacatatttatattcggcatagataacaccgtactctctaatatcccatactatgaaaaacatggatatggggtggaggaatttaatgaaaccttatat

SEQ ID NO: 72049 - DNA, 85 bp, Glycine max
gggcagtgttttgtttttggattgcttattgctttacatgtggttgttgttatgttgatgaatacttacaacacaattgaggtat

SEQ ID NO: 72050 - DNA, 445 bp, Glycine max
atggtggggaaaacaaatgcatactatgtggaatccactggagcatctttcactttagattgtagtgttagtctcatccaccgatactgtggaacactccctcgagataagtactcctgtgtaaagcccaattttgagtttctgtctgtggaagggggttatcagtgtaaattaatattaccatctaattcagctttccaaacaataattggtccttctggaaaagatatgcgtttggcaaagcatcttgcatgtttcgaagcttgtaagaagctgcatcaaatgggtgccttaaatgaacatttggttccattaattgaagattcttcagaagatgaccatattgtgaaaaataaagaatcaagttctggtgcagggaccacataaagaaaggagttacatggaaaagctaacattcatgcattaaggtgtgcatggggagaca

SEQ ID NO: 72051 - DNA, 220 bp, Glycine max
gagagtccaaattcggatttttgaaacggcttttactccatttcgcttctccttcactgtcgcacactctcacacactccgggggatcgtttctccctaccgattcacgaaaccctaatatttatggttcctattccgttgagcgaatatttagggttagattgagctgaggtgacatattcatcagcatcttctttgataaaatatgtaatggtttcat

SEQ ID NO: 72052 - DNA, 449 bp, Glycine max
  unsure (1)..(449): unsure at all n locations
cccacgcgtccgcccacgcgtccgatcgagttaactagaaacagtgtgatgaaaatgaagggccttgttttcttcgttgctacaattttggtagcatggcaatgccatgcgtacgatatgttccctctccgaatgaacactggctatggtgcccgtactccggaggtgaaatgcgcaagttggaggcttgctgtggaagcacacaacatctttggctttgagaccattcctgaagagtgcgttgaagcaacaaaggaatacatccatggcgaacaatatagatcagactccaaaacagttaaccaacaagcttacttttatgccagagacctcgaagtccatcccaaggacacatttgtgttcagtatagatggcaccgtactctctaatattccatactacanaaaacatggatatggngtggagaaatttaactcgaccttggatga

SEQ ID NO: 72053 - DNA, 452 bp, Glycine max
gaaacagtgtgatgaaaatgaaggtccttgttttcttcgttgctacaattttggtagcatggcaatgccatgcgtacgatatgttccctctccgaatgaacactggctatggtgcccgtactccggaggtgaaatgcgcaagttggaggcttgctgtggaagcacacaacatctttggctttgagaccattcctgaagagtgcgttgaagcaacaaaggaatacatccatggcgaacaatatagatcagactccaaaacagttaaccaacaagcttacttttatgccagagacctcgaagtccatcccaaggacacatttgtgttcagtatagatggcaccgtactctctaatattccatactacaaaaaacatggatatggggtggagaaatttaactcgaccttgtatgatgaatgggttaacaagggcaatgcaccggcactgcccgag

SEQ ID NO: 72054 - DNA, 154 bp, Glycine max
tgcatcaagcagcgtgatctctaatactctagatagcaggtgtgccgacttgtggcatgctatggcacttcactgtatggaggagcaattgaatggactcttgtagactagcactttgagaggaactttgatcgacgctggctataaagaacat

SEQ ID NO: 72055 - DNA, 413 bp, Glycine max
gtgaccgacagtgaaggatggactgttgctgctgctcacacacatacatacaagctatctagacaggatatgtgtacgattacggagtaaaaaatgaaaatgatcaataatccatgattctgagactgtataaatatataacataacagaccagtgagtgaatagtgtgattaagctattgacgtcgatgcgagaaatgagaatgaagaagctgattttaatactcatagcagcatctaccttcgtttctgtagctagatctgcgtctgatcatttcttcgaaaactatggcgtatcactggcagttgctgcaacacccggacctacacctgtcatggaacccctcactcttattcacggagctgctttcaaaggagccgtctgtttggatggaacatcgcctggttaccact

SEQ ID NO: 72056 - DNA, 459 bp, Glycine max
  unsure (1)..(459): unsure at all n locations
cccacgcgtccgcgagataactagaaacagtgtgatgaaaatgaaggtccttgttttcttggttgctacaattttggtagcatggcaatgccatgcgtacgatatgttccctctccgaatgaacactggctatggtgcccgtactccggaggtgaaatgcgcaagttggaggcttgctgtggaagcacacaacatctttggctttgagaccattcctgaagagtgcgttgaagcaacaaaggaatacatccatggcgaacaatatagatcagactccaaaacagttaaccaacaagcttacttttatgccagagacctcgaagtccatcccaaggacacatttgtgttcagtatagatggcaccgtactctctaatattccatactacaaaaaacatggatatggcgtggagaaatntaactcgaccttgtatgatgaatgggttaacaagggcaatgc

SEQ ID NO: 72057 - DNA, 399 bp, Glycine max
acgcggcgtacggacatcgcactactaatcactagatcatgaacatttattagatttgcagcatcagcgctaagaacgctggctcagttacgatgtggagcagctcttatccgctgttaaatactacgatgcggattacacaatacctgcgtgagaaaaccactgcataatagcgcattgccgcatttatatatactaacatatattgctacatggaccggataaccgttctcaccaattgcaatctcagatggtggattacgacttatgcgagtttctgagatttggactcatcagacactacgtcatcgataggcatatttgtggcctaatcatgcacttgacggtacacattaatgcagatgctacgaggcttgtaggcagcagaagattgtctga

SEQ ID NO: 72058 - DNA, 86 bp, Glycine max
cccacgcgtccgcccacgcgtccgattatactatttttttgttaaaaaaaaaaaaaaaaaaggaaaggataaaaaaaaaaaaggaa

SEQ ID NO: 72059 - DNA, 342 bp, Glycine max
gggatttgcgtttactgatctcaagtcttctactctcactgtcgtagcgtagtgattgtgtcgtttctcttctcagttctcatggggacgatcttgctgctccgaaaaagggttttcctaacatcgaccattccatttccgggctgttcagttcgtgaatagactgttgcttgttttaacatgttatgattacgtcttttctttgtactattatatgcttctatttcctgcttccttttttcgcttcatttattccctttactttttttatcttgtttcttattctttttccatcatttgtttttcttaacgtttcttcttttttttctttcatattttttt

SEQ ID NO: 72060 - DNA, 220 bp, Glycine max
cccacgcgtccggtctggtccaatcttaatttatatgtagtttctatggccaaacagccgggtatagttctagaatttactaataagattgaggatgtacatattctggaatacataattgatgcttttgctcccgaaagaaattgttcgagtaaaaaaaaaaaaactaataagataaattgaaaagactaaaaaaaagcctaaaaaaaaaaatcaaaaa

SEQ ID NO: 72061 - DNA, 330 bp, Glycine max
gacacacgcgtccggtgaaacagaaactgattacaatatgaatcagtgtgatgaaaattaacgtccttgcggggctcctttctacaactttgggagcatcacaattccatgcatacaacatgtcccatcttccaataaacacttactttcgtgcccctactccgtaagtaaactgcaccaagttaaacgcttacactagaagcacacaacatcttttactttaaaaccatacactaacacttcgatcaatcaactaactgaaacatccattgctaacaatatataacatacttctaaacatttaaccaacattcttactattatgccata

SEQ ID NO: 72062 - DNA, 187 bp, Glycine max
ggaaacagaaactgaattacaatatgaattgaatgaagatgagggtaaggttcgatagtggtaagaacatgtggaggaaagggaaacagaaacaggagcagaagcgcaacctgaagagaagaaagatgagggtatggttcgggacagtgaaaaactcgtgtaggaaacgcaaacggatacagaagga

SEQ ID NO: 72063 - DNA, 359 bp, Glycine max
ccactttgtagtgtggcaatccacaattgttttctttaattttacgattccaatccctcccgaaaaaaaaaaaaaaaaaaaaaaaaaaaaaaaaaaaaaaaaaaaaaaaaaaaaaaaaaaaaaaaaaaaaaaaaaaaaaaaaaaaaaaaaaaaaaaaaaaaaaaaaaaaaaaaaaaaaaaaaaaaataaaaaaagtcccccccttttaaagtctccaaccttctaaccccatcaatccaattacaaacctcttaaaaatatcccccaaaataaaattcatatcccttttttaaaaaccatattccctttaaaaccctttaatttcccaatttaaatcccttttaaaaaaaatccttttt

SEQ ID NO: 72064 - DNA, 444 bp, Glycine max
  unsure (1)..(444): unsure at all n locations
cccacgcgtccggatcgagataactagaaacagtgtgatgaaaatgaaggtccttgtttgcttcgttgctacaattttggtagcatggcaatgccatgcgtacgatatgttccctctccgaatgaacactggctatggtgcccgtactccggaggtgaaatgcgcaagttggaggcttgctgtggaagcacacaacatctttggctttgagaccattcctgaagagtgcgttgaagcaacaaaggaatacatccatggcgaacaatatagatcagactccaaaacagttaaccaacaagcttacttttatgccagagacctcgaagtccatcccaaggacacatttgtgttcagtatagatggcaccgtactctctaatattccatactacaaaaaacatggatatggngtggagaaatntaactcgaccttgtatgatgaatg

SEQ ID NO: 72065 - DNA, 90 bp, Glycine max
cctaaaaatatttataaaacaaacaaaaaaaaaacactataaagggaccttttaaacaaaacaaaaacataaaaaaaaaacaaaaaatat

SEQ ID NO: 72066 - DNA, 70 bp, Glycine max
gacaccacgcgtccgcaccacgcgtccgcaggacttaaagatgccttttttgaagctttcatagactaca

SEQ ID NO: 72067 - DNA, 95 bp, Glycine max
cttgtcctaagcctcaacacatacacaaactcaaacacacacactctttcttctatcttcgggcaatttgagttgagattctgagagtaacaatc

SEQ ID NO: 72068 - DNA, 70 bp, Glycine max
tttttttttttaatttttggttttgtttttttttttttttgttttttttttttttttttttttttttttt

SEQ ID NO: 72069 - DNA, 234 bp, Glycine max
cacgatcaactgttcagacaagaggtttaatctgaatgactaagagcactaagccgggacatattagctagcacaccaagtcgtgtcgtcactcacactgtttaacaaattctagcttcaatgaagagcatagtacttcagactctattgctcgcaaagatacgcaaagtctcaaactccacctatgctgaattcaccactccagtttcactccaatgcatcctaagttgcttt

SEQ ID NO: 72070 - DNA, 403 bp, Glycine max
aaaatgggctatggtagatgcagagcatcctttgttttggacggtttcagtctaaagcccgtgccataccccgttctgctaatcttatcactgatccttctattcctcggcatttcatggtacttgtcgtatgaagaagtagttgaagccgctgaagaacaactggggtggatgctgttagccacaccagtggtgctaatactcgtagttcgttggttatcgtcagtggatacttcagaatggttcttctttaactcctcgccatgggagaggcgtatgagaacccaccacttcccatcagagggtagctccccttggggtgttgctgctttgatcctgcttgttctcgtgcttcttcattatcactccacttttcttgatgcctggtttgtttgattttatt

SEQ ID NO: 72071 - DNA, 404 bp, Glycine max
  unsure (1)..(404): unsure at all n locations
tagaaacagtgtgatgaaaatgaaggtccttgttttcttcgttgctacaattttggtagcatggcaatgccatgcgtacgatatgttccctctccgaatgaacactggctatggtgcccgtactccggaggtgaaatgcgcaagttggaggcttgctgtggaagcacacaacatctttggctttgagaccattcctgaagagtgcgttgaagcaacaaaggaatacatccatggcgaacaatatagatcagactccaaaacagttaaccaacaagcttacttttatgccagagacctcgaagtccattccaaggacacatttgtgttcagtatagatggcaccgtactctctaatattccatactacaaanaacatggatatggggtggagaaatttaactcga

SEQ ID NO: 72072 - DNA, 229 bp, Glycine max
tcaatctttaattttcagtcatcactttatattggtcacattttcaaagtaacaaatataggatattgtgtgaaaagatggcaaaacttgctggctgtgtagctcatttttttattgcagcaatggttttgagcacgttgtacgtgaccttaactgtggcacaattagagatagcttctacttcacaaatggagactggagaagggtttgctttgtctgtttctggtgt

SEQ ID NO: 72073 - DNA, 443 bp, Glycine max
cccacgcgtccgcccacgcgtccggctttgcaaggcagcccttggccatgggaaaggatagagacaacatcaaggatggtagcagaggctgtgatatttttgaagagaagattcgaagattaccaggtggagaaacatgggatagaaaaatgaaaagaaaacgttccgtgggtactgttgttgccagatccattgatggtgaaggagagctgaaaaaggttatgcatataaggctagctaatgagtcaggtccgcagggttctgatgcccaaggtttgagatcaggatattctggcagtaatagcaagcttgatggtgcttccgtgcctgccacttttacgactgccaataatgagcaagaaaaggtgtcaaggggttcagtggatggatcaaataaggaacgggttgtgcttaaaggaaataaggttaatgttcgcaacaat

SEQ ID NO: 72074 - DNA, 118 bp, Glycine max
tccacgcgtccgagggaagaagaacttagctacaagctaatgaaggatcaaagagaatggggcaagcaatggcattaatgactagcttacgtggttcctctcaggctgtattggaagg

SEQ ID NO: 72075 - DNA, 123 bp, Glycine max
  unsure (1)..(123): unsure at all n locations
ggctganacacactgtcaccaaagaccaacccttttttcctacatagtgctctgccctaaggatagggtttaggtccccatacacacactcacaattggtggttgagtgcttgtacagaaaat

SEQ ID NO: 72076 - DNA, 122 bp, Glycine max
cccacgcgtccggaggcttcacgcttgagtagccatggctcttcttaagctgccaggttcaggctatcaactggttgaattctaagaatgtcaatagcaggaggaaacgtttaatttcttgt

SEQ ID NO: 72077 - DNA, 217 bp, Glycine max
cccacgcgtccgcccacgcgtccggttgagaactaagaaggagaagcaaatggcttcctcaatgatgtctgtcccagctgttaccactgtcaaccgtgccggtgccggcatggttgctgcattcactggcctcaagtccatggttggctgtgtcactagaaagaccaacaatgacattacgttcattgctagcaacggtggaagagtgcaatgcatg

SEQ ID NO: 72078 - DNA, 420 bp, Glycine max
tagtgtcgtctgctactatgagcatttattatctaatcatactttctctccttctttccaggattctttcaactgcaagttcgtcttcttcttcttcctccctctatcttgggaagggcttctcccatctcacattgtctcccacttatcacattcacaaaaccatttactaatcctatgcatttatctacgatgctgataccacgtgaagccgtgtacatgtctatcgttttaaccaacatttatatctccttctcattgtccaataccttgattcgttcctttacacttttctttcattaagttctaacttctcttattcattttattctttattatctttttttcttctattgtctttttttttattttcttattttttattatttttattctttttttctttttttcatttatttt

SEQ ID NO: 72079 - DNA, 168 bp, Glycine max
tcgcccacgcgtccgcccacgcgtccgcactttcgaccatattctcttcttcttctctgtctcgatcatggtgcaaacaaggaatgttcagaggtgtcaggcagcgccattggggttcatgggtatcggaaattcttcaccctttttctgatgatgaggttgtggcta

SEQ ID NO: 72080 - DNA, 197 bp, Glycine max
aaaaatctcaaaataaaacaaccaaaccacacacttcacacccttttcaacatccttatcgggtacaataacaagaagaaacaatgtcttgctccaatctcacaatgtttgtatcctcaaaacctttccttccttgttagtcaatctgaattgctcatccttagcagcatcaacatacacaccattcacatcacaaa

SEQ ID NO: 72081 - DNA, 168 bp, Glycine max
acgaccacgcgtccggaaaaaggagatgaaagacaaggatggcaaaactgattcagaggatatgagtaagaaagaagatgatgggaaggatgatgaagagaagaaggaaaagaaggagtagtatgacaaaattgaagtaatgaatgttaaggtggaagtagatgatgg

SEQ ID NO: 72082 - DNA, 231 bp, Glycine max
aagacgaaaggaacaagtacaaccctcgaaagtgaattaggaagaaaacacattgaaggaagaccatgacacagaataagattccagataaattcaataatacacaatttttttttttttattttcatttccccccctctagtagtcagtggtgggaagctgtagagatgaaagcagaagttattgtaggccataaggcctgtctagttatggaagaagtcatagaaatga

SEQ ID NO: 72083 - DNA, 167 bp, Glycine max
tccacgcgtcctgtcacgcgtccgtccacgcgttcgtcacaaacaaaaccacttgcatttgatccattccaacttctcaacccaaccaacaacaaccataacacaagacagtgtcagcgcggtaccctgtcctttttgagcttgttagttcattcggggagatagtg

SEQ ID NO: 72084 - DNA, 377 bp, Glycine max
  unsure (1)..(377): unsure at all n locations
cccacgcgtccggcaagatttgcattaatggcgtcctcagagccaatacctccaggggcagagcccgaaagccacctttcttctctcatctacgagatatcaaatgaagtccaagggatcatggagaacatgtttaagactgtcactgaaattaatcaaagttctgctgtggtagaggaggagatagagaaatgcaaaggttctgctctcgagaggaaaagagccttagatgaagagaaggattactttcaaaaagctgcttatgctgttcttgacatgctcagcanagaagtaaacgctctangttaccgggaagagcttgaagattaaaaaaacctcattcctgtaagaaaacttaatctttcaaatgacttcta

SEQ ID NO: 72085 - DNA, 110 bp, Glycine max
caagggcataaaccactgctgatctagaaggtgatgttgaacctaccctatcagatgaaggtgtacctgccctatcagatgaagctgaaccagagccagttgatccttga

SEQ ID NO: 72086 - DNA, 130 bp, Glycine max
cccacgcgtccgtccacgcgtccgtccacgcgtccgtgaggattggggaggtggcggaggcgagtgcggtggtggtgttgccggtctccgcggcggaggagagggagattttggaggtgccggatgagag

SEQ ID NO: 72087 - DNA, 115 bp, Glycine max
aattgttttatatatgtatttcttgttataattgtacatttaattttatatgaaaatagagtcaagggaaatttgttcaacgtgattacttttatctctatttcaatacttgagt

SEQ ID NO: 72088 - DNA, 288 bp, Glycine max
gccacttctgaatctattgaatcaacaatcatgtcggacgaagagcaccatttcgagtccaaggccgacgccggagcctccaaaacctaccctcagcaagccggtaccatccgcaagaacggctacatcgtcatcaaaggccgcccctgcaaggttgtggaagtttcgactttcaaaactggaaagcacggtcacgctaagtgtcactttgttggaattgatattttcactgtcaagaaacttgaggatattgtgccctcttcttacaactgcgatgtgcctcatgtg

SEQ ID NO: 72089 - DNA, 107 bp, Glycine max
  unsure (1)..(107): unsure at all n locations
naagaaaggaggctcagaanagcgggacgtcacgccagccagaaccacagatcggaaaggggtatatcgccttcaaatactgtcgtccacggcggtgaaactcgcct

SEQ ID NO: 72090 - DNA, 167 bp, Glycine max
  unsure (1)..(167): unsure at all n locations
ccggaancccggagcgcccacgcgaccgggcaacagaaacaaaagaggcagcaagagggggcaccaccgaagagcaaggagcagacaagggcgaggggagcaacaaagacgaaagcacagcagcacaggaacaaaacaaaagaggggaggcagaccaggagagagaa

SEQ ID NO: 72091 - DNA, 269 bp, Glycine max
catcctctattactctatcctactccattttcactcgccttcctcatttctcacgaacagtttataacaaaaagtgggcaggccaaatattattctgtcaatgcaagcttatcaatcatatacacccaaaagcaagaatagttaatgaacatctaatgctcaatcatcaacaacttctactcctaaacccaatatacccttctatacctcgaataactttcatattgtaatgttatacaatgataaatatctaaatagcatcaattatc

SEQ ID NO: 72092 - DNA, 210 bp, Glycine max
gggagactcgccatgttttgcttatctaacctttctactatcaaacccattgtggctaatgccactcgtccccataacaacgattctgatcaaaccaaaccttcaattccagttcccgccacaaaatctttaccttgcagaaacaggcttttgaatgtagccccaaagccttctgtaatgcaaatggaacgcattgttggcgctggaagc

SEQ ID NO: 72093 - DNA, 445 bp, Glycine max
  unsure (1)..(445): unsure at all n locations
tcgtctcgggccgnnttctctgcttatctctatcctacatctctctcttcccttggcctnntcctcgtttcctcgcagagactggttgagaactataaaaggtgtgtcaattgtccctttctgaatttgtgcccagtgcaacgggtcggtcatagcagagacactccgagtagcatagaagagtgaagcggtcattctannatgctcagtcttcacagtgcctgctgcnntcctaaactccaagaaaccccgtctaaattccttgaagaaacggtcagaaattgtgatgcggtggacataggggagaaatanttctcaatagccgttncaattatcttnnntctgttgggccactccatccttaattactataaggatnntagattactatnnttatgaggacttcgtggtgaatnggtcctggaatatgcccgtatttatttga

SEQ ID NO: 72094 - DNA, 243 bp, Glycine max
ttcctttttcgacccacgcgtacgcattagaccttaaaaaaaccatctatatatccaatctgtttaaatctcctaatctcaataatgtcaattgtgcaatattccatgggtaattggcttcctaatcactaccctactactaatactcctttattttctattcttctaaaaattaataattttctatgttttaacactcccaataaaaaactttcatatcatatttcttaattcccatctcaa

SEQ ID NO: 72095 - DNA, 215 bp, Glycine max
ctgatgctgcttgtggcttatccatggagatttcttctgtcagttacaagtgctgccactggcaaccatctcatcacaaggctcaatttccaaaaagtgccaatgccttaattaaaaaaaacctttaccctcctaaattattgaacccttccccaatttggttgttaattttcctgaagaacccttaattttcccactttgaattccattgggtt

SEQ ID NO: 72096 - DNA, 348 bp, Glycine max
tcgagaaaacccacaggaggctctttttgaggtttccggcgctgtgaaaacttgcggagaaacagctcctgtctccagggctcttgctcaagacagcatataagtagaacctcctactgctgaacaacgcactgacgatcaaagtttcagaaacgttgaatactactctggcgaccaaaattcaaattaagagacccctgaaattaagcttgaaactgctccaaccgaattacgttttccaactacaaatcataccacacatagctttacccgatacaatgaacatcatcgatgcgaagctttcaatggagaaagcgcaccataatgagactagtttgccaaatatta

SEQ ID NO: 72097 - DNA, 408 bp, Glycine max
gtcatggaatgatactcagatctgccactatatgacgtacgacatgtcaacccattaacaggaacttctaacactgcacatccgctttgaacgacctcgcactctatctctactctactaacacacttacattctagaaaaatgatcgtactcagatgagcctaatgatcacgctaagcaaattccggtgccgactaccaccgtaactaaagctgcgccttcaggtacactgaagcatgtcaaactgacagctaccatcatgaatcatgatagcagctgatggaatacatgtgtggacactcagggaattgatgaaaacaatgctgaatctctatgtacatcaaagtcttttgacgttaaaattcatgactatcaatggtagaacttccatcatgctacttcaaaaat

SEQ ID NO: 72098 - DNA, 396 bp, Glycine max
accacgcatacgaaaaaataaatttaaaaattttaaaaacaaaaaaaaaaaaagggggacgggcgctctataaaatccaaacttacatacgcgtgcatgctatataatacctatactatagtgccacctaaatacaattcaatgcccgcctacattacaacgcaaactacaaggaaaaccccggcgtttcacaacttaatcaccttgcaaaacataccaatatcgaaagaaatcgtaataccgaacattcccctaccgaaagctctttccaacactttcacattctgaaagattaatgttacccgcactgtaacggcctaataagcgattcgaacgtgcaacttaccctcagcttaacccttacactttccatcgccatcacaaccgttccttttt

SEQ ID NO: 72099 - DNA, 412 bp, Glycine max
atagtcgacgttttaagctaatagtcagtgttcaatttttcctcagggactcagatagtgagttttgaagaatagggggactccgataatgaattaaaaaaaaggggaccgatttagtgaaatgagaaaaatagggtacattttttgcaattaagccacgataaaattctagaactttcagctaggggaatttctttccaaatgctttagctaagttgacacttcccccaccccgcacaaacaaatgtttgcacgtagaagtgtaccttgaacttaccttttggaacgctgaacccatgtagtattttagtcacatgcctcatcatgttgcctatcggagtttgttcatcaagacctactggtttgatcactttatcttttctgatatactctgcattggtattaatctttt

SEQ ID NO: 72100 - DNA, 256 bp, Glycine max
accacgcgtccgctttggataacaacaactatatgtgcttaccctatgctgaagacatggaggatgatggccacaggatgaagaatgccaacatgctgaataagattgcagtcttgtggaagaagcctcaaacatagttgagatgatgtctgatttatgaagcgttctgaaattgtagtccaataaatagcgtgttcatgtgatgtctattactatgtctcttgcaaacgtctgacccctacattatcctctgtac

SEQ ID NO: 72101 - DNA, 171 bp, Glycine max
tgatcgagataactttaaacagtgtgatgaaaatgaaggtccttggtttcttcgttgctacaattttggtagcatggcaatgccatccgtccaaaatgttccttttccgaatgaacactggctatggtgcccgtactccgaaggtaaattccccaagttgaaggcttgctg

SEQ ID NO: 72102 - DNA, 171 bp, Glycine max
gccagcctattagaaatacaggcaaaaatgataactaaatgagcagcagctggcgactctgtgaagttcaaaggctgtgaacgaatttcttgagcatcagaaggaaaatataacaaatttgataaaacagagtctggcagattttcacgcctatatatatcaccaactgcc

SEQ ID NO: 72103 - DNA, 253 bp, Glycine max
gttttgattcagtcagagtacttacgaagtttatgttcttgcgtgcttcgcgtggacctttgatcctatctgtcatgagctgcaggactagcataacccgttggatttattagatatgcatttgaggtttgcaatattttcaaatctatatatacaccacctggcgcgtcaaacccgcgagcaggcgatctagatcatcacaactgacggcctctttgctgctacaagcttccatgagtatggcatcaacgac

SEQ ID NO: 72104 - DNA, 307 bp, Glycine max
cccacgcgtccgaccacgcttacgcggacgctttgatcgtccacgcgtccgcccacgcattcgaaaaaggagaaacataaaaaaggacaataagtaaatatatattaaacatacatatattaactcaaaatgactaactttatctttttcccaaagataatataagacgctatacaataaaaagctgaactagtttatctacttaactttaaaatgtgattcactggatattcctttgttaaaaaaaaaaaaccaacaatatttaaatatcctccattataaaataccaacaattttaaaaatattc

SEQ ID NO: 72105 - DNA, 410 bp, Glycine max
gatcgagataactagaaacagtgtgatgaatttgaaggtccttgttttcttcgttgctacaggtttggtagcatggcaatgccatgcgtacgatatgttccctctccgaatgaacactggctatggtgcccgtactccggaggtgaaatgcgcaagttggaggcttgctgtggaagcacacaacatctttggctttgagaccattcctgaagagtgcgttgaagcaacaaaggaatacatccatggcgaacaatatacatcagactccaaaacagttaaccaacaagcttacttttatgccagagacctcgaagtccatcccaaggacacatttgtgttcagtataaatggcaccgtactctctaatattccatactacaaaaaacatggatattgggtggagaaattta

SEQ ID NO: 72106 - DNA, 382 bp, Glycine max
  unsure (1)..(382): unsure at all n locations
tcgaccacgcgtccgaccacgcgtccggtccttgatctcttcggtgttacaattttggtagcatggcaatgccatgcgtactatgtgttccctctccgaatgaacactgactatggtgcccgtactccggaggtgaaatgcgcaacttggaggcttgctgtggaagcacacaacatctttggctatgagaccattcctgaagagtgcgttgaagcaacaaaggaatacatccatggcgaacaatatacatcagactgcataacagttaaccaacaagcttacttttatgccagagacctctaagtccatcccatggacacattcgtgttcagtatagatggcaccgtactctctaatattccatactacaganaacatggat

SEQ ID NO: 72107 - DNA, 196 bp, Glycine max
gaataataaggtttcattgctaactatatattttggaagattttggactattatttatgttgtggaattgagatttgtgcctaaagtttaatcgtatttatagctttgtaatgggggtgtgtcacggcttcatatgtctgtagctcttttgtctttttattcaagttgattgaattgatgagatttcagtatttga

SEQ ID NO: 72108 - DNA, 404 bp, Glycine max
cccacgcgtccggagtgcgttgaagcaacatttgaatacatccatggcgaacaatatagatgagactccagaaacagttaaccaacaagcttacttttatgccagagacctcgaagtccatcccaaggacacatttgtgttcagtatagatggcaccgtactctctaatattccatactacaaaaaacatggatatggggtggagaaatttaactcgaccttgtatgatgaatgggttaacaagggcaatgcaccggcactgcccgagactcttaagaattacaacaagctggtgtctcttggcttcaagattatattcttgtcaggaagaacactggacaaacaggccgtaacagaagcaaacttaaagaaggctggctaccacacatgggaaaaattaattc

SEQ ID NO: 72109 - DNA, 244 bp, Glycine max
aattccaaagggcacaggcctaccacaaacaaaccaccactaaaaaatcccccaaattataaccctactactcacaaacctccatcataaaacccatcaactaaaaaacctccaaaacataacccaccacattcacaaaccaccaacaaaaaaacccccatcttataaacccacattttagaaaccaccaaaatacaaacccccattttaaaaaccaccacaatacaagcccccatcagaaaaa

SEQ ID NO: 72110 - DNA, 447 bp, Glycine max
cttaattcacaccactatctaatttagagcctgtttggatgcaaagtagagaaggacccctggtgggcaaacttaacgaatatcccaggaatgaggaatgaaatagcttctgctatctactcactcttgccactgagagcttttgaaagtttcaaactctcaaaagcacgcacttatgacttatatccaaaatttctctactggaaaaagtttctctcaaaatcgtttgtaaatatggcacttaaccttcttaagctcatctccctggcaatcaaaatgagcattacaaaaagacccttaatttgaagaagtgggtcccattaacaagacctcgtacccatgttgttttgagtttgattcagcgacagaaagcaacataattatgctcccaaacgatgtcatttcctccggtgaaaaatactcgtttttgatttcaaagtgcattac

SEQ ID NO: 72111 - DNA, 456 bp, Glycine max
cccacgcgtccggagaggagttagatgaactaaagaggaaacacaaactagctgtctcagagcttttgatggaaattcctccagaaatgtgccagaaggtcctaaatatatgcaacctgcagatgcctgacagtgaaatggccaggcttgcccttcattaatctaaatgccactttgtgtggtttatggtagtagttcacttagaaagctcattttaggagtgaaatttagaagttgtgatcttgcttgttgcttggaactgttgatattttgggtttcataattcatgcataagagggtaaatttttaatggcacaagtgttcttggtataatatatgttgtcaagaggaattgcagctgggttaactagggactgggaattggggactggggagtcatctttgcaggagaaatctcgttacggcataacgtcccaagagcttggaggacttaat

SEQ ID NO: 72112 - DNA, 449 bp, Glycine max
gagataactagaaacagtgtgatgaaaatgaaggtccttgttttcttcgttgctacaattttggtagcatggcaatgccatgcgtacgatatgttccctctccgaatgaacactggctatggtgcccgtactccggaggtgaaatgcgcaagttggaggcttgctgtggaagcacacaacatctttggctttgagaccattcctgaagagtgcgttgaagcaacaaaggaatacatccatggcgaacaatatagatcagactccaaaacagttaaccaacaagcttacttttatgccagagacctcgaagtccatcccaaggacacatttgtgttcagtatagatggcaccgtactctctaatattccatactacaaaaaacatggatatggggtggagaaatttaactcgaccttgtatgatgaatgggttaacaagggcaatgcacc

SEQ ID NO: 72113 - DNA, 281 bp, Glycine max
cccacgcgtatcgaccacgtttctcgaaaaaattataaaaaaaaaaaaaaaaaaaagaaaaaaagtgaaaataaaaaaaaaaaaaaaaaaaaaaaaaaaaaaaaaaaaaaaaaaaataaaaaaaaaaaaaaaaaaaaaaaaaaaaaaaaaaataaaaaaaaaaaaaaaaataaaaaaaaaaaaagggattccatttaaaggaaaaaaattttataattcttaaaaaggtatttattacctttaataaattacaccaaaaattaaaaaaaatgacgtttttt

SEQ ID NO: 72114 - DNA, 211 bp, Glycine max
gcatctcctatattattttcttagtgttctacctctctatgttgcttgtatggatatctacttgttgtatatggagcatttgtttttatgtacttggtctatatatacatttggtgataattgtctattttatctgcgtctgttctctttgctacatagactgatactttttgatattccccactatgtgcttcacacagtgtatgcccac

SEQ ID NO: 72115 - DNA, 384 bp, Glycine max
cccacgcgtccggatcggtgttcacttgatctcatcataatcgtcagcgtcaggggaagaagatgccgatcagagacatcgccgtcggaaggcctgaagaggcgactcaccccgacacgttgaaggcggctttggctgagttcatctcaaccttcatcttcgtgttcgccggctcaggctccggcatcgcctacaacaagctcaccgacaacggcgctgccacccctgccggcctcatctccgcctccatcgcccatgcattcgccctcttcgtcgccgtctccgtcggcgccaacatctccggcggccacgtcaaccccgccgtcaccttcggcgccttcgtcggcggcaacatcaccttcctgcgcggcatcgtctacgtca

SEQ ID NO: 72116 - DNA, 369 bp, Glycine max
cccacgcgtccgaaaaaaataaaaaaaatattataaaaaatttaaaaaaaaaaaaaaaaaaaagggaaaaaggaaaaataaaaggcgacaaatttaaaaaataccaaaataaaatacacattcatacgaccggatcctttttatattccaggtttataactcattctactgaccttttattttcaacttaatgactctaaaaaccctgtcttttacccaactttttacaccttgcacctcttgaaaaaccttgtagttacccatttatctaattttcctttaaccaccttttttcataactatttattatctaaaatgcccaattccaaacccctttgcaaacctttattaaacctgaatggctaattg

SEQ ID NO: 72117 - DNA, 423 bp, Glycine max
cccacgcgtccgggtggctattgggaaacatgagaaaagaataattgggacggaatccctgatatatttggacagagttgtgatttaccttcatgctcggaagagactgcatcctactgaatactggttttcttttttttcacagcccttaaaaatatcatgtcttgttaaatgtgaatttggttgtaggttgtaagttatataaagatcctttcaaaaagtgttaattccttttctggctgtgctgggcgtttatgggcatttgtcattaatctccgaaagtaattttatgttgatgcttactttactagtatattaataatatcaagttttcagacgtaagcaaaataaaagcaagccttaaagaatttaagctgttgaattaatctgttaggtaaaaaaagattttaaaagggcggccgc

SEQ ID NO: 72118 - DNA, 357 bp, Glycine max
tcgcccacgcgttcgcccacgcgttcgcttccttaagctccttagtgctgctccttgcagctctggttctatcccctcaagttcttgcaaactatgagaatcccccagtgtacaagcctcccactgagaaaccaccagtttataagcccccacttgagaagcctcctgtttacaaacctccagttgaaaaccccccaatttataagcctccagtagagaagccaccagtgtacaagcccccagttgagaaacccccagtttataagcccccagttgagaaaccaccagtgtacaagcccccagttgaaaaaccaccagtgtacaagcccccagttgaaaaacccccagtgtacaagc

SEQ ID NO: 72119 - DNA, 296 bp, Glycine max
aaaaaaaaataaaaaaaataaattaaaaaatttaaaaaaaaaaaaaaaaaaaaaggaaaaaaagagaaaaataggggggccactttctaggctcccagagtatataatcgggcgtgcgacctcttgtatcttatttatcgtgccctatattcaaaattcatgtcctctcgctttccaatcgtctaaattgtgaaaactctggcgcttttcaaattattctgcttgtgaaacatctgccttttgccagatgtcgcgttatgcaaaagacccccgttgctctcgctttctaaaatttt

SEQ ID NO: 72120 - DNA, 432 bp, Glycine max
cggacgcgtgggcttttttgtgcacaacaatcaaacaaacaaacctaccacctgttcttctgtgtatttctatgctgtgtcaatttctcgtgccagttgagactcttgacaattacaactaccttggacattacctttgcttctgttctgtatttccatcatcgtcttcttcttccttacattctatcataataataataaactcattctacgcactcttgcattgcctccacctcgttttcctcactacgtctattatataaacctgataatggctgctgaagtatattaccaggctattggcactttgcagtcccattcttatctgaataatttaaataatcaccaaaaacatcaaaacaatttagtaagattggtggctagggattttatcagcagtaatggcttgtcaacgagaagaagtaaccgctc

SEQ ID NO: 72121 - DNA, 153 bp, Glycine max
acaccaccaatccaacagaagatgtttctacacattgttttccttctttcccttgtgtcataggcttcttatgccagtgtccaagacttctgagtggcatacctcaatggtgcacacacccttttaggcttcccctgcatgtctcctggttat

SEQ ID NO: 72122 - DNA, 210 bp, Glycine max
cccacgcgtccgatttctttcacacaaaaaaatctatttacatttaacgaaaaaaaaaaaaagaaaaaaggaaaaaaaaaaaaagaaaaaaaaaaaaaaaaaaaaaaaaaaaaaaaaaaaaaaaaaaaaaataaaaaaaaaaacaaaaaaaaataaaaaagaatgataaaaatttaaatataaaagaacataacttaaaaacagaaaata

SEQ ID NO: 72123 - DNA, 58 bp, Glycine max
cccacgcgtccggaaagataaaaagaactgttttatatttgaacggtggaaatgtttt

SEQ ID NO: 72124 - DNA, 239 bp, Glycine max
cccacgcgtccggggatttccagaaaatttgggacttcattacctgcctctttttccttagagtagttgtcttgtccaactagagctccaaatctgaagtcacagttccaccaaaatacttgatggagcagaggaaatattttcaagttatgtattttcattctctagattgtaatgtgagattcttcaagaatttagaagggaattggttatgacattggcagggatattaaagcaaa

SEQ ID NO: 72125 - DNA, 194 bp, Glycine max
tcaccttattcatcccttttatccaaatcacaacaacttctctccccatacctacattatcaaatacttcccatacactgaaactgatcttatattaacataatttcacccctacattcaatatcttctttacaactcattctataattaataacacatataatcatttaaataccacaacaaacctatcatct

SEQ ID NO: 72126 - DNA, 419 bp, Glycine max
agaagttattgagtgcttgtacttaaattgaattctgcataaggctttaaagagttgattgaaaaaaaaaaaaaaaaaaaaaaaaaaaaaaaaaaaaaaaaaaaaaaaaaaaaaaaaaaaaaaaaaaaaaaaaaaaaaaaaaaaaaaaaaaaaaaaaaaaaaaaaaaaaaaaaaaaaaaaaaaaaaaaaaaaaaaaaaaaaaaaaaaaggggggccctttaaaaaggacaaaatttaacatacccttctttcaaattaaaaacttttttaaaaggggcccaaaattaaaataaagtggactgtttttaaaaacttaggaattgaaaaaacctttagttacccaaataaaaagccttggaaaaaaatccccttttaccaaattgggaaaatcctaaaaagccctaaacgattggcctttc

SEQ ID NO: 72127 - DNA, 391 bp, Glycine max
cccacgcgtccgcccacgcgtccgcccacgcgtccgcttacacatcgcaaacgccaacctagaaaaaaaaaaaaaaaaaaaaagaaaaaaaaaaaaaaaaaaaaaaaaaaaaaaaaaaaaaaaaaaaaaaaaaaaaaaaaaaaaaaaaaaaaaaaaaaaaaaaaccaaaaaaaaaaaaaaaaaaaaaaaaaaaaaggccccccttttaaaaaaaccaaatttaacacccccaaaaaacccccatcaaaccccccaaaaagaacccaaaaaaaaaaaaaattaacaggggttaaaaaactaaagaaaccgaaaaacccgtgcgctacccaaccaaaatcccattgaaaaaaaaccccttttaaacaaatgccaaatacccaaaaagccccac

SEQ ID NO: 72128 - DNA, 138 bp, Glycine max
aaaaaaaaaaaaaaaaaaaaaattaaaaaatttaaaaaaaaaaaaaaaaaaaaagaacaaaagataaaaaaaaatacaaacttacgtacacatacttacaacatcatacttactttatagtgcctcctactttcaatc

SEQ ID NO: 72129 - DNA, 60 bp, Glycine max
gcgaaaagcaatagaatttataagagagagtatcttgtcctttatttcatgatatgatca

SEQ ID NO: 72130 - DNA, 444 bp, Glycine max
gtttgttgtgagctataagctagtttatcgtgaggagaatatgaagttgtttgttttcttggttgctgcagtagttttggtagcatggccatgccatggcgcaggctaccaaaggttccctctccgaatgaaaactggctatggtgagcgttcttcggaggtaaaatgcgcaagttttaggcttgctgtggaagcacacaacatccgagcctttaaaaccattcctgaagagtgcgttgaaccaacaaaggactacattaatggcgaacaatttagatcagactctaaaacagttaaccaacaagctttcttttatgctagtgaacgcgaagtccatcacaacgacatatttatattcggcatagataacaccgtactctctaatatcccatactatgaaaaacatggatatggggtggaggaatttaatgaaaccttatatga

SEQ ID NO: 72131 - DNA, 441 bp, Glycine max
cccacgcgtccgaaaaaaagtattgataatgtttctcagtgcttttccacgagagtcacaagtaacatacgtacaatgctcagaaaacgaaaatcctagagtaaactctcacttcaaacattcttatccaattttccactcaaattcccaaagagtttgtttcccaatttttccttaatcattgtctatctcagcaagtcactaaatctgtgtccccgtggcatgcattttataagccaccaccctcaactcagtttcactcacattttaattcaaaccacaccactccttcctttccaggtcctccaagtgaccttcttcattctctccatatgctttttccttgttttcattttttctcttttgatcatttcttgttgtggggttggaagaaggaggctatgtttttatttttattttaggctgtagaatacatacaaa

SEQ ID NO: 72132 - DNA, 148 bp, Glycine max
tgtagattccctctagactttcagaattgtgtttctgaaagtaatgaaattactttttcaggatatgactaatgattttcatgttgaatacaggttgacacctttttccattgaataaattgaaagctgcgcttgcttattactttct

SEQ ID NO: 72133 - DNA, 406 bp, Glycine max
ggagagaactttaaacagtgtgtttaaaatgttggtccttgttttcttcgttgcgacaatttgggtagcatggcagtgccatgcgtacgatatgttccctctccgaatgaacactggctatggtgcccgtactccggaggtgaaatgcgcaagttggaggcttgctgtggaagcacacaacatctttggctttgagaccattcctgaagagtgcgttgaagcaacaaaggaatacatccatggcgaacaatatagatcagactccaaaacagttaaccaacaagcttacttttatgccagagacctcgaagtccatcccaaggacacatttgtgttcagtatagatggcaccgtactctctaatattccatactacaaaaaacatggatatggggtggagaaattt

SEQ ID NO: 72134 - DNA, 358 bp, Glycine max
ctaaggtgatccatacgatccttgttaaagttccacgtctcacatgcagtactgtgcctggggggattgcttatgacggtctctacttggaatcgagagatagcacatgtacctttgatagggaagctgaaccctacagctatgacatacagattacatatgaaggcctttacactactatgctagcagttaaagttgcaatagcaacttgatgaaacctcatgccataacttgaaactagagtcatgtacatattcacctatgatagattcctttattcgtgttcgagattttagccacgcatttgtttatcaccaggagatgatcatgagtatgctagtcaatgatttgaattatt

SEQ ID NO: 72135 - DNA, 452 bp, Glycine max
  unsure (1)..(452): unsure at all n locations
gatcgagataactagaaacagtttgatgaaaatgaaggtccttgttttcttcggtgctacagttttggtagcatggcaatgccatgcgtacgatatgttccctctccgaatgaacactggctatggtgcccgtactccggaggtgaaatgcgcaagttggaggcttgctgtggaagcacacaacatctttggctttgagaccattcctgaagagtgcgttgaagcaacaaaggaatacatccatggcgaacaatatagatcagactccaaaacagttaaccaacaagcttacttttatgccagagacctcgaagtccatcccaaggacacatttgtgttcagtatagatggcaccgtactctctaatattccatactacaaaaaacatggatatggngtggagaaatttaactcgaccttgtatgatgaatgggttacaaggggcatgcacc

SEQ ID NO: 72136 - DNA, 207 bp, Glycine max
cttttataataaactcatctcccctcaagccttttgtaaccaacccatgttctttctcgcatttacactaaaaaaactatcaaaaacacccctaaccttccacaacaacatcaaaactacaaccccacatcaacaaaaccccaacctaaaaacacaacaacccctaccactaaacactacccaaaaacaccaaccaatcgaaaccac

SEQ ID NO: 72137 - DNA, 145 bp, Glycine max
cccacgcgtccgtttttttttttttttttttttttttttttttttttttttttttttttttgttattttggtatttttaatatggttatataaaaaaaaaaattttaataattaataataaataaataattttttaatgttaaat

SEQ ID NO: 72138 - DNA, 408 bp, Glycine max
cccacgcgtccgcacgatggcaattacaatacaattgggtcgcggtggagtggaaaagcagagtcaggttacaacaacattcttcagtgagagcagtatttataaaaaaaattggtgtaaatactttttttattgtttgtaatttaatattttttttcttttcattcttgtacttttttttatttttcttcttacaaattatgttttgtccctagaacattgtaaatattttttcttactgttctgtttaaatcgttttaagaactaaaaataaattaagcaaggattaaaaacatttaaaaaaataaaataaaatatactcagtgacaaaaagtaaaaagatatttaattttattaaataaaaatattagaagatgtttgacccttcattggtgggatttacatgat

SEQ ID NO: 72139 - DNA, 205 bp, Glycine max
cctacacgttagggcacgcacacgggttctgttacttttcatacgacatcgctatcgggctacggcccagtttgagggataggctgtgagaacaataccgccgaccacgccagcgactgctaacatcggtcgggacctcaataggaaaacctaagtggcacagcttacgtctatgaacgctacgagttcctctgttacaacagtc

SEQ ID NO: 72140 - DNA, 233 bp, Glycine max
ggtagtataactggccggacccacgcgtccgagctcttctcttaaccccacccttttcttgtctcaaagccagctaccgcgccttgctgccatggaagcaaaactcgagcctctccttctccagcccgaagccccttaagttctccagaacaatcatagcatcagccgtcgactagaccacatatgcaccagcaaaagtatatgctgcacccttcgggttcaccttcacctta

SEQ ID NO: 72141 - DNA, 89 bp, Glycine max
  unsure (1)..(89): unsure at all n locations
ncacgcgtccgtccacgcgtncgcggacgcgtgggttcactttcaaatcagcttcctgtgtgtgtccctggtggatttgagaataacct

SEQ ID NO: 72142 - DNA, 352 bp, Glycine max
cacccgtccgcccacgcgtccgaaagaaaatacacttaaaaatttgaaaaaaagaaaataaaattaggagcaaattttatttctttttaatttaaattccaaaattttctccactcgtttattttctatttagcatttcaaacagtgtaaatgataaaaaaaacttggaaaaaattaaagatgtaggccaaaaagaaaaaacaatgaaaagatgttcagtgacaagtggaacaggaagtctgttggtatatatatatctgtaatgaaaagagttaatatacttgttacatatacatagtcttatttaatgttgatgtgttgaatatcaaccatcaatgatattcattgctga

SEQ ID NO: 72143 - DNA, 430 bp, Glycine max
gtttcgttccatgaatgaagctatctcgaagtcatggaaaaaagtttgtctcctagaagcaaaacaaacggagggtggttttcatgttgggggcgtctcaaattgaagcttccatggtcgaagagaacaagcacttataaacccattggtggttttaactatgaccctttaagctatgctcaaaactttgacgagggatgggaggaggatgatgaagaatctttacatcgcgggttctctgctagatatgcagcaccttcctcacataataaattgctcaagcaatgatagggttgattgaagcttcatttaaggtcagctagtatatatgtactgaaaaactggtcttatatttcttgtcacattttactttaccctctaatgatcttgaatcttgattatataaattactcatgtttggtgcagcaaa

SEQ ID NO: 72144 - DNA, 426 bp, Glycine max
atatctctggattatgtggaaagggaattcaaccatgtaaaaaatgatggagaattggtaggctgggtcacagatgggcttattgcaaggccattgccaaataggatttgcataggcgacactgcaccctcaaactcagtgagtagctgacatggccaaagactggtggctttcattcatgaccacttgcattacatagctgcatgaggaagctagttggactcaagatgtcttgggatcaagggcattggttggttctttgccatccattggtgagtagcacatcccacgcttgcaaacaaacaactcagtgaatggcaccaaataaccacgaactagtttgaattgaaagcatgtggcaacatggtgtgacaaaacccccggtctgccaccccttgtcattgtcaatgaatggactcctactga

SEQ ID NO: 72145 - DNA, 94 bp, Glycine max
atttgtgaaactaacaacaacacaatggcagcatgcgggcacctgataacgcaatggaaagccaactaaggcccggcggttctacaacgacgca

SEQ ID NO: 72146 - DNA, 309 bp, Glycine max
aaaaaaaaaaaaaaaaaaaaaaaaaaaaaataaaaaaaaaaacaaaaaaaaaaaaaaagggggaaaaaaaaaaagaaaaaccagaaaaaaaaagggggcgggcgttttgggggatcaaggttatcgaccccgtgcttgcagggtgatattttttttttagggtcccctaattcaaatccatggccggtgttttaacaccatgtggactggaaaacccagggctttcccaaattaattcgcttgaaaacacatccctttttctcaggttgggaaataagaaaagggcccggcccctatggcctttccaaa

SEQ ID NO: 72147 - DNA, 427 bp, Glycine max
  unsure (1)..(427): unsure at all n locations
cccacgcgtccgcccacgcgtccggataactagaaacagtgtgatgaaaatgaaggtccttgttttcttcgttgctacaattttggtagcatggcaatgccatgcgtacgatatgttccctctccgaatgaacactggctatggtgcccgtactccggaggtgaaatgcgcaagttggaggcttgctgtggaagcacacaacatctttggctttgagaccattcctgaagagtgcgttgaagcaacaaaggaatacatccatggcgaacaatatagatcagactccaaaacagttaaccaacaagcttacttttatgccagagacctcgaagtccatcccaaggacacanttgtgttcagtatagatggcaccgtactctttaatattccatactacaaaaaacatggatatggggtggagaaatta

SEQ ID NO: 72148 - DNA, 377 bp, Glycine max
gtgtagcggtctcaagcatgagaaactccaataaaaaaaataaaagggaaaacgaatttgctcatatggagtacatgaacataactgtaattacttcgaacaaaccttatgggatatctgatggctccaacccattttttgatggcctcaaagttcctaaattcaatctaaagaaaggcggggtgcatagtggtcatgttcaacaagggcttagagataaattttgttttgtgaagaatgggaaagggagatgtcaggacggttatacagctgaggtggatggtcctgactcggtgaaggtacttgtcgccactaaagcaaagcctaacagggacgttaggaattagcttgacaaaaaaatattttaaaagcttttt

SEQ ID NO: 72149 - DNA, 170 bp, Glycine max
cggacgcgtgggaaaaaaaaaaaaaaaaaaaaaaaatcttcaagaaaaaaaaaaaaaggaagaaaaaaaaaaaggggaggggagaaccagtcttacaaggcccatctgaatggcgtcaacaagccaaagaggcattgcctcacttacaccaaagggatggatccaaagtt

SEQ ID NO: 72150 - DNA, 419 bp, Glycine max
gcaattgaagttgaagtcttgcccttctctcttcaactccaaacacaagacatcatcatccatggctgcctccgtctccactgtcggagctgtcaacagagctcttttgaacctgaatgggtctggacctggggtttcagctcccagttcatccttctttgggagcagcttgaagaaggttattggctcaagggtccccaacacaaagatttcctctggaagcttcaagattgttgctgtagaagagaagaaagagattgaagagacccagcagaccgacaaggacagatggaagggtcttgcctatgatatctcagacgaccaacaggacatcacaagaggaaagggttttggtgactcccttttccaagctccacaggatgctgggactcactatgctgtcatgagcttctacgagt

SEQ ID NO: 72151 - DNA, 291 bp, Glycine max
cccacgcgtccgaccattaattgaaaaaaaaaaaaaaaaaaaaaataaaaaatgggggggataatataagagaataggggataaaaataaaaaaaaaaaaaaaaaaaaaaatatatgggggggttttttgggggtataaaattatgggggggggtttttcttatattatatctttttttttgttgtctttgtttttatttattttttttttttttttctaatgttttaatttgggtattttgttgtttttttcatatttgtttgtgatagattgtgttttctttttttttt

SEQ ID NO: 72152 - DNA, 201 bp, Glycine max
  unsure (1)..(201): unsure at all n locations
ctgagattcagcccttgtcgctttgattcgtgaagntaatgacaaaggcccaccaccgaggccaagaagcccaccggctccgacgtcaactggctccaatgcataccctgctctcgattgctaccaacaatccgacccgatttttgacccgacagcgtccttctcgtacaacctcttaacctgcgacgcacatcattgtca

SEQ ID NO: 72153 - DNA, 296 bp, Glycine max
cccacgcgtccgggttgtatccctaaatgaccccagctcgaggtcacattaattatttcccagagagagatagagagtgtgtgtgagagagaatatatattatattccctttgtattatctcggattttactagtattgttatcaagaagaagggtgaatcggattgcgaaaaaaaaaaaaaaaaaaaaaaaaaaaaaaaaaaaaaaaaaaaaaaaaaaaaaaaaagttaatccttcttaaaagatatcaaaaattcataaaccataaaaacaagggggcggcccttttaaagggt

SEQ ID NO: 72154 - DNA, 269 bp, Glycine max
gtgagtgatcggtgttcacttgatctcatcataatcgtcagcgtcaattgaagaagatgccgatcagaaacatcgccgtcggaaggcctgaagaggcgactcaccccgacacgttgaaggcggctttggctgagttcatctcaaccttcatcttcgtgttcgccggctcaggctccggcatcgcctacaacaagctcaccgacaacggcgctgccacccctgccggcctcatcttcgcctccatcgcccatgcattcgccctcttcgtc

SEQ ID NO: 72155 - DNA, 252 bp, Glycine max
cccacgcgtccgatgaaaatgaaggtccttgttttcttcgttgctacaattttggtagcatggcaatgccatgcgtacgatatgttccctcttcgaatgaacactggctatggtgcccgtactccggaggtgaaatgcgcaagttggaggcttgctgtggaagcacacaacatctttggctttgagaccattcctgaagagtgcgttgaagcaacaaaggaatacattcatggcgaacaatatagatcagac

SEQ ID NO: 72156 - DNA, 264 bp, Glycine max
ggcttgttcaagcaagagactatctatgttgatgatgactagtggaagtggaatatattattttgcacggcataaaactatgttgtttgagtctgtgttaacgtagataatttggttgcatgtgtatggccttgtaaagttctatattttgaagcaggatatttatatagttgtactgtttcagaaaaaaaaaaaataaaaaaataaatttataaaaaataaatataaataaaatattttttatataatttattattttttatt

SEQ ID NO: 72157 - DNA, 204 bp, Glycine max
aaaaaaaaaaaaaaaaaaaaaaaaaaataaaaaaaaaaaaaaaaaaaaaaaaaaaagggaaaaaaaaaaaaaaaaaaaaaaaaaaaaaaaaaaaaaaaaaaggggggtttagttcgggggcggcctttttagaggatccaagtttacgtccgcgtccttgcaaaataatagtttttttttggggcccctaaaattaaattaatg

SEQ ID NO: 72158 - DNA, 368 bp, Glycine max
cccacgcgtacgatcgagcatccataaaaaacacctgccctggtgacgataacatactagaagaaagagaagcattatcatcatatatctgctgcttcacactacagtagtgctagcgaataaagctggacccactattcggaccaaccatagctgcataaaaattactaccattaggcaaggtagtgctgtggagtgtgaaggaaaacgagcatgaatggaagagtactctgaggaagaagagtccatgatccctgacgcttcttgtgaacctgcacattatgataatgattgctatcgacagaatcggaattctagacttgcttccatagccaaagcatcccaaaagatgatcatgtgagtcaaag

SEQ ID NO: 72159 - DNA, 411 bp, Glycine max
gagataactagaaacagtgtgatgaaaatgaaggtccttgttttcttcgttgctacaattttggtagcatggcaatgccatgcgtacgatatgttccctctccgaatgaacactggctatggtgcccgtactccggaggtgaaatgcgcaagttggaggcttgctgtggaagcacacaacatctttggctttgagaccattcctgaagagtgcgttgaagcaacaaaggaatacatccatggcgaacaatatagatcagactccaaaacagttaaccaacaagcttacttttatgccagagacctcgaagtccatcccaaggacacatttgtgttcagtatagatggcaccgtactctctaatattccatactacaaaaaacatggatatggggtgggagaaatttaactc

SEQ ID NO: 72160 - DNA, 258 bp, Glycine max
acgcgtccggttcactacctatcgcaaagcaaaaactggtgtcgactcgacaatacaatgcgaaaacgaagaggagggttgtatcgaaggtcccaattccaaacaccaccttaccgacagaccctatagcatgtgacaggcttatgaccattcaaatgtcctgtgtgcttaatcacggtggcatgacgaactcttaggcgtgtgaaccagatacggcttgagaagaatttaactttgctcatcggacactgtaaaaag

SEQ ID NO: 72161 - DNA, 144 bp, Glycine max
gcgctccatttgacacaggcctagtggagtactacttattatggcgcacaccagcatgcatgactaatgtgactgcggagtcccttcaattccccacactgtttacacctggttgctctaccagctcatattcccatggcggcc

SEQ ID NO: 72162 - DNA, 264 bp, Glycine max
  unsure (1)..(264): unsure at all n locations
cccacgcgttcgcccacgcgtgcgtgtttatttatttttcgatatacactaacaaaccacatgaataggtagnctgactgtctcgattaacccctttaccttctaccctcaaaaattcactctctgctcaaagaccaaaaccatccctacataggagcataaatatggcgggagcccattttggtttcaatagaaagactgtggaatgccatgaatcacgacctgggaatcatcctatttctgtgccattcaacgtgacccata

SEQ ID NO: 72163 - DNA, 339 bp, Glycine max
acgctggtttttatgagaaactcaacttagaggtcaacaaggctgactgtcatgctgctgtcatggcaaaccaagtattccagaagaccaaagacaagtttattattccctgatcagttagctctaatcatcttattaaatgcgagcgcacgttacaattgttcaggaaaactttcgattcttggacaaaaataattttttgtcagactttattttggattagacaaaaaagaaataattcaagaaatatacaatgcgcacgttcgtgttttgaacaaaacatcgagcattgccaccaaagcacgcacaactttacactcgcaacctgattcgcaatca

SEQ ID NO: 72164 - DNA, 381 bp, Glycine max
tcgaggcaggcgtacgcgcacgcttcctacaaaataaaaaaatcattgactttcttacgttgaatgaccaacaacacacgtggtgtgactgtgtatacactacgggctgttagtatccttcctactttaccaccacctgatggccataccactgctgaagatctgccttgcctaaacaacgatcctgtttataccactaccatgggctgtggactatggaccggaccatgcacagaacttcgctatagtggatgttacattcactgtgggcaagggcacttatccggctgaacatccttacaacttatcacagctagctcgtgaaacatcactttggtattgaagtggcggcctcagcataatatgaatgtgaagttagca

SEQ ID NO: 72165 - DNA, 371 bp, Glycine max
cgagataactagaaacagtgtgatgaaaatgaaggtccttgttttcttagttgatacaatgatggtagcatggcaatgccatgcgtacgatatgttccctctccgaatgaacactggctttggtgcccgtactccggaggtgaaatgcgcaagttggaggcttgctgtggaagcacacaacatctttggctttgagaccattcctgaagagtgcgttgaagcaacaaaggaatacatccatggcgaacaatatagatcagactgctaaacagttaaccaacaagcttacttttatgccagatacctagaatttcatcttaaggacacattttgtttcagtatagattggattcgtacttttttaatatttc

SEQ ID NO: 72166 - DNA, 277 bp, Glycine max
acgctacctacaaaaaaaaaaaatcatctaacgttctaacgatgaatcaccaacaacactcggctgtgactgcgtatacaccacgggctgatatcatcctaccatctccaccaccacctgaaggttataccactgatgatgatcttccttgccaacaaaacgttcctgtcaaaaccactaccaggggtggtggcttatggagcggacgttgcacagcactccgctatggtggatgttacatacactgtgtgcaagggcgcttatcctgttgaacatc

SEQ ID NO: 72167 - DNA, 139 bp, Glycine max
gatcatacccaattcttgaatatgtattcaatttttaggacaatgtttgtaatatactatgttggtggtaaaagattttatttcttttcttttgtccttaaaaaatttgtgttatgagaaaaaaaataaaaaaaaacaa

SEQ ID NO: 72168 - DNA, 399 bp, Glycine max
atttgacatacgttgacgcgtgcacaatgcatattcaaaattttggatatgacataacatatgtcttccccattatgctgcattccacttttgacttgaaccaaatgctaactaccttataaatacggtcgactcaaaattgtctgtcgttgtcttggacttcggcgcttatatgaaatatgctgttgatgattttgagaaagcatgacttgcattagttacgctgatttggtaattagtctaagcgtgatggcatgtataattgattgactggctttgcaaatcacatgccgtatttaaatgacattgtcgactactactctagcgattcattcctcttggattcattcccttgctatgtgaactaacttttggttgattacccctcatgtttgatga

SEQ ID NO: 72169 - DNA, 425 bp, Glycine max
gctgatcgcaatgttatcagctgcaaacaatctttagtctcccatttacacatggaaatcccagatcaatctgtctccttatcagatctagctcgcataggccattgagaaacacaagaaagacaccactcaaaacacaaatgatcaaaaccaagtgtaaatgggagactaaagattgcttgcagctgatcgcaatgttatcatttgctaatcatttgtttgagtgctgaactagattttatctcgttccacgtgtattggataaatatgttaaaacagaatataatagtttgacacatgcaatttgttttgcatgcaccacaaacaattatatcgtgcatgtccaagtaaaagtaagagacgtgatgagtagaattaattttaaaatctctcgtgtcattttttttttctggcacatgtgcaca

SEQ ID NO: 72170 - DNA, 336 bp, Glycine max
ggtggctatgggttggatcatgctaatcctccttatacgcttatttacatgaagcttgtacgtctactggcgaatcaattagggtcaaggacccattatgggataaatgtgagctcaagaccgactaataaatcctttcatgactcctcattactgccgagctcacatttatctcatactgactctaactgcattctaccaaatcaacttataaaaacaggattatatccacttatatattctactttgactatatcaccatgtgaggctagatctacagtgcatccaagaatgaaacatcttatatgacaactggcatagcttacacatgcgtag

SEQ ID NO: 72171 - DNA, 88 bp, Glycine max
ggaatgattgcattcaaaccagttttcctgttttctgtgtaatggttacccttaaaaaaattctggtctttgtgtgctttggctacta

SEQ ID NO: 72172 - DNA, 124 bp, Glycine max
atggttaatttttttgttttattatggatggtacacttacttttaattacaatatttgttttaacattatcgtttttgccacttggtgacatgagaaattttgggagttgtgtattgaaatgag

SEQ ID NO: 72173 - DNA, 94 bp, Glycine max
ctgagtttaaaaagcattcttttccaaaaaattaaaaacaaaaaatgcatttatagataattctttaataaataaacagactaccattatgctt

SEQ ID NO: 72174 - DNA, 193 bp, Glycine max
aagaaattatagagcacacatgatcacaagtctgagaaattggtttttttaagatggcttgttcacaaatcaagcgcatactatttgtggctttcattattctattgttgttttcctctcaaatgtttgtagcacgaacattgtaagaagaaagcagcctaactagcggggatgccaactcagttcaacataa

SEQ ID NO: 72175 - DNA, 180 bp, Glycine max
gaacaagtatcggtgaactaatatggagatgcaaacggctaagtcaatgatctatttgtcggctggagccagtgacaaaagtgccggtgcctgtatggctgctccattaactagcctcaagttcatggttgacatggcgacctgaaagaccaacggtgaccttacctgcattggtagcaa

SEQ ID NO: 72176 - DNA, 128 bp, Glycine max
cccacgcgtccgcttcccctttgaatccttcctttcctttctaaaatatcagtatcatgtggttcgttcatagagtgaatggagtctgttatgagaaacataaaaaaatatgatgagctaccttcaat

SEQ ID NO: 72177 - DNA, 62 bp, Glycine max
gcttgcaagagtgaaaaccttctcttacccttctctcaagtttcaagagaattcatcatggc

SEQ ID NO: 72178 - DNA, 74 bp, Glycine max
ttagaggatctaaggttcgtacgcgtgcatgctacgttatagctcttctatagcgtgatctaaaggagaagtct

SEQ ID NO: 72179 - DNA, 145 bp, Glycine max
aattttggagctttgctatcaaagttaccatctggaatcccttcccataattccactcaagtccctaatgcagggacacaaagcatcattgagagagtgaaaattgaagattgtgaatttcatcccacccatgatgatgatcaca

SEQ ID NO: 72180 - DNA, 193 bp, Glycine max
gtcacgcgtcagcgcagtggaatatatacttttaagcaaatgcgaaagcatggtgttcaggagacatacgacatcatgagaaaggaggagaacacgatgtggcaaaatatgcctatggcatactgaatctgtatgaggaccatctacaccatcgaggaacaacgcaaagcgcacgcactatacaacagaccaa

SEQ ID NO: 72181 - DNA, 158 bp, Glycine max
ctgaaagccaaggataacgaccacgaccaccatatcttctgatccttatctattaccaccgcctaccgtgccggtgccgacccatccattccatacaccgaacagctacacgctgctggcctccccacgaggtagaccatcgatgtcctatcctacaa

SEQ ID NO: 72182 - DNA, 73 bp, Glycine max
gtcactcgtcaacgcagtggagtatgcgcccctgaatactaagcgattatgtggttacatgagtcatatagag

SEQ ID NO: 72183 - DNA, 387 bp, Glycine max
aatggctcccaagggtttaacctttctggctgtgttaatatgcgtttcagcactgtcactgagtccttctgttgcgggggaagggcaaaataatggccttgttatgaacttctacaaggaatcatgccctcaggctgaagacatcatcacagaacaagtcaagcttctctacaagcgccacaagaacactgctttctcctggctcaggaacatcttccatgactgtgctgttcagagctgtgatgcttcactgttgctggactccacaagaaggagcttgtctgagaaggaaacagatagaagctttgggttgagaaatttcaggtacattgagaccatcaaagaagctttggaaagagaatgccctggagttgcttcatgtgctga

SEQ ID NO: 72184 - DNA, 294 bp, Glycine max
acgctgacgcgtccgtgcaagcgtccgaatcaactacattcacttcaatttgtgagcgagtaaagggtgcctaattctcttcacattgcaagattaactacatggtgcacgcaccacagatgtgaccggatccaattggactctattctgcaacacaaacacaacgcatcatcatttttcttcaattacttcacttgaggaatctctgatgatgctgaatcagacgatgaaaaccaccacataggtgacacctttactgtgtgttacctcatcaactagtggggattgtcccca

SEQ ID NO: 72185 - DNA, 203 bp, Glycine max
ctcaggatctctggaatctatgcgcaagactgtacacagatggaccggtgaattacaggaacctagcgacgacatggggttgatggctacacatgcatgagatccgcattatctatgctcagcattcacacgtttaccggatgcggatcatatggaacacagaatggctggattgaagacgatttgctcacacaagggacgaa

SEQ ID NO: 72186 - DNA, 203 bp, Glycine max
cccacgcgtccgctctcgcacacaacaacgcgcacgttgaacctgccatccaggcttagcttgtacagtggcgactcctggagaggatactgatgatcaggaggaagtcgaaaaggctcatgatgaccttggcgctcttatatacgacagaaactgcaccgatatcgtgcttagattagcgaggaccgatgctgaggcttacg

SEQ ID NO: 72187 - DNA, 350 bp, Glycine max
caagtccaacacttctaattccgttctggaacccgacattgccaaccacctcctcggcttctctcagtatttctccacctctgctgacgtgtcatttcttcaccaccactctcataaaccctattatgtggcttttgcagattggagactgggcctgctaggttccacgacggctatagcagactatgaacatggactcattcttcactcgatttgtacaagcacgagttgcttcgcgtgctttatacggcgttgatacactgcttcatggatcttgtcgccaaaggacaagttcatgaagctcggaactttcaatacttttcgcgaagaccatgaaatgatgcacttgc

SEQ ID NO: 72188 - DNA, 60 bp, Glycine max
ccttctcctagaaagctttctgtaatcccttttcactcaacgaactgcacacatttgtca

SEQ ID NO: 72189 - DNA, 436 bp, Glycine max
cccacgcgtccgcccacgcgtccgcaagcacacacaaaaattctcatcaaagatgttcagtgccaaaaaagctgagcttcatccccagaacacagtgctccaaatcaagcaagatgacaagttcttcagcaggcttctctcaaaggaaggttccatgtccaaaccctctttcagaatggctgtggcagtcccttttgtgtgggagtctcaacctggcacccccaaatacactttctctgaggacactctcccacccctcactcctccaccttcctattttgttaactccaacaaaaaaaacaagccactaaagaaacgctcaagatccaacatcttcttagcactcttcccaaaactaaatctcaagaagaaaaacattctctcaccctcttcacctacctctccatcttctctatggtcaacctcagatcattct

SEQ ID NO: 72190 - DNA, 220 bp, Glycine max
aaaaaaaaaaaagcaaaagaaaaaaaaaaaaaaaaaaaaaagaaaaaatgagaagaaagtgaataggaatataaaaagaagaatagtgtaattaagataatgagaaaagctagaaaaatgacatatataaaaagtagtgtaaattaaatacagtggcgacagaattacaataacggaactgggaaaaccccgacactaccaaactcattacactaaaagc

SEQ ID NO: 72191 - DNA, 350 bp, Glycine max
tcgcggacgcgtgggtgccggcatgcgaaatggacgctctttgcagatgggcgctggtttggcctgacgatctggggtctgaccgcaggtatgcaagcttttagagctgatgcgttgcaactttggaccaacgacgctaccgtactggcttcgcatggaggccccgtttgcggggatatgtgaaaagctgcaggtcggatgccgtacgctgcgctgcgccgctactgggctgtgtggggtgcaggctgggcgctcatgtgatgtggggctgctttgcatgccaagaaagtgctgtgtaacaggccaatgctggcaatgaaaaatgaattggtaaatgacttaaaattgtg

SEQ ID NO: 72192 - DNA, 426 bp, Glycine max
ggcgttgttccgaaccgtgttacttatgggtgctttgttagttactattgtgctgtgaatgagattgataagggtgttgagatgctgagggagatgcagaggctgggggacggggttgctagttcaagtctgtatacacccatcattcatgcgctttgcgaagctgggaggaaccagtttgagtttgaatgcttgaatctagtgttgagttggatttgaatttctgctagtgaagtcaatcaagagcgtggttttcttcaaatgattattattgatctagtggggggatctttgattcttcagatgcatgcaagtgcaatgttcagacaaggaattttcgtaattggcagatccacagttgcaaggtcactgaccaggatctggtctaacgatggtcatttgatttgcattcatgtatttcgagaa

SEQ ID NO: 72193 - DNA, 211 bp, Glycine max
tcgatttactcaccattgtacaaatcaatggcgttgatggttgtcgagtatgagagcagtgacacgtaccaatgaaaccgctggcatgtccatcgtaggaaaggctatgacgaatcctttgggaaacaaagtcgctcacatgtcaaagctgatgaccggcgtaatgaagaagacgcaccgattgaggacatgaacggcagatctgatggag

SEQ ID NO: 72194 - DNA, 399 bp, Glycine max
tcgcccacgcgtccgatctgtcctcataaataatcatttccttgcacgattgaatgagctatcattgaagacgcgcatttcttcctctccagttctcgattcgcctctggcggcggagctgtggagtgaagtgaagtgaaccaacacgtcatatgataaattcgccgtcaaaaccactctcttccatgaacgacggtgataaatttctgcattctttgtattaatggcattgaaacattgaattattaagggttttgtttggggagaactgacattggaagctagaatctgttgttatggcttcaagagtgattatgcgaaagagaaggggcctcttcttcaaccctctgatgaggcaacctacttgcattatttgtggattcttcagtgttgggcacg

SEQ ID NO: 72195 - DNA, 117 bp, Glycine max
ctgtttttgttttctgtgtgccaatgcttttctatcgtgtctgctttatgcttatcacactgcaatttgatcatggatgatataatgcatgcttttgtatgaattttaatttccttc

SEQ ID NO: 72196 - DNA, 276 bp, Glycine max
aagaaaatgacggatagctcctgtggtcacacttagccgtgaccatcctcagctaccggaccagggccactacgggtccaccgagttcccaactgtgtaatgcactgtcctaggggcgcgctatactggggaacaatctataggcacgcgtccgtgcaactttcagagcacagcatgatgctgcttaactccaaaaaactggccgcttattaacaacggactaacaggctaaacccgggtgataccacacttaatctcatatggcataaccccctt

SEQ ID NO: 72197 - DNA, 72 bp, Glycine max
cccacgcgtccgcccacgcgtccgcccacgcgtccgcccacgcgtccgcccacgcgtgcgcccacgcgtccg

SEQ ID NO: 72198 - DNA, 107 bp, Glycine max
aacacgcgtccgtaaaagcaagcctaagataaaagcacagccataggctctatataagatggatgcgactcatgagccacctatctctggtcacttactacactcaa

SEQ ID NO: 72199 - DNA, 255 bp, Glycine max
gccatgccttcattccttcaattcgttttgccgtcaaaagcttcaaaggttgttaatcaggttgcaaaggttccaacggtctccaactgcttaaacctttgggaggcctctggcttttccactgtgcccggttaaggtatggtacatacaaaagggctctaccttgagaggcctactatttcaccacacgaggcagacgcgccccttcttatggagagttacaaagtttacactgatgaattcgtggccctatac

SEQ ID NO: 72200 - DNA, 78 bp, Glycine max
gtgtcagcaccaccagattctgccagagctatttgattaggaagcacgcacagaactcgtgacaggaacatgaccctt

SEQ ID NO: 72201 - DNA, 212 bp, Glycine max
aaaaaaaataaataaataaaaaataatttaagaaaaaaataaaaaataaaaaaaaaaacaggacaattgaaaaaaaacaagtggcgatcaatatggcggatctaattttgctttcgctttctcgtaacttcatatctagggggtaccgttttctgggttcaaccttttgtgcgtcgtttttgcttcctattcctttttttaaccctggcctt

SEQ ID NO: 72202 - DNA, 383 bp, Glycine max
ttctttacattcatttttcttctggtgattccacaatgtgtcctaactctcaatcggcttcctcttaattatactctattcatctttttcctcataacctcaaacacaaaacccaatcattgcaattcccaatctcacagaaacaccagaattaataaaacacataacaaaaaaaaaagcgaaaaatggcgagctcagtggacaaggacgtggtgcgagcgatgaaactttctctttggagcttcctgctccacctgcttggaagaagaagttcatcccatagaaagctggtaccccatagataaacgagattgagttcacttcaccaacaggagaggaaatcaatagcaggaaacacctggaaaaatatttgaaagcacacc

SEQ ID NO: 72203 - DNA, 254 bp, Glycine max
cccacgcgttcgcctaccatcaaaacaaaaagctacaaactaaaccaaaaaatgaaaaggaacacattctatgaaagatgaaaacagataataaaatattataagctacaaattcattgggagtttgatatacacgttccatctttcttaccttgcctcgacatgctatgactcttttttgccgaaacttaagtccattgcattggccgattgcttcacaagatcatggattgagatcacctttgggaatcgca

SEQ ID NO: 72204 - DNA, 262 bp, Glycine max
atttcattgtcatttgcttgtttagaaaaaagttggattgaagctggagtgtactggggattgttagtacatccctggaatcctaataaaatgaataatatttaatattaaaaaaaaaaaaaaaaaaaaaaaaaaaaaaaaaaaaaaaaaaaaaaaaaaaaaaaaaaaaaaaaaaaaaaaaaaaaaaaaaaaataatataaatgttaaaaaacaaaagaaaaaaaacaatataatgactataactaaattacatttaaatgg

SEQ ID NO: 72205 - DNA, 171 bp, Glycine max
aacacgcgttcgatttaggagtgagtgtatagcttatacggggaagggtggtaggattacgagacgcactttgacgtatggctacagtgagacagaagactgggtgcgggaaatctgactggtagtacgtgtggaactagagggtcatgctgtatgactgaattatacgag

SEQ ID NO: 72206 - DNA, 185 bp, Glycine max
gtagattatatattatacccttatgttatatgccatgtcattgtggatagaaaaaaagggaagagagaaagcaaacaagaaaaaagagagacagacaattgggaacggaggagcaaagcctagtctacgtgcaaggactaccatgagccggcgccggtgccgctggatgaccgcgcagtgttcac

SEQ ID NO: 72207 - DNA, 244 bp, Glycine max
aacataccctcttaactcccacaaccacgcttatccacttcaaaaccaacaccttcggctaggctcaatctatcatagaggagcgcctaccattcgatacttacacagccaaaaatgctacaatcaacacattcaacgatctctttcagcatacatctcatgccactcacatacttatacaaattaacctcttgcactcacttaagcatactgataacctttaaattaaccatattatgcttcc

SEQ ID NO: 72208 - DNA, 423 bp, Glycine max
  unsure (1)..(423): unsure at all n locations
cccacgcgtccggatcgagataactagaaacagtgtgatgaaaatgaaggtccttgttttcttcgttgctacaattttggtagcatggcaatgccatgcgtacgatatgttccctctccgaatgaacactggctatggtgcccgtactccggaggtgaaatgcgcacgttggaggcttgctgtggaagcacacaacatctttggctttgagaccattcctgaagagtgcgttgaagcatcanaggaatacatccatggcgaacagtatagatcagactccaaaacagttaaccaacaagcttactnttatgccagagacctcgaagtccatcccaaggacacatttgtgttcagtatagatgggaccggtactttctaatattccatactacaaaaaacatggatatggggtggagaaattta

SEQ ID NO: 72209 - DNA, 439 bp, Glycine max
gttggtcatagattagagagcgattggagtgaacgggaaaaggataatagagattattatcaagatggtattcagaagcttctatctctgaaacggacacatttttgtatggctgaagaccttatggctagatcattttgtaatgttgataaacattttggtatgcaccccatgccatccacttgttatgatcaaagttctatgaaaagtagtgaaaggttttctttctgtgcaaaaatcaaggataaattacaaaatcctaagaattacttttccttgctgtagatatccacatgctttgaaaaaactactcgacaagaattgccatcatcaacaactgatttcccaagaaaattcccagatctcatgaagggatttaatgaatgtgtaacccaatgtaagaagatgaatgaatcctcgagggatgaagaacatgtgc

SEQ ID NO: 72210 - DNA, 68 bp, Glycine max
atttgtggacaatctgttatgtaataggggtgtttttctggctatgaagctcaccatattgtttagtt

SEQ ID NO: 72211 - DNA, 59 bp, Glycine max
aaaaaaaaaaaatataaaaaaaaaaaaatttaaactaaaaaaaaaaaaaaaaacaaaaa

SEQ ID NO: 72212 - DNA, 439 bp, Glycine max
cccacgcgtccggagtgatgaatatgatggaatcatttgttgcccaaacacatgtgtgatgggtgggaatgctgagtccacgtttagcaattgcaagtcagaagcaagtcaaaatggagtgaagtcagaggaatcagttcatactggtttgaagttggtgattattctacaagtggttctggttatttttctggtatttctctggagttttcgttgccgcaccagatctagaaggagacattaccgttgaattgaaagagactttgctttttacctgacattgaatggtgttgatcagttggagttgaagtcctgaaggttatggatttagagtcacaacattgttatgagtgcagtttgcgagttcaagagtttccaaggcactgaatttaatgaatagtgaaatatggatcatccggcacaaggaacattggtgaaa

SEQ ID NO: 72213 - DNA, 187 bp, Glycine max
  unsure (1)..(187): unsure at all n locations
ccggtccgaattcgagggcgcgcacgcgtccgtccactcgttctgatactatgaggtatacattccttgccatatatgccaatcgatgcccaggtgtnttggtatagggggcaggtgtggatgatattatagaagagagattgaacgttgagggagatggtgactggaaaaacaagggtaagagtta

SEQ ID NO: 72214 - DNA, 153 bp, Glycine max
ttctcagccgctacaacggtattgccttttacgacaggcgctgcaaagccagggcctggaagtatcactagggtccttgcggctgtgcttagatccgcagacaataccaggagttcgacagtgagaattaattacgtacttgatttccgcata

SEQ ID NO: 72215 - DNA, 421 bp, Glycine max
  unsure (1)..(421): unsure at all n locations
cccacgcgtccgagagtttgttgtgagctataagctagtttatcgtgaggagaatatgaaggggtttgttttctttgttgctgcagtagttttggtagcatggccatgccatggcgcaggctaccaaaggttccctctccgaatgaaaactggctatggtgagcgttcttcggaggtaaaatgcgcaagttttaggcttgctgtggaagcacacaacatccgagcctttaaaaccattcctgaagagtgcgttgaaccaacaaaggactacattaatggcgaacaatttagatcagactctaaaacagttaaccaacaagctttcttttatgctagtgaacgcgaagtccatcacaacgacatatttatattcggcatagataacaccgtactctctaatatcccatactatgnaaaacat

SEQ ID NO: 72216 - DNA, 290 bp, Glycine max
cggactcgtgggctgaaattttgaaaatcaattcaaattgcaagaataaaaaaaaagggtaggaaataaaaaaagaaaagaaagataaaaaaaaataataaaaaaaaataaaagggtaacatctatagaaaaattcaagaaaacttacaaattaatataaaataatatgttgtttatagcttaaattaaatgaatttaattgttcgtcaattaataatgtaattacagtgaaaacattggacgttaaaaaatttaatgccataaatcataatactatttaacatattgga

SEQ ID NO: 72217 - DNA, 382 bp, Glycine max
actatgcgagcgactatctgaggcgcagtctattgtgcaggccaagctacaggcgcaggcagatcaccacgcacaacagactcctgctatggcttctactgctgtttcgatggccttttcgatgaactacgacatgaacaactacaaagccttattcaaagccttattcataccgctaccaatacggacactattgacgacactggtcacgacaaacgccaaggctaacttcaatgcttatatgaatgcatatgcaaatgcaaaagtcacagcaggacttacaacagcttctatgacagcatctgaggtggctcatgctgctggatatgctgtttgatatgacctctagaactttctgatgaacattcttgttagcatgttt

SEQ ID NO: 72218 - DNA, 457 bp, Glycine max
gaaaatgaaggtccttgttttcttcgttgctacaattttggtagcatggcaatgccatgcgtacgatatgttccctctccgaatgaacactggctatggtgcccgtactccggaggtgaaatgcgcaagttggaggcttgctgtggaagcacacaacatctttggctttgagaccattcctgaagagtgcgttgaagcaacaaaggaatacatccatggcgaacaatatagatcagactccaaaacagttaaccaacaagcttacttttatgccagagacctcgaagtccatcccaaggacacatttgtgttcagtatagatggcaccgtactctctaatattccatactacaaaaaacatggatatggggtggagaaatttaactcgaccttgtatgatgaatgggttaacaagggcaatgcaccggcactgcccgagactcttaagaattacaac

SEQ ID NO: 72219 - DNA, 365 bp, Glycine max
gaaaaaaaaaaaaaaaaaaaaaaaaaaaaaaaaaaaaaaaaaaaaaaaataagggacaacaccaatggtggttcgaggcctaactactaataaaatcaaacacttataatatacatatctcataccttaacttcaatcaacataacgtcgtttatctaatatgggcctgttcaaacccattacattctccaatttattcttttaccatcccgtaccccatttattatgttaacattttaattacaactcctcacactattgccttttctattagaccttctaattctatggcaattgggactcgccttataacattcaattagaattttccggttgagcctttacacgcttcttctcccttaaac

SEQ ID NO: 72220 - DNA, 443 bp, Glycine max
gcagaagaacaagtagttgagaactaagaaggagaagcaaatggcttcctcaatgatctcttccccagctgttaccactgtcaaccgtgccggtgccggcatggttgctccattcactggcctcaagtccatggctggcttccccaccagaaagaccaacaatgacattacctccattgctagcaacggtggaagagtgcaatgcatgcaggtgtggccaccagttggcaagaagaagtttgagactctttcctacctgccagaccttgatgatgcacaattggcaaaggaagtagaataccttcttaggaaaggatggattccttgcttggaattcgagttggagcacggtttcgtgtaccgtgagcacaacaggtcaccaggatactacgatggacgctactggaccatgtggaagctgcctatgtttggttgcactgatg

SEQ ID NO: 72221 - DNA, 458 bp, Glycine max
cccacgcgtccggtttgttgtgagctataagctagtttatcgtgaggagaatatgaagttgtttgttttctttgttgctgcagtagttttggtagcatggccatgccatggcgcaggctaccaaaggttccctctccgaatgaaaactggctatggtgagcgttcttcggaggtaaaatgcgcaagttttaggcttgctgtggaagcacacaacatccgagcctttaaaaccattcctgaagagtgcgttgaaccaacaaaggactacattaatggcgaacaatttacatcagactctaaaacagttaaccaacaagctttcttttatgctagtgaacgcgaagtccatcacaacgacatatttatattcggcatagataacaccgtactctctaatatcccatactatgaaaaacatggatatggggtggaggaatttaatgaaaccttatatgatg

SEQ ID NO: 72222 - DNA, 331 bp, Glycine max
ctcacacgtcactctatgtgctcaatgcacactgtccacaaattcaagtttgttgccactcaatgcgccgaagtcggcagcaccacccgtagacctaccaccagtcccatggtccaccttggctgtcgaaagatcctactcatgttttttgacaggcgacgtttccgtactgcgacggacgatccgtctgaactgcccgactactaggcgcgcgtacgccacaagctcaaggacctctattgtatgatcgtgaccgcctacacccatcaaggacgaagaaagaatggtacaccatgagcagcagcagctacagcaacagcaagatcagcac

SEQ ID NO: 72223 - DNA, 441 bp, Glycine max
gtctaaataagttcaaagattctttaacttcatctcttgtagctcaggctattgattctaggaagcatgaggcacaaactagaagattgctcacgttcttcttatggtcttgtaagaatttgagtcatcgtttggaagacaaggattataatcatgctcttcgagtttttgctgaaaagaaagactacacggcaatggatattttgatgggagatctcaagaaggagggtcgagccatggatgctgagacttttagtcttgtagcagagaatttggttaaactaggaaaagaagatgaggcattgggtattttcaagaacttagacaagtataagtgttctatagatgaatttacagttactgctatcgttaatgccctttgctccaaagggcatggtaagagggctgaaggggtagtttggcatcacaacgacaagatta

SEQ ID NO: 72224 - DNA, 68 bp, Glycine max
tcggagataactataaacagggtgaggaaaaaaatagagctcgcgttttttttgggtacacacatggg

SEQ ID NO: 72225 - DNA, 294 bp, Glycine max
  unsure (1)..(294): unsure at all n locations
gcgggctgtataagttatctggcaaagattgtggcaatcattgtaaacatgtacgatgacatactttagtgaaaatacaaacttataaactgaagatattgcagccccacctcccatctctcttttgtactggtctggccctgcaggctgtataagttatctggcaaagattgtggcaatcattgtaaacatgtacgatgacatactttagtggaaaaaaaaaaaaaaaaaaaaaaaaaaaaaaaaaaaaaaaaaaaaaaaaaaaaaaaaaaaaaaaannnnaaaaaaataaaa

SEQ ID NO: 72226 - DNA, 234 bp, Glycine max
  unsure (1)..(234): unsure at all n locations
aaaaaaaaaaaaaaattttttttttttaaaaaaaaaaaaaaattttttttttaaaaaaaaaaaaaaaaaaattatttgtttaaaaaaaaaaaagaatttttttaaaaaaaaaaaaaaataaaaaaatnttttttttttttttttgtggttttatataaaaaaaaaaaaaaaaaagggggggggttttaaaaaaaaatattatatttttggggtgataaaaaaaaaaattttttt

SEQ ID NO: 72227 - DNA, 197 bp, Glycine max
aaagcttacgagacttttgcaatctctcaaatttaaaacaataaggtttcttagaagaccaatggatggatgtatctgccttagttgttcacatctttcgagatttaacttcttcaaaagatttaggtcctctacaaaatgtggcaagtcagtgagacttttacaccctcccaattctaatgaaggagtaagctttc

SEQ ID NO: 72228 - DNA, 143 bp, Glycine max
aaacaaaaaaaaaaaaaaaaaaaaaaaaaaaataaaagataaaaaaaaaaaacggaaaatatggaaaaaaaaaaaaagaggttcgcatatatacaacaatcttaatttttatatagaggaacgtaatttacataaactggccg

SEQ ID NO: 72229 - DNA, 446 bp, Glycine max
cattctctttgcgcagttccctacctctcctttcaagatgcagatcttcgtcaagaccctgaccggaaagaccatcacccttgaggtggaaagctctgacaccatcgacaacgtcaaggccaagatccaggacaaggaaggaattcccccggatcagcaacgtctcatcttcgccggaaagcagctcgaggacggccgtaccctcgccgactacaacatccagaaggagtcaacccttcaccttgtccttcgtctccgtggtggcatgcacatcttcgtcaagactctcactggcaaaaccataaccctagaggtcgaaagctctgacaccattgacaacgtcaaggccaagatccaggacaaggagggaatccccccagaccagcaacgtctcatcttcgccggaaagcaacttgaggacgggcgcaccctcgccgactacaaca

SEQ ID NO: 72230 - DNA, 346 bp, Glycine max
cggacgcgtgggaaaaaaaatataaaaaaaattaaaaaaaaaaaaaaaaaaagggaaattttagaaaaaaaaaaaaggaaaaaaaaaaaaaaaaaattttatttttttaaaaattaatttttattattattaaaagggcgtcctttttaaaaaattaaattttactttcccttactatcaaccctttaattttttttttttgtcacttaatttaaattcatttcccgcctttttaaaatttttttatttgaaaaactttggcgttaccaaatttaatttctttaaaaaaatttcccttttttccaatttttttaaaaacaaaaagaccctaaccattttctttttt

SEQ ID NO: 72231 - DNA, 67 bp, Glycine max
gcggatatcataggctatggataaactccaatgatgcctgttttgtcaatagtatactggtagggga

SEQ ID NO: 72232 - DNA, 427 bp, Glycine max
cggacccgtcggcttcaagctactgtcctgcattaaaccattgcctcaagattatcaatgggggactctggctcggttgagggggtgttctactcttccttgttctctggatactctatgcaaaccgcccccgaaggagggaagtgtttgagaagtcatccttaccataaaccaccacaaatttaccgttgtcaaatgcaaatagagaaatataaattgtacaataaaaaaaatagttgataaagtagagttccttattgttatacacctcgcatactatattacatccaataaacaaatgctaatctaaactccatctatcagtttgaatagaatacccaaagctagtgtactacaactctcatgatgaagtacaactatgctgtcaaagggatacaaacctgcgtggaagctgtcttactggttg

SEQ ID NO: 72233 - DNA, 411 bp, Glycine max
  unsure (1)..(411): unsure at all n locations
cggacgcgtncgctctaatctactcggcgccattaaaccattgcctcaagattatcaatgcgcgaccatgactcgggccacggggtgttctactctcccttcttctctggatactctatgcaaaccgcccccgaaggagggaattaatagagaagtcatccttaccaaaaaccaccacacatttaccgatgtcaaatgcaaatagtgcaatataagagtacaataaaacaaatatttgataaagaagacgatcttattggtttacaattccctactatatgacgggaacaaccacacgtggagcacagctgcatctttccacatgaacacaatagccaaagctagtggactacaactgctttccatataaagaaagagcattctctagcgttttcttgggaaacatacctg

SEQ ID NO: 72234 - DNA, 451 bp, Glycine max
gttgatcgagataactagaaacagtgggatgaaaatgaaggtgcttggtttcttcgttgctacaattttggtagcatggcaatgccatgcgtacgatatgttccctctccgaatgaacactggctatggtgcccgtactccggaggtgaaatgcgcaagttggaggcttgctgtggaagcacacaacatctttggctttgagaccattcctgaagagtgcgttgaagcaacaaaggaatacatccatggcgaacaatatagatcagactccaaaacagttaaccaacaagcttacttttatgccagagacctcgaagtccattccaaggacacatttgtgttcagtatagatggcaccggactctctaatattccatactacaaaaaacatggatatggggtggagaaatttaactcgaccttgtatgatgaatgggttaacaagggcaat

SEQ ID NO: 72235 - DNA, 438 bp, Glycine max
  unsure (1)..(438): unsure at all n locations
gctataagctagtttatcgtgaggagaatatgaagttgtttgttttctttgttgctgcagtagttttggtagcatggccatgccatggcgcangctaccaaaggttccctctccgaatgaaaactggctatggtgagcgttcttcggaggtaaaatgcgcaagttttaggcttgctgtggaagcacacaacatccgagcctttaaaaccattcctgaagagtgcgttgaaccaacaaaggactacattaatggcgaacaatttagatcagactctaaaacagttaaccaacaagctttcttttatgctagtgaacgcgaagtccatcacaacgacatatttatattcggcatagataacaccgtactctctaatatcccatactatgaaaaacatggatatggggtggaggaatttaatgaaaccttatatgatgaat

SEQ ID NO: 72236 - DNA, 445 bp, Glycine max
  unsure (1)..(445): unsure at all n locations
gctagtttatcgtgaggagaatatgaagttgtttgttttctttgttgctgcagtagttttggtagcatggccatgccatggcgcangctaccaaaggttccctctccgaatgaaaactggctatggtgagcgttcttcggaggtaaaatgcgcaagttttaggcttgctgtggaagcacacaacatccgagcctttaaaaccattcctgaagagtgcgttgaaccaacaaaggactacattaatggcgaacaatttacatcagactctaaaacagttaaccaacaagctttcttttatgctagtgaacgcgaagtccatcacaacgacatatttatattcggcatagataacaccgtactctctaatatcccatactatgaaaaacatggatatggggtggaggaatttaatgaaaccttatatgatgaatgggttaacaagggc

SEQ ID NO: 72237 - DNA, 327 bp, Glycine max
cccacccgtccgcagaaattttggcttaattgtttgtagaggaactggtgtcatgcttgggtgcccaactgatggtacagatgacatcgccaaccactttatacagcctgatgggttttaagtgggaaatatttgtatcttaaaatgtgcatactagctcatcaatagtcatcgcttagagcctgaaacatctatgcctggattgtgattaacgattagactatttatgaagcttggagattctgacccatttcttcttcttgttatgatgaagattatttctctgcgatgcgtcggcagctacactttgacgacttaatatttatc

SEQ ID NO: 72238 - DNA, 284 bp, Glycine max
  unsure (1)..(284): unsure at all n locations
ccgacccattatccgactccctggagcgttgccagcacagcgggagaaacaaccaaacgggggaactacaacnaaacacgcggcggaacacacgcaaccccgcacgaaaaaaaggaagggagagggcaaggacggggttacatcatcgcagaaggcaacaaggcgccttaccgtggacttggcataggaaccaagttaacgaatcatggtcttgatccatgctccaagcaaaacatggatgacggatactagcatgggcagacaaacaatcaagccgccataaa

SEQ ID NO: 72239 - DNA, 152 bp, Glycine max
  unsure (1)..(152): unsure at all n locations
aaaaaaaaaaaaaaaaaaaaaaaaaagggaagaaaaaagaaaaaaaaaaaaaaaaaaaaaagaagaaaanaaaaagaaaaaaaaaaaaaaaagaaaaaaagaaaaaaaaaaaaaaaaaaaaaaaaaaaaaaaaaaaaaggggggggggaggg

SEQ ID NO: 72240 - DNA, 341 bp, Glycine max
  unsure (1)..(341): unsure at all n locations
aaaaaaaaaaaaaaaaaaaaaaaaaaaataaaaaaaaaaaaaaaaaaataaaaaaaaaaggggaaaaaaaaaaaaaaggggagaaaaaaaaaaaaaaaaaaaaaaaaaaaaaaaaaaaaaaaaaaaaaaaaaaaaaaaaaaggggggggccggaaaaagggaacaaagggaaaggccccgggcggccaacggaaaaacccnccaaggggggcccaaaaaaaaaaaaaaggggccggggggaaacaacgggggaacgggaaaaccccggggggccccaaacaaaaaggccgggaagaaaaccccccnngcccaggggggggaaaaaggaaaggggcccgccc

SEQ ID NO: 72241 - DNA, 348 bp, Glycine max
gaaaaaaagacccaaacggacaaacaaaaaaaaaattaaaactcactgacttgacacaccagagaacagaataaagagagagggcagctgcaacatctggtgctgagataaaaaacgtagacatctaaaaaaaaaaaaaaaaaaaaaaaaggggcccccccttttaaggaacccaactttccgtccccccccttcccaccctaaaccttttttttggggcccccaaaatcaaataaccggcccggcctttaacaacgcggacccgggaaaaccccggcgggaaccaaaataaatcccctggaaccaaaaccccctttcccagggtggggaaataggaaaaagccccca

SEQ ID NO: 72242 - DNA, 411 bp, Glycine max
ctgcttcatagaatatcacaccaaaaaactaactccaggccttgtcccctaaacttaacaaaccaccgagaatgattctattcctttttccttagaactcattagagacaaaccattttcgtcaccactttgttgtgcgctgtcattgaaagattgaagcttgttgtgcaaaagggtatgtctgtgataggggcgtattcacattttctctacggagaggtttatcagaaggatcaacagtgcccacagtacttggtgagtgggaggggatatttgttttctcacaagagtagttgtgggagcatatgggttggaagcagaaagagtgaaggtaaaattaaaaggaggaatttgcgtgtggaagctatgtggcctgatttgtcaagaccgaatgagttagagatggaagag

SEQ ID NO: 72243 - DNA, 410 bp, Glycine max
agaaaggctaccccgaaaataaggcgccttccttggagcacaatggcaaggcgtagggagaaagccttgacttgaacaaatatgtgaatgcaaactttgaacggacacctttgtttcccagtgatcctgccaagaaagagtgtcgggagacacagatatcccaagttatatacattcagaaaaaacctgtgcgggtcattgaaaggggatgctgtacaagaagccagacccgctttggaatactaggagattgctcttggacaattcaaagatgacccattcttgcacagacaaactagattggcggatattgcttatactgcatgtgttgaaagaaaacaaaatgaatgcgctgaggagttcaaacatgacatcacataacgaacgtctaaacttgcaacacggattga

SEQ ID NO: 72244 - DNA, 437 bp, Glycine max
  unsure (1)..(437): unsure at all n locations
cgacccacgcgaacgcccacgcgtccgagaggnnggngngagctataagctagnnnatcgngaggagaatatgaagttgtttgttttctttggtgctgcagtagttttggtagcatggccatgccatggcgcaagctaccaaaggttccctctccgaatgaaaactggctatggtgagcgttcttcggaggtaaaatgcgcaagttttaggcttgctgtggaagcacacaacatccgagcctttaaaaccattcctgaagagtgcgttgaaccaacaaaggactacattaatggcgaacaatttagatcagactctaaaacagttaaccaacaagctttcttttatgctagtgaacgcgaagtccatcacaacgacatatttatattcggcatagataacaccgtactctctaatatcccatactatgaaaaacatg

SEQ ID NO: 72245 - DNA, 334 bp, Glycine max
  unsure (1)..(334): unsure at all n locations
gacccacgcgnncgnagnnnnaaataagaaaaaaaaaacagcgactnngngactagggaagatcaccgcnncggcgncnncnncnncnncggcgcgncnacnacnacnacgacnacnnnncgnccacaaaaggangcncagaancaagagggnncccaccggcgcnnccaacnaccaaaaagacgacgcngcagacncnccncgncccgncggaggggggggncggaanngccncaaagcngggggccnnccagaagcaaagcngccnnngnaggcnnncaagaaggcnaanggaaaggannnggcccngcangcangcgccggggagccnccc

SEQ ID NO: 72246 - DNA, 404 bp, Glycine max
taactagaaacagtgtgatgaaaatgaaggtccttgttttcttcgttgctacaattttggtagcatggcaatgccatgcgtacgatatgttccctctccgaatgaacactggctatggtgcccgtactccggaggtgaaatgcgcaagttggaggcttgctgtggaagcacacaacatctttggctttgagaccattcctgaagagtgcgttgaagcaacaaaggaatacatccatggcgaacaatatagatcagactccaaaacagttaaccaacaagcttacttttatgccagagacctcgaagtccattccaaggacacatttgtgttcagtatagatggcaccgtactctctaatattccatactacaaaaaacatggatatggggtggagaaatttaac

SEQ ID NO: 72247 - DNA, 426 bp, Glycine max
  unsure (1)..(426): unsure at all n locations
cacgcgtncgaaaaaaaaaaaaaaaattaaaaaaaaaaaaaaaaaataaaaaaaaaagggggaaaaaaaaaaaaaggggaaaaaaaaaaaaaaaaaaaaaaaaaaaaaaaaaaaaaaaaaaaaaaaaaaaaaaaaaaaaaaaagggggggcggcnaaaaagaaaaaaagcnaacaaaccggggaaggggaaaaaaaacccctnaaaagggggcaccaaaaaaaaancaaggggccgggggnnaaaaacgggggaacgggaaaaaccggggggaaaccaaaaaaaaaggccggggaaaaaaacccccnncgccaggggggggaaaaaaaaaaaaggcccgaacgaaaggcccncccaaaaaggggcccaaccaaaagggaaaaggggaccccccccggaagggccaaaaaagggggggggggggggg

SEQ ID NO: 72248 - DNA, 235 bp, Glycine max
  unsure (1)..(235): unsure at all n locations
ggcaaaagaagcggcggnggnggcgggagcccnagcanncgcgnggcncgcnanagagcgcgcncncaaacccnnccnngccaaggcacgngccccganngacaacnccgacccgccacgngaccccgacgacgangcccnnccnaaaaccaccacngacgacgnncccgacgccgccganncnaaacccgccggcgacgngccncccgcngcnganaccanaaccaccgacgcc

SEQ ID NO: 72249 - DNA, 253 bp, Glycine max
agaagacagctgcttgcgggcccagaagaggtcgagttctaaacagaccacataagaggcgtctgagagaccctttgcgactggcgtggttgaacgaacactgtacggagcatcatgtacatgtgcatgataccacaggatgtcgaatgatacacactcgaggagagttaagaggagctttcgctaaccgaataggcattgcaatagcctttaatgcgaggtggaactctagacagattccacatggaggatt

SEQ ID NO: 72250 - DNA, 415 bp, Glycine max
cccacgcgttcgcccacgcgtccggttgatcgagataactagaaacagtgtgatgaaaatgaaggtccttgttttcttcgttgctacaattttggtagcatggcaatgccatgcgtacgatatgttccctctccgaatgaacactggctatggtgcccgtactccggaggtgaaatgcgcaagttggaggcttgctgtggaagcacacaacatctttggctttgagaccattcctgaagagtgcgttgaagcaacaaaggaatacatccatggcgaacaatatagatcagactccaaaacagttaaccaacaagcttacttttatgccagagacctcgaagtccatcccaaggacacatttgtgttcagtatagatggcaccgtactctctaatattccatactacaaaaaacat

SEQ ID NO: 72251 - DNA, 427 bp, Glycine max
  unsure (1)..(427): unsure at all n locations
gacccacgcgtncgnccacgcgtccgcccacgcgtccgnaaaaaaaaaaaaaaaaaaaaaaataaaaaaaaaaaaaaaaaaaaaaaaaaaaaaaaaaaaaaaaaaaaaaaaaaaaaaaaaaaaaaaaaaaaaaaggggggggccgtttaaagggaccaaagttaactaccccggcctggcaacgaaaaagttttttaaaggggcacccaaaataaaatcaacgggccgcggtttaaaaacgcgggaacgggaaaaacccgggcgtacccaaattaaatggcttggaaaaaaatccccttttgccaagtgggcgaaaaaccaaaaaggcccgaaccaatggcctttccaaaaagtggccaaccctaaagggcaaagggaaccccccctgaaccggccaataaaccccgccggttggggggttaacccc

SEQ ID NO: 72252 - DNA, 279 bp, Glycine max
  unsure (1)..(279): unsure at all n locations
gacccacgcgnncgcccacgcgnccgctnccacagccganncggctcngnccanggccaccgaaccaaaagcagccactgaggacgncaagagcganctctncgaagacgangacgaacnngaagagcnngaaancaacgaagagngggacgacaaggaggaagggaaagaagngactcaacagngggagganganngggangacgangacgnnagngacgacnncncncttcagnngagaagggagnnggagagcaacaccgagaagaacnaaaccac

SEQ ID NO: 72253 - DNA, 431 bp, Glycine max
  unsure (1)..(431): unsure at all n locations
ncatcacctaccactgataactccatcccttccttcctctttatcatcactgacatttgcccttcatgtccctctaactcgaccacctttgtgtgtcaactctcaagactttctgagaaatggggtctaatcttaatgctgaattatccaagaaaactcccatttttggtctaaaagtttgggaaatatttggaattgtagttggattgtctataatagtcattctttctgtggtctcactttgcctaacctcaaggaagaaatctagaaaagataaagacaagattccccttagtcaaataccaactgtctcaaaggaaatcaaggaagtgcgggttgaacaagtgccaactaatgtatttgctcctcgtgatggaatacttctcacgattcaggataagtccagtgacaaggaatcagacaaggtcatg

SEQ ID NO: 72254 - DNA, 261 bp, Glycine max
  unsure (1)..(261): unsure at all n locations
gcacgaacacacncacagacacncacgaacacaacgcnncnncggcnnnncggannnncgcnccaaaacccanngcgncnancacncacacnccacnnncagancggggngngncncncnccccgacagacaaaaaaagaagaaaaggannggaagannnggaaaagnngcnnncagncnngaagnaccaaaaaaggggagngngagacgngaagngaaccnngaacagngaaaanncggaaanggggacccaaaggcaaa

SEQ ID NO: 72255 - DNA, 408 bp, Glycine max
cccacgcgttcggtttgttgatcgagattactagaaacagtgtgatgaaaatgaaggtgcttgttttcttcgttgctacaattttggtagcatggcaatgccatgcgtacgatatgttccctctccgaatgaacactggctatggtgcccgtactccggaggtgaaatgcgcaagttggaggcttgctgtggaagcacacaacatctttggctttgagaccattcctgaagagtgcgttgaagcaacaaaggaatacatccatggcgaacaatatagatcagactccaaaacagttaaccaacaagcttacttttatgccagagacctcgaagtccatcccaaggacacatttgtgttcagtatagatggcaccgtactctctaatattccatactacaaaaaacatg

SEQ ID NO: 72256 - DNA, 236 bp, Glycine max
  unsure (1)..(236): unsure at all n locations
gacccacgcgnncgcccacgcgngcgcccacgcgnccgcccacgcgnccggngaaaaanatgaaagnnnanccgagacacgcnccagncagggcgcaaaancaaggaagaagaggncaccancancancnncngnacagaagncnncnggggcggggggnnaccgccacaangaagggaagcaccaggaganaaagagganggngaggacgnngagaaagaacgcgcccganggag

SEQ ID NO: 72257 - DNA, 183 bp, Glycine max
  unsure (1)..(183): unsure at all n locations
cccacgcgnncggcnncnncnacancacatccanccnnncgggcccnccngaaccngncggcagccanacccacnncnncggccgnaggcacgnncccaccgncnaaaaaaccgagcaaagcaacaaaacggcgncangcccgggaaggagcangcaaagggaacccnagaaaaaggagggac

SEQ ID NO: 72258 - DNA, 306 bp, Glycine max
  unsure (1)..(306): unsure at all n locations
ccggccggaatcccggtcgcccacgcgtncgccagcgtccggngagaactaagaagagaagcaaaggcgnccncaagancncgggccagctgttaccactgtcaaccgtgccggtgccggcatggttgctccattcactggcctcaagtccatggctggcttccccaccagaaagaccaacaatgacattacctccattgctagcaacggtggaagagtgcaatgcatgcaagtgtggccaccagttggcaagaagaagtttgagactctttcctacctgccagaccttgatgatgcacaattggc

SEQ ID NO: 72259 - DNA, 183 bp, Glycine max
  unsure (1)..(183): unsure at all n locations
gacccacgcgnncgcccacgcgtccgcgcacgcgnccanccattcgcnnncacnacaaactttcatactcgagggccctccggaacacagggggagccactcacaatacacgcacccaacacaccttcacaccgcctaaaaaccctagccaagccacaaaacggcatcccgcctgggaagaag

SEQ ID NO: 72260 - DNA, 321 bp, Glycine max
  unsure (1)..(321): unsure at all n locations
gacccatgcgnncgnccacgcgtgcggataactagaaacagtgtgatgaaaatgaaggtcctcgttttcttcggtgctacaattttggtaggatggcaatgccatgcgtacgatatgttccctctccgaatgaacactggctatggtgcccggactccggaggcgaaatgcgcaagttggaggcttgctgtggaagcacacaccatctttggctttgaaaccattcctgaagagggcgttgaagcaacaaacgaatacattcatggcgaacaatataaatcagactccaaaacagttaaccaacaagcttactttttatgc

SEQ ID NO: 72261 - DNA, 92 bp, Glycine max
  unsure (1)..(92): unsure at all n locations
gcggcaagaaggaccaaggggacgaacgcgcgcangcgacgacaaaacacnncaaaaggggcacccaaangcaaagcaccggcccgcgnggc

SEQ ID NO: 72262 - DNA, 117 bp, Glycine max
  unsure (1)..(117): unsure at all n locations
accggatccgaangccataactacatacatgcaactcgttgagctatcttaataaatgccgtttgtatgtgttagaatttaaaaaaaaaaggaacctttaaaaaaaaaataatctac

SEQ ID NO: 72263 - DNA, 156 bp, Glycine max
cgcacgaatatcttgttgtttggagcgatccgagaaaaactctgtaaacatgttggtttacgaggacctccttacaggtgatgagcttctctctgactccttccgttacaaggaaattgagaatggaatgctgtgggaagttgatggggaagtggg

SEQ ID NO: 72264 - DNA, 253 bp, Glycine max
ggaagacgaaaagagagttgagagagagtgagagttagtgagagggagcagagggagcgaagagaagaaacaaagatggagactcctgcttcccaacaaggcgtcttgaagaagaaggagacaaggtgccgaaaacccaaaccaaaggacgtacacgggaagggtttgaaggaaggttggaaaacacagcatcatcaacaacatcatcatcagcagcagtaacatcaacaagatcaaccttcgttggacaaga

SEQ ID NO: 72265 - DNA, 433 bp, Glycine max
tctagacccacgcgtccgagaacaagtagttgagaactaagaaggagaagcaaatggcttcctcaatgatctcttccccagctgttaccactgtcaaccgtgccggtgccggcatggttgctccattcactggcctcaagtccatggctggcttccccaccaggaagaccaacaatgacattacctccattgctagcaacggtggaagagtgcaatgcatgcaggtgtggccaccagttggcaagaagaagtttgagactctttcctacctgccagaccttgatgatgcacaattggcaaaggaagtagaataccttcttaggaagggatggattccttgcttggaattcgagttggagcacggtttcgtgtaccgtgagcacaacaggtcaccaggatactacgatggacgctactggaccatgtggaagct

SEQ ID NO: 72266 - DNA, 291 bp, Glycine max
aaagaaagcgatagaaaaggaagaagaagcgcttcgcgatgcacgaaagagaagaattggaagcaaagtttcggcgttttgtcttttataaaaaaaatgttaaatcattataattttctatgatagggattggtttcttgtcttttttcttttgtttatgaatatcggtgtattttaacagttgtaaagcactgcgccctcgctgcatgatcatgtagttttcaaccagctgcgtttgcaggggttgtaaaactaataacatatataattaaataaattatattctctctc

SEQ ID NO: 72267 - DNA, 246 bp, Glycine max
ctcaagcgtacgtgcacgcgtacgaaaacacaagccaagtgtaagtgagaaaagataaagggaaagagcacgatggtgaacacagtagtgagtacaaaggagagcatcatggtgaacacaaagctggagagtaccatggtgagcacaagccagagcacaaagaggggttcctagacaaagtcaaggacaagatccatggtgagggcggcgccgtcgagggcgagaaaaataaaaaaataaaaatat

SEQ ID NO: 72268 - DNA, 185 bp, Glycine max
  unsure (1)..(185): unsure at all n locations
cccacgcgtccgctactttctctctctttgtaacttgtaagcatggagtcctcaaagatctatgcttacctcttcctgtgcatgctcttcctctcctgcgncactcccattctcggttgtggctactgtggcaaaccccccaaaaagcacaagcctggtaaaacaccaaagacacccacagtacc

SEQ ID NO: 72269 - DNA, 287 bp, Glycine max
  unsure (1)..(287): unsure at all n locations
agcggcggagaaggcacccggcggagaagaagcccgaaggctggagaagaagatctcgaaggaaaggagggagccgagaagaagaagaaagcgcaccgaagaagagccgtggagacctacaacgatctacatncttcaagggtcctcaagcanggttcaaccccgacatttggtatttccagcaagggccatgggcatcatgnaactagcttcatcnaacgaccatcttcgagaaaagctcgcccaggaaaagcgtcgcgtttgggcttcgctaccaacaaggaagc

SEQ ID NO: 72270 - DNA, 170 bp, Glycine max
tcgaccaagccttcgggtttgttggaaacgcacagatgcaatcattgtccacactaaccatcagcgacatgactgggtctttccctagtcaagactgtccaaggtcaacttatgctggtcgaacttaaataggtgaagacacataccgttcattaacctaatggctacac

SEQ ID NO: 72271 - DNA, 82 bp, Glycine max
cccacgcgtccgcccacgcgtccgaaaaattaaaaaaaaattttaaacacaacaaaaaacaagaacatacatgaaaaaatac

SEQ ID NO: 72272 - DNA, 335 bp, Glycine max
ggttgctgtaggagataagattgcagtagtgctaagtgctaacacctgcagtgaacaatggcctctgcatcagcatctctgctcaagtcttcacttgttcttgacaagtctgagtgggtgaagggacaaacccttcgccaaccttctgcatcagttgtgagatgcaaccccaccaccccatcaggcctcaccatcagagctggttcctatgctgatgagctcgttaagaccgcgaaaacagtggcttcaccagggaggggtattttggccatggatgagtccaatgctacctgtgggaagcgtttggcttcaattgggctagagaacactgaagc

SEQ ID NO: 72273 - DNA, 202 bp, Glycine max
ccgaaatggggatacttagcccaggaccagctccaattttcaaactctgatggtaatctggtgattgagtctttcccaggtggcgataagattgagtccatgttgcaaaggatggagcagttggtggatgagtttgacccttcttcaaccgcctaaatttgttcaaccaagaaccaccaaaagtggactgatgataactttt

SEQ ID NO: 72274 - DNA, 220 bp, Glycine max
cgaaagacattcctaaggaggacaaacattaatgtttatgaaggtgatgctgatgttactgctgtaattttgtgtttctcttattgtctttgaatggatacatgtttttgtgtcttttactagaatgatttcttgatcactgtctgttcatattactcttgaatggcccttgtattagtacatatatatttagcaataaaatgacatgacaattttggtt

SEQ ID NO: 72275 - DNA, 276 bp, Glycine max
cccacgcgaccgcccacgcgtccgaaaaataaaaaaaaaaataaaaaaaaaaaaaaaaaaaggaaaaaaaaaagaaaaaaaaaaaaagaaaaaaaaaaaaaaaaaaaaagaaaagtatgaaaaaaaaaaagacaaagccaacaaacaacagaagcaaaaaactaaaacaaaggaacaaagaaaaaaatacagaaaaaagaaaaccattaaaaaacaggacaaatgacaaaaaaaaagggataaccaaaaaaaaacataaagaaaacaacccaaaaa

SEQ ID NO: 72276 - DNA, 450 bp, Glycine max
cgagataactagaaacagtgtgatgaaaatgaaggtccttgttttcttcgttgctacaattgtggtagcatggcaatgccatgcgtacgatatgttccctctccgaatgaacactggctatggtgcccgtactccggaggtgaaatgcgcaagttggaggcttgctgtggaagcacacaacatctttggctttgagaccattcctgaagagtgcgttgaagcaacaaaggaatacatccatggcgaacaatatagatcagactccaaaacagttaaccaacaagcttacttttatgccagagacctcgaagtccatcccaaggacacatttgtgttcagtatagatggcaccggactctctaatattccatactacaaaaaacatggatatggggtggagaaatttaactcgaccttgtatgatgaatggggttacaagggcaatgcacc

SEQ ID NO: 72277 - DNA, 420 bp, Glycine max
cccacgcgtccgcacaataccaattagcctaacactctcaacccaacacaagttttattttgttcttcagtttttctcttcccaaagagtttttgttttgtcttttgttcttctcatgggtgggtttgaacagaagatgaaggatagggccaaggagctcaaggtcttgctcaagaaaggggtgaagattgtgggagattcatgcaagaaggggtggcacatagtcaaacacatcaaacgctgattagcgtgattgtaatcatctgttgcatggcttattatcccaaagtctcttgattgtttttcttttttttttttggtattgccatttatttgtactttcataggtttggtttgcatgtaaaatgtagtccttctaatttttctggttcctctatccccttttttggggttgctttt

SEQ ID NO: 72278 - DNA, 184 bp, Glycine max
cccacgcgtccgattcaaaccagcaagctaaacctaagagtgaacagcctgcgctttctgatgatgcaaccaacccggacagtaataatgttgtgcaagaagaaccgggatcatcaaatgcttctggttctagctaatcgaaggagcacttatttaaccaatttccaggacctctaattaaccc

SEQ ID NO: 72279 - DNA, 124 bp, Glycine max
cccacgcgtacgaaaaaaacagcagcacaaagcactttaagagaagactaaagaaaaagaaggagagggaaacaagcaggggaagaaagaaaacaaagggcggaaagagaagaacgaggagaaa

SEQ ID NO: 72280 - DNA, 101 bp, Glycine max
ggaactagcactgttgcattgcgcgaacaaaattttgtgacctgcttatgttcaacattgaccagcgatgattacgaggagctactgagcaaatagcgact

SEQ ID NO: 72281 - DNA, 145 bp, Glycine max
gagagctaagaaccctaagaaggacagatttgtgaccaataatgccaggaaagagacccaggaacaaccagggaagaaccagacacaaacacgggaaacacatgacagaagcaaccaagcgccaatggaccacagagcacactgg

SEQ ID NO: 72282 - DNA, 125 bp, Glycine max
ctactcttatcactcatctatggctacatttttttgaccttgtttaccatctttcttctacggcaatatcatcgggaagatctagaatctattactatgctctaagtgaagaccactattaggag

SEQ ID NO: 72283 - DNA, 481 bp, Glycine max
tcgggacgcgttcgccacgcgttcgcccacgcgttcgcggacgcgtggggttttgcttacttggttgattgccagaggcttcaacatgccctctctggtgccaagtgaattcatcaaccgtgtgttaattggacgaacaatttgagaggatcgaatgttgttcgcggtcatgttgaggaaattgacaaggcaattagtgagtattcttaggaaatgggcatcaagtcgatttactagtctatgtagtagcaggtttttatagtttttggattattagaagcacaactatgggtttttgtgatgtatgttgtctaatcaaatccttcaaggatggtattgtaggattttggatttcaactgcccggttaccaatgcatgttaagtgattaattatacattcatcatcgtcatagttcaccaatatagggagaatttattgtatgagaatgattatcctatcttaaaatgaaaatgataattt

SEQ ID NO: 72284 - DNA, 226 bp, Glycine max
aagcttattttggttgtttacatgtagtttacggaggaaaattgcagagatagtgcaacattagtggaaaatttgggggtatagctggatgaaagagcgaagtcaaagtaactggttgcatataatgatatattaacaggagttttggggattgcatactcactaaagagagaggcttctgtagtcatatagggccttcataaaatgtgtgttacacctgttattg

SEQ ID NO: 72285 - DNA, 275 bp, Glycine max
cccacgcgtccgggttttgtgtatggtgttctacaaaaacagagaagtttcagggaaaccgagaatgggtagctgctatgaggacacaggatcttcatctattcctgcattaatggactcttacataagttttgaccaaactcaaacccatgcatatgagtttgagcaagtgctatgcttcttcattatctgtcagaacgaaacaagctacattgtcaaccacatggccactatggagcctaaagtaccttccaaccatgcacactatgcatatg

SEQ ID NO: 72286 - DNA, 333 bp, Glycine max
aaaaaaaaaaaaaaaaaaaaaaaaaaaaaaattaaaaaaaaaaaaaaaaaaaaaagaaaaaaggaaaaaaaaaaaaaaaaaaaaaaaaaaaaaaaaaaaaaaaaaaaaaaaaaaaaaaaaaaaaaaaaaaaaaataaaaaaaaggggagatcgttttaatgataaaaactttgaatacgtgtaactgttaatataaacattttaaaaggggaagcaaaatcaaaattaattggcctggtatttaaaaattgtaaatttgaaaaactttgttgtaaaaaaattaattatattttaataaatttattttttaaaaatttgggtattttttaaaaa

SEQ ID NO: 72287 - DNA, 197 bp, Glycine max
tacacacattcaccaaattaagattttaattttaacgaaccttacatctatccgcgcatatgcgtcattatctacagcacatacccaaaaggctatctatatctacaacaccatgctcctaatctaacttgaactctactatcattgcctaatcataataactcttgaatcaattgactgttagtatacacattata

SEQ ID NO: 72288 - DNA, 533 bp, Glycine max
  unsure (1)..(533): unsure at all n locations
tccaacgccgtccggcccactgcgtctcgtcccactgcgnntcctgcaatgggctattggatagggtgaataccgtcganntatctcacagagggcctatgtcgaagcggtgggatttggcttgggaaactccgagccgattgtcnttactatcggcaaaaccgaatagcgttaaagcgtcgccaacccttcttcgccactcgtcactgctgcgtccctttcgacccagttanaatccttcaactcccactcccctttcaccgaatctccttcaatttctcaatcgcttccctcacatttgtcatacaggttgaagctcccaagggttaccctatggaggcgtgccgattggcttatgggctatttgcaatggtcttctaacgcgtattggcagagagaactgccatcgatcnttggcgacgaccaatttcacttctcttctacgacaccaatatnccctcgccaggctggtctttcgggttctaagcggatcgtgtgtgctgcgttgaactgggttgtggatttctacaacg

SEQ ID NO: 72289 - DNA, 64 bp, Glycine max
aaaaaaaaaaaaaaaaaaaaaaaaaaaaaaataaaaaaataaaaaaaaaaaaaaaaaaaaaagg

SEQ ID NO: 72290 - DNA, 338 bp, Glycine max
cccacgcgtccgcccacgcgtccgaaatgattattgatagtgaatacgtgatatctcacaaggcctatgcaagggtcgtattgcttgagaaccacgagcgatgtctactacggcccaaccatagcgataagcgtatccaacttcttagccaccgtcacgctgcgtcccttcgaccagattatcctgcaacctaacacccttcaccatctaattcatttctcatcgctcactcaattggccaacaagttgagctcccaatgttactatggaagaatgcgattgcttatggctacttgcaatgtcttctacacgtattgaacacagaacgccattgatct

SEQ ID NO: 72291 - DNA, 256 bp, Glycine max
attatgctttctttcttaaaaaatttaaaattatatataataacatattaattggaaataagtactataatcaaaaataataaaaaaaaattatatttactaatatatataaaataaaataattaatttcatttttcaatatataaaaatatcaattattataattaaatctaaattaatattactatattttttttgttttttttataaatttaattttcatttctatctttaattaattaatctattttaatat

SEQ ID NO: 72292 - DNA, 200 bp, Glycine max
ctcaagatcagggctatttatcactatgtatattctatccacaattatatttaccacacaaccactaataaaccctttttgacaaaaactttgtgtttactatgaccttcttcatgcattatattagaccataatttcaatctacaaaataactgctataattattattcaatgcaataacataattacctatatacata

SEQ ID NO: 72293 - DNA, 277 bp, Glycine max
cccacgcgtgcgcgcttgttgccgttggaattatgccctagctagctgcacaatggctgacgtgtaggagcatgatgcggatggagtaatagctgggcaggcagagaatagaacgttcaagaagaggagtatcatgggcagttgatctagctgcacttctagccatgttcagctatgtactgctgaagatgtgcatggctcatgctcatagaaaggtatacagagggttcaccagaaagtgcatggactacatcaagaaactgtacgtagatggaag

SEQ ID NO: 72294 - DNA, 251 bp, Glycine max
aatacgcatagcgcactggacgccatttcgaatacaggttgatggattgaagtgccatagttggccgaagaggatggcttgtaggtgatgctctgaatgccttttgaagctagtgaactcaatatcgaccattgctgatctgcccacggtcgactatgggactgatcagtttgatgaatacactacaactgcgaataacactctcactgtcagtgatgatcagactgtagagcaactaggccgacccatgc

SEQ ID NO: 72295 - DNA, 424 bp, Glycine max
ctataagctagtttatcgtgaggagaatatgaagttgtttgttttctttgttgctgcagtagttttggtagcatggccatgccatggcgcaggctaccaaaggttccctctccgaatgaaaactggctatggtgagcgttcttcggaggtaaaatgcgcaagttttaggcttgctgtggaagcacacaacatccgagcctttaaaaccattcctgaagagtgcgttgaaccaacaaaggactacattaatggcgaacaatttagatcagactctaaaacagttaaccaacaagctttcttttatgctagtgaacgcgaagtccatcacaacgacatatttatattcggcatagataacaccgtactctctaatatcccatactatgaaaaacatggatatggggtggaggaatttaatgaaacc

SEQ ID NO: 72296 - DNA, 374 bp, Glycine max
cacacgcgtacggacgacgctgccggtgacagtcaccgtcgaacatacattaactgctctcagaaatatgcggctgcatcgatgtgaaaagacagtattggctactcaactagcggagtttacaagccgaaggctgcttaaggaggtcaacatcaagctcggctccgtatccgctgaactgtcacagagacagcagtcagtggagttgctaaagattgaatactggcgccggacgtgacatgatgaccatatggctattgctgaattacgtgaagcatggctttatgaacatgctatgcatgacgttactgatgaattgccgctccacaaacttcgacaccttttctttgcacatattaggattgaggcagatg

SEQ ID NO: 72297 - DNA, 336 bp, Glycine max
cgcacgcgtgggcggacgcgtgggttgagatctaagaaggcgaagcaaatggcttcctcagggatctcttccccagctgttaccactgtcaaccgtgccggtgccggcatggttgctccattcactggcctcaagtccatggctggcttccccaccaggaagaccaacaatgacattacctccattgctagcaacggcggaagagtgcaatgcatgcaggtgtggccaccagttggcaagaagaagtttgagactctttcctacctgccagaccttgatgatgcacaattggcaaaagaagtagaataccttcttaggaagggatggattccttgc

SEQ ID NO: 72298 - DNA, 174 bp, Glycine max
aatttaccttttttttaactcattcaaaacgacctggattgtatgtagtgtgtgaattctgtgtcataccttatctgcagcttcaaagttagtgttctcattaagtaagcaatatagttaacgaaaaaaaaaaaaaaaaataaaaaccatacaaacaataaagtatgtcaatag

SEQ ID NO: 72299 - DNA, 148 bp, Glycine max
  unsure (1)..(148): unsure at all n locations
cccacgcgttcggtggaaactttggacagtgtactnattaacactatgaaatactaccagagtggaatgacacatgaagctccatgcagagaatcacagcttaaacggctgcacaatcttctagtggtaaaagatgaacaaattatta

SEQ ID NO: 72300 - DNA, 360 bp, Glycine max
cccacgcgtccgcccacgcgtccgatcgagataactagaaacagtgtgatgaaaatgaaggtccttgttttcttcgttgctacaattttggtagcatggcaatgccatgcgtacgatatgttccctctccgaatgaacactggctatggtgcccgtactccggaggtgaaatgcgcaagttggaggcttgctgtggaagcacacaacatctttggctttgagaccattcctgaagagtgcgttgaagcaacaaaggaatacatccatggcgaacaatatagatcagactccaaaacagttaaccaacaagcttacttttatgccagagacctcgaagtccatcccaaggacacatttgtg

SEQ ID NO: 72301 - DNA, 313 bp, Glycine max
agcgcccaaagtcacccactagtacccgctttctccgatctcccgccgccgcatcccgttccggatctgtccacccgtttcagtctcgagccaccgtgccaacagcgctgtttcgccgcgcatttcagcaggccaccaccgtgccacccaaccacacccactgtgccccccatttctggagaagtacacttggagcaaatcttgagagaagagattgtgtactggataaaggagaaatatggaggaagggaaaactattatatgtgactatactgaacatgttctcttcagtattttatggaactcttggctc

SEQ ID NO: 72302 - DNA, 217 bp, Glycine max
cccacgcgtccggacacagaagaagtgaatgcggagagttgaaagaaggatatggaagcagggtcagagttagaccaaggtatgaaggtgttgtattcgtgtttagcgaatatcaattggcgcttttaacttttttacttgcgtttcttatatttatattttttctgctttctatttcaagtgtgatatctatctttttatttttattgtttttttc

SEQ ID NO: 72303 - DNA, 161 bp, Glycine max
caaagccaaattcccaatagtcctttcacttttcaatcctacattaatatcattggcaactcgttccatgcattaaagccttgtcccaatattactcactatgcattactccatcttcatatattcacgcatcttcaacactaacaattacattacacttc

SEQ ID NO: 72304 - DNA, 312 bp, Glycine max
cccacgcgtccgaaaactcacgcgggccagtctgcgacttactgaccactggatcagatcggggttctgtctctcgcatccatctgcattgtagtcgccggcgtcggaggacagtctaccgtcgcagcgccgtcaaacactccggcaactcccgccgccgccactcccgcccaagcaccttccacagtaccgaaatcaccagctcccgttgcttctcccaaatcatctccaccagctgcaacccctgcatctactccggcggcatcttccaccaccacccccgccgcgcctgcttcggtgaccaagccacct

SEQ ID NO: 72305 - DNA, 185 bp, Glycine max
cccacgcgtccgagcacttacaaactgcatttagagattcagtcaccaatggatcgcaacggcgttcggtctattgcattcatctgcattgtagtcacctacgtctgaggacagtctaccccctcatctccatcaaacactccgtcaacttccgacgtcgtcactccctgccaaacacctttcac

SEQ ID NO: 72306 - DNA, 187 bp, Glycine max
cccacgcgtccgcccacgcgtccgagcaagctcatcctagagttttaaaaatggcagcagccgcctccatggctctctcttccccatccttggctggcaaggccgtgaagctgggcccatcagcccccgaagtcgggagggtcagcatgaggaagaccgtgaccaagcaagccttcttcggaagccc

SEQ ID NO: 72307 - DNA, 55 bp, Glycine max
tgtgcattgtagttcttatatatctttgtgtctgatcagtgatcaattagttctg

SEQ ID NO: 72308 - DNA, 223 bp, Glycine max
cttaaatccaccttcgaaattctttcacaattgcctacccactaaacaataacaggaataaggttatcaatggcttcaaatattaaatatcattatgctcataaccacgccacacaggaactcgatgtcatctgtctcatgatcaggaataccatgcaccttaaagtcttagcacaacaccgcaagtactataacctctttaatacttaattcatatcataat

SEQ ID NO: 72309 - DNA, 206 bp, Glycine max
tccactcatccatccaatcgtccgctcacgtttacacttttccttaagcttaaattttcttgtatcggactcatatatctattataaccaaacactcttctacatattctacttcttctacctactactatatctccgactagcatcatgacacttagagcattgctattgcttgctatatattcttcttccatccatggatcaaa

SEQ ID NO: 72310 - DNA, 121 bp, Glycine max
cccacgcgtccgcattggacaaaaacaaaataattttcacagtggacaatatgatgtattagaaatgttattttagaaactacgaagtatattaactgaactgtaatcaataatttcagat

SEQ ID NO: 72311 - DNA, 105 bp, Glycine max
gtgattgatgttaacacgaccaacacacctcccctgccaccagcatgttgtacttacgggagcggatgcgtcatgggtggcggaggctgttgaagacatggacaa

SEQ ID NO: 72312 - DNA, 370 bp, Glycine max
  unsure (1)..(370): unsure at all n locations
cccacgcgtncgcccacgcgtncgcccacgcgtccggtttgttgtgagctataagctagtttatcgtgaggagaatatgaagttgtttgttttctttgttgctgcagtagttttggtagcatggccatgccatggcgcaggctaccaaaggttccctctccgaatgaaaactggctatggtgagcgttcttcggaggtaaaatgcgcaagttttaggcttgctgtggaagcacacaacatccgagcctttaaaaccattcctgaagagtgcgttgaaccaacaaaggactacattaatggcgaacaatttagatcagactctaaaacaggtaaccaacaagcttcttttatgctagtgaacgcgaagtca

SEQ ID NO: 72313 - DNA, 133 bp, Glycine max
gcgtcgccagcgcggcaggaatgttgtgagaacgtggaaactggaagaaaacgagtgtcagagcaatacgcttgtatgtgaaggagagtgaataagttgtacgcaactaaggttggctttgaatggagtgatg

SEQ ID NO: 72314 - DNA, 359 bp, Glycine max
cccacgcgtccgaacgactctctcttttttcgctccttcgactaccatttcttggggggcatagacgcttccaccaatgtctaccatctcaactttaagtgccaagacaaaaaacttgatcttgccaaaaccatcgatttcatcattgactatgttaccctcacaccaccaatctccgccgccattcatgttcttagcatcttggcaccaccaaacaacaccatcgtatgaaatttttcttaacttttccattgtcaatccctcaccacccttaaccttttttacatatccactgacatcacattcttttctttggcttctttttaaaaattagacccttattattttgttttcaaagg

SEQ ID NO: 72315 - DNA, 247 bp, Glycine max
aaacgatcaaaagactactaaaagaccacttgatagactgatgaatctgaagtttctttttttgttggtgtaatatgttgcatcattgcctagtcttaaggagagcctctgtggtagtggtgctagccttatggaaattatgtgtatcatgctcctaccgatgtaactaaattattatattagactatggagttgttgtatgaactcatgtcaaagttactatgatgagtatgtttattatttcttg

SEQ ID NO: 72316 - DNA, 288 bp, Glycine max
cccacgcgtccgcccacgcgtccggtagtgtggctggatagagtcaccgggaatgttggcatgtccatttcggcgaaggcgatgacaattaacggaattgatgaccggagatactggaattggattcctactgaagaatctaggttagatttaattggctttagttgtttgctttaaggttgaatatggatatatgaaacctgtgtcttattaaaaaattatataatttaattctttttattatatattatttttttttatatctgtttatttttttttttttttttt

SEQ ID NO: 72317 - DNA, 220 bp, Glycine max
aacggacccagctactttgaaaaaaaatttccaaaaattttttaattaatcaccaaacatattacttttgctgttatttgcaatcttcagcctcaacaaattaataaagtattctttcatttttacttacattttttatttaaacaactatatatcttttaaaacatcaattcaccttttaatatatcattaatttcttttatattaatatcattaaaac

SEQ ID NO: 72318 - DNA, 341 bp, Glycine max
cccacgcgtccgggaactcctcagggtacatgaaaagcaaattgcataggaagagttggctagctggtcttggttgcaaatgctattgttctgacaagaattctgttgatattagtgaccatgcaggtgaaatcagtttcagcaaaaattctagtcatggaaaaacaacttcaagaaatatgttcaatgctgatccagaggctaatcattcagttaaagttactaggcctcacgcagccgaaatctcgattaacaaagatgtttacttccaaaggccagagaagttaggggtgggattgagcaaagagaacagtttagcactctcaagtttgaattctaac

SEQ ID NO: 72319 - DNA, 84 bp, Glycine max
cccacgcgtccgtaagacactccacgtacctacgatgttgactcttaccggcttggagaaatcttctgcccttgttccatattt

SEQ ID NO: 72320 - DNA, 401 bp, Glycine max
  unsure (1)..(401): unsure at all n locations
cccacgcgtccgcccacgcgtccgttataaacagtgtgatgaaaatgaaggtccttgttttcttcgttgctacaattttggtagcatggcaatgccatgcgtacgatatgttccctctccgaatgaacactggctatggtgcccgtactccggaggtgaaatgcgcaagttggaggcttgctgtggaagcacacaacatctttggctttgagaccattcctgaagagtgcgttgaagcaacaaaagaatacatccatggcgaacaatatagatcagactccaaaacagttaaccaacaagcttacttttatgccagagacctcgaagttcatcccaaggacacatttgtgttcagtatagatggcaccgnactctctaatattccatactacaaaaaacat

SEQ ID NO: 72321 - DNA, 154 bp, Glycine max
  unsure (1)..(154): unsure at all n locations
gggtccgaaaaacccggtccaaccaacccgtccgcccacccgtccgaaaaaaaaaaaaatnttttaaaaaaaaaaagggcggacaatataaggggggcaatcttacaaaacccgtgcatcctacataatacctgtttgtaaagaaaaaaataaa

SEQ ID NO: 72322 - DNA, 401 bp, Glycine max
cccacgcgtccgaaacagtttctagtttctgggctatagtactagggtttcttcttcgcgtggcttcctccgctaacacatacagtagtacttttctgcaacttaatctattctcaccagatcaatccaaacagttttgttcatgagaattagctctctctaacctaacttgtttcttctatattttaggatgcgtttgcttctatattgttgatcatgaaccgtcacgaccaatttcagaaacgtatgcttttcttaattcaccttaaacggataacatttttgttcgtcttcatcgcattgctggaattttgcaacattctcttcaacttgtattccaattccgattctctactgtcaggaaatcatgcattcacggctttttttttttttttttttta

SEQ ID NO: 72323 - DNA, 323 bp, Glycine max
agtgtggggtggagttggaggggtgtgtgtttaatttcgctgctttggtggaggtttaccggttaccgggtgaacttgttgtggtggaagttagaagaagggacggggatggtggggtttttagggatgtgtggaggaataagctgaggccgtgtttgtgttgctgcgagtagcagttctacgtttagatcgggatggaacaactttggtgcaacctggggtcggtgaatcatgattaggggttattattttttttaatttggaattttaaattaaattgataaaatttaatgtatgttgaggttttaaaattgaaatgtgtt

SEQ ID NO: 72324 - DNA, 249 bp, Glycine max
gaggcatggcactgcgtggcatggcgcttggctgatccagacattgacatttcgatgtggagaggccatggctctccgacaactgatgtccaatgaatgctggatgttctaacacttttatgataagaagattgcaaggtttggtatactctgaacgtataagtgggggacattgtgaacgcactatgctggatgttgaaccacactgatgcataaccttctagtatggagacgaccttcatacacgct

SEQ ID NO: 72325 - DNA, 176 bp, Glycine max
  unsure (1)..(176): unsure at all n locations
tttctctctctctctctcactctttctcnctctctctctctctcatccacatttgctggtcttgtcacccccgacaaaggagatctgatttatgttgttcgnctcacgggcctttgcaacggcaacagcaacaacaacaacaacggcagtgtgtcaccggattcaagtgttttcat

SEQ ID NO: 72326 - DNA, 96 bp, Glycine max
aaaaaaaaaaaaaataaaaaaaataataaataaaaaaaaaacaaaaaaaaaaaaatgcgcgattattataaaaaaaaattcccccaccaaacaaat

SEQ ID NO: 72327 - DNA, 270 bp, Glycine max
tctaccctcccaggcacggtctcttacctcacccaaccgggttacccatgggccgctatgaaggaccctcgcgcgccgctcgggatatgggggaccctcacgcatcgcgcacgtcgcgatgactctaccaggctacttgacacggcgtcacgcacctcgcgcgactaccatacagacgggacatatacctcacgaggcccgggctttcatctgcgggtgatcgacacttgctgtgtggtctgagagtgtgctttatatacacacaaagtg

SEQ ID NO: 72328 - DNA, 235 bp, Glycine max
gttgtgagctataatctagtttaacttgatgagaatatgaagttgtttgttttcttgcccgcttcaaaaatatatgcagcatacccaaaccaattcgcaatctactaatctttctctttcatatatttaaacttatttatatttttcttttttatttattttatcttttctcttttctatttttatttattattttttattacatattttaattttttttacatatcttatatta

SEQ ID NO: 72329 - DNA, 60 bp, Glycine max
cccacgcgtccggctttttacgattattaaaaaaaaaaaaaaaaaaaaaaaaaagggggg

SEQ ID NO: 72330 - DNA, 182 bp, Glycine max
gacaaaaagaccctttacaaaatttttttttatgagcaacctttgtgctggtctttggaaaaacatgatgacaactgaaggtttaagggccccacaaaaaggctgggcatattgttatgctcgagcacgaacagacaaactaatacaacatgagggtaccatagatttgaacgatataaata

SEQ ID NO: 72331 - DNA, 409 bp, Glycine max
gcggagaaggtgaaggagaagattaataacaacaacaaccttcactcttctattattggtattattcaatttaatcatttaataataataataataattttgttcaccaattattattattctacatcagcatgggtaagggtcccttttccttccgccgctccgcctctcgccgccgacccaagaagaccgccgccccgcctcctcctccgtctccgccgcagcctccctacgcggccggaatcgccacctcacccgacgacaaaaacgacatggaattgattttgtagctgttagactagtgttgtacgatctattggtgaaaaagtcaatctttcatttgtaacttttgattaaatttcataaaagaaaggaacttgggccatttttttaaaataccttttctctt

SEQ ID NO: 72332 - DNA, 377 bp, Glycine max
aagcaaatggcttcctcaatgatctcttccccagctgtgaccactgtcaaccgtgccggtgccggcatggttgctccattcactggcctcaagtccatggctggcttccccaccagaaagaccaacaatgacattacctccattgctagcaacggtggaagagtgcaatgcatgcaggtgtggccaccagttggcaagaagaagtttgagactctttcctacctgccagaccttgatgatgcacaattggcaaaggaagtagaataccttcttaagaagggatggattccttgcttggaattcgagttggagcacggtttcgtgtaccgtgagcacaacaggtcaccaggatactacgatggacgctactggaccat

SEQ ID NO: 72333 - DNA, 89 bp, Glycine max
  unsure (1)..(89): unsure at all n locations
cccacgcgtccgnaaaaaaaaaaaaatttttttaaaaaaaaaaaatttaaaaaaaaagggggggaaataacgggcgcgtgggggctatt

SEQ ID NO: 72334 - DNA, 298 bp, Glycine max
tttatatcacaatgcacgagtgtgatgaagggggatatctcctgtacaatgagtcaaaaaagctgcgatatggctactttcgaacactctaaaagattgaaactggtattatgagctaaacaccatccgcggctggaccggcgatgtattcgtcaaagaaaagctttgaaaatggctcaggagtcactctcagaaacccccgatatctcgccccctttgtctactgcacaatcgcagccagatccacctgttcaaggaacgttgctttagtccgtttaatcacaggcaccagaatttg

SEQ ID NO: 72335 - DNA, 130 bp, Glycine max
cccacgcgtgcggttacgctagaattttttatagggaaagcattgtgatagtcattgatacaactgcatgtatcatcatatatgaataagcggcaaaactcacgattgtaataacagacggttacttgaa

SEQ ID NO: 72336 - DNA, 213 bp, Glycine max
aatactatgctctaaaaacggtgcgcctttataaggccgcctacgaatccaccagtgtctatcctaatccggattccttcacatcttctctaatcccacaagatgccatccagtcccgcgacgaaaggaaagtcgccaaattccataagcgaacatctatgcggtgaaacgaacagattatcttctattactcccaaataagggagccaattc

SEQ ID NO: 72337 - DNA, 454 bp, Glycine max
  unsure (1)..(454): unsure at all n locations
gaaacagtgtgatgaaaatgaaggtccttgttttcttcgttgctacaattttggtagcatggcaatgccatgcgtacgatatgttccctctgcgaatgaacactggctatggtgcccgtactccggaggtgaaatgcgcaagttggaggcttgctgtggaagcacacaacatctttggctttgagaccattcctgaagagtgcgttgaagcaacaaaggaatacattcatggcgaacaatatagatcagactccaaaacagttaaccaacaagcttacttttatgccagagacctcgaagtccatcccaaggacacatttgtgttcagtatagatggcaccgtactctctaatattccatactacaaaaaacatggatatggggtggagaaatttaactcgacctngtatgatgaatgggttaacaagggcaatgcaccggcactgcccgagac

SEQ ID NO: 72338 - DNA, 169 bp, Glycine max
atcacacattctcatgctgattataatcactaacctctaacctatgcgacgaggaattcggcaatcatcaatacacatactatggtatctgatcacaatctcaagttccatcaaatgatgcaaacgtgaactaacaagacatactacatatcacatattggaaatgaat

SEQ ID NO: 72339 - DNA, 304 bp, Glycine max
  unsure (1)..(304): unsure at all n locations
cgtcggaaccttttccatgcggcttccgtgagcatccccctgggaactgacgaagaagcaccgacgggtaatagtgtcacggctcgacgcctcagcgaactcatcagttgacgccgaacctccagagtacgcgatcatcacggctcgacagtgaactccccacgtgatttcatagctcgacgcacgaccggccctgcgaagaaacaaaaaagccgaacctngctaaaaaaaaaaattaacgacccaaaaggccttcgtttgggtggttgtctgaaagggtgaacctcgtagacacttactatat

SEQ ID NO: 72340 - DNA, 348 bp, Glycine max
  unsure (1)..(348): unsure at all n locations
gttgttagcgcgtcggaacctgtttccctgagtggttgtttgggtaggcatcacacacttcttcatatctacgcacaacacacggctcaacccgagaccgctccaagatgcggcttaattaaactactcctctcctcctcaccgccgcccccgccgccgccacactaggcgggaccccacaagaaacgggctcctatcgacaagagatacgaattgctccgacgtccctaatccaggatctattatccgggtgtaacgggccgactaaaatgccaacaacctgtaaatttgagcccctccttaaggtaccctcttcatctatcatgcanganaggaaacggacgagtt

SEQ ID NO: 72341 - DNA, 468 bp, Glycine max
atggttgttagcgcgtcggaacctgtttccagtgcggctgtggttgaggcatgtcgggactaccaaataaaaactccttctatcaatattgcccggaataaatcatataagaaaccgccctataatctagaaaacacgaataacttctgtgcaatcaccgtagcacctccggtagtaaccgcccctatcgtacaccccctataccccgcggcggagggcaagaaagaaactacaactctacctaaacgtaaatagaaactagaacgtccaataaataccgtccgttaagttccgcgccgaccgttgacgtgacaacggaaaacgcaaacgctacggccctaaagaagaaactgtgaacttaatggccctcttaccaggactccgaccattcaaccaacccttcacgcaaatacaaaccccaccgcgacgtgtaacacccaccccaacaaaaacaccaaccccggttcc

SEQ ID NO: 72342 - DNA, 128 bp, Glycine max
ttcatagtttaaaccaaatcaatttgccaaatgtactaaactacaatatagttttttttttaacccaatgatgatggtgataataaggaatgtatgtaaacaatgttcagtgtcatatatagttcttt

SEQ ID NO: 72343 - DNA, 269 bp, Glycine max
  unsure (1)..(269): unsure at all n locations
tgtaggcgtcggaacctgttccatgcggtntcgttgagcatcccccatcttacgaagtaggggattaaatacggattccccgatatcagatactaagatgaccctcccagtcctaccatacgaagtcgcgcgtcctcggtccgtgacaaatccgctcgcgaaccagggtctacatagatagacacagagaaagatcctctacatcacaccgatagtcccctcaccgccatcatcgagatggcataactccgaaaaacaaacgctctcgg

SEQ ID NO: 72344 - DNA, 323 bp, Glycine max
agcgcgtcggaacctgtttccctgagtggtgcttgggtaggcatccgaacgaacgattcggactaaataccataaagtgtgctgggaggttcggtcacagatttacatcaaatgaaatggaagtaatttaacctatagctggcttacccaccgacggcgggatgcggtccaacctaattggtactttacccaacattggcccggaactatagacccgaccggaaatacgagactaagctatcccagatccggatcctggttgtgattatttccaaggtgaacctcgtagacacctactatatcggtggttggctgagtacgta

SEQ ID NO: 72345 - DNA, 289 bp, Glycine max
gcaaattccaattcccaattcccaattcccaattcgaaacccttattcctttcaaagaaccaaattgagtgatcgtgatggcaccaaaggcagagaagaagccagcggagaagaagcccgcggaggagaagaagtccacggtgggagacaaggctccggcggagaagaagccaaaggccggaaagaagcttccgaaggagggaggcgccggcggagaagggaagaagaagaagagaaacaagaagagcgtggagacatacaagatctacatcttcaaggttctgaagca

SEQ ID NO: 72346 - DNA, 84 bp, Glycine max
aaaaaaacaaaaaacaaatatataaaaagattaaaaacaaagcatacaaatggatcttatggagatatcaaaccgatgtatatg

SEQ ID NO: 72347 - DNA, 210 bp, Glycine max
aaaaaaaaaaaaaaaaaaaaaaaaaaaaaaaaaaaaaaaaaaaaaaaaaaaaaaaaaaaaaggaaaaaaaaggaaaaaaaaaaaaaaaaaaaaaaaaaaaaaaaaaaaaaaaaaaaaaaaaaaaaaaaaaaaaaaaaagaaaaaaaaaaaaaaaaaaaaaaaaaaaaaaaaaagaaaaaaaaaaaatgaagagaaagaaaaaaaaagaaa

SEQ ID NO: 72348 - DNA, 387 bp, Glycine max
gtaggcgtcggaaccttttccactagtgttcctttgatacatatcccgcaaaccaattaagaaataattaaatcagggtaactggaggccatcccgccggcaagacgacatcctaatacttcacatacaccggaacgactctctccgaaaaacataaatatacgaaattcgcctcaaatacactcgtcgtacgtatctctatagcagtaattcccatatacggactacacaatactacacgtagataccgttcccaccatgataccaaatgaacgtaaacaattaccttacctcctagaaatacaatcacttcgcacataaatctcgcaaccatcaaaaaaatcttatcaggcgtccatctaatctattctccaagaatcttgaact

SEQ ID NO: 72349 - DNA, 220 bp, Glycine max
atcacacgtccgcagaaactgatgcaattttacaagcaacgagagcaggcgaataattgagctatacaccatgtgaagctagagaacgtgaaatatctaaggcagtgcatccagatgactatgacagtcataactagtacgcatctgcaatgcaatcaagcaactacattgacgaatcttcttacataactctatagatccttaaaattcttccactaat

SEQ ID NO: 72350 - DNA, 290 bp, Glycine max
tgtagcgcgtcggaacctcttccctcatagatatcttgtatgcctccaaaacaccgagcgctgttgatccgaaattggccctagcgagattaacgagaacaacttctggaaggagcaagaatttaattactccctttattcatacagaatccgcaattacccgacaacttcaacgtagatatcaaattagccaatactataactactaagcaagtactaaagtccccgattaaatttactcctttaaaagccccaatcaaattctaaagcaaccatctatctgatctccg

SEQ ID NO: 72351 - DNA, 397 bp, Glycine max
  unsure (1)..(397): unsure at all n locations
atggtgtangcgtcggaacctgtttccatgcggctgtcgttgatgcatctcggggtcgccctcgtcgtaatccttatctcgggcctaccggactgagtccctgcgcctcatgtagtgacggtgtgcttcctaagagatcgtacgaaacgctcggcgactcctgtggccgcactcgtcccagcggtgcgcgggttcgtttcgcaccggaaacctaataagggccctgtcgtacttatttgcaagattctcgcccgcttcttccgtgtacgcgaccgtttattcttcgcgctctcttctgagtccgtcttcgggtccgtgaaactctctcgccatagaccgcggaggcgacgacttagagtctaaataggaaacggagaattatcccgcggcttccccc

SEQ ID NO: 72352 - DNA, 360 bp, Glycine max
cccacgcgtccgcaaagcctctgatggaatcagggaatattgctgagctagctgatccaagattggaaggcaagtatgatggagagcaactctatagggtagtgctaacggcttcatactgtgtgagacaaactgccacgtggcgtcccccaatgagtgaggtattagagctgctaactagtggccaagagagtgaggttggaaagagctggaggatcccaaagttcacttctgatgaattggatgattactccatggttttcggatatgatgtaccctcagacgtatctttggaggattatctgtgagaatgaaatgtatggttcaggttcaaattttcttttcatactcaatatctaa

SEQ ID NO: 72353 - DNA, 368 bp, Glycine max
  unsure (1)..(368): unsure at all n locations
cccacgcgtccgcccacgcgtccggaaagcaagctcatcctagagttttaaaaatggcagcagcctcctccatggctctctcttccccatccttggctggcaaggccgtgaagctgggcccatcagcccccgaagtcgggagggtcagcatgaggaagaccgtcaccaagcaggcctcctccggaagcccatggtacggcccagaccgcgtcaagtacttgggcccattctctggcgagcccccgtcctacctcactggcgagttcccaggtgactacggctgggacactgctgggctntcggccgacccagataccttcgccagaaaccgtgagctcgaaatgatccactccaggtgggccatgctc

SEQ ID NO: 72354 - DNA, 300 bp, Glycine max
cgtcggaacctgtttcccatagtgcttccattgatagatccccccgaaacccactcactaatctcatttcagggactcccagaagcgcagctattctcttccacatattacacaaacaagagttcttagcactgaacacacttttaaccaaatatgagaccaccacgataagcctccgcgcattcaaaatccaacgcccgataaattcgcaataccatcactaaacctcctactatctacaccggaaaatccatctcgaaagcattcgtacaaagatctcatttccgaactaacactctc

SEQ ID NO: 72355 - DNA, 313 bp, Glycine max
ggaaatcaaataactctttgtgggtagattatgacaaaggaaactccaaatgaagagaagaagatgaaatagcaataaggtgaagcttgccacattttgtggacttatgatgatacgtgtgagacgcctctggtgtgtgtctcgcacgtgcgtattgtgatttttctttttttagctatggccggaattgctatttcttgtttacttgattaattccttttttgagtactctagtggtataccatcacacactaccaaaagtaacgatagcccaagccctatacaaccaaaccctaacacacacccatttgat

SEQ ID NO: 72356 - DNA, 388 bp, Glycine max
  unsure (1)..(388): unsure at all n locations
agcgcgtcggaacctgtttccctgagtggttgtttgggtaggnatccccccccccccccccctcccccgtagagtgcagtaacgaccacctaagaacaaaatacagtaaacccaatagattacagtttaaagccccaaatgataatacaaaataatatatctaaaggccccgctcaatacaaataacgccagtaaatccatgaatatatgagaccgtacccaggacaaccttcccaaaacatgaagggactcaagcagagaccccaccactacgtcgtactaactaaatggcaatagagataaactcggttactctaaatagtttacttctaactataatactatatgatcttactccattttcaacccccttcttccggggttccct

SEQ ID NO: 72357 - DNA, 282 bp, Glycine max
gttcgcacacctgattgatgtgtttatccattcattactgtatcttatgcttggaaatcttattaaatatatgtaagaataaaatatgatatcctgataaaaaaaaaaagcataaaaaaaacaaaaaataaaaacaaaaaaaaaaaaaataataaaaaaactacacaaaaaagaaaatagagaaaaaaataaaaagaagtacaaaaggtgtcaacattttagggtatcaatctttcattacattgctttagaaacgtataccttttgaaaagggtgcccaaa

SEQ ID NO: 72358 - DNA, 325 bp, Glycine max
agcaatggttgttagcgcgtcggaacctgtttccagtgcggctgtggttgaggcatcccccccccccccccccccccccggtgccattaatcaaaacacccacccaagcaaaaacaggtactactaattactcttatagcctacacactccaacgtaacaatccctacacccccaagctcactataccacacacgtatactaccctacccaacgggtataagtgcgcctaacagtcgaaatagcccgtcctatacttatctttacaccgtagacaccggtaagtgtcttcgcacatcctaacttgcaacttactggcgtcttata

SEQ ID NO: 72359 - DNA, 313 bp, Glycine max
gtgtacgcgtcggaaccttttcccatagtgggtgtttgtataggtatcccgatccgctccgaggatagtgactcctacggtacgaggggagagataccgaagaaataacattaaaccgcccagagaagaataggcttcgacgtcgaattagggatgaacctccacgcaagttgtcacggactaaaagtgtccaccaaagatcactccgctcttcataccggaattaacttcgacaatgaaaatcctatccccgtcggacctatcgtcctattaactctcatacccagtcctgctaacatctgcgacactttcc

SEQ ID NO: 72360 - DNA, 103 bp, Glycine max
aaaaaaaaaaaaaagaaaaaaaaaaaaaaaaaaaaaaaaaaaaaaaaaaaaaaaaaaaaaaggggaagaaagggaaaaaaaaagggaaagaaggaaaagaaaa

SEQ ID NO: 72361 - DNA, 386 bp, Glycine max
cgtcggaacctgtttccctgagtggttgtttgggtaggcccctggggatttaataaaaagaaaacaaaagggaaatataagagaaataaatagaaagcaatacgagactctctccatcagttccgccttcagcctccgtcccctattgcggtgaagtagttgcgctccgtaatgttgcggccggagactcccatttccgttctcttcatgcggcctaaggtggcaatgctttagtgaatcgtcgtaatggcactagaatgtctaatagctaggtttaaattttcgcggattgctagggtgcccgttgccgtactaaaaacgtcactggaggagctctccctctcctcaataattctaataacgtctagctcccgttcgtcaagcgc

SEQ ID NO: 72362 - DNA, 86 bp, Glycine max
cccacgcgtccgctttaaaggacattaacattaaacactgtacaaaattgaagagtttatgctgtgtatcttgttccttatgcact

SEQ ID NO: 72363 - DNA, 300 bp, Glycine max
tgtaggcgtcggaacctgtttccatgcggcttcgttgagcataccacgaaccactcggataaatacctaaatggggctaaagcgtcgccacagattacatcaaatcaaatggaataatttaacctatacttgcttacccaccgacggcgggtgcggtccaacctaatggactttacccaacattggccgcaacatagaccgaccgcaaatacgaaataagctatcccaaaccgattcgttgggtggtttctgaaaggtgaactcgtacacccttacatatcgatggtggctgatacgtac

SEQ ID NO: 72364 - DNA, 372 bp, Glycine max
cccacgcgtccggtgggaaacagttgctaccaattttgatgaatttcaggatgtttctgagaagcttttcacaagtaaaaacagaacggaggcatctgtagggaagaaggtgaagatagacatgctccctgaaatcgagaaagttcacaggagaaaggagaagttgctgaaaaaacaacacagacaagctcttcttcttgataatttcttgggtgttgatgggcttgcccctgggcgttcacttcgtgatagaaaacctgttacctacacttttgatgattacgatcgatccatcagtgaagcaattaagataaccaaacggaaaccaccatccccagaacctattccccagaaaggagccagagccaaaca

SEQ ID NO: 72365 - DNA, 401 bp, Glycine max
  unsure (1)..(401): unsure at all n locations
agcaatggttgttagcgcgtcggaacctgtttccctgagtggttgtttgggtaggcatccccccccccccccccccccccccccccggcggccccccgggccccccccccccccccccccccccccccccgccccnaaccaaaaaaactcgacccttccccgacagtaaattttaccccatccccataacgaagcctccaatccccatctaaaggcctaaactccccgttctatacaaatccatttccctataaaccatacgtaatagagctcccaacccccatttatttttttttccccccccaaagtccaattggcccccgaattgtcccccctatacagccggggaaaaagtacccccggtaaaattttaccgttttgcccaaggtccgaaactcccc

SEQ ID NO: 72366 - DNA, 366 bp, Glycine max
  unsure (1)..(366): unsure at all n locations
cgcgtcggaacctgtttccagtgcggctgtggttgaggcatcccccccccccccccccccnnnnnnnnagaatgaaaagtacgccagtccacctcccaccgaccaaccagttggtctccaaacagttcccaatacaaaataatcgttcttcatccctcctggaggatcccaataatccgaaataaacctccgaccaggcaaacggtcatcctcacattgtcacataacaaaagtccaccgtgatattacgcatgcatcaattccacgtaaaatatagcttgcgagacttacgccccgccaagcccccaatcccgtcccctcataagagtaagtcaggggcccgacaagcccccagatgtccggccc

SEQ ID NO: 72367 - DNA, 134 bp, Glycine max
cttaatgttacttgctttttcgtaaaaagcaagtaacattaagctggctcttgattctgcaagttatttacggactgataccagctggcgatccagctatagctataccgagacgatatttcaatgtccgaaaa

SEQ ID NO: 72368 - DNA, 210 bp, Glycine max
tcgtccacgcgtccgttttttttttggcatcatcaaatagaacaaaaatcacaggagaaaataggaaaatgaaaacaagaaatcaaaaaaacaataaaaaaaaggacagcaactattgaggtaccaacgcttatctaaacctgcctaccacttcaactgtcttttatgctgctacttaaattcagtatacaagccttacatttacaaccc

SEQ ID NO: 72369 - DNA, 186 bp, Glycine max
  unsure (1)..(186): unsure at all n locations
tagcgcgtcggaacctgtttccctaagtggttccttggttaggtatccagatagcccccagactggattggagacagggaaggaaaggggcgtctaanacgatcagagttccgactagacgtcctacaaacgtaacgcagcagctaattatatcttctctatggcgaagataagacgaatggccaa

SEQ ID NO: 72370 - DNA, 267 bp, Glycine max
gtaatgacagacaatctgttaagttctctttacataatcacacacataattttagactaagctacctatctattggcacactacaaatgataatgcttgacactcaaacttactaataccctttactatagtaatttatatctaaaatcttctcaatcatctatctataactacatcctatctatatctaataacgaatgcacttatgcattatctacatataaccatatgctttcctcaacaaagtcactctaacaaatgcttaca

SEQ ID NO: 72371 - DNA, 322 bp, Glycine max
ctggatttggggttccctaagcacaccattattttattatgaatgagtggcaatagcggcggcaacaacaatataagtgaaagaatctcttggttgtcatgacactttgctagatccagtctccatcatggcgttagagaagcactgctgctcttgccgatactgcctctgatgctgatgctgctaccatatttgaccagatcatccttactggagattccttctactgtgacatatgaggatgacaaggttcttgactatagtgacataactgcttaagcttctacacatattcttatcatttcgaaattccaaggctctt

SEQ ID NO: 72372 - DNA, 295 bp, Glycine max
caagtagttgagaactaagaaggagaattttatggcttcctcaatgatctcttccgcagctgttaccactgtcaaccgtgccggtgccggcatggttgctccattcactggcctcaagtccatggctggcttccccaccagaaagaccaacaatgacattacctccattgctagcaacggtggaagagtgcaatgcatgcaggtgtggccaccagttggcaagaagaagtttgagactcttttctacctgccataccttgatgatgcacaattggctaatgaagtagtatacctt

SEQ ID NO: 72373 - DNA, 413 bp, Glycine max
caaaataatacttttattctaaagccactttttatacctttacaacaacaaacagaatcggggaaaatacacaaacataaacatcgacatcaaacaggcctgatcacgcaactcacccagccatcttagcacgcagctctggctaatcccgctcctaaatcttctcctaccctacgcacactctaatctcggtgaagcactacctactctaattatcctctaaccatccagtccactccggcctcaatcttcgacgtcattgcacatgcatattgagcactccacgctcgttcctgataccctcgcatctactgtggactcctactcctaacctctctgttccgccaagctcgaagaaatcgcttccgtctgcctcgacggccatgatctcggtttgttcctctacattcaat

SEQ ID NO: 72374 - DNA, 277 bp, Glycine max
cccacaaactcacagtcttagtccttagttgggttctcggactttgaaagactagaggctgtctctctgtttagatccgcacacaaaagagaagcaggttgatgcgctctacttggatgtctgtagtggtatcactcttacacgcacgcaagagtgcaggcctatatagattatgtgagatgggacgagacaaagcacagtatggagcatacgttatgcgagacctcccgagtgtccgcttgtgacagtgatcaatatctaatggaacgatcagata

SEQ ID NO: 72375 - DNA, 360 bp, Glycine max
cccacgcgtccgaaaaacaagtagttgagaactaagaagaaggaaatggcttcctcaatgatctcctccccagctgttaccaccgtcaaccgtgccggtgccggcatggttgctccattcaccggcctcaaatgcatggctggcttccccacgaggaagaccaacaatgacattacctccattgctagcaacggtggaagagtacaatgcatgcaggtgtggccaccaattggcaagaagaagttcgagactctttcctacttgccagacctcgatgatgcccaattggcaaaggaagtcgaataccttctaaggaaaggatggattccttgcttggaattcgagttggagcacgggttc

SEQ ID NO: 72376 - DNA, 128 bp, Glycine max
agagagagggaggaagtcagggaactctgaggtaggaggaaaagatgccgcttgtcaagggtttgaaaccccgaacagaaaattcctcttttggacttttaaggagaatgggaccattggccttaaca

SEQ ID NO: 72377 - DNA, 418 bp, Glycine max
cgcaagagaaggatggggagcccttcaggttggcaaccagagatgaaaaagcgtcttgatgcaagttatcacaatgatcttgccgaataaaggaactcgctgaataaaggaactgggaagggggagagttggctatgtaggcagggaaagcacaaggaatggggagcaaaattattgttgaggtgaatattctgatgtcctttatttgcttattgtgatttagctaatcggttgctaaagaattgatgattctggatgctcttgtttgccttatacatttcttgtttaaggaacgggatgcctcagttttggtagtgccattaaaggcttattattatttttttttccgggctgggagggggttgtatgagaaccttgtgctatttatttaatttaatacatatgaatatatttctgc

SEQ ID NO: 72378 - DNA, 363 bp, Glycine max
tctatattggatacacacacactttgacttatagcatatacgagtgagtgatgacgtgcagcaaaactgaatcggttcacagcttactccatcttcaccttaagatcaccaaacggctgtgtactatgtgcaagccttcaagggattctatgatggggcacgtatcttcaatgcaggcaactcaatatcaaacagcctatggagtctcctcacaccctcattcggcgtactaaggaactcttcccgagccgcttttcggggattttaggcatcttcgggaggaaagggcgttgaagaggaatgataaggggggcctggtgtgagtgattctggagaacggcttatcatgagtttaagacaagg

SEQ ID NO: 72379 - DNA, 357 bp, Glycine max
tataacgctttctcaactcgcaatttattttgtgtgttgaaagaaatgacgatagggaaggacgcagaagtataagatgaagacgaagggtagagtaagtgataaagagtattggctgacatcttgtaaataaggcaaccctaaatgaaccttgcttgggttattgaaccttgatgttcccattaattgattagctccaacctgctactgttaccaataatgaatctattgtcattgcttgaatcggacatgagtgaacgagctttgtgggattgcgtattgttagaaagtcctcaagatgatatccagagtctatacgaatcttttagatttggcctccactaatgtcctgtcaat

SEQ ID NO: 72380 - DNA, 404 bp, Glycine max
  unsure (1)..(404): unsure at all n locations
tcgtctcgacgtgaaggagcaacgaagcctctcggtgtgttgtaaattncatggaaccgnnaaatgtaagaagacatgtctcaaggaaccctcggtnncttaacactttttcaaggataacatcattggagcaattggctctncagcagctttcagcacatcnnggttctcatnnntcttgaagggcattctaatcctgttccgnntttggaagggaaatactctctcaagccttcaagncccccatgcncnnatggctgnntcttctgtcatgaccgctgtgannatcagctntngttcaaccttgaggaaaaggctgtgtaaacgtcaactttgtgaagggcaattcaaacccttgcaaaaggattaacggtgcctacttttcattttaaaagccccggtgt

SEQ ID NO: 72381 - DNA, 309 bp, Glycine max
acacgcgtcccatgcataatagactttattacagataatactatcaagataaccggtgggcattatttatttatttgggtcataatctttatataatagataacagatacttctatttagattctcatgatttatttagctagaacttaaatggtgtatccctatgattcctattcgaattctatttataattttaaatcacaatacttttaatttatattaatttgatctcttctctaactcttaacaactataacatcaatttttatcctacattctacaaatctcatatattcatattcataatat

SEQ ID NO: 72382 - DNA, 431 bp, Glycine max
ctccttactattacaagtctccaccatcttcctctccaactccgtactactataagtgggctcctccgccgccaccttattactacaagtctccacccccaccatccccagctccttactactacaagtctccacccgcaccaccaccttattactacaagtctcctccctcaccaccttacacgaagccttacatctatgcatcacctacccctacttaccactattagcatacctcttatcgatatgaagaatatgtgcaacgaataaaagaaagcgatggaaagcgcttcgcgatgcacgaaagagaagaaatggaagcaaagtttccgcgttttgtctatcataaaaaaaatgttaaattattattatctatgatacgattggtttcttgtctatcttctctagcttaagaatttccgtgtatttta

SEQ ID NO: 72383 - DNA, 152 bp, Glycine max
acgcgtcactgcgacccgttctagatcgctgcagttcgatcgcgatctatacttcactagcaagggtcatactttcctttggccttgtcatcaaatcgaatcgccgcaccgcgattctactgtgcctgaataccacagagaacattgaagca

SEQ ID NO: 72384 - DNA, 271 bp, Glycine max
cccacgcgtccgtcaacacatcctttcacgtttatggccaactcgactttaacggtaacgggcatactatatttaaacattgtcaactaattcaatcaccataccgtctatctactctgcatgaataacacaaagaaaattgaagcatcctaatacttagttctaaagaataccgatttagcaagagaagataaatcatgtggtgataactgacttttcaaacaagatgcataaatcagtgttggttgcagtttataaactattctaccac

SEQ ID NO: 72385 - DNA, 249 bp, Glycine max
caagcccacacagaacagaaatggtgatattaatgagagtcccagcacaaacccagacacagttacaggtgaagaaacacatgatagatggtttcggagctatatacttcattttagaattgttttagcaaaggtgatcttgaaaaactcttcattgattgtctcagcaatttaaagcttatccacatgcactgtttatctgtgacaacattgtttttgtatattaacctttattggctattttatctt

SEQ ID NO: 72386 - DNA, 296 bp, Glycine max
aaacaacaatatggctcatgttattgaattataaaattataaattaataatatggctggctcctgctaaaaatgccatcatctgataaatccatttcccacacaatacacaactaacttttaagcacttttatcaagaacaacataacaaactccatttggaataggaggggaaatagcttttttattttcactagatttaatggtaaataattagaccccgaactttaaaatacacaggctacatccgtgagcaataataataatttaagtgtatactactactaggcactacta

SEQ ID NO: 72387 - DNA, 257 bp, Glycine max
tcgcccacgctgttcgaaaaaaaaaaatttaaaataaaaaaaaaaaaaaagaaaaaaaaagaaaaaagaaaaaaaaaaaaaaaaaaaaaaaaaaaaaaaaaaaaaaaaaaaaaaaaggaaaaaaaaaatagtggtaaaaaagattaagtagaaaggcatgtaaggtaaaaaaaaattaaaatgagggggcttaaatagaattcaatggtgggtgttttacaacgtagattattgtaaatttcttggggtgaccaaaa

SEQ ID NO: 72388 - DNA, 376 bp, Glycine max
cccacgcgtccggaagaataaaagattttggagttggagtggctcactcagcgcgtctatacgtgctaagcgcaagcaacacaacaaggaaggtcacatgacaagcatttggaagaaaagaggccaattggaagttcttgaaggcgctcaatgcgtcaatacttgctaagctcattggtttgacagtgaggatttgggctcagtgcaacatgctgggctaagcccacggccacttaatctaatgttgcttttgcatgtatgccacatgttgggctaagcaggcagacgattatgcaataacgacaacgtagtgcatttggccctatttaagctccatgtatgcaaattgaaggcaaatttggttgggggagctatc

SEQ ID NO: 72389 - DNA, 146 bp, Glycine max
gctacgcttagctgctcactgctgcttctatcagctctccatgcatcttgatacggtcgtgcccactattatgattcatcagctatcaactgtaactatgatctaatctcaacacttaagccaagggcttacaaaactacccatta

SEQ ID NO: 72390 - DNA, 447 bp, Glycine max
gtgagctataagctagtttatcgtgtggagtatatgaagttgtttgttttctttgttgctgcagtagttttggtagcatggccatgccatggcgcaggctaccaaaggttccctctccgaatgaaaactggctatggtgagcgttcttcggaggtaaaatgcgcaagttttaggcttgctgtggaagcacacaacatccgagcctttaaaaccattcctgaagagtgcgttgaaccaacaaaggactacattaatggcgaacaatttagatcagactctaaaacagttaaccaacaagctttcttttatgctagtgaacgcgaagtccatcacaacgacatatttatattcggcatagataacaccgtactctctaatatcccatactatgaaaaacatggatatggggtggaggaattaatgaaaccttatatgatgaatgggtta

SEQ ID NO: 72391 - DNA, 329 bp, Glycine max
tccacgcatactatattaaacattttctcttacgtctgttccacattatcccagcgtatggactctatcatctgaaacaatgtcctataataaacacatatctactatcaatataacttatccctatacatacaacattcatgacttattaaaactccataccttacccaatctttatcttatttcatcacattcaactttctccacatttctttatacctaaaatgtacttactaaacgctctcatcatcatctatacatctcttaattgctaactgtactctctcctatatacaggctttaaacgctttttgtttttacatatactt

SEQ ID NO: 72392 - DNA, 492 bp, Glycine max
attcccgtggtcgactccacgcccgtccggaatgcaacgaaagggaatactatccgatggcgaactaatatacgatcgagacgtccgaaaacgagttaggcgcgaacaagctttacgttttgatgcgcgagagactcttcgaagtcgcatgcccgaaggacacgatttgtcgttcaagtattatatggcactcgtacttctctaatatgtgcatacttacaagaaaacatgtgatatgtgggtggagaacatttaacgtcgactcttgtattgatgaatgggttaacgaagggcgaatgcactcggcacttgcgccgagacttcttatagaattacaacgaagctggtgtgctcttggctttaacgtttgcgttctgttactggcctgtttgtcccagtgttcttcctgacaaggaatatgaatcttgaaaggttctacgatctgcgagcgtgccgctctaggaggatccaaagcttactgtactgcgtgca

SEQ ID NO: 72393 - DNA, 66 bp, Glycine max
aattctctagtgcttggtgtgtgtaaagaacattagctactatatattgaaagttattctaccaaa

SEQ ID NO: 72394 - DNA, 56 bp, Glycine max
aaaaaaaaaaaataataataaaatttaaaatttaataaaataaaaatattaaaaaa

SEQ ID NO: 72395 - DNA, 403 bp, Glycine max
cagacacgtgcatcgacgcatgcagaagaggctatactcgcaggtgcaaatgcgccaatcggtgaagcaagtagacctatgtacgcagttcaaggctggtgaaaggaacatcatatgaggaatgtgaatggcggaaggctcttcgtgtgccataaggctcgcaccaagttctataatacccttgaggcttaatgacgacgacaactcataactatgaaaccaagtgacatatctaaaccataacccattgactgggattactatagaatatgaattcgcacttgcttataggctatgtacaaggagcattatcatagcattgcagtgcgcaagtttgttgacacagtaactggtcaatacatgactaaatttgatgccctattgatcgagcttaaagaagcat

SEQ ID NO: 72396 - DNA, 188 bp, Glycine max
aatactccttgaaaaacacaaattttcagattacaactgaagtgcagaagtttgagtagggcgaagcttacgctcgctatcacgctacctcataagaatctaatattgtcacctgacatgagtgaattcatcgaaaggtaccaactttccaaacttataaaaccatctcgttgcatatcttaatacac

SEQ ID NO: 72397 - DNA, 216 bp, Glycine max
cccacgcgtccgattgttcgttgttgtaactcgttcttcttcttttgatgttctgtgtgtgtgtttgttttttctctaacctaaaaatgcttgttgcggtggtaactgtggttgcggaagctcctgcaagtgcggaaacggttgcgaaggctgcaggatgtacccagacttgagctacattgattcaaccaccaccgtgaccttggtcatggaagt

SEQ ID NO: 72398 - DNA, 347 bp, Glycine max
gaattatgatgtatgcatgtttatggtccttttttgaatgtaattgttatcaatcaagagcagctacaatatgtcatatgagctaatgaataataagaactccaggagaatcaataggtctgaattgaaaactctctctcaacatgaatgtattattgttttgtgttgatgttgattggagaatttcacggttcctacgctgctatagcagctaggaactggtggaaaatgatgggtatcttggcctacgattagcttcactattgtagatagcaaacttagcaataggattatttcggcaggtgctgctgtataactcgttgtcggcggatgctgttggatgagaa

SEQ ID NO: 72399 - DNA, 397 bp, Glycine max
  unsure (1)..(397): unsure at all n locations
atttgattaataattacatttaagtgacaataatatagaaacttataataatttctgactggtgagttgtaacacgacctaacccattgttattgttgactagcacacaatagccacagcgaaatggggccgggccgaaaccattttccgcatcaaatttggggtattgctatttgctaatagtaatatgcacgtgggtacactttagtcatatcccaaaattgtcccttgaaaaattgtacaacataatcatatttctattgtgcaattgaggggtgtaaaaaaataacaatgaaaatacgtttccattgtacaaatcacgttttcattattaattnntttatccccttaattgtgcaacaaaaaccacgaattttgttgtataatctgtttatct

SEQ ID NO: 72400 - DNA, 230 bp, Glycine max
gttgggttgatcgcacgccttgttcggcgaagtgagtagtgcgtgctgaatcgaatgacgtggatgctgcgacacatggctgcgagcgatcgaacagtgatgcactgatattcatcatattgtactggtgcgcagatctagcccacgaaggtacaccatctggtgatctgcaacatgtgcaaaggctatgtcagacgccctgactaagctgaccgcgtaatctgaaccct

SEQ ID NO: 72401 - DNA, 385 bp, Glycine max
cggacgcgttggtgaatttgcggattgtacagtgattacagtagctcacaggataccagcgtgtgatggattgcaccaaagttcttgccatcagtgatgggaaactggtggagtatgatgaaccgatgaacttgataaagagagaaggatcactctttgggaagcttgttaaggaatactggtctcattttcagtctgcagaatctcattgaagctgaacatgtttttttagcatagctcttatatttttctctgtggattgagaagaagccaagaaagagtacttagaagtaggatgcaaagtgtattttactattatatttggaaaaccctgaggtctgagaagtgggaaggaattagagggactaaggaggtaaaaggaaat

SEQ ID NO: 72402 - DNA, 168 bp, Glycine max
accacgcgtccgcggacgcatgggtgtttttcgagataacctggaacagtgtgatgggggtgaacgtcctcgcttacatccgggctaccattgcccgagcatatcgcatcaaatgcgtacgaaatcatcgctatacttatgaacactggctatagccccagtacttta

SEQ ID NO: 72403 - DNA, 293 bp, Glycine max
cccacgcgtccgacaagggtgactgctgtgtctgtgaatgttgatgatgtaaccacagtgcttgaccctgctccagtggaagtcacatggcaaattgtggttggagctatagctggggttaccccttttgtggtggcagggattgaatttagcaaaagaattatagctcaaaaaagatgcgaggtgtgtggagggtcagggcttgttcttagggaaaaggaaaaggactatctccgttgcccagaatgtgtttcttacattttggttatgaggagctatgacaagtgtatgac

SEQ ID NO: 72404 - DNA, 278 bp, Glycine max
aacacacgttcgcatggtcttgcattaggattgatcattttatcttgtatggtatatggggactcaggggcttcatcacctgatacataactttagccaccactacgtacaatactgacggtgatattcatcaaaatctgggcacatactttagctcgaacggctgtcgacaattgccgacgaatctaactcagatgcagtgctaactatactggcctcatgtgtcatcacacggactctctataggagtggatattgagcaagattacaaggcatca

SEQ ID NO: 72405 - DNA, 179 bp, Glycine max
cccacgcgttcgcgcaattcttttcaccatttttaacaaacgaatatccaagggaaaaaccgcgatccttaaaagacctcaaagacctattatttcatacacaaataccttcaaataataacgagccttatgaaatctaattatattaaagataacaaaagatcatataataaatgtac

SEQ ID NO: 72406 - DNA, 260 bp, Glycine max
ctgacgcatagtccgtagtggatatatgattttctgcacctgaacgtgtgtacagggcactgactgaaacaaagcttcttattgtcaacaccatctctttgcctacgacatatacagagtcaatcatgtgaagacctgaggcacaacgctgaccaaaccaatggactgattctatacagggtgatcatagagagcgacaatgatgactgtgagattaagtatttatcgagcacttgaacacattgtattcttaaattata

SEQ ID NO: 72407 - DNA, 384 bp, Glycine max
cccacgcgtccggtagttgagaactaagattgagaagcaaatggcttcctcaatgatctcggccccagctgttaccactgtcaaccgtgccggtgccggcatggttgctccattcactggcctcaagtccatggctggcttccccaccaggaagaccaacaatgacattacctccattgctagcaacggtggaagagtgcaatgcatgcaggtgtggccaccagttggcaagaagaagtttgagactctttcctacctgccagaccttgatgatgtacaattggcaaaggaagtagaataccttcttaggaagggatggattccttgcttggaattcgagttggagcacggtttcgtgtaccgtgagcacaacaggtcaccagg

SEQ ID NO: 72408 - DNA, 116 bp, Glycine max
ccgcaccgacgcacgcatccgctcacgcacacggccttttaaaactaaggtttacaaaccaacaccattgacaaggatccagtccacatcacaagcgaaaaacgactaacccgaaa

SEQ ID NO: 72409 - DNA, 345 bp, Glycine max
aaagaacccaatcatggatgacctcatgattcgtgcttttgcaaacaagaatgacatatgggcatagggccctgttatgaggctatgggagactgctcgtctcactactggttcagcctaaaccagcccatcaattttaaaaacaggatcgacacaatgtagaatctacgactgagcattgacaaggctacaacctaagcttatgctgaaatggccataattgtagaagcctatgctgatactctgggctgcagcattggggacttttatttaaatcaaataatttgcaaatcttgaaagtagcgtctctaatgccttgattgaatattgacgtctcttacatgc

SEQ ID NO: 72410 - DNA, 240 bp, Glycine max
aaaaaaaaaaatactaagtagcataagtaaattttacatttaatgaaaacacaatactatacggacatagattaaataataatagtgcataacaatgtaaaaagaaaaagcaaaaaggggctgccaatttataggcctaaactttacgtacacgtcctggcgacggtcataactctactaaagggtgaccaaattacaattacctggccttctgttaacaacgtcatcactgtaaaaacc

SEQ ID NO: 72411 - DNA, 172 bp, Glycine max
acgtaaatgctgactctgacattattattatatttttccggatcaaattttgctcaggaacaggtcttaattaaataatcgcctctaatgtggaagactctcagaaaagcttgctgcaaattctaatacaaatacacaatgagtttcactaccttcacaaacatattcacat

SEQ ID NO: 72412 - DNA, 77 bp, Glycine max
cccacgcgtccgctttttgttcgattgagactatatgttatagcgtattagtataatataagcctttttgtcttccc

SEQ ID NO: 72413 - DNA, 272 bp, Glycine max
gaatacgtacgcctactcagacatccactttacaggttacacgaccataagctagaattggcgaatgttctaattccgacgcgctctaaccaggcttgactatattacaaattccatacattgattactcctaataagcattatctatcacaaacagaatctacatgttattacatcttattatgacaaactccatattatactcacttaaactattcgactatagtataagcttaaattcgtaacaaccttattgcatagataatcacttc

SEQ ID NO: 72414 - DNA, 410 bp, Glycine max
gatcgagataactagaaacagtgtgatgaaaatgaaggtcctcgttttcttcgttgctacaattttggtagcatggcaatgccatgcgtacgatatgttccctctccgaatgaacactggctatggtgcccgtactccggaggtgaaatgcgcaagttggaggcttgctgtggaagcacacaacatctttggctttgagaccattcctgaagagtgcgttgaagcaacaaaggaatacatgcatggcgaacaatatagatcagactccaaaacagttaaccaacaagcttacttttatgccagagacctcgaagtccatgccaaggacacatttgtgttcagtataaatggcaccgtactctctaatattccatactacaaaaaacatggatatggggtggagaaattta

SEQ ID NO: 72415 - DNA, 314 bp, Glycine max
gtgagctataagctagtttatcgtgaggagtatatgaagttgtttgttttctttgttgctgcagtagttttggtagcatggccatgccatggcgcaggctaccaaaggttccctctccgaatgaaaactggctatggtgagcgttcttcggaggtaaaatgcgcaagttttaggcttgctgtggaagcacacaacatccgagcctttaaaaccattcctgaagagtgcgttgaaccaacaaaggactacattaatggcgaacaatttacatcagactctaaaacagttaaccaacaagctttcttttatgctag

SEQ ID NO: 72416 - DNA, 224 bp, Glycine max
gacccacgcatgcgtacaaacacacatgcacttagtttttcagttttctgctcagaaccttgcaaccgacacaggttctatataaattcccgacctcaacctatcaagattgcaggttctgaatttgtccaacaacaacttgcaaagaagtgtgcctaaatacctgataaggtatcctgactctgcatttattgtgaataacatttcctttgtaagttcttcca

SEQ ID NO: 72417 - DNA, 157 bp, Glycine max
aacacgcattcgtcgaagcaaactcttctttacgcatgttctagacttcaaccttgctacgatcatggtagcattacaaaggcacgcactcaatatgttcagattacatatgcacactagcaaacaaactcaggcttcctaggcaagacccacaagt

SEQ ID NO: 72418 - DNA, 431 bp, Glycine max
gtagttgagaactaagaaggagaagcaaatggcttcctcaatgatctcttccccagctgtggccactgtcaaccgtgccggtgccggcatggttgctccattcactggcctcaagtccatggctggcttccccaccagaaagaccaacaatgacattacctccattgctagcaacggtggaagagtgcaatgcatgcaggtgtggccaccagttggcaagaagaagtttgagactctttcctacctgccagaccttgatgatgcacaattggcaaaggaggtagaataccttcttaggaagggatggattccttgcttggaattcgagttggagcacgggttcgtgtaccgtgagcacaacaagtcaccaggatactacgatggacgctactggaccatgtggaagctgcctatgtttggttgcactgatg

SEQ ID NO: 72419 - DNA, 302 bp, Glycine max
accacgcgtccgagtgatttcagtgcgcgtttggtgttcacttgatctcatcataatcgtgagcatcgattgaataacatgccgatcagaaacatcgccgtcggatggcctgaagaggctacttaccctgacacgttgaatgccgctctggctgagttcatctcaaccttcatcttcgtgttcgccggctcaggctccggcatcgcctacaacaagctcaccgacaacggcgctgccacccctgccggcctcatcttcgccttcatcgtccatgcattcgccctcttcgtcgcctacttcgt

SEQ ID NO: 72420 - DNA, 426 bp, Glycine max
cccacgcgtccgagtgatttcagtgagtgatcggtgttcacttgatctcatcataatcgtgagcgtcaattgaagaagatgccgatcagaaacatcgccgtcggaaggcctgaagaggcgactcaccccgacacgttgaaggcggctttggctgagttcatctcaaccttcatcttcgtgttcgccggctcaggctccggcatcgcctacaacaagctcaccgacaacggcgctgccacccctgccggcctcatctccgcctccatcgcccatgcattcgccctcttcgtcgccgtctccgtcggcgccaacatctccggcggccacgtcaaccccgccgtcaccttcggcgccttcgtcggcggcaacatcaccttcctccgcggcatcgtctacgtcatcgcccagctcctcggctccatcgtc

SEQ ID NO: 72421 - DNA, 334 bp, Glycine max
cccacgcgtccgcccactctgcctactgaattctccaacttgctcacatgcaggtggcgcgggcgaatacaaaggatgctatggtaacactaccttctgaattgactattcaagtcaagatgtgctaaccttaaccccttcagcgaacccatcatgatgttatgaatatggatgtagtcaatacaatcaatgctggtttggaaagacatcaagaatcataagtatagccaacgacatactctgcatgctagctcaatcagaccaacaaatatggaaatgcctactactataggattcactcatcttttcagagcaaccaagctcttcagtatca

SEQ ID NO: 72422 - DNA, 123 bp, Glycine max
gaacgctgctgccgaaacccttccggaaccttaaggtaagtgagtaatcagtggttgagaagggtggataaggcgaatggtagaacggaggaggtgtttacccaagagttcacttttaacgtt

SEQ ID NO: 72423 - DNA, 274 bp, Glycine max
cccacgcgttcgcgctggtgttcttgtctttttccttttgcattagtggtggaatttgatgtgtgtttttggctggtgaatgtgtttgcttgtagaatgtagatttgtttccatgctgctttagacatatgtttgttttgcagtgcatagattagttttagtttctgaaagttatcttttctttaaaaaggtgtggttataggctccatgtgttatggatgttggttgaattttaataattcttatgcatgtgctatatgtgttctattgttgt

SEQ ID NO: 72424 - DNA, 453 bp, Glycine max
atattgcattctctctgtgtatttccctacttatcccttcaagatgcagatcttcgtcaagaccctcaccggcaagaccatcacccttgaggtggaaagctctgacaccatcgacaacgtcaaggccaagatccaggacaaggaaggaatccccccggaccagcaacgtctcattttcgccggaaagcaacttgaggacggccgtacccttgctgactacaacattcagaaggagagtactcttcacctcgtactgcgtctccgaggtggcatgcagatcttcgttaagacactcaccggcaagaccataaccctagaagttgaaagctccgacaccatcgataacgtcaaggccaagatccaggacaaggagggtatccccccggaccagcaacgtctcatcttcgccggaaagcagcttgaggactgtcgtaccctcgccgactacaacat

SEQ ID NO: 72425 - DNA, 291 bp, Glycine max
cccacgcgtccggtactgtgttcgtactgcttatagtttggtgaggcttctgtgtgctacggcattcccttccttcactcttcatgcactattttcattttgctaagggatcgatcataacgcggaagaattacaaggtcttgggacctgttctgttggcttataaagagtccacaacaggagccttcttggtgtttcagaaagtaggaggctaggatgaaaaggagtggagatacaagtggtcaaagggacagcgacttattggatactgaatgataacaagtctatggc

SEQ ID NO: 72426 - DNA, 61 bp, Glycine max
atccttgatatcttacattcccggatatgttattaatcgcatatgaagattaggtaagcag

SEQ ID NO: 72427 - DNA, 192 bp, Glycine max
atcaggcgagaataatagtctattgtctatttttcagttcgtttgtattactgggaataggtgattttacatgtggtgcatgagttcataactgatttagagaaagttaaacatggatgtgttatgtgtaaatgaaatagatgcactattcagattgaaacatttcagatgatgaaactagacataagatta

SEQ ID NO: 72428 - DNA, 451 bp, Glycine max
aaagaacgtcacaaccaacatttgtcatgttcttatcctctccctccctctttgcagctgtgtactccacatattcagtaccccatttccatgcactgccactttcactttcttcttcttactttctaattaatgttactacccttcacccatcatgtcctcgtctctgatcataatcacaaattgagatcaaatttcttcattatcatctttcttcttgtatcacatatttttagatgccattatcatcaatgtttaactttctttattccattgcaccactttatctaattgcttattcttctttttaattccagatttattgtttttcttttttctctctgattttttttcctttacttttttctttatttactttcttatatttatctttatttttttttattttatgtttctttttttctattaattttttatattattccatttt

SEQ ID NO: 72429 - DNA, 261 bp, Glycine max
gacaaatcatatgatgattaatggcgaagtttatggcgaaggcagatgagacgagaaatggggaatctgctgcattacgaatgacagtaaatcagcactacaaggacatacaccttggtctatagagagacattcagagctaaatataggaagcacacatgagcttgaatactttcaaggacacaatagaacaagcctagctcaatctcagtacagcactcacatactcaacacttctaaatcgatcacgttcaatgcacg

SEQ ID NO: 72430 - DNA, 393 bp, Glycine max
cccacgcgtccgattccattctctctgtgtatttccctacctctcccttcaagatgcacatcttcgtcaagaccctcaccggcaagaccatcacccttgaggtggaaagctctgacaccatcgacaacgtcaaggccaagatccaggacaaggaaggaatccccccggaccagcaacgtctcattttcgccggaaagcaacttgaggacggccgtacccttgctgactacaacattcagaaggagagtactcttcacctcgtcctccgtctccgtggtggcatgcacatcttcgttaagacactcaccggcaagaccataaccctagaagttgaaagctccgacaccatcgataacgtcaaggccaagatccaggacaaggaggggtatcccc

SEQ ID NO: 72431 - DNA, 275 bp, Glycine max
tcgcacacgcgtccgcttcatccatagacatggccaccgacacttctgcagccgggggtacatcctaggcactgaccttaatgcaagcgcaggcaaagtgtgcgccgaagttaaagtatcatctccgcaagccacatggtagtgcataacagcttcgctgaaagacgttagacacgctgttgatgacactgccgcgagtgcagcgctagctagcaacgccatggccattgtactgatgctgagtgttgatgacaggtctttggctttcggaccaa

SEQ ID NO: 72432 - DNA, 240 bp, Glycine max
tccacgcgtacggagagagcttacgactcaagtgtaggaggggatgactgactgcacaccttaccggagcactgtctgagtctaccgaggtgtcccttacgtcactaaatccagtgcgctctcgcatggtgctcgacgcagctgttgggacaccaatgcgaataattgactcgattaactgagacctgcttaaacgcattgacagtcaagacccggctaccgatgaagctcaccacatgc

SEQ ID NO: 72433 - DNA, 129 bp, Glycine max
aaaatgttattattataggatttaattttaatttttaatttataaaaattttaataaatttaaaaaactttttattaaattcactaaaatattttataaaaaattaataaaaaaataaaaattattttt

SEQ ID NO: 72434 - DNA, 120 bp, Glycine max
atagttttatgaacatcttgtacagtgaggatcaaatgaaactatcgagctttgctttgtgtctttggtgtcgccagtttaatgcttaaccaagtaacattatttttccttttgattttc

SEQ ID NO: 72435 - DNA, 120 bp, Glycine max
atagttttatgaacatcttgtacagtgaggatcaaatgaaactatcgagctttgctttgtggctttggtgtcgccagtttaatgcttaaccaagtaacattatttttccttttgattttc

SEQ ID NO: 72436 - DNA, 263 bp, Glycine max
ggtacataagattgtgcatggtgatgtccctttttctttgccttcaaaaaaaaaaagtaatggtataaaaaaaaaataaaaaaaggtctctctataaaaatattatactcttttttgtaaaaataccatctataatttggtataatttttatttcttaagaaaatatctttaaacgtctttattttatcttacttttttttttatacacttatttcactttttgtttttaaatttatgaaattttttataaaaacattatttt

SEQ ID NO: 72437 - DNA, 396 bp, Glycine max
tccacgcgtccggaaaattatctattacggttttatctgttggttcaaaaaaaaaaataggtggaaaaaataaaaaaaaaatagaaaaaaataaaaaaaattttaaaatattttttttaaaaaattgaaaaaaaataatttaaaaattttttttatttaaaaattataaaaaaaaaaactatatatggggggcttttttaaagaaaaaaattttactttcgtgtttttttaaattaaaacttttttttttgtgtccccaaaataaaatacagtggccgaggtttaaaaatgttttttttggaaaaattttggatttacaaaattaaattttttttaaaaaataaaattttttgcaattttgttaaattaaaaaaaggcgggaatttatcctttttc

SEQ ID NO: 72438 - DNA, 288 bp, Glycine max
cccacgcgtccgcccacgcgttcgcccacgcgttcgctccgccgcaacaccaccgtcacactcaagccaaaccttcacgcttcaatctgctccttcccaaatttctcactcaaaaaaccacacctaatttccactcgcaaaccctccgctttaacagtcagagcctccgctgcctccataaccccggcgccggctccggtccagccatggcaaggcgctgccataaaaccgctaatagcctccatcgcgacggaggtaatcctttggttttaaccggttccggccggc

SEQ ID NO: 72439 - DNA, 341 bp, Glycine max
agttattatgtactatggagagatcatgaatcaaacattatttactgcgtttttgggcctatatgctcgttgactctaacaaactaagctacgagccactttggatacacttaaaaaaaaaaaaaaaaaaaaaaaaaaaaaaaaaaaaaaaaaaaaaaaaaaaaaaaaaaaaaaaaaaaaaaaaagggggggaataaaaaaaaaaaaaaaataaataagaaaaaaatacaaaagaaaaaaaaatggggggggggcgcttaaaaaaaaaaaaatttacgtacccgtatatcgaaatgaaaagtttttttataagggaaccaaaaaaaaaatacggggggggg

SEQ ID NO: 72440 - DNA, 420 bp, Glycine max
cccacgcgtccggccaagtgaaagtgagaaaaaataaaaatcaaagagcataatgtcagggatcattcacaagattggggagacccttcatgtgggagggcacaagaaggaggaggagcataagggtgagcaccatgctggagaatacaaaggggagcaccatggtgaacacagtagtgagtacaaaggagagcatcatggtgaacacaaagctggagagtaccatggtgagcacaagccagagcacaaagaggggttcctagacaaagtcaaggacaagatccatggtgagggcggcgccgccgagggcgagaagaagaagaaggagaagaagaagaaagagcatggccatgagcatggccatgacagcagcagcagcagtgacagtgattaaactgctgcatcacctatatatttaaa

SEQ ID NO: 72441 - DNA, 335 bp, Glycine max
atttcaaataaaaccattactttgactacatttaaaaaaaaaaaaaaaaaaaaatggaaaggggaaaaaaaaaaaaaaaaaaaaaaaaaaaaaaaaaaaaaaataaaaaaaaaaaaaaaaaatataaaataaaaaaaaaaaaaaaaataataaaaataaaaaaataaaaaaaaataaagggggggggtgtttttaaggtaaaaaagttttttacgggggtttggaaaatgaaatattttttttatggtgaatgaaaaaaaaataagtgggtgggggttttaaaatgggggggatggaaaaaagggggggtaccaaaaataattttttttgaaaaa

SEQ ID NO: 72442 - DNA, 274 bp, Glycine max
gtggattcacagcagatgatgaggaggagtgtttgcacacaagcttctggacaagttttttattgttgcaatattatttttaaatttgattcttgtcaacatattttattttctgttatttatgaaattctacatcttgtatcaaaaaaaaaaaaaaaaaaataaaaaaaaaaaataaaaaaaaaaaaaaaaaaaaaataaaatataaaattaataaataattactatattaaaaaatattatataatttaaaaataaaaaaaaaggggggtcc

SEQ ID NO: 72443 - DNA, 95 bp, Glycine max
gcgaaaaaaaaaagagtagagtggataatggcttcgatatcgctctgcatagcacatgagagcacgcactcactcagctgctgtcattctcacta

SEQ ID NO: 72444 - DNA, 99 bp, Glycine max
tcgccacgcgtccgtttttggtttctgttttcggacttcaatggaaattaatggatgagaactaatgagataagctattgtgttgtgttgctttgtttc

SEQ ID NO: 72445 - DNA, 322 bp, Glycine max
cgttcaagcttcaaccaattcttcaacagtgttcaagtaaaatatctgcaaagccttagaatatatctgtgtttgatttaatgttaggttaaaccgacacactagtttccatacacgttttttaagaaataataattcttatcttttaattcaactgactttcaaggttaaaccaatcacacccatagaaagaaagagccgacacgggtcaaaatctgaaacccgaaatccataagcctaaaagactgaatctttgatcgacgccacggatgtcgaacggcataattctcatgcagtcaggtgggtcgactaaccggctaca

SEQ ID NO: 72446 - DNA, 232 bp, Glycine max
cgacggatgggtccacgcatgcgtaaaaaaaaagagtacagaggattatggcatttgataacatactcgtagcaacgagagacagagaacaataagctgccgtgacttataattacctagaagactgagtacatactttggagctgacctgtcatcaatacaacgctcgatctgcgtgagccattgatggcatctcatatttggttcagatcatgctttgaaatataacatt

SEQ ID NO: 72447 - DNA, 177 bp, Glycine max
gccacgccttcgttcacgcgttcgatcactccttcctatttatcgacataactagatacagggtgaacaaaaacaatgaccttgcatttttccgggctgcaagtgttgatgcatggcaatgccatgcttacactatgttacgtatggctatgaacactgattatgctgccactgctg

SEQ ID NO: 72448 - DNA, 279 bp, Glycine max
  unsure (1)..(279): unsure at all n locations
cccacgcgtncgcgcttactccttctctgtttctctcgcacactctgaccctacgtcgttgtttctttttgttttccaaacacacacacaccgcgtactacaactaacacaacggcggggctaatgcttaaaaaaaaccaaccacagccaaccatgttgcattgtcttaacacttcggggaatctaagagccaccttgtcggacatgacagtgttgggaagacaacgggaagcaaccatgaagtggcagctacaccttcagaacaaccaaacaccctta

SEQ ID NO: 72449 - DNA, 220 bp, Glycine max
gcgaataaagctaaggagaacttttgagaagcatgtttaagcaagttatggcgacgaaccaccttccgctgatcgtcatatctgtagctgacatctttgtgaagacttagaaccttttaagactattggagatctctcatgttttgatacaaaaatccacttatagccgcactcaggaatcacctacagttgttgaagacatatctcgtaagcatttatc

SEQ ID NO: 72450 - DNA, 87 bp, Glycine max
cccacgcgtccgtacaaacaccttgatcattacaatgcatctagcaatggcggccaacgctgagaattgaccgctatcggaacgacc

SEQ ID NO: 72451 - DNA, 353 bp, Glycine max
gcgagacgagcgtagttactggatacatgggctggcacaaagggatcgagcagaggtagcggatctactctacgagattgagatatacacaagcgacactgcggaatcacaatttgatcgtgaaaagaagtcacatgctatgcatgccaggacacaaagacaggatatgacgtaggcgattgaactcagagcaatttttacatagattcttctgtatcatcatttctttgtaacatagactagtagcatgtgtggaagcgggctagactatattgaacgaggaattgaaggaagcaggaaatttggtggggttcataccaacaggagctcctggaattcggctcggggtacat

SEQ ID NO: 72452 - DNA, 106 bp, Glycine max
  unsure (1)..(106): unsure at all n locations
ntcacgcgttctaatgatatgaattttgcttttgcaactgatggatcaattaatgggacgggtgaactatcataatgtctttctctactatgaatactgatcacca

SEQ ID NO: 72453 - DNA, 68 bp, Glycine max
cccacgcgtccgaaaaaaaataaaagaaaaaaattaaaaaaaaaaaaaaaaaaaaaaaaaaaaaagga

SEQ ID NO: 72454 - DNA, 352 bp, Glycine max
gcccggaaaacccggacgacccacgcgtccggcctaaaaaaaaaaaaaaaaaaaaataaattttataattatcaaaacaaaaaaaaacaaaaggggcacggtgaattttatattataaaacaaacctaaaaaaaaaaatattacaaacaacggggtctgcccttttaaaggaacaacattttccttccgcagcttccaaagttttcatttttttatagtgaaaccaaaattcaatttattgcccgttattttacaatgtaggaacttgaaaaacctcggcgttttcaaatttaatgggcttcgtaaattacccttttattaagtttgctaaatataaaaaaaacctaaacct

SEQ ID NO: 72455 - DNA, 143 bp, Glycine max
gcgagattatggtaaaacgttaggcatggattataaactatatcgctatatatgtgtcgcgggatcgctttgaacaatacaaacgtcccttatctcaatctaacacattgaatcttttattcatttttttactaactctatta

SEQ ID NO: 72456 - DNA, 214 bp, Glycine max
cagacgcgttgggcgtatagttgtctggatgagttttaatacgatcaacgtaggccgtactcatggtttatctatttggcgcattctgcttatataagaaataagagattcttttatttaggatttcatgattgcgttagcttgaacttaaattgtgtatctctatgatgctattgtgaataggtgggggaattgcaaatcacagtaatgtgaa

SEQ ID NO: 72457 - DNA, 240 bp, Glycine max
acccacgcgtccagcagcgtccaaacaaagtggaaatcggatagagagttttagagcgagacaatcatactgggatgcggggaactaattagggggagttatgatcaacataaatgttgagcataacaacaaaactaacgttggaataaacataaaatgtggtagagaaatacaaaagtggtgaagatatggacacaacattttatataccagcttattgaatttggtaactctaaactg

SEQ ID NO: 72458 - DNA, 417 bp, Glycine max
cacccagtctcgattgtgccctcgaactcttcactatccctctctcgaagtctccctctagagcacacccactctcaattgcgtacattattaactcttgcactgtccttcacccactgtccttcgagacgtccctctctctggttgtgtactcagcggcaatagaaagtttgtctccgtggtgtggcccgcccgtacgttgtgcgcccatcctcacacaggtaaaaaccttatcttctttgtcactattttatttattgaaagtgaaatggacttccccttattcttgaaagaacaatctgggagggaggggggagtagacatctcacaaaaaatggaggttaattttatggaatacttctgttgagattttttttattaagttgtaataagaaatttatatgtttttggttttga

SEQ ID NO: 72459 - DNA, 300 bp, Glycine max
attagttcttcagtgtaggctgtgtagctactcagatttggtgtagctcaaccaattgttattcttttgtattttattatacttcatgtacattttactgactgttgtatatgtatgttatacactaagttctgtgcgtgtacaatagaaaaaaaccattttagtgagttcaagatattcgaatcatgcgatgagcaaaccttggccttttttttttcaaaaaaaaaaatatggaaaaaaaaaaaataaaataaaaaaaaaaaaaaaaattaaaaaaattaaaataaaaagataaaagat

SEQ ID NO: 72460 - DNA, 149 bp, Glycine max
aaaaaaccctaatttttttaataaaaaaacacttccaaacccctttttttattccaattttggccccaaaccattccaacccttaaccaatccttaatgctttactgtttttcaacgattttttgtaaaaaaaaaaacctttttttttt

SEQ ID NO: 72461 - DNA, 342 bp, Glycine max
acgcgtccacccacgcgtacggacatcgcgagcattcttttcccgtaaaaccgtttcttcatacgcggcgtctcaacactcaaactcttatgtttcaccccttcaccttcaacgcttaaaacctcttgctctcgaatcactcacgtatattcatctcatgaaaaccatggaggtccgtttaatttcaatggaatcaacggccttgcttcttgtactcttacagcttatacacttacttttggttcatttacccttactgctgctacccaaagactttccccattgtcaaccgatccccatatctttgagcctgcctttattgtcaacacaattggtcaaacc

SEQ ID NO: 72462 - DNA, 444 bp, Glycine max
caaaatagaaagaaagaagaatgggtgagtgagtgtaaaaactgcgctctcacaattgcggccatggaagaagcttcttcgagcgaatattccattttcaaaaaaagaaaaaccactgcattccatattccgtgcgatcggagaagaggaacagactctgaagtacactttcgcttgaagaattttgttgtgaaggctcactctcgtgttcatcgctcactcactcatgctcgtgttttctgaactccgggatccattctacgatcaatttcgttcatgttccgttctctctttctctcctatgctcgtgttcttctcggaattggtttcactctgactgaactgaaggggttaacattctttgcaagagttctactagagaagcatataagttgtgtctgttctaatttggatgacatagagaagttggtatctaagttagaa

SEQ ID NO: 72463 - DNA, 127 bp, Glycine max
cccacgcgtccgaggttacctctgtgacatttgtgctgctagttcatatatttgcggctgacaccgagaaggaaagcaggaaaaaaccaaaaaggagcagatgggtagctaaggtttttaatggaaa

SEQ ID NO: 72464 - DNA, 94 bp, Glycine max
cccctatctctatttaacctttttattatctttatttcatcctttccttaccttcttcttcactttttctttctataattgtaacttttcattc

SEQ ID NO: 72465 - DNA, 261 bp, Glycine max
cccacgcgtccgcccacgcgtccgcccacgtgttcgcccacgcgttcgcccacgcgtccgagaaaaaaaaaaaaaaaaaaaaagaaaaaaaaaaaaaaaaaaaaaaaaaaaaaaaaaaaaaaaaaaaaaaaaaaaaaaaaaaaaaaaaaaaaaaaaaaaaaaaaaaaaaaaaaaaaaaaaaaaaagaaaaataaaaaaaacataaggaaaaagggaaagtaaataaaaaaagataagagatataaaagtgaaagatggagg

SEQ ID NO: 72466 - DNA, 456 bp, Glycine max
gatgaaaatgaaggtccttggtttcttcgttgctacaattttggtagcatggcaatgccatgcgtacgatatgttccctatccgaatgaacactggctatggtgcccgtactccggaagtgaaatgcgcaagttggaggcttgctgtggaagcacacaacatctttggctttgagaccattcctgaagagtgcgttgaagcaacaaaggaatacatccatggcgaacaatatagatcagactccaaaacagttaaccaacaagcttacttttatgccagagacctcgaagtccatcccaaggacacatttgcgttcagtatagatggcaccgtactctctaatattccatactacaaaaaacatggatatggcgtggagaaatttaactcgaccttgtatgatgaatgggttaacaagggcaatgcaccggcacttgccgagactcttagaattac

SEQ ID NO: 72467 - DNA, 250 bp, Glycine max
gaccgcacgcgtccgctcagaaatcaagatactacgagtcagcactttctcttaccaggaaaataaagatagacacgacagggtctactgaggatttgggccaatacagcatccatgcactctccttttgcatcaccaatcccatcaccgcaaccaacagccgcattctaaatctatttatcccaacctatctcctcatactacatagattccacagcaaataacacgcactcaaatcatcttaatgcta

SEQ ID NO: 72468 - DNA, 301 bp, Glycine max
ctcatgtctgctctcatacgtccgtgtcattccaatggatactgcgatctacatcaagacggaccgccaagtggcgctcttcagagcgctccacgggcatctgcaccgagctgctaaactcgccttgctacgtcgtaacctaaaatgccgcgttacttactatcacagcagcagcaactgctgccgcatgccgagctctttcggctgcgagccgacgccgatctggcttggatccttccgcggactgctaccgctaacgccgcgctgcataatgagcttcgaggcatacttagctacatct

SEQ ID NO: 72469 - DNA, 206 bp, Glycine max
gtaaaaaaaaaaaaaaaataaaaaatttttatataaaaaaaaaaaaaaaaaaaaaaaaagaaaaacaaaacaaaaaaaaacataaaaaaaaaactaaaaaaaacataaaaaaaaaaataataaacaataccaacataaatcataacttaaaatgccctcaatactaaaatatcacatcatcatcaacacctaacacatacctaact

SEQ ID NO: 72470 - DNA, 167 bp, Glycine max
gaccactattaatcatcgtcttcacattcatattctgaacccgatattgaaacttcatgggaaatcttttaatgtcaatctacgaagcagaaaactgataaattttgtgtaattcacttctaggcttttaagcgacacaggtatagatttttgatcttttgtcctaa

SEQ ID NO: 72471 - DNA, 244 bp, Glycine max
gtggcaacagagtggtggcaacttatcctgaactcattcatgtgcaaacatatttcaatgatgtttttccttttcatgttatgtttttctcttgtactgcattttcggctgtgctcttcctctttctatgtatgcctggcatgtgcttgattattattactatcaactaatccataaattctttctcgtgattcattagttttttctctgtcatattttatatcactgactaatgtttgattgc

SEQ ID NO: 72472 - DNA, 124 bp, Glycine max
gccacgctcgccagctcgatataaaaaaaaaaaaaaaaagggaggcggcgtctaagaccagctactacgctcatgcactatacttctataggtacctaatcaatcatgccgcgttacaacgctg

SEQ ID NO: 72473 - DNA, 216 bp, Glycine max
attcccgggttcgactccacgtcgtctcgtaaaagaaaaataaaaaacaaaataaaacaattataatttataaaaaaaaaaaaaataaaaataaataaaagaaagaataaaaataaaaataaaaataaaataataaaaaataatatataaaaataaatataaaaaataataaaataaaataattaaaaaaaaaataaaataaatattaaaataaaa

SEQ ID NO: 72474 - DNA, 412 bp, Glycine max
ctcacgcgtccggatagacatttcgagagtctgctatctctatatgaatggtgcgagtctgatgcttgctacgatggtcttagtatggccattcacagcgataccatatgttagcagctttgaatgaatatgtgtcatatctgccaatacaacgttatgagcaaatgcgcaaactgtaacatcgataggaaacacacactatactcttggcttcagaccatgcgatgaaagtcacggtaatcggcttgggctatcataaattccacagttcatatatcagagctcacgatgcttaatcaagatgcttactctgatgtcacagaccatgcagtccatgcacttggcacatctgtgttaaatatatatggctccgtactgtctagtattatatactttaaaatacatgcttttt

SEQ ID NO: 72475 - DNA, 122 bp, Glycine max
ctttaacatagtgtggtttgtaatttgtttttggtgtgcatactgtggtttgtagttttggctaatgaaataatcacatggttttttttttaactagtttggtctcaataagtctgtttgat

SEQ ID NO: 72476 - DNA, 362 bp, Glycine max
gggtatttgccacttcgcttttgattgcaatggggtttgctttaacattatgatcataaggtgagataatttgtatgatctctcccctttggtttagatgcctttgcagtctttgatgtatatgaaaggcttggcctcagctattcttttttcccccttgcttgaatttgtaatttggtaagagattcatggcaattggtttcccaactttcttatttacatattaaatttgtggtattggctcttgcaaaaaaaaaaaatttccttacccaactttatatccttttaaaacatttcccttttttcaaatggtgttaataactaaaaagagcgcaacaaaaaaaaaaggggggcccctttta

SEQ ID NO: 72477 - DNA, 250 bp, Glycine max
cccacgcgtccgaaaaaaacatgtataactttgcttaattaaaatggaaaggtttttcgcggtgggagaagaggatgtcctgggatgaattctggaattgcttctatcgagtatgtgcttgctagtctcctttattggcctgattggaagttgcctgatacactagatgtagatattagcgaggtatttgtacttgttgtcttaaagaaagtgccacttctccttaaaccataaacctttccattttaat

SEQ ID NO: 72478 - DNA, 261 bp, Glycine max
cccacgcgtccgcccacgcgtccgcccacgtttccgaaaaaaaaaaaaaaaaaaaaagaaagaaaaaaaaaaaaaaaaaaaaaaaaaaaaaaaaaaaaaaaaaaaaaaaaaaaaaaaaaaaaaaaaaaaaaaaaaaaaaaagaaaaaaattaaaatatataaaaaacttaaataaaataaaataaaaaataaaaaaatgtcccctatatttaaaataatttaatttaattgaccaaattttaaaacagtaaaaactgtaaa

SEQ ID NO: 72479 - DNA, 452 bp, Glycine max
  unsure (1)..(452): unsure at all n locations
cccacgcgtccggatcgagataactagaaacagtgtgatgaaaatgaaggtccttgttttcttcgttgctacaattttggtagcatggcaatgccatgcgtacgatatgttccctctccgaatgaacactggctatggtgcccgtactccggaggtgaaatgcgcaagttggaggcttgctgtggaagcacacaacatctttggctttgagaccattcctgaagagtgcgttgaagcaacaaaggaatacatccatggcgaacaatatagatcagactccaaaacagttaaccaacaagcttacttttatgccagagacctcgaagtccattccaaggacacatttgtgttcagtatagatggcaccgtactctctaatattncatactacaaaaaacatggatatggggtgggagaaaattaactcgaccctgtatgatgaatgggttaac

SEQ ID NO: 72480 - DNA, 78 bp, Glycine max
gcgaccctttctgtgacatatcgaaacatgtttcatctcccaactcctgagtaattagggagcctcaaacttaatagt

SEQ ID NO: 72481 - DNA, 185 bp, Glycine max
cccacgcgtccggtaacagcattttgtagtgttatcttgtatctgggcatattactacttgagtacttgccctttctccaacaataataacgtttatgaactacaagtgcgtttggtaattcgggttaaggtgctttaataaaataatggatggtggtggtagttctacctgttggctttggttt

SEQ ID NO: 72482 - DNA, 448 bp, Glycine max
  unsure (1)..(448): unsure at all n locations
cccacgcgtccggctagtttatcgtgaggagaatatgaagttgtttgttttctttgttgctgcagtagttttggtagcatggccatgccatggcgcaggctaccaaaggttccctctccgaatgaaaactggctatggtgagcgttcttcggaggtaaaatgcgcaagttttaggcttgctgtggaagcacacaacatccgagcctttaaaaccattcctgaagagtgcgttgaaccaacaaaggactacattaatggcgaacaatttagatcagactctaaaacagttaaccaacaagctttcttttatgctagtgaacgcgaagtccatcacaacgacatatttatattcggcatagataacaccgtactctctaatatcccatactatgaaaaacatggatatggngtggaggaatttaatgaaaccttatatgatgaatgggtt

SEQ ID NO: 72483 - DNA, 421 bp, Glycine max
cccacgcgtgcgatctgaactttgccatgctaaaccgatggttatatttctgacagggcaatgactccaacattagagttagaggagattgattcaccaaaaagaaaatggttagaggagatcaacgaattaagtggcttggtgcctatccgaaaaaaacaatacaacgtggcccaactctatcatatgcgcatgtgtgtgaataaaaaaacaaattggcccacttttatctatatacgctcgtgtgcgaataaaaaaacatattgtgtgcgtggactacacagttagtaggcgaaatacactggtctatactatctatgatgtaatgatgtgtcagtataaagcttaaacgaccttggagattcaaaatgacacgctgaactgtaagttagagccactgatggatgtgcacggaacaatc

SEQ ID NO: 72484 - DNA, 224 bp, Glycine max
cccacgcgtccggtatcgcactggtgggattagacgtaatgtttttgctgcgacactaaagcatctgagcttgaagattattgttactctgaagggctggtgactcttacctatctgaagacttgaaggcccatgactaatggcaacgagactctataagtaatcaatgctacgtctatcacactctatcgtgtagaaatatacgtgtagacacatacctaatc

SEQ ID NO: 72485 - DNA, 371 bp, Glycine max
aaaaattatttagttattttatataaaaaaaaaaacaaaaaaaaaaaaaaaaataaaaaaaatttataaaacaataaaaactaaaaaaaaatactacaaaaaacaaaaatattaaaaaaaaacaaataaatccacctaatatgatgaattaaaaaacaagaacaatgcacaaaaactgaaaaaaaattttaaaaattacaacaaaaatatattaacttgactagaacaaaatataataaaaaaaaagaacactacacaaaaattccataacaaataaaaacttaaataatttttcaaaaaaaaaaataaaaaaaattaataataaatgatccacaatatccttacactacaaatgaatttttatacaaaac

SEQ ID NO: 72486 - DNA, 324 bp, Glycine max
cccacgcgtccgctcattacaaaattaatatgaatcctttcccttgttttttttaaaaagggaaaaaaaaaaaaaaaaaaaagaaaaaaaaaaaaaaaaaaaaaaaaaaaaaaaaaaaaaaaaaaaaaaaaaaaaaaaaaaaaaaaaaaaaaaaaaaaaaaaaaaaaaaaaaaaaaaaaaaaaaagggggggccatttaaagggaccaaagtttacgtccccagtattgaaaagtaaaagatcttaaatagggccaccaaactcaatttgatgaggcggactttaaaaaggttgtaccgggaaaaacccgggggttacaaattt

SEQ ID NO: 72487 - DNA, 459 bp, Glycine max
  unsure (1)..(459): unsure at all n locations
ctattctctctctctgaattctgattctgtatccgaaaccaccaacgacgtcgttgcatggacctcttccttgtcgcattcgatttccgcatagttctctattgccgacgacgattcaattccaatggcgactgagcagttaatgtccggcggcggctcccgctacgtccaaatgaaatcgtctccgccgtcgtctccgtcagccgcggcggccgaggagatgtcctcggtcccgtcgttccggcacagcggcgccgaggccaatcggattttcgaggaattgccgaaagccttcatagtctacgtctcccgccccgacgccagcgacatcagccccatgcaactctcttacacaattcaggttcagtacaaacagttcacgtgggagctaacanagaaagcccatcaagtatttattttgcatttctcgctaaagaaacgtgcccttattgaggaaat

SEQ ID NO: 72488 - DNA, 447 bp, Glycine max
  unsure (1)..(447): unsure at all n locations
cccacgcgttcgcccacgcgtccgcagacatatgccaggtctcatagtcagaatatcatgctgtttgaggtttgaatccaatactttcaatcgcatgttgggaatagataaaactgccacatatttggaagaggtagatgcacttcctgctatatatgctactgtgttaaaattctcgtcatctgcaccatatgggtcaattccatcctatcgaataccatttcttcttggtgaaccttacaataaagatcctgcatctcaaaatgcctncctaagtattggtcctgttggtgttggaaatgattccagggaagaggaaaaatatagagctacggttgagattgatttggagcccagggaacccacaccaggtatagttgatgttcacattgaaacaaatgcagaaaatggtcaaatcatccaaggtcaacttcaaggaatcacagt

SEQ ID NO: 72489 - DNA, 270 bp, Glycine max
aaccacgcgtccggataaacactatatatattttgcatgtaaatattttgatgattaaaaagcgatgcttctggaggactgaaaaaaaaaaaaaaaaaaaaaaaaaaaaccaaggaaaaaaaaaaaaacaataaatgaaatgaaacaatacccaaacataaaaaaccataaataaaaacaaaaaagggcctgccgctataaaggatccaagcttactaacacgtggatgcaaagacaaaaccatgtaaaagggccacctaaattcaatta

SEQ ID NO: 72490 - DNA, 302 bp, Glycine max
ggtactactgtacgtgcgagcatactaacggaaagaggcatgcaacttcatttgcacatgtgatccgtgacataagttgggtctacacgaagtcgttatcactatccttccattttgtgctgctcgagtcactttatgtcctactcagagaggcaacccagcgtagtgtctagcgcacatgttggagtacagtgcgatgtagttcgcctatactcattgacacgtggaccaatgcggatcagggttacgtatgagaagcaggcttgtgctgacgcagcatggatcaacaaagacgatccttt

SEQ ID NO: 72491 - DNA, 324 bp, Glycine max
cccacgcgtccggtcgaacctaaataccattccttacagtttcaaacacttgttcttcatgttcttcttctcttttatacctttctttctctgtggatctacaccgacttagatgctagccgtattctaaaaatggaaaacaatcaaagtgctgcaggaacacatgatagttctatgatgaagtccgctgatcaaagagcacgatcaaaagggcgcaatgacataatgactcaacgtctgaagaatcgtgagagacaacgtagatatagggcacgtaagcgtctagaatccgtatcatagaagtcatttgttgtggaagagaca

SEQ ID NO: 72492 - DNA, 363 bp, Glycine max
aaggaggggacatccatattctttaaccttttgaccacatcttcacacaacaaaataataggctcaaacaacaccgtcaacaccgttaatcctccaaactacaccatcttctacactctatccataattcaacccaacaccaccgaaccgaataaacgcacgcaagctgttatatcttatgttcactctttatgaccttataaaaacatcaagagagtctgcaatgctatccatgttcctgaacctgttaaacctatacgcccaattagatttcatcctgctactgctgcaccaaattcttcaactgctattgtaatgcccattattgttcctccctcttcacctgcatcttttatgcaatct

SEQ ID NO: 72493 - DNA, 408 bp, Glycine max
cgcacgcgtccgcccacgcgtacgaccaggtttgaacaagcacagacacggagactaatatggtagcatactagaaataacagctttctacatatacatatatgagcgcaaaacaactatgttacatcagctgtagcagataacgaaagctcataaaaggcaaaatatgcaagaaccacaacggcaacatgcatacgtacactatggataaaagaactagtcgatagaggaagcatgcgcaggatccattaacccagctacgaaccgataccatcaaaactgctaacacatactaagatggaaaaggcacgaatccacttatgtaataaactacatcccacaaactcttgagcaccagggacaacattaaagctccaaagatagaaaggctctcctatgacactgtat

SEQ ID NO: 72494 - DNA, 219 bp, Glycine max
cccacgcgtccgcccacgcgtccggttcgatatgaactttcactaaaactcttcttgccttgtctaattaatgtcatgactttagattcttgtttatttggccgtttacgtttgtagtagttgatgtaactgaaaataacaaagtacactctgttctttgctgataatgtattaaagttcatatcgaacgttaatcccacgcgtccgcccacgcgtccg

SEQ ID NO: 72495 - DNA, 250 bp, Glycine max
gtcgcattgcagttaaaaaaaacaaaaaaatttaaacaaaaaaataaaaatcaaataaactgggataatataagaaaaaaaatagggattcatggtttattcgttccaggggctcctgccttaccttctcttgcatgcgactgtcatagtacttctatggtgtttcctaattttgatttactggccatctttttacaactgtcacacctgtaaaaacactcgtgttacctaatttaatagcccttggctc

SEQ ID NO: 72496 - DNA, 308 bp, Glycine max
gccacgcgtccggtagtgtggaattggatcatatctggttggttgagagagatgtcaccgggggaaacctgattcggaaggttggttaagggctctctggggggtttcgcactgggctctaagctttgcgcgtgtgtgcccgttctctactggggatttaagaacgcccttactctctgcaacaacaacaacaaactctcttgcgctttctgtctctgtgactgtgctctccctctctcgctcttccaacttgctcctgggctggcgaaaattctctgtctcatattgtggaagtaatgacccccatc

SEQ ID NO: 72497 - DNA, 78 bp, Glycine max
ggcatgctaccaaacacacgtacaagcttcatctggtgacatcatcatcacttgtgaaatgtgatctgcgaatgcgaa

SEQ ID NO: 72498 - DNA, 241 bp, Glycine max
gaagaatatgtgcaacgaattaaagatagcgttggatagcgcttcgcgatgcacgaaagagaagaaatggaagcaaagtttctgagttttgtctttcatataaaatatgttaaattattattttctatgataggattggatacttggcttaagtctcttgtttaagaattttggtgtattttaaccattgtaaagcactttgcgctgtgtctgcatgatcaagtacaactactagcatgct

SEQ ID NO: 72499 - DNA, 128 bp, Glycine max
aaaaaaaaagaaaatgaaaaaaaaaaagtcttgaatttctcacttctagttctagtattgttgttgttgttgttatatgatgtatggttgaataaatgtgatttggtgtttgtactttgtagagttaa

SEQ ID NO: 72500 - DNA, 82 bp, Glycine max
aaaaaaaaaaaataaaaaaaaaaaaaaaatttaaaaaaaaaaaaaggaaaaaaaaaaaaaaggaaaaaaaaaaaaaaaagga

SEQ ID NO: 72501 - DNA, 335 bp, Glycine max
  unsure (1)..(335): unsure at all n locations
aacaggcnaagcnggngagggttctttcaaaggacaggtggggacacaacaaacccaaacagcaantggcccaggctttactaggagagggaagatagtgaaagcaatggagtaagtgggcggctcgcattaaagtactaatcacattctaagctgattgcttgccctggccatagggtggaacattgaaccatagagcatgcggggggaaaacatcaatcaagagaggcactgttctgcgacaaacttggatgtggaatgtaaagttaggactggccgcacgcaagtgcttgaacaggcttgaacgatgaatttcacgtggctctaaccggacg

SEQ ID NO: 72502 - DNA, 296 bp, Glycine max
  unsure (1)..(296): unsure at all n locations
ttttgccaccggnngggggcgggccccccaaaccaacccaacannaantaatgccaattgcccaccacccactccaactccatctccatctccgaagcccacaccacccacaccaccaactccaaaaccaacacctcccactccaaagcccacgccaccaactccaaaaccaacaccacccacacccacacccacacccacaccacccacaccacccacacccaaggctggttggcctccaccttctcctccttcgccacccaaagcttcatgccccaaggacacattaaagctag

SEQ ID NO: 72503 - DNA, 168 bp, Glycine max
  unsure (1)..(168): unsure at all n locations
ggcaaanncnnncaaaggaagnagcaaaaagnanggcngaggaaggaggcnngccnncaacaccngnngcnncncagncngcccagggggnnaaagggcnnccagaagncaagaccaangaagngccaaaagaaaacacncnggagaagccagaaaagccngagagca

SEQ ID NO: 72504 - DNA, 204 bp, Glycine max
  unsure (1)..(204): unsure at all n locations
gagacgcgnccggataaatgatcaganggcaaaaaaggcagcaaagaggactacagccacgatgacaggggggaccccagaaagcaaacgggcgacaaagggggcgcaaaggacagcacacaggagaagagccgccaagagtgaaggcaaaaaggaaagggaagaggacagtgatgacaacggagagaggaacgggaggaggaa

SEQ ID NO: 72505 - DNA, 201 bp, Glycine max
  unsure (1)..(201): unsure at all n locations
gaaaacaataggaatnaaagnncagttttttaaaaaagaaaaaaaaaaggaacccaaaaaacaaaaaaaaaaaaaaaaaaaaaaaaaaaaaaaaaaaaaaaaaaaaaaaaaaaaaaaaaaaaaangggggggccgcccaaaaggaacaaagcnaacgnacgcgggaaggcaaacgaaaagcccnncaaaaggggaaccaaa

SEQ ID NO: 72506 - DNA, 64 bp, Glycine max
  unsure (1)..(64): unsure at all n locations
aaaaaaaaaaaaaaaaaaaaaaaaaaaaanaaaaaanannnnaaaaaaaaaaaaaaaaaaaaaa

SEQ ID NO: 72507 - DNA, 68 bp, Glycine max
cccacgcgtccgcccacgcgtccggaacatgtttggtatctacgcattagtcagaactcaagggattt

SEQ ID NO: 72508 - DNA, 236 bp, Glycine max
cgcgtccgcccacgcgttcgaaaaaaaataaaaaaaatatattttttaaaaaaaaaaaaaaaaaaaaaggtttttatttttaaaaaaaaatgggcggcctccaaaaccccgcccggctctttcttccaggtctttcgctttcgtcacgcgttcttcttaaagggacttctttttttttatggtccccccaatttatttcccttggccgccctgttacaaccccgttaatgcccaaa

SEQ ID NO: 72509 - DNA, 241 bp, Glycine max
cgaccgacgcgttcgtccacgctttcttccactcgttcgtccactctttctattttaacatgctcatcttccaaacagatgcttccaaataacaagcagagccacaccaaatgtatccaccttctaccccactctttaccggagaggcaagatctaccagtcaccgactcattcctcgtctcaatttaaagtactaacaccaatctaaactgattgtttgctcctgccattaaaatgaaca

SEQ ID NO: 72510 - DNA, 389 bp, Glycine max
gggaaataaaaaatagataactcgtttctgcacactcctgctcttctatccgctactctcaggtcttcacttcccttctatcactcttctcacttctgagaggtggaatcgttgggtcttaatgggtcccttttcactatccgttatggttaatgactctgccatttcattaccagatacttgtacgaaaagaaagcagaacttacttctgaaaaattcttttgcatcagttagcatgggagatgaaaagccatttgacttcctacgcattttatttgagggcgttattgcaggaggtacagctggagttgttgttgaaacagctttatacccaatggacacaataaaaacacgtctgcaggctgctcgcggaggagaaaaactaatat

SEQ ID NO: 72511 - DNA, 131 bp, Glycine max
gtcccattacatgttaaacgtaatggtgcttgtgagtacctatcaccactttttttgttggttggcaacttgccatttaattagtcaggttaatgtcttttttagtgttaatctctcagctttcttgcaag

SEQ ID NO: 72512 - DNA, 249 bp, Glycine max
gtttagatcgcgagcgttcccctctatgtttttttttgaattggggtgattatcaataaggatgaattaataatgcatggggggcgatgtacgtaacaaaaggtgacagtaataacatccatgcgtgtaactttggaacgactgagtccagacatcaactatcataggtgcggcactcataagtctctgcattgaccttgcaataattttcaagcaggtcaaaccgcttctgcttctcaatagcgtggc

SEQ ID NO: 72513 - DNA, 267 bp, Glycine max
gcccacgcgtcgtggctaccaaccctttctctccttttgtcgcttctcttcgatgatggcttagaatgccgcggagttcgacccctcccagatcgtcgacgtcttctacgcgtaccggctgtgggtcggcgcggtggtcccttgccctgaatcgccccgttagctatcgcgtgagatcggagatgatatcggcatgggaaccggcacggcctgattgtccttcgtgtcaccgcagctgaccggcaaaccgtaggccatggtcacggt

SEQ ID NO: 72514 - DNA, 370 bp, Glycine max
ctttatcgcatgtgatgtaatctagcctgaaaataaatgtaactcttgtaataaaaaagagaaaaaaaaaaaaaaaaaaaaaaaaaaaaaaaaaaaaaaaaaaaaaaaaaaaaaaaaaaaaaaaaaaaaaaaaaaaaaaaaaaaaaaaaaaaaaaaaaaaaaaaaaaaaaaaaaaaaaaaaaaaaaaaaaaaaaaaaaaaagggggggggccttttaaaaaaaacaaagtttccccggcgggaaaaaaaaaaataaagtccttaaaaaagggcccaaaaagaaaaattgggggggccctaaaaaaaacggttgggggggaaaaacccttgtttaccccaattataacgccgaataaacaaaccccttttt

SEQ ID NO: 72515 - DNA, 326 bp, Glycine max
aacacacatacgtgattacattaaaggtcttttttaaaccgctgcgctgactccaacatgggggggatgatataacttgttccaatcaaccaatgtcactcccagtactctcggcatcaatttatcgattttcctctccctccttccatctccaacttcttccccagctcctaattctcattcacctcatcggtggttaacacacgtgtgtactggtacgagactcccatagcccacgtgtgaaaggtcctgcttcctatcttcacataccacgacgttctggttgagctacaataccagatcatgctccatgtcatcgtgcagag

SEQ ID NO: 72516 - DNA, 59 bp, Glycine max
gacacgcgtatgccacactcatggaccgacttttacatacatgtggataataaggcaat

SEQ ID NO: 72517 - DNA, 448 bp, Glycine max
cagaagaacaagtagttgagaactaagaaggagaagcaaatggcttcctcaatgatctcttgcccagctgttaccactgtcaaccgtgccggtgccggcatggttgctccattcactggcctcaagtccatggctggcttccccaccaggaagaccaacaatgacattacctccattgctagcaacggtggaagagtgcaatgcatgcaggtgtggccaccagttggcaagaagaagtttgagactctttcctacctgccagaccttgatgatgcacaattggcaaaggaagtagaataccttcttaggaagggatggattccttgcttggaattcgagttggagcacggtttcgtgtaccgtgagcacaacaggtcaccaggatactacgatggacgctactggaccatgtggaagctgcctatgtttggttgcactgatgcttctc

SEQ ID NO: 72518 - DNA, 355 bp, Glycine max
gagacgcgttctgagactagatctcattgcagaaaacatagcatacaccacgacatctacgatgacaggttgtatatttggctgcacacctgtgaccaaaccggcgcaaaggacattactcaggagaagacttgtcaaaagtgctggcgaaaatgtaagggataacgacaatgatgacaacggtgagaggaactggatgatgaacttgactgttgctgcggctgtttctgctgctgggattgcagctgggaatgaacctgcacctgaaacttaaccaggcacctaaaaagctgccacaaagtgtgtcaccaattgtgcaactaagactacaggtaagagatgatgtactggatga

SEQ ID NO: 72519 - DNA, 55 bp, Glycine max
cccacgcgttcgcccacgcgtccgaaaacaagaggaattaaagttcattcatttg

SEQ ID NO: 72520 - DNA, 396 bp, Glycine max
  unsure (1)..(396): unsure at all n locations
tcgcccacgcgttcggaacgaacacatgcttagtttttgtctgtgactcactcactcaactctgttgttcattagtgctgcaaaaggggaggaaaaaacaaatagagaaaaaccctaatcttctggttcctctcaaattggttgaattggagcacttttatggcctcaacggagtgatgcanagtagagtggtgtgagtctgttgtagaagagcaagacaaccgatggcaatggcgtctaccgatacagagttggaagaacaactcctggaagccggtaacaagctcctcctagatcctctctcctcggtggaggacctcctcccactcctcgaccaagtagagaagtgcctatcaaggggttgacagtcacctaatgactctatgcgaaatgcac

SEQ ID NO: 72521 - DNA, 366 bp, Glycine max
cgcacacgctgaaccaatggaggcaacttatgttgctacaccccaagagcaagatcgtgacatgcaccatagattttgcttgttgatccctttcaattttggcacatttctcatcaagttgtatctgcttgatagtgaatttagtacagccttcggacacccaacgtcaataggaatttgattccatgggctattgatcctgacctgaatgctgaactcctgattaatcataaatatgctataatgtgggaaaatatatcaaatttaaaaccccaatgttgtgtttgaaaatgtgtgtcactgtgcctacgtggattcttgccctaatggaccgtaactgctggatctatcatatttataggttcg

SEQ ID NO: 72522 - DNA, 73 bp, Glycine max
  unsure (1)..(73): unsure at all n locations
cccacgcgtccgnaaaaataaaaaaaaaatttttatattttaaaaaaaaaaaaaaaaaaaaagggggaattat

SEQ ID NO: 72523 - DNA, 59 bp, Glycine max
  unsure (1)..(59): unsure at all n locations
cccacgcgtncgcccacgcgtncggaacatgtttggtatctacgcattagtcagaactc

SEQ ID NO: 72524 - DNA, 437 bp, Glycine max
cgttgtcaataccacttctcacatcatggggttgaaaatgagtacgctggtggcgcaacggttgaattatattcacgacgggcctaacaggaacttcgtggacgtaatgctacctaggcacatggtaagtgatttctcactctatctaacttctaagacgacatatgaactagaaggatacgagcttgataatgaaatgatacactgagcatactgaagcggtaaatggggttacagtttatgcatctgggaggatcgtgacgataaagcttaggggacatagtgtatactagctgataagttaaaaaaaagtggcaccattattttttgtcttaataccatgttctgtgacctggcgaatgtagcttcaagctgaaccgagactgagattcgcgatgccggatggccgcagttgatccgtcagtatatgtaccttt

SEQ ID NO: 72525 - DNA, 395 bp, Glycine max
cccacgcgagataactggaaacagtgggatgaaaatgaaggtccttgttttcttcgttgctacaattttggtagcatggcaatgccatgcgtacgatatgttccctctccgaatgaacactggctatggtgcccgtactccggaagtgaaatgcgcaagttggaagcttgctgtggaagcacacaacatctttggctttgagaccattcctgaagagtgcgttgaagcaacaaaggaatacatccatggcgaacaatatagatcagactcaaaacagttaaccaacaagcttacttttatgccagagacctcgaagtccatcccaaggacacatttgtgttcagtatagatggcaccgtactctctaatattccatactacaaaaaacatggata

SEQ ID NO: 72526 - DNA, 463 bp, Glycine max
ccgtatcttaattgctcgactcgacccactcgtccgcccacgcgtccgaaaagtaagagtctggataaatatgtaatttatatttttccgttcttgtcaaggataaaagagtaattttttataattctttatcttaaaaaggaaataatttcccactcataattttaaggctaatattgtaattttaacttttttgctctttttaaggataaaagtgtaattgtaaaattattattcatattataaccgtaataaaagaaaaattaaactcacgaaagtaaaatgctcacttcttatgtgagaaagtttttgtgggaaattaattaagaaaaaaaaataactaaatttttcaatctatgattctcaaaaaaaaaaaaaaaaaattctcctactaaacgttttcttatatagatcgttcaattttattatgtaactatacatgttaaatattatgtattaattt

SEQ ID NO: 72527 - DNA, 118 bp, Glycine max
ccgaccccttggttttggtcccagacttttttggggaaaggacctaatggaagtcaaaccgagggtggtggtgggcacctttttttaaaagtattttggaattctttgcgtttgggtt

SEQ ID NO: 72528 - DNA, 446 bp, Glycine max
ctctccaatcttaaaaatgataaacgcctgtattaatccaacaaaaaatggggcttcgaagctaagcatgcacaaagtgagattggcccagactgaagaaatacagaaaaatggcttgagatcaagcctaaccacgaataaagaagaaagaaaaaatgaccaggggcttttatggcggttcacatcagattcaccaaaccagaaactaaatgagtgatatccatcttcatggatatgtcaccacatctctatacatctaaccctgcctgccccgagtttaatgttgtataagaattgtgatacataagtcatagagttagagaccaatccaagaagtatgtttgcaaatgcagcatctaatgtcctcactgatctctcctccattgattaaggaaaaaaaatcaagcttggatattacacatgatatatagatgtctcttgaattc

SEQ ID NO: 72529 - DNA, 433 bp, Glycine max
gttgagaactaagtttgagaagcaaatggcttcctcaatgatctcttccccagctgttaccactgtcaaccgtgccggtgccggcatggttgctccattcactggcctcaagtccatggctggcttccccaccaggaagaccaacaatgacattacctccattgctagcaacggtggaagagtgcaatgcatgcaggtgtggccaccagttggcaagaagaagtttgagactctttcctacctgccagaccttgatgatgcacaattggcaaaggaagtagaataccttcttaggaagggatggattccttgcttggaattcgagttggagcacggtttcgtgtaccgtgagcacaacaggtcaccaggatactacgatggacgctactggaccatgtggaagctgcctatgtttggttgcactgatgcttct

SEQ ID NO: 72530 - DNA, 243 bp, Glycine max
cccacgcgtccgcccacgcgtccgggcaattggaaaaattgacaaaaaaaaaaagaaaaaagaaaaaaaaaaaaaaaaaaaaaaaaaaaaaaaaaaaaaaaaaaaaaaaaaaaaaaaaaaaaaaaaaaaaaaaaaaaaaaaaaaaaaaaaataaaaaaataaaaaataaaaaaaaaaaaaaaaaaaaaaaaaaaacaacaatgaaaaaaaaaaaaaaaaaaaaaagaaaggtacatataaaat

SEQ ID NO: 72531 - DNA, 445 bp, Glycine max
tgcaattagacaaattattctgaactctgatcctcaactagaaatatttgtgaggcttctaaaaagcactagtctgtttctaaaagctgcagttcttctttatctgtcaaaaccaaaggcaaagcagatgttatcttcggaatgggtgccattaatacttcgagtgttggaatttggtgacaaattgcagaccctcttcacagtacaatgcagtcctcaagtggcagcattttatgttttggaccaaattcttacaggttttgatgaagacaagaacttagaaaatgcccggcaagttctttcacttgggggattgacactgctaatgagaagaattgatggagaggtccatgagagaaacaatgctgctatgataatttcatgttgcattcgtgccgaaggaagctgtagaagttttttagctgacaacataaataagacttct

SEQ ID NO: 72532 - DNA, 62 bp, Glycine max
tccacgcgtacgcccactcgtcctaaaaaatataaaaataaaaaaaaaaaaaaaggataatg

SEQ ID NO: 72533 - DNA, 419 bp, Glycine max
cccacgcgtccgaaatggcttcctcaatgatctcttccccagctgttaccactgtcaaccgggccggtgccggcatggttgctccattcactggcctcaagtccatggctggcttccccaccagaaagaccaacaatgacattacctccattgctagcaacggtggaagagtgcaatgcatgcaggtgtggccaccagttggcaagaagaagtttgagactctttcctacctgccagaccttgatgatgcacaattggcaaaggaagtagaataccttcttaggaagggatggattccttgcttggaattcgagttggagcacggtttcgtgtaccgtgagcacaacatgtcaccaggatactacgatggacgctactggaccatgtggaagctgcctatgtttggttgcactgatgct

SEQ ID NO: 72534 - DNA, 337 bp, Glycine max
cgtgaactctctgcgttgatcgagctcgagttgttggcttgcttccgggagctctgaaccggaccgacatcggtgggacatcaaaaccctgcaacggaaaaatggcgttcttgttgaaccaaactagtatcgcttacacattttcgagctaactctcagaagaatgaagattaggcttcttttactagccgacgattccacgtcaaaccattggctcgcgagaaatctctgttggcagatgaagcaactctgaaaccgttcaaatcgtacaagaagagcgttaaaaagcttagaaaaactgggaatgcccttacaattgctgttgctgcacgatgct

SEQ ID NO: 72535 - DNA, 278 bp, Glycine max
cccacgcgtccgcccacgcgtccgaaatttgatcaatgtataattcgattctttaaaaaagaaaaaagaaaaaaaaaaaaaaaaaaaaaaaaaaaaaaaaaaaaaaaaaaaaaaaaaaaaaaaaaaaaaaaaaaaaaaaaaaggaaaaccaaactaaaagaaccaaggcttacttcctctatgcataccaagttataattctcttatagggtaaccaaaatttaattcattggccaaccttttacaaaatcccaactggtaaaaccacagcgataccc

SEQ ID NO: 72536 - DNA, 418 bp, Glycine max
cccactcgtccgctcactcgtacaagtacctttttacaaagtccaaattttatagctccgcgaaaccataccaaacctaattggcaacatcctaagcctcatccatgatatcaacaccggccttatctgcatccatccaaaagctccatcatttgaagccatccaacgtgtgctttcaaggtcttagacccctctcaagggtcacctaagccttctcaaccatagtgagcaccaccacctaaagggtcattccaaagcggtggtgttagagctgaactcatactcacaccttgctgataagcctcagcactggcctatgcctctacttgggaaggtgcgtgttacttaacttgcatagggagaacgtggcaaatcatgttcctgatcagaacggcctcacacacttagaggctggtga

SEQ ID NO: 72537 - DNA, 351 bp, Glycine max
  unsure (1)..(351): unsure at all n locations
gtgccggcatgggtgctccattcactggcctcaagtccatggctggcttccccaccaggaagaccaacaatgacattacctncattgctagcaacggtggaagagtgcaatgcatgcatgtgtggccaccagttggcaagaagaagtttgagactctntcctacctgccagaccttgatgatgcacaattggcaaaggaagtagaataccttcttaggaagggatggattccttgcttggaattcgagttggagcacggtttcgtgtaccgtgagcacaacaggtcaccaggatactacgatggacgctactggaccatgtggaagctgcctatgtttggttgcactgatg

SEQ ID NO: 72538 - DNA, 54 bp, Glycine max
cgtcaagataatccttctttgaaacactttggtagtgctcttagattgtaatcc

SEQ ID NO: 72539 - DNA, 169 bp, Glycine max
cccacgcgtccgaaaaaaaaaaaaaaaaaattaaaaaaaaaaaaaaaaaaaaaacgatatgggagaatacaaaaaaacaaacacgtacatacaacaaaaataaaatataatataaaaaaacctaaaataaaattcactgaccatcattttacaaacatcaaaactgaaa

SEQ ID NO: 72540 - DNA, 425 bp, Glycine max
actcggtcttgaattcccggacccacgcatccgtaattttttataaaaaaaaaataaaaaaaaaaaattaaaaaaaaaaaaaaaaaaaaaaaagaaaagaaaaaataaaaaaaaaaaaaaaaaaaaaaaaaaaaaaaaaaaaaaaaaaaaaaaaaaaaaaaaaaaaaaaataaaaggggggccctttttaaagattcaaaatttacaactcagtctatcaaattctaaatatcttttaagaataccaaaattttaataactttgccatccttttaaaaaattttaacttggaaaacacttgtgtaatcaaaattaattgcctttaaataaaaaccttttttcgcaagatgcttatatcttaaaaagtccttatcgtatggcctttataaaaattgactcaatttaaactgtaaaggataccccct

SEQ ID NO: 72541 - DNA, 432 bp, Glycine max
aatagttattttatcttatgcaatatttatttaatgagatgttttggtgcaagggttgatgcttgttttaatttatgttccatcgcttataacttaagatgttgagtacattgaacaattttgagaactcgtgttttactttaaaaagcaccaaaaccaatgtaacttcgagatcatcccagcttttgttttgtcacatgccaacattatcgtatcttctagaccaacatcaacatccttcattgtcttttcactcatacaatcaacattgttagactccatctgatatttattttacttttcaagctcatagtttagttttttcttgtgttattttttctttagggttgtgattgattttcaatttttaggttttggactgtttggattttttttgatattttgtttatttaagttcatattatccttgtt

SEQ ID NO: 72542 - DNA, 348 bp, Glycine max
cccacgcgtccgtatttttttcctccttcataagtctttaaagaatgttcttgggtcaaagaaaaaaaaaaaaaaaaaaaagaaaaaaaaaaaaaaaaaaaaaaaaaaaaaaaaaaaaaaaaaaaaaaaaaactaaaaaacaaaaaaaaaaatacaacaccccaattttctataagcacatcacattaccctcattaatctaccaaatataaacactatccttagtttaaaaaaaaatcaatacctgaaaaacataaaccagagccacaagtaaaacattttcaataacatgccatatatccatagccaacccatataaaaattattaactttttcataatcttaaac

SEQ ID NO: 72543 - DNA, 260 bp, Glycine max
cccacgcgtccgaaaaaaaaaaaataaaaattaaaaaataaaaaaaaaaaaaaaaaaaaagaggactggataaaaatttcctagagtccttgcaaatacatataaacaatacaatattatatataatgatacctaaattatggatcatccattttaatggatctaactttccttactgttaaaacccctacattactcactttaatagctttcaaacctaaatccctttcccctactttcaaaaatctctaacctggaaa

SEQ ID NO: 72544 - DNA, 444 bp, Glycine max
cccacgcgtccgcccacgcgtccgtccacgcgtccgtgttgttgtaactcgttcttcttcgtttgttgttctgtgtttgtgtttgttttttctctcacctgaaaatgtcttgctgcggtggtaactgtggttgcggaagctcctgcaagtgcggcaacggctgcggaggctgcaagatgtacccagacttgagctacactgagtcaaccaccaccgagaccttggtcatgggagtggcacctgttaaggctcaatttgagggtgctgaaatgggtgtgcccgctgagaacgatggctgcaaatgtggaccaaactgctcctgcaacccctgcacttgcaagtgaggtgttgggagagcaagcttcaagcagagatagcccttaattaggaataatgataaactattaatgtgtagctaaaaacttatgtattatgtctgtgatg

SEQ ID NO: 72545 - DNA, 135 bp, Glycine max
gtgagaaattgtgcgtgtatctggttgctaattcgagtgctattagtctgtgggttggggggtttgtaaccccgctacttgggttatgtttgattgtatattatcctagagaaataaaaattttaaattatcagt

SEQ ID NO: 72546 - DNA, 348 bp, Glycine max
gatagtcactcagttttgaatatataaatattcctagtttgacacttcactttcttacatgcacatgaccatgtcttatcagactggagatctaaaagttgctaatgtactgtcaaaggcgtgctggagcaccgtacatggaagtgataaaaatggaactgtgaaagtcatataacattgatatggatgaacacaaagtgacacagaacggaaatgtggagactgatgaaggtgtggaagccgtttgaaaatgtgtgaagaaaactgtattcataatggatgaagctgcactatctataaacaagcctatagaaagtggcactctgacgtctcagaggacaaaccttc

SEQ ID NO: 72547 - DNA, 465 bp, Glycine max
  unsure (1)..(465): unsure at all n locations
gagtttgttgtgagctataagctagtttatcgtgaggagaatatgaagttgtttgttttctttgttgctgcagtagttttggtagcatggccatgccatggcgcaggctaccaaaggttccctctccgaatgaaaactggctatggtgagcgttcttcggaggtaaaatgcgcaagttttaggcttgctgtggaagcacacaacatccgagcctttaaaaccattcctgaagagtgcgttgaaccaacaaaggactacattaatggcgaacaatttagatcagactctaaaacagttaaccaacaagctttcttttatgctagtgaacgcgaagtccatcacaacgacatatttatattcggcatagataacaccgtactctctaatatcccatactatgaaaaacatggatatggngtggaggaatttaatgaaaccttatatgatgaatgggttaacaagggc

SEQ ID NO: 72548 - DNA, 318 bp, Glycine max
ggcagatgagactatgtggctagatcagctgtcaaccgcatttgtgaacagacatgatcagggatacagccttatttgtaaacgcaggtaggtggttacttacacatagtttgccccgactggtatgctgcctgagatcaatgcgatgaacactatgtacggaaaagtgtggagcttcacgatcgacaagacagtagcaatggtcgtagaaccggtgtccgctgagcctgagatcaataatcacgtgcgtaagaagacgaaatgccatgctgaccatgctgataaccaagacaatgtcatcgacaattgccagctaca

SEQ ID NO: 72549 - DNA, 437 bp, Glycine max
gcgcacatgggataaagtatggtcaggaagcttattgcgacaaaatgaagcgaggtgggcatgtgttaacaaaatgctgcaagacagagatctcttttgtgtgaacagaatctaagcagcaattcctcactgttttagctgcttccaagtatttcgctatatgtttcctttacctttcgtagaaaagcttccctgtgatgtaatctagcctgataataaatgtaactcttttaataatcaatctacttcaagaagatttcatttcttcaattatccctttgtggtttcaaagttaagaaaaaacatctaatgcatggatgacttcatgaatttgaaggaaaccttatcattgtataaaaaaaataagtaaacctaaatacaaaagttaaaaaactacaatagataatgtatgtcaaccttaaaaaatccatttatat

SEQ ID NO: 72550 - DNA, 445 bp, Glycine max
cccacgcgtccgaagctagtttatcgtgaggagaatatgaagttgtttgttttctttgtggctgcagtagttttggtagcatggccatgccatggcgcaggctaccaaaggttccctctccgaatgaaaactggctatggtgagcgttcttcggaggtaaaatgcgcaagttttaggcttgctgtggaagcacacaacatccgagcctttaaaaccattcctgaagagtgcgttgaaccaacaaaggactacattaatggcgaacaatttagatcagactctaaaacagttaaccaacaagctttcttttatgctagtgaacgcgaagtccatcacaacgacatatttatattcggcatagataacaccgtactctctaatatcccatactatgaaaaacatggatatggggtggaggaatttaatgaaaccttatatgatgaat

SEQ ID NO: 72551 - DNA, 435 bp, Glycine max
ttgatcgagataactagaaacagtgtgatgaaaatgaaggtccttgttttcttcgttgctgcaattttggtagcatggcaatgccatgcgtacgatatgttccctctccgaatgaacactggctatggtgcccgtactccggaggtgaaatgcgcaagttggaagcttgctgtggaagcacacaacatctttggctttgagaccattcctgaagagtgcgttgaagcaacaaaggaatacatccatggcgaacaatatagatcagactccaaaacagttaaccaacaagcttacttttatgccagagacctcgaagtccatcccaaggacacatttgtgttcagtatagatggcaccgtactctctaatattccatactacataaaacatggatatggcgtggagaaatttaactcgaccctgtatgatgaatgg

SEQ ID NO: 72552 - DNA, 322 bp, Glycine max
cctaagcaatttaaaaccgagtcttttggcaatcatgaactgtgaatgggttttggccagttaataatgcattaccatgcattgtgcctgaagatttaatgcatctaatcactagcatttccttgattaatacagttctatggcatttccaaattgaatttgatctattgtactgcattatcctttgaggaagacactgttatgggttatcctttggttgaaaccgttggattgggcacaaaacagacggttccttcagaatccaatcgattaaccagttgtctacaatttggcacttgccatttcatttacattggaatgc

SEQ ID NO: 72553 - DNA, 437 bp, Glycine max
atcacgcgatcggctcaacaacacaacagcttacatctcataccttacccttccagaaagccctcattatcgtatctaattgtgagaatctacaattcttgtctaaatcattcgaccactataaatgtatctaagccgtagaaattgaataaaggcccaaatacaaatatatcagacgctattactgagactactgcgtaatctgaagatccaaaaaaactcttatcaactgacacataaatttgcaccacaaggaagagtattaagaagcaagagctgttatagatcccgaagcacatgcattgaaatccaacactttcaaggaatgtggggccacttttaaaatacacgcctatttggtgcatcacatgcaaaggcatctactagatgaaagtaatctataagtttctaaaatcattgtaaaattatgggtcaat

SEQ ID NO: 72554 - DNA, 74 bp, Glycine max
atctagaggattctatcttacgttctcacgcatgctacggcgtagcttttctatagcgtcacctaaattcactt

SEQ ID NO: 72555 - DNA, 110 bp, Glycine max
agtgtcaattgtctgttcagtttttacaacaaggtcaacctctctgtgcactataagctggagcaattgattctaatctgaaacttatccttggccccacacacattcca

SEQ ID NO: 72556 - DNA, 401 bp, Glycine max
taatttatctaacccaccacctacacaactttctcttacaacaacaaccactcctcttctgtgtggacccaaaaacacgctttccttacaccccctttttatcttccttatacaaactcattaaaatgtttcgagataaaaacaaaacataaaaaaaattcacttaattattaaatttttttatgactttccactaccatcttcatcacaagataaccttccctcctttcaccgatgatcaaaatcttaaccataatagatacattcaacatatgcttccaccttctacatttctctacaactttaacgtttacccctctttaacataaatttccttctcaatctaaaaaatcttttttttttatccctaacccagaaccaattttcaaatcccatttttt

SEQ ID NO: 72557 - DNA, 203 bp, Glycine max
  unsure (1)..(203): unsure at all n locations
ccacgcgtncgtgagctataactagtttttgtgaggagaatatgaaactgtttgttgctttgttgctgcagtagttttggtagcatggccatgccatggcgcatgctaccaaaggttccctctccgaatgaaaactggctatggtgagcgttcttcggaggtaaaatgcgcaagttttatgcttgctgtggaagcacacaaca

SEQ ID NO: 72558 - DNA, 108 bp, Glycine max
  unsure (1)..(108): unsure at all n locations
tcgcccacgcgtncggtgagctataagctagtttatcgtgaggagaatatgaagttgtttgttgtctttgttgctgcagtagttttggtagcatggccatgccatggc

SEQ ID NO: 72559 - DNA, 151 bp, Glycine max
gctgaaacgattgtgggcaatttcatgaatcgtataactacctacaaatttaattatgaaactgaatttgcgtgatttatatactgtatattaaaactattcagtggttgctaaatgagtttatgaagcagaactttctgttgctcattct

SEQ ID NO: 72560 - DNA, 217 bp, Glycine max
tatacacgttcgttgaggtgtaatctatcttatcgattgcagagtaagcccttgatgggggactttcctgcgacaaccaagatgcttgcatcgctcttcaacgctactttctgtcagagaggtggtcgacggatgaatacatcctatatggagcgtacattgtggcactatcacccgataagagaagttgcgtaagcaaacaccaatcatgccttta

SEQ ID NO: 72561 - DNA, 224 bp, Glycine max
tcgcccacgcgtccgactctctctcaccaaattcttcctagaacgaaaaaaaaaaaagaagagcggttttccctcaccaaagaagaagatgcaaacaatggccgatcaacttaccgatgaacagatctccgagttcaaggaagccttcagcttgttcgacaaggacggcgatggttgcatcacaaccaaggagcttggaaccggtatgccttcattggggcaaa

SEQ ID NO: 72562 - DNA, 200 bp, Glycine max
cccacgcgtccgcccacgcgtccggtggggtttgggtaatatgcaccagatcatagatttaaaccttgttattgtaaaaaaagaaaatggaaaaaaaaaagtcttgaatttctcacttctagttctagtattgttgttgttgttgttatatgatgtatggttgaataaatgtgatttggtgtttgtactttgtagagttt

SEQ ID NO: 72563 - DNA, 185 bp, Glycine max
attgtctcaagcaaccatggcaatggcaacccaagcctctctcttaaccccacccctctgcggtctcaaagccagcgaccgcgcctccgtgccatggaagcaaaactccagcctctccttcttcagcccgaagcccctcaagttctccagaacaatcagagcagcagccgccgacgagaccacag

SEQ ID NO: 72564 - DNA, 106 bp, Glycine max
acgcgtccgggccttctctagtttggttgaatcttattatcatgtgcacttcaatttgaatgaattcgaataatagtttcctcgctttgtaaaatacataattaaa

SEQ ID NO: 72565 - DNA, 300 bp, Glycine max
cgcgttcgtgaacaaatactaattcaagaaagatctctgaaaaaagatatggcttccactttctgggtgttattgttattcctggtacttattccatccagaatagagtggtgcctatctctgatgcattcttcaagccactcacactactgtcctccaaggtagtggcggcatcaaattccaatggaaggtttcaggtgaggacctccatgaatgagaaagttgtaacatggctcacagcagcttcattgacagcttcaatgatggttcctgatgtggctgaagcttacgtcttaacct

SEQ ID NO: 72566 - DNA, 91 bp, Glycine max
  unsure (1)..(91): unsure at all n locations
naaaaaaaaaaaaaaaaaaaaaaaaaaaaataaaaaaaaaaaaaaaaaaaaaaaaaaaaagggagaaaaaaaaaaaaaaaaaaaaaaaaaa

SEQ ID NO: 72567 - DNA, 93 bp, Glycine max
ggtttgtctgacagatgtggttcctaaatatggtcaacattcatttcaaaaaattatttggtatttgttattttttgagttatttcttcaaaa

SEQ ID NO: 72568 - DNA, 201 bp, Glycine max
cccacgcgttcgcccacgcgtccgaaaaaaaaaaaaaaaaaaaaaaaaaaaaaaaaaaagggggaaaaaaaaaaaaaaaaaaggggggcggccgttttagaggaaacattattacctccgccttcatgcgacataattcctcttttatagcgccaaataaaaacaaattagtggccgttttactacaacgtgactactgaa

SEQ ID NO: 72569 - DNA, 243 bp, Glycine max
cccacgcgttcgcagactgagcccctgtgagtgctctctctctgtaactaacttgctccctggatgaccctaagcatcaactgaagcagtggacggacctgtggaccgacgagatctcctccgtgatggaggcctttatgtcgtcctccgatctgtcctcaatctggccctcgccggcgccggcggaattcactgcggtcttcaatcaggacaccctgcaggacctgctggaaggcctgatcg

SEQ ID NO: 72570 - DNA, 287 bp, Glycine max
aagcatttgaaatacttaaatgtagcttctacttctccctatcatcaatgtagtagaaaggtcattaagatttgttggtccgaagctataccatcgaaagagaaaagggctgggatgaaaactgtggagtacctttactcgtttctttctattgctttctaacttgtacggctcgattaatgaagctacagcagttaagaatttaaaaaaaaaaaaaaaaaaataaataaaaaaaaaaaaaaaaataaaaaaaaaaattaaaagggtggccgttctaaatgaatcca

SEQ ID NO: 72571 - DNA, 410 bp, Glycine max
gtgagctataagctagtttatcgtgaggagaatatgaagttgtttgttttctttggtgctgcagtagttttggtagcatggccatgccatggcgcaggctaccaaaggttccctctccgaatgaaaactggctatggtgagcgttcttcggaggtaaaatgcgcaagttttaggcttgctgtggaagcacacaacatccgagcctttaaaaccattcctgaagagtgcgttgaaccaacaaaggactacattaatggcgaacaatttagatcagactctaaaacagttaaccaacaagctttcttttatgctagtgaacgcgaagtccatcacaacgacatatttatattcggcatagataacaccgtactctctaatatcccatactatgaaaaacatggatatggggt

SEQ ID NO: 72572 - DNA, 142 bp, Glycine max
aacaactataacaacatctgtctctgtcctttttgatcacactttggccacctcaatcgccaaatcagtccatgatttcaccgttaaagatgccaaggcaaatgacattaatctttttaaccacaaacgaaatgcccttatc

SEQ ID NO: 72573 - DNA, 407 bp, Glycine max
gcatcgcatccctcttgatttgtagtttgttttgttctgtagataaaagttctgccaaaggaagaggggtgctaagatcatagtgggtgttgtgcaacaatacctatgatctatgctgctatgatcctggcacattctgccatttccatacttgaaactgtcgtagactctgatattgaacaatgaggcctcttgtatgtctaccagatcacatctcttggtagacgtgtacagagtaactagacgcctaactcttacactggaggagttctaatccagccacctactgtagcggcctgtttatgtgaatgtttcataatagcatctatgcatatcggcgtgtatgcttggacattttacagaatcaatggagccctatttattacgtaacttgggattcttacctt

SEQ ID NO: 72574 - DNA, 328 bp, Glycine max
cccacgcgtccgcctacacgtacgattttatttgaaagataaaacacatctagactggcgagcatgatttttcatttacactggactcatactatccacacctatgtaacatcatagctgtacacattgtagtatggtactatgatgctggaaccattaaatcagccataatttaatgaattagttgaactctacattggtatttttacacattgagtttatggaaaatttatgtttcagtaatctcagtatctaatgttgttatcaatgtgaattgggacctattaatttattaattcatgattttttgtaaagtgttttacttttt

SEQ ID NO: 72575 - DNA, 187 bp, Glycine max
cccacgcgtccgatctccttgtcctacaattaattaacatggttccagccccctcattcgagtatgttctcttcttttgttgtacttttggctttaacttggtatccaatcctggtcctgccctcaacataagaacttgaaccaattgaagtggttgcttttgtggccaagagtgccattgaccatg

SEQ ID NO: 72576 - DNA, 70 bp, Glycine max
aaaaaaaaaaaaaaaaaataaaaaaataaatttaaaaaaaaaaaaaaaaaaaaaaaggaaaagaaaaaaa

SEQ ID NO: 72577 - DNA, 56 bp, Glycine max
ctaaaacttcgttatccactctcagtccgttccctcaacatatgagctgtaaccac

SEQ ID NO: 72578 - DNA, 57 bp, Glycine max
tcgaataaaagaaagaaaaataaatataataaaagaaaaaatataaatttataataa

SEQ ID NO: 72579 - DNA, 408 bp, Glycine max
cccacgcgtccgctcaaatatggccaaaatgaaagtgtccgaatctctggaccccatgggtgccccaaccgatgactcctcctcagctctgcagattcagaacctcaaaaacctcaacgccctccttctcaaggagaccacccaacgccgccaccagattcactctctccagtccgccctccaccgctccgccgtcacattcgacaccaacctcgccttccacctccaaaacgccgtcgtttccgtcttcttcaagaaccagctccaggaaatgaacctccgcttcgacaccctgctcggagatagggacttcgaggtttccgctctcaagcaccagctcagcgacctcgtcgcgcgtctcgagaacgaaacgactgctctcgccgaggatcgtgacgggctcgttcg

SEQ ID NO: 72580 - DNA, 174 bp, Glycine max
cccacgcgtccgcgtccacctctctctctctctctctctcactcacagattcagcctttcgcagtttctctctctagaaaaaccaaacctcgctactctcttctccctttttttttgtagttctttccttatttggccttcacactccgaactgcgaaatccttttttagcaaa

SEQ ID NO: 72581 - DNA, 358 bp, Glycine max
ggtgcttgttttcttcgttgctacaaattttgtagcatggcaatgccatgcgtacgataggttgcctctacgaatgaacactggctatagtgcccgtactccggaggtgaaatgcgcaagttggaggcttgctctggaagcacacaacatctgtgtctttgagaccatgcctgaagagtgcgttgaagcaacaaaggaatacatccatggcgaacaatatatgatcagactccaaaacagttaaccaacaagcttacttttatgccagagacctcgaagtccatcccaaggacacatttgtgttcagtataaatggcaccgtacttcttaataattcatacttcaaaaaacatggata

SEQ ID NO: 72582 - DNA, 296 bp, Glycine max
cacatcatctcactcgttagcttggtccgatgatggctgctgacatgagggctggacgctatttaaacttcaccctgacgacctgtctgacgagctggatctagctcattgcaccgcatagagtgatgagcaagaaggcttcgttgcgctacagatgtgtaagtagcagagggcagagagatagcatcagagcttgtggaaccactggggcgcctgaccaggtgatctgccaggtgaccatacaggatgtatgggagaataaagacacggtgcaacttatgaccctgtacatatgc

SEQ ID NO: 72583 - DNA, 397 bp, Glycine max
cggacgcgtgggcggacgcgtgggtgcacttcatgattgatgagaatgttcactgcagggacactgcaagacttatcaatgcacttgtggcagctggaaaaccgtatgagttaatagttttcccagatgaacgtcacatgccaaggcgtcatagcgatcgagtttacatggaagggaggatgtgggacttcattcagaggaatctgtaaaataacttgttattccatctttggttgaatggccagagtagtttctcaaaaaaaaaagaaaatcataatagatacaattaatataaaaaatatttaacgtttatatttataaaaaattaaaattaaaaaaaaaaagtttgtaattaaaaaaaaaggggcggccgttttagaggttccaagtttacttt

SEQ ID NO: 72584 - DNA, 291 bp, Glycine max
cccacgcgtccgcttgtactttaattgaattctgcattaaaaaaaaaaaaaaaaaaaaagaaaaggaaaaaaaaaaaaaaaaaaaaaaaaaaaaaaaaaaaaaaaaaaaaaaaaaaaaaaaaaaaaaaaaaaaaaacaaaataaaaaatcaaaaaaaaaaaaaatcttacatccaacaaaaaaaatatattataaaggtcacctaaataaaaaaaactaaccctacatataaaaaataataaaactgtaaaaaccatttctaatacctaactaaattaatttaaataaaaa

SEQ ID NO: 72585 - DNA, 370 bp, Glycine max
gagttccggggtagacgtacgcgtacgcgtacgcgtcacgctgagaggaagtgtagagggtgattctctgactgctaccttgtggcggaaaagtggttacgttcaggtgtgaccagtactacacggtagggagggctcttgcgacgggatctgatcagctccgcaagatctaccgaatgaggctctgtgccactatcaaggattgtgacacgatcacgttctggtatgatgtgaggaaactggactatgtgtagtagagcagtggccaattgcttgacatcaactgagaatggagtgaagatcccaactaactatgaagagctctggtatctggttgcggcatcagagtacgactagatactagaacatg

SEQ ID NO: 72586 - DNA, 309 bp, Glycine max
cctagtcctccgtatgggtcgccaagcgggttgttaagagccatggtgcacgtcactttgtacggaaactattaccgaacgtataggaagccttttaatacgtaccagaaggagtgcttgaacgcccagttgaacctcgtctgtaagttcggccttcagtgcaggatggagttatggagggaccagtgcacgctgaaccgcatccttaacaacatccgaaacctcttgacactcgttgtgacgaacgctgagcagatctctgagggtgtagtccttgttcaaagaatgttccgatacatactccgttac

SEQ ID NO: 72587 - DNA, 426 bp, Glycine max
gttgtgagctataagctagtttatcgtgaggagaatatgaagttgtttgttttctttggggctgcagtagttttggtagcatggccatgccatggcgcaggctaccaaaggttccctctccgaatgaaaactggctatggtgagcgttcttcggaggtaaaatgcgcaagttttaggcttgctgtggaagcacacaacatccgagcctttaaaaccattcctgaagagtgcgttgaaccaacaaaggactacattaatggcgaacaatttagatcagactctaaaacagttaaccaacaagctttcttttatgctagtgaacgcgaagtccatcacaacgacatatttatattcggcatagataacaccgtactctctaatatcccatactatgaaaaacatggatatggggtggaaggatttaat

SEQ ID NO: 72588 - DNA, 225 bp, Glycine max
gcaataccaaataaaaaataatataaaaatttaatttaaaaaaataaaaaaaattaaaataagaaaaaaaaataataaatccatataataaaaaaaaataattttataaaaaaataaaataattataaaatattattaataaataacaaataatttttaatttaggttcaccctttttttgaggcccaatttaactttccctaatatccctcttattaatttttt

SEQ ID NO: 72589 - DNA, 416 bp, Glycine max
tgttgatcgagataactagaaacagtgtgatgaaaatgaaggtccttgttttctgcgttgctacaattttggtagcatggcaatgccatgcgtacgatatgttccctctccgaatgaacactggctatggtgcccgtactccggaggtgaaatgcgcaagttggaggcttgctgtggaagcacacaacatctttggctttgagaccattcctgaagagtgcgttgaagcaacaaaggaatacatccatggcgaacaatatagatcagactccaaaacagttaaccaacaagcttacttttatgccagagacctcgaagtccatcccaaggacacatttgtgttcaagatagatggcaccgtactctctaatattccatactacaaaaaacatggatatggggtggaagaatttaac

SEQ ID NO: 72590 - DNA, 210 bp, Glycine max
caacccacttttgggacgtgaatctgcctagcactgatgagaattcacaaatactcatcatacattttcaacaacttgaatactgatccacccaccaatctaaattcttatgcatcaactatctactctatattactacaccactcatacactaatcttattattaaaacttatacagcttaatagctacaatcattaataaataaagat

SEQ ID NO: 72591 - DNA, 328 bp, Glycine max
ggcccacgcgtccgaaaagacagaacattacgtgtttctgaaagactgaaactttcaggcagggctactatccaagccggtctggtataccttcactttctcccacactacacattaacacatgcaactcgactcacatgatcaatgtagcattttacaactgcaagataccctgatctgtacaacacatgtatatccctgtctctgactctgtctcttgatcacggttacttagttatacttcaattcatcgaccacataccatccttacacccaaacacaccgaactatcattcactttcctttaaccccatactcatactaaatt

SEQ ID NO: 72592 - DNA, 405 bp, Glycine max
  unsure (1)..(405): unsure at all n locations
cccacgcgtncgatcgagataactagaaacagtgtgatgaaaatgaaggtccttgttttcttcgttgctacaattttggtagcatggcaatgccatgcgtacgatatgttccctctccgaatgaacactggctatggtgcccgtactccggaggtgaaatgcgcaagttggaggcttgctgtggaagcacacaacatctttggctttgagaccattcctgaagagtgcgttgaagcaacaaaggaatacatccatggcgaacaatatagatcagactccaaaacagttaaccaacaagcttacttttatgccagagacctcgaagtccatcccaaggacacatttgtgttcagtatagatggcaccgtactctctaatattccatactacaaaaaacatggatat

SEQ ID NO: 72593 - DNA, 234 bp, Glycine max
gacccacaacgaccgctttaccttatcctacataaacacctttctatacctcacctaacactcatctatcaccgccatttttacacattaggagcgcctaacctacaactaccttcaatacattctcccccaacaaagccttcatttctacctcttcactccctcgaaccttcttatccattcccttattggcttaacaaccttcatcaaaacaatactcctttattccaacca

SEQ ID NO: 72594 - DNA, 307 bp, Glycine max
cacctttgttcactcttcttctcttgcggctagggttttagcgcagcttcttctagatggaaggaagatgggtaaggaaaaggttcacatcagtattgtggtcattggccatgtcgactctgggaaatccactaccactggtcacctgatttacaagcttggaggcattgacaagcgtgttattgagaggtttgagaaggaagctgctgagatgaacaagaggtctttcaagtatgcctgggtgctggacaaacttaaggctgagcgtgaaagaggaatcaccattgatattgctttgtggaagttt

SEQ ID NO: 72595 - DNA, 218 bp, Glycine max
  unsure (1)..(218): unsure at all n locations
gcaacatngnngcttccatnncatcactgtcactttgctttccagcaacctcggtagagtctttttgcagccaccagcggcaaagcggtgcctggtgtgaagccaaagaagagaaacggtccttcttcgattgcgatcccttggaagggttgcaagaagggaagaccccagctgctagagactcgatcccaatcctcaaagaagggtggagggagaag

SEQ ID NO: 72596 - DNA, 326 bp, Glycine max
gccagctgtaccactgtcaaccgtgccggtgccggcatggttgctccattcactggcctcaagtccatggctggcttccccaccagaaagaccaacaatgacattacctccattgctagcaacggtggaagagtgcaatgcatgcaggtgtggccaccagttggcaagaagaagtttgagactctttcctacctgccagaccttgatgatgcacaattggcaaaggaagtagaataccttcttaggaagggatggattccttgcttggaattcgagttggagcacggtttcgtgtaccgtgagcacaacaggtcaccaagatacta

SEQ ID NO: 72597 - DNA, 313 bp, Glycine max
ccctgtctttacgctgctgctaacagtgaatctttaactcactatcataatttagggcggcttgactctattatcagtgacctgatatttggatctgactaatactcatccactggaaccgaaattgagttaacactttctattacccatctaaagaaagtcgcggacactctctacatcgttcaaaccaagtcttacggaggaagtgaatcaggagatcgtgactgctacaccactgtgattacgtgtgataccatcgccggagactcgtgaaaaggaagcgatgcgtaactattaaaggcctactgatgct

SEQ ID NO: 72598 - DNA, 453 bp, Glycine max
agagagagagagaggaaggactcagattgcagaaacgcagcagcatcgtgttggagagtgagacggaatgcattagtgaagaccgaggtttctcagaatctcaataacccccttcgttgaaaccaaaacgacgacgcgtcacttcactttgatgtgtctcgtcgtttctactttctgttgattagcctcattcactctctcgctcgcttgcaaccacacccttggatttaatttcattcatggcttcgaccaccacctcctccctctgcacgtggctcgttgctgcttgcatgtcagtcacgtgccacgccgaccgcaccaaaacccctcacgcaatgttccgctccttcaaaaagtctcgctactctcaattcaacgtttgtcgatccactcattctggtaaaacaatggctgtagctttgcaacctacccaagagatcacgacaataaaaa

SEQ ID NO: 72599 - DNA, 250 bp, Glycine max
ttcccttgaccaatggctgagctacaacacatcaatttgctcacattttatgcatctcaaatgaagttcattatgacgattatcctaattgcgtcatctatttggccccagctgcatagaagaatttgtcataaaaacatgcatatatcacgaggatgtatctattagctagcttattagtcactgtaaagcttcattcctgtcgccttagcttaccttaccatttatgcttacatctctgtatatttat

SEQ ID NO: 72600 - DNA, 149 bp, Glycine max
cttttagtagcagtatttgataattttaatttcatattaatagctctgtgcccaaatggggagaaattttaaactgaattgcttgtaaactttgaaacagcgataagttttccggttagattgattaatgttattaatgttatatattg

SEQ ID NO: 72601 - DNA, 170 bp, Glycine max
tcctgatgcatatgaaagtttctgaaacataacccataacccatcctcctgaacctcaaaagtcatatatgtactttcacgtagtgagagacatgagtgagactaaataaatgcttcatgctgtattcaattattgcaagtctaaataaaataatcgaagtttatgtcta

SEQ ID NO: 72602 - DNA, 68 bp, Glycine max
aaaaaaaaaaaaaaaaaaaaaaaaatattttaaaaaaaaaaaaaaaaaaaaaaagggggggactatat

SEQ ID NO: 72603 - DNA, 459 bp, Glycine max
gtgagctataagctagtttatcgtgaggagaatatgaagttgtttgttttctttgttgctgcagtagttttggtagcatggccatgccatggcgcaggctaccaaaggttccctctccgaatgaaaactggctatggtgagcgttcttcggaggtaaaatgcgcaagttttaggcttgctgtggaagcacacaacatccgagcctttaaaaccattcctgaagagtgcgttgaaccaacaaaggactacattaatggcgaacaatttagatcagactctaaaacagttaaccaacaagctttcttttatgctagtgaacgcgaagtccatcacaacgacatatttatattcggcatagataacaccgtactctctaatatcccatactatgaaaaacatggatatggggtggaggaatttaatgaaaccttatatgatgaatgggttaacaagggcgac

SEQ ID NO: 72604 - DNA, 390 bp, Glycine max
  unsure (1)..(390): unsure at all n locations
gttaaaacgaaagttagaaatggtaatccttttcccagatgcatgtattgacctgggtgattctggttgctcatagattatgattattattttcttatatttggatggtggattctcttatgaggattgctatatacataaattatatactttcatttatgactctgttggctctcctgttagccttggtagcttcctcttgtccccttggggccaacttcaattttttgcaatattctagaaaataaacttataatactttctttgtttaaccattgacattaattgattccttatactcaaaggttgaggctcttgctgaaattgacgttgccacaaagctcttgaaagatgacgcanaaatgcagggagatcctctgaatactcatt

SEQ ID NO: 72605 - DNA, 87 bp, Glycine max
gtattttatcaaatgaatatcgcaatctctaaaaaaaaaaaaaaaaaaaaaaaaggggggaaaaataaaaaaagggggcgggcggtt

SEQ ID NO: 72606 - DNA, 260 bp, Glycine max
ccgataagtcatacgcagcacaccgcgcgtgtatcaacgtccacgagctcatgccggggacgaggagcggatcattgagatttcctacacgcgccgtcgcgacccggaggggtgaatgctgttctttttctctcttctatatacttttgttctgtttttatttgctgtttttattttagttcttttctttttttatttttttaatttaattattttttgtttttcttatttttttttgttgttttgaatttatatttttt

SEQ ID NO: 72607 - DNA, 220 bp, Glycine max
gtttaagagtctttgggtatttctgtttgatgttctttttcgttattcttcaatgggtctgttagctggagttttgcttgtaaggaaataagaattaaaacaaagagagcaagcttttgtattttctttgtattccttgctgataagaattggcttaaaaataacctttcctttttatacatcctatcaatggccggtctctctagaggatgcacgctta

SEQ ID NO: 72608 - DNA, 410 bp, Glycine max
  unsure (1)..(410): unsure at all n locations
ccaaactcactctatcttctcccttttccttcaaaacttcatttctgccaaaatcaccatcattttctctaggtttatactcccccagaactaatgttaccggtgtcaaagttcatgctaaattaggtggtggagatgaacaagccaagaaaggaggaaagaagaaattcataaccagagaggaagaaccacaacagtattggcagacagcaggagaaagggaaggagagaatcccatgaagacccctcttccttacattatcatatttggtatgtcaactccttttgtaatcttggcaattgcttttgcaaatggttggattaaggtacctgttcgatgagacagcacttcgntgtctactctactcctcgatcttcacatgttaattcacgaattttaagcactttac

SEQ ID NO: 72609 - DNA, 374 bp, Glycine max
  unsure (1)..(374): unsure at all n locations
agaaacagtgtgatgtttatgaaggtncttgtttttttagttgctcgacttttggtagcatggcaatgccatgcctacgatatgttccctcttcgaatgaacactggctatggtgcccgtactccggaggtgaaatgcgcaagttggaggcttgctgtggaagcacacaacatctttggctttgagaccattcctgaagagtgcgttgaagcaacaaaggaatacattcatggcgaacaatatacattcagacttcaaaacagttaaccaacaagcttacttttatgccagagacctcgaagttcattccaaggacacatcttgcgttcagtatagatggaaccgtactctctaatattccatactaccaaaaa

SEQ ID NO: 72610 - DNA, 243 bp, Glycine max
aaaaaacagccggaagaaaaatatgttaaaacatatattaaatataaattttttttaaaaaaaaaaaaaaaaaaacccgcatttaaaaaaaaaaaggtaaaaaaaatactaaatataaaaataattataattatttattaataattattaaattaaaataactaatattttatataaaaataaatataaaatataaaaattaatataaaaaatataaaaataataaaaaataaataatatatt

SEQ ID NO: 72611 - DNA, 271 bp, Glycine max
  unsure (1)..(271): unsure at all n locations
gacccacgcgtacgntcatcaatcaattattcttccgtttattgtaaaacaacaacncaatnaaaaaagccgcctttttatccaagtcactatctcaattctacattcttgtacatctattccattctcaaatttcaactccttcactacccctccttaaactacttcgattatccttcccattttttctacctaatactatactacatatcttccttaattaaactttaactctttacctctcatacatatacactctacccttattttt

SEQ ID NO: 72612 - DNA, 475 bp, Glycine max
  unsure (1)..(475): unsure at all n locations
acccacgcgtncggacataatataanancataaaacttttgattttgtgcaaaaattatccataattgcccgcatattttcaccctgaatctaagatatctacgtacatttgtagtttctggtaaacgttttactgattctgatcatactcattagaaacagataggatgtattgtaatatgcttcttccaatggaatgtttgacactgtaccaagttgagtttgtattatgaacttttgtatactttaaactcaccaagtcagtacggtggtttcatttttagacaacttttgcggtctccttatagcaagcattttcagtgcaagcattttccctatacttttcttgattcttccaagtttgttgcccagagtttttcaatgaataagaattattgtttttttaagaccaaacttttcattattaatataaaaataaatcctctacaggttaaatttgtccaggctttcattt

SEQ ID NO: 72613 - DNA, 371 bp, Glycine max
gaaaatgaaggtccttgttttcttcgttgctacaattttggtagcatggcaatgccatgcgtacgatatgttccctctccgaatgaacactggctatggtgcccgtactccggaggtgaaatgcgcaagttggaggcttgctgtggaagcacacaacatctttggctttgagaccattcctgaagagtgcgttgaagcaacaaaagaatacatccatggcgaacaatatagatcagactccaaaacagttaaccaacaaggcttacttttatgccagagacctcgaagtccatcccaaggacacatttgtgttcagtatagatggcaccgtactctctaatattccatactacaaaaaacatggatatggg

SEQ ID NO: 72614 - DNA, 159 bp, Glycine max
cgaaatacccgggccgaccaacccgtccgaaaaaaaaaaatttaaattaataaaaaaatttttataaaaaaaaaagacctactattttaaggggggcaatttaaacaaaaccaagcttcaaacttcatttcttttgttttacgttatctaaattcaatt

SEQ ID NO: 72615 - DNA, 160 bp, Glycine max
  unsure (1)..(160): unsure at all n locations
ttccgaaaaaaaaaaaaaaatttttttnnnnanttttttttggcccgccgttttaaaggttccaagcgggactttctcgagcattcaacgttttccttctcttataggggcccctaaatttaatgaactggccgtcctttttcaacttcgcgactggaaa

SEQ ID NO: 72616 - DNA, 267 bp, Glycine max
gcactcgatggcgatcactggacttctagttcaaggggaggttggactgggctgagcagtctaaagtcatcacagtggcaggccaaggacatgaagaaaaacaatctggaatactcgagagccctgctgtactaccacttgtgtgacctctgccaaccaaggactgaatgggttagctacagcaaactctgactgaaagatcaaatcctgtgcagttcagctgatgctggtgaactatatctaatagcatgctggacatgatacgag

SEQ ID NO: 72617 - DNA, 187 bp, Glycine max
tcgagactttgacactcagctcagaaaactctcgttcaagtaagcgttcacctgttaagtgcagtgacagctacgtacactggcactgctcttatgttagcaatgtctggctgttaaagctaagcacgatcacgcatttccatgacggtagccttactattcctgacctgcacgaagctcgacagaa

SEQ ID NO: 72618 - DNA, 439 bp, Glycine max
gtttttgtgatcatataactattgtaattatgattgtatatataaactatattatgtgtctgtaatttcatacaacatcaaagatttcagctagtcattgaagttccgtaatcatgtttgtctatacttgtttgtaatatcgattatcgtgacaaaatcgagactgtaactacaatttaaaaaatcttgatttcagccacaattttaaggtatttgaggtcttctttacaatcacacatgactgtaattgtaattacgccaattgaatttatctataattttatgtgatatcaattatcgtgacaaaagtgagactgtaactacaatttaaaatcttgatctcgacgaaattgcaaacgcgaccacgtttgcaatttataaccctcctatccactctctttaattgttctgccatttggtacactgtttcacccttttc

SEQ ID NO: 72619 - DNA, 210 bp, Glycine max
accaagcttcctattgatggacgattctattatattaatgcttaggatcaatcagtgcacgtcaacatttggtttgagaaatgtgtttcgcttaactaagtcatgattaatggaagatagctagcattgtattaaaacaacttataacaaacatagcaactgcgaaaactgtgacattacacaacttaaaaacctttcaggacatccccc

SEQ ID NO: 72620 - DNA, 439 bp, Glycine max
gtttggtgggatacctcttataatccaatgtttatcaagcccagttaggaacactgtaaattatgcacttggggcactttattatatctgtaacgaatctaacaaggaggagattttaaggcccgaagttgttgatgtcattaggaggtatgcagccgctgaagaagttagtgtgagcttcagtaatctggctaaagcttttctgagtaaacatctggccgagaactactgagagacacagcttacctttccatactcattataagaccatatgtcttgagtaaggcaacaagtaattagaaagaactattattattgttattattattcttggttgatcaaatattattattcttgttattggtatcacactattcatgtctagaaaggattagaccatacaagatactatttgacaaaaaaaaaatttttattatat

SEQ ID NO: 72621 - DNA, 115 bp, Glycine max
tcccacgcgtccgaaaaaaaaaaattttaatttaaaaaaaaaaaaaaaaaaaaaaatgaaataataataaaaaaaataaataaaaaaataaaaataaaaaaaaactttactatat

SEQ ID NO: 72622 - DNA, 457 bp, Glycine max
cccacgcgtccggttgatcgagattactataaacagcgtgatgaaaatgaaggtgcttgggttcttcgttgctacaattttggtagcatggcaatgccatgcgtacgatatgttccctctccgaatgaacactggctatggtgcccgtactccggaggtgaaatgcgcaagttggaggcttgctgtggaagcacacaacatctttggctttgagaccattcctgaagagtgcgttgaagcaacaaaggaatacatccatggcgaacaatatagatcagactccaaaacagttaaccaacaagcttacttttatgccagagacctcgaagtccatcccaaggacacatttgcgttcagtatagatggcaccgtactctctaatattccatactacaaaaaacatggatatggagtggagaaatctaactcgaccttgtatgatgaatgggttaacaag

SEQ ID NO: 72623 - DNA, 326 bp, Glycine max
  unsure (1)..(326): unsure at all n locations
ccaacccgtccaaccaggatcaaaacttgtttttccaggctttaatgttttcaactgtaaagtggtacctggttaaaggggcagggaataaggtttttgggatggttgttaaatggttactcttaaatattctaacatggtctgtaatgcaaactcaattcattgcactgcttctgagttgaatgaaaggtgttttaagaaaaaaaacataaannataannaaaaannaccacttcnaaattcatcctttcaaaataattgagcttgtgatgaacaaaaaaaaggtgtggcggacacaaaaaaaaataaaaaaactgcccaggctt

SEQ ID NO: 72624 - DNA, 82 bp, Glycine max
aaaaaaaaaaaaaaaaaaaaaaaaaaaaaaaaaaaaaaaaaaaaaaaaaaaaaaaaaaagaaaaaaaaaaaaaaaaaaaaaa

SEQ ID NO: 72625 - DNA, 325 bp, Glycine max
gtttgttagaagtacaatcatcacttttttttggacattggacctctcattggtggtggtttggctggccttatctatggcaatgtcttcattcgctctgaccatgcacctctttccagtgaattttgatttggttcaagtcatggcatgtgtaattcatgtttcttgatgataaaaggaggaaaaagcagttcttggttttctttctttttctatctatctccttttttttcttcttcttttaatttatttgtaaagtgtgctactactgtttaatttggtgagaaaaacaaaaaaagaaaagatcgggtaaaaaactttgagc

SEQ ID NO: 72626 - DNA, 144 bp, Glycine max
tttgaatgtgccaaaaaaacacttggtacctttattaaccgcgtccctacttggtctatctctctctcacggtatgggcacacacaccctggcttggacatgttctttggcgaaagaggattggcaggggctttctatatcttt

SEQ ID NO: 72627 - DNA, 334 bp, Glycine max
cccacgcgtccgggagacaatgttaacggatggcatctacctcctgttcacctacttcaccaagcctgaatcaattacccctcttgaggagacaatgttaacggatgataatgttatccgatcaatgagttccaaaattaggaagaggaaatattagtttcttttcaagtctccagtaactctcctttaaggagatgcttatagagcaatgttatatttatcatttgttattatgtatttttccccctttcatttggattcaaggatttttgtaacatgattgaatttaattaaaagatagatgtaggtgctatcacttgcagtctacagagtt

SEQ ID NO: 72628 - DNA, 285 bp, Glycine max
  unsure (1)..(285): unsure at all n locations
nnttttttttttttttttttttgggggtttttttttttggtggggtggttttnttnnggggtaaatttttttttttaattttttttggggagggaaaaatttcttttaaaaatttttgtgggaaaggtaataaaagtggaaaaaaatgaaaaaaaaataacaaaaaaagggatcccccaaaaaaaaaaagccgccaaatttaaaaaaaattctttaaaaaaccccccctcaataacttccccaataccgaaactataaaaaacctaaaaaaaccccttccaatgg

SEQ ID NO: 72629 - DNA, 186 bp, Glycine max
  unsure (1)..(186): unsure at all n locations
cccacgcgtncgcccacgcgtncggcgtttaattggaaaaaaaaaatcagaaacgcaaagggcaagaatcacccaattccgagctctactactccgcggcaccaccaaccagcgctcccctctccgccgccccgccgtcgccgattcttcatttgcatcaaaaccctcattctctagtgccgccgc

SEQ ID NO: 72630 - DNA, 259 bp, Glycine max
  unsure (1)..(259): unsure at all n locations
gagggccaagaaagcaaggtagtcccttcttccctcaagtcctcaaacaaggttgaatctagagcatccccgcgaaagctctttttttagttgcatggatctttttaccctttttcatttttccaattattattattatattatattgggcggacaaaaaaaaaaattattatattatattggaggacacaatgatcttgatgcttaattaaatgagatattattctcttgatggttccntaaaaaaaccgctcattct

SEQ ID NO: 72631 - DNA, 416 bp, Glycine max
gaagcaaatggcttcctcaatgatctcttccccagctgttaccactgtcaaccgtgccggtgccggcatggttgctccattcactggcctcaagtccatggctggcttccccaccaggaagaccaacaatgacattacctccattgctagcaacggtggaagagtgcaatgcatgcaggtgtggccaccagttggcaagaagaagtttgagactctttcctacctgccagaccttgatgatgcacaattggcaaaggaagtagaataccttcttaggaagggatggattccttgcttggaattcgagttggagcacggtttcgtgtaccgtgagcacaacaggtcaccaggatactacgatggacgctactggaccatgtggaagctgcctatgtttggttgcactgatgcttctc

SEQ ID NO: 72632 - DNA, 410 bp, Glycine max
gtgatttcagtgagtgatcggtgttcacttgatctcatcataatcgtcagcgtcaattgaagaagatgccgatcagaaacatcgccgtcggaaggcctgaagaggcgactcaccccgacacgttgaaggcggctttggctgagttcatctcaaccttcatcttcgtgttcgccggctcaggctccggcatcgcctacaacaagctcaccgacaacggcgctgccacccctgccggcctcatctccgcctccatcgcccatgcattcgccctcttcgtcgccgtctccgtcggcgccaacatctccggcggccacgtcaaccccgccgtcaccttcggcgccttcgtcggcggcaacatcaccttcctccgcggcatcgtctacgtcatcgcccagctcctcggctccatc

SEQ ID NO: 72633 - DNA, 174 bp, Glycine max
cccacgcgtccgtagaaacagaagagggtcactgctgataattgttcaggggcaattagtctattccttagaccttgagacacacatccttatacaacttccaattgcagaggggggtttatggactctataccctgcttattacgctgagagcctgtttctacttgacaaaat

SEQ ID NO: 72634 - DNA, 181 bp, Glycine max
  unsure (1)..(181): unsure at all n locations
cccacgcgtccggtctctttccaatcagatagggtgggagatttcagtgaccccaccacccctatgagcagctcaagtgtgacatttnattaatanagaaaggggtcacattggcttttttttggttttatacttttctttttactctttatttttttgtttttttttttttctttatttt

SEQ ID NO: 72635 - DNA, 281 bp, Glycine max
aaaaaaaaaaaattaatgagaaaaagttttcttgtaaaaaaaaaaaaagggttaacattcgtggcgaaaacaagcttcagtgcgcgctcttgcaacgtacaatgctctccgattgagacagcccaaccttctttacgggcccatggctgacaacatctcaactgggaattccctagctttaccgaactgacctgccttgaaaaacatccgctctgcgacaactgtggtaatagccaatacggccgcattgcccactttttccaattggagggcagtctgaa

SEQ ID NO: 72636 - DNA, 418 bp, Glycine max
cccacgcgtccgcccacgcgtccgctttctctgtcccgatttcgctctggtgcgtctcgttcctgtgcttttgaatcatattcgtcgatctgttcttcaacatattctctgctttcaaccgttcgcgtcgtgactcagcttcgaaattgttcagtataagtataatctcttcagcgtaattccttgtcttgtgaaagttggaacttggaacttggaacatgtatgggagtaaagctagccaacttgtgaaagaatttgcaagtggagaaaaaggtcagcttaccacatacaataatgacttgattcgagaagtagttgcagagtgtactcaacatcaccttgattttcagtccttgataaggaagatgcaggaagaacgtttggatatccaaacggcaaaaaatgcagatcactacgg

SEQ ID NO: 72637 - DNA, 313 bp, Glycine max
gcgggcacgcgtgcaaacacgcgtcctcccacgccatccgagaccctctaacttatatgtgactattcttagacgcttgtgacactgctactaatatgagtgtccccggcctaactattatgctatactctatggtgagccggaactccctgagcccctgcttaatgtacatcgctatctacaaaacgatgactgtacacgatatgctgaagttcaaatgcaacagcgctccgtgtgagattacggacaacgtggatatcagagcgggcggtctgatgattacctctcccagcgagtcacacaggatcgagat

SEQ ID NO: 72638 - DNA, 419 bp, Glycine max
acacattctcatgggccaccactgtcttcatcttctgcaggttgtcttagaactgttaaatgggcatctttaatgcttatagtactcgtgttacatgtataacatagtactggaattgtatcactcggccaagacaaaactagagttccactacaaatgtgagctacgcaaaaggcaagctgcacattcatctgagtggatataagctgtgtcatcatgtgtgtaaatagttgattaaaaagatccagacggtgtatgtatgtgttttcaggtcaaattccccaagtggcaggccttgatcacacacattgccgctgtttgtgatgtaagatgaaaaaagaaaatgaaagaaagaaaaacagaagaaagtaacaatttccttttttggttctcaccatcccttgcaataaaatcattat

SEQ ID NO: 72639 - DNA, 282 bp, Glycine max
cccacgcgtccgcccacgcgtcctttttttttaaaaaaaaaaaaaaaaaaaaatggaaggaaaaaaaaaaaaaaaatggtgaataaaaaaaaaaaaaaaaaaaaaaaaaaaaaaaaaaaaaaaataaaaaaaactatatttaaaaaaaaaaaaaattataataaaatgtatttaatttatgggggggccttttttaagaatcctattttttttcccggttttttggcagttttttttttttttttttggcccctttatttattttctggggcgctcttttta

SEQ ID NO: 72640 - DNA, 419 bp, Glycine max
cccacgcgtccgcccacgcgtccgctataagctagtttatcgtgaggagaatatgaagttgtttgttttctttgttgctgcagtagttttggtagcatggccatgccatggcgcaggctaccaaaggttccctctccgaatgaaaactggctatggtgagcgttcttcggaggtaaaatgcgcaagttttaggcttgctgtggaagcacacaacatccgagcctttaaaaccattcctgaagagtgcgttgaaccaacaaaggactacattaatggcgaacaatttagatcagactctaaaacagttaaccaacaagctttcttttatgctagtgaacgcgaagtccatcacaacgacatatttatattcggcatagataacaccgtactctctaatatcccatactatgaaaaacatg

SEQ ID NO: 72641 - DNA, 314 bp, Glycine max
tcgagatgtgaaaaatgtgaaaccaattgagacacaccaacatgatagcttaattggtgtggctcaattccaagttaccctatacactttgcatatttgaattgtaaaatggttttgtttattcaggtggtggtggtggtggtttttgtgatggacccatttgctaagtataattgcaagagtagttgagcgtccaagcccccgttcaagccactccaatgattggaatgtttttgttgtttatgtaatttgtgttgtagtattgtttgggtcctataatactgttcaaataaattgattcagatgctttcctc

SEQ ID NO: 72642 - DNA, 293 bp, Glycine max
gccacacgtgcggctgaaagagactccttcttgtcaatcactgtgacaaaaaaaactgtacactgactctgctatagctgtgactccactcaccctgtacaagtcgttatatcgaacatggaaactgttacttctaatgatccacaggctgatgaattcaaactgcttgtcgatgaagcattgaccgttggcgaattctacctagccattgatctatatacacatgccattctcctgctcagtcgaaacgccattgactcttctattctggcctttgctcatctttaccttga

SEQ ID NO: 72643 - DNA, 346 bp, Glycine max
cccacgcgtccgcccacgcgttcgtcttttcgtccgcccacgcgttcggaaaaaagaaaaaaaaaaaaaataaaaaaaaaaaaaaaaaaaaaaaaaaaaaaaaaaaaaaaaaaaaaaaattaaaaaaaaaagtaaaaaaataatttaataaaaaaaaaaataaaaaaatttaaatataattttttatgctataaaacgaaaatattcctaatcaaaaataaaagaatttccctccctaacttttataattaattcaagaagctcgtgctttaaaaaaaaattatggtttttttttttatttaggagataaaaaaatttcttgatatgattcttattccgaatttat

SEQ ID NO: 72644 - DNA, 235 bp, Glycine max
cttatgattcagaaactgtgaggcattacacattctcaaccgcgaaccctactagcagggcgaacatgacatccaccttgcgcaccgtcagaagactcggagggacattactgtcatccacctcatctcgactcacctgagggttagtgaaatccacagtgattgctatgaattcattgagggaggctgtggcaatgggagatgggaagatcacatgctttgataggaattgggt

SEQ ID NO: 72645 - DNA, 421 bp, Glycine max
caattggccttgatcaactactatagatgtattcatttgttctgttgcgatttttatggtgcaatccatgttttgtgatgcaggcatgagatagataaagtcactgctgggcagcgattagatttgaaccttgaaagggggagaataagggaggaattgtctaatcagaatgctgaaactaacaacctgacaaacaaacttgatagagtaagcaattatggatctgtctgggtaagctcatccaaaagcggagaagaaaacaagaaaaaaaaaataaaatgagtttcttcgtaagctcataagctaatttgtagaattctcgatgttttagagatactatatgtgagaacttctacaaattagcttatgcataattgaattttagctcatgtacaaacttatttcattttttacttattat

SEQ ID NO: 72646 - DNA, 286 bp, Glycine max
cccacgcgtccgaccacgcgtccgaaatataaaaaaaagagacaaagaccgtcgggagggaatttgattcagcgtagcagggcaacaaccataagcaacacaacaatatccatttaacagattctgattcgacaacgtcagacaaaggaaggggttaaggtgtgacggggggtcctttttaaagagaaaaattttcttttctcaccttagaaccctaatatcttttttttgggggcgccaaaatcaacactccgggcgctgctttcaaatccgccagatgggaaaa

SEQ ID NO: 72647 - DNA, 95 bp, Glycine max
  unsure (1)..(95): unsure at all n locations
agcnaagagagggtttgtgcgcgtcgcgcgtccgtcgattccggtggcacgcgtcgccgctcgccacctcgccaccgtcgccacgcgtcgccacc

SEQ ID NO: 72648 - DNA, 302 bp, Glycine max
gaacaatccaactcttttcttattgcttgttgcgttctccctcgttttcgcggacgaggggggctgtcgctacagaggagccaagctataccgatgatcatgcacgaggtcaatggtcttgactagcggctgctaacatgacaccactggccggagtttaacaacatgttcactagggaaaaccagtcctaagacaactacaattactggtacaacgtgctcattgctaacatgcgccgaacacggaagaagcacagtctggacccttttgccaataacggcgcaacgcgcttgtccaatgg

SEQ ID NO: 72649 - DNA, 324 bp, Glycine max
agccaagtgaaagtgagaaaaaataaaaatcaaagagcataatgtcagggatcattcacaagattggggagacccttcatgtgggagggcacaagaaggaggaggagcataagggtgagcaccatgctggagaatacaaaggggagcaccatggtgaacacagtagtgagtacaaaggagagcatcatggtgaacacaaagctggagagtaccatggtgagcacaagccagagcacaaagaggggttcctagacaaagtcaaggacaagatccatggtgagggcggcgccgccgaaggcgagaagaagaagaaggagaagaaga

SEQ ID NO: 72650 - DNA, 374 bp, Glycine max
gctagtgaaattgtatgttaaaatacaatttataaaataattaaaaaaaacatgttgaaatcgtatggtaaaatataatttccaaaatattaaaaaaatattaaaattgtatgtgtagtatacgatttcaaattttaataaaaaaattaaaaaattaaaattgtatgtgcatatagtgtaataatttttttaaaaacaaaatcgtgctttgaagtattattatggtaatttttttaaaaaaacaatatctcattatggtgcaagagtagactatattagtatcaagatggttagtttggcaatagaaactctcacatgatgaattaatgcttggataattttttttcttatttgaatcattggtaaaaggtaaa

SEQ ID NO: 72651 - DNA, 131 bp, Glycine max
cacacgcgtccgcttactcctccgaccgctccagctggctgtgctaaccattcagacgtaggaacctgagggctgggaagcgatgaagatcatgcactggactcggcgaacgttggcaaatccgacccacg

SEQ ID NO: 72652 - DNA, 317 bp, Glycine max
tccctttctaaacaaatggaaatggcaatattacttttcacacacaaacacaaacaacattactttgtacattttacatatcacacttgacatacatctcaacaacctcactcaacgcctacaacagctaatactgccactcataacattgcctcatcacctacacgtatttacaaccatagttctactaccaatcccacgtctccagaatgctctactatgtgcaccaatctcaaactttcataacacacaataaatataacaaaacttcaacactaccacacaatcaaagctacctaaccttctttacttacaaa

SEQ ID NO: 72653 - DNA, 332 bp, Glycine max
cccacgcgtccgcttaaaagctgtaatcagaagtgaagaggaagttaggtggatgtgccaagagagttatttagcctgtagagcctgtaattggttgcagttgattgtgaaactgttgcttaaaggaaataagtagcatttgatattcaaaaaaaaactaagtttaaaaagaatgaagagatgacaaagacaaacctaaatgggcatgatgaataagcaaaattcggattttttcatcataaaccaatattcaagaaacatattgcaattccagtatataaacctgtaccaaaaccattttcagtgtataaacctataccaaatccaatttc

SEQ ID NO: 72654 - DNA, 371 bp, Glycine max
gcagaaccgcactcttctaaggaattgttacattggttatacttgagtgtttatcgtgatgagcttcaatggaaatgtgttgcacagtgcttggttttcccttttaccattgttgtgagctcaactttattattatgtcttagtatacccaaaagttatgacttctgtgtatgtagctaaagcttttctttattgctgctttcaacatgtgctcaactcaactgcaggaacatcgacctcttgtcatttggttcataattatttactcctttacttaattatgtgtctcctcatcattggggatcagcgaccagaatctgtgaacattgatgcacctgatatcaatggaacaaggtttttcagtcaacttg

SEQ ID NO: 72655 - DNA, 120 bp, Glycine max
cccacgcgtccgcccacgcgtccgcaggaaactcatttcatttcagataaaactagaaagtttactaataaaaaaggcaactaatggggttatccggtacttacaacacaacttaaatat

SEQ ID NO: 72656 - DNA, 410 bp, Glycine max
cccacgcgtccgctcacgcgtccggcatcaaggcctacaatgtattgacagtggagggagaacttaaaacaaatgtgagaaacagcttcaagtcgatcaagaacaagttcagcgacattcgctacggtgtgtgaactaggatcaaccataagagttgcttgccttggggctagcatgtgttgttcagtaatatcaactttaaaggtcaggcctttataaaggaaaatattgcaatggtgtatcgtgaggcaagatgctatgcataaaacatatatgagagtactatctggcttggaatatgtatatgctctgcaaacaagggtatcttggccggctaatggtaagactgatagcagcaaactagcatgctttgtgttaaacatgcctgaatttaaaaatgtttttgaaaa

SEQ ID NO: 72657 - DNA, 162 bp, Glycine max
gagctattgaaactattaaaaaaaaaaaaaataatttaaaaaaaaaaaaaaaaaaaaaaaaaataagagaacctatattaacatacccgtccatacaacacaaacatacaacatataaatacacactatattaaaatcatttaccatcaccttacatcattt

SEQ ID NO: 72658 - DNA, 411 bp, Glycine max
caagccaagtgaaagtgagaaaaaataaaaatcaaagagcataatgtcagggatcattgacaagattggggagacccttcatgtgggagggcacaagaaggaggaggagcataagggtgagcaccatgctggagaatacaaaggggagcaccatggtgaacacagtagtgagtacaaaggagagcatcatggtgaacacaaagctggagagtaccatggtgagcacaagccagagcacaaagaggggttcctagacaaagtcaaggacaagatccatggtgagggcggcgccgccgagggcgagaagaagaagaaggagaagaagaagaaggagcatggccatgagcatggccatgacagcagcagcagcagtgacagtgattaaactggtggatcaactatatatttaaa

SEQ ID NO: 72659 - DNA, 362 bp, Glycine max
aaggctgcttagcctcaacttcctccatctatctcttcggcaccacaggcgtcacgacccgtatactagcgaccttaactgccttaactgcgcctgcacccaactccatgccgcattcgcgccatcaccctcacccagacgacctcagagactcgacgcgacagggacgatgattgcgaaaacagcggcatggacctcggcctagggaccagctccactgatgcctacgtcgtcgtcaagcttggcgccctaatcacctgcggccaactctacgacatcgtcggcgagcacaactgcaaacgcacggaggagcatgcccgttcccttagcatgcccctttccgcactcgacgacaacccccg

SEQ ID NO: 72660 - DNA, 430 bp, Glycine max
tgctcccaaacgacatggccgcggaattagcgcggacgtctgtttaagaacaaaaagaaaaaacaaattatggcgtgccttaaatataaacgggcgaccctatttaaggatccaatcttactgctcaatcacacaaactaatgacatcttatatcattaagctaaatttaatatactggcctgcaatataacaataccactgctgctaaaacctctgcatatgccaaacttactcagacttaatcgcattcggctttttcactttgtactcatagatattaggccctaacgcacacccatatgaaacatcttaattcacatatggactaaagcaaatctacctatgacaaggacctaatatctatgactagctctattatactactcatgacctctacacttggtctagccctatcttccattactttag

SEQ ID NO: 72661 - DNA, 174 bp, Glycine max
aacgagcgaaccattgacacagccctctacagtgaactatccattgcttgaccgaaagggctgtcatttctgccagcatggaacatagagtggaacaaagtctcaacctttactcatccgagcaagtaactgagcgtgtgagcgatcactgatacctgcgccattatttccgac

SEQ ID NO: 72662 - DNA, 276 bp, Glycine max
tctttctgcatcttttattttaaatttcttatctctttcttgtaaattggatttgctttaatctaaatataacaaagttctcgtaaaaaaaaaaaaaaaaaaaaaaaaaaaaaaaaaaaaaaaaaaaaaaaaaaaaaaaaaaaaaaaaaaaaaaaacaaaaagcaaacaaacaacaaaaacacaatcttaatcgtcacacaaagaaaaaattaaacggcttcagtcgggtaacctacaacctcaacaacgccctgtggttacccacctcagaaact

SEQ ID NO: 72663 - DNA, 172 bp, Glycine max
aaaaaataaatattttataataaataaaataaaaaaaaaattaaaaataaaataaagatagaatataaatataaaaaaaaaaataataaaaaaaaaaaaaaaatttaataaaataaaaaaaaaataaaaaaaaaaatacataaaaaaaatcaatttttaattttaatttaat

SEQ ID NO: 72664 - DNA, 316 bp, Glycine max
ctaaacattcactcatgccactatcccaccacgcactctaaatgccgcaccacccactccaaagactacaccatcaactgcgaagcccacaccatccacgccaaaatccacaccaactactgcaaagtgctagtgatcatcttcgtctcctgcttaaccaccatgaaacaaagcctcatgccctaatgacacattaaagctaggctcttgtgctcatctattaggacttgcttacattattgatggaactcctccttccaacccgtgatatgcattgatcaaagctttggcggattatgaaacttcacttttccta

SEQ ID NO: 72665 - DNA, 237 bp, Glycine max
ctcactctttcgtccacgccagcgtcttctcggtctataaaaaacaaaaattaagatggacaataagcagcattaatcgctactaaaaacaattctacttctgctttagacagacaattattcctttcactcaaacctcttcctactcctataactaccataagcctctaccttcatcactatatgatcttacataacttacgtcattttcctttccattgcatccacctcttcact

SEQ ID NO: 72666 - DNA, 364 bp, Glycine max
aacacttactatgcaagtatcaccctcaccgttggcccggaatattgagtaagagatcagattgctgataaagatcggtctgaacacttcaaaatctgataagaacatttggtattcactgtgggatcgagataaattttcttcgacacaaccaacataatcgattaactaacttaacagtgtcatcagcaagaaatcaagggggagtattttatctaccttcaaagtagttgttcgcaatacattcttttattaaattttatcttggcatcaattgtcgaccttaatattttcgttcaaattcatagtttacaagcaggaaccttaattcagacttgcatagtagagatgctaatcacgcctg

SEQ ID NO: 72667 - DNA, 186 bp, Glycine max
ctttgataaataaaatattatttcttaataaaaaaaaaaaataaaaaaaaaaaaggaaaaaaaaaaaacaaaaaaaaaatgactacaacaaaaaaataaaaataaaatataaactaaaatacacaaacttcaaaataatatacaaaactaaataacaaaactctaacaaataaaaaatattaccct

SEQ ID NO: 72668 - DNA, 55 bp, Glycine max
cccacgcgtccgcccacgcgtccgaagaaaactaaggaaggaaagaagagtgagc

SEQ ID NO: 72669 - DNA, 334 bp, Glycine max
taattttgaggaggcaattctggtcattcccatcagtattccgttttcagatttcagtttcggtatgtttttttgggggtcgtttgggtactttggtaccaactttcccgtgccgaaaactttcgggaccctacccatttggggtctttccagagtaagaacttaaacccgggaaaaaaaaaaggacctttgcaccttgcactttgcgggtgtttttggaaatatcaacctgcatctgtcagagtggttttgttattttttagtgccatcactctctattagccattttgggaagttaattttccttgtgggatcattttgatttcacttatgc

SEQ ID NO: 72670 - DNA, 426 bp, Glycine max
cgcacactttcttcacaccattccgtttctccatttcccagcaatgtcacaacacattggaattcttccgcatccaccactctcctcaataaccccatcaaccaaacccgattcactacccctctgcttcagcttcggcttcaggttcgggttccattcctccgcctctccactgatttccctctcctgtggctgcgcacaccaaacccctccggttcggttgagtccacaacaagggtcatcgcaagaggaggaagagtctgttttcctttaccttcaacctatttccagcgaaaaccacttcgaccgtgtcctcgccaaggctcaaacgctcgacgaaggtgtcgttgtcgtttggatggcaaattggtgtagaaaatgtatatatttaaaaccaaaattggaaaagctggcaacagaatatta

SEQ ID NO: 72671 - DNA, 406 bp, Glycine max
gataactagaaacagtgtgatgaaaatgaaggtccttggtttcttcgttgctacaattggggtagcatggcaatgccatgcgtacgatatgttccctctccgaatgaacactggctatggtgcccgtactccggaggtgaaatgcgcaagttggaggcttgctgtggaagcacacaacatctttggctttgagaccattcctgaagagtgcgttgaagcaacaaaggaatacatccatggcgaacaatatagatcagactccaaaacagttaaccaacaagcttacttttatgccagagacctcgaagtccatcccaaggacacatttgtgttcagtatagatggcaccgtactctctaatattccatactacaaaaaacatggatatggggtggagaaatttaac

SEQ ID NO: 72672 - DNA, 366 bp, Glycine max
cccacgcgtccgcccacgcgtccgcccacgcgtccggcgagcgagcagtttcaaagagaggatttgggattgggaaggcgagggattgcgctgcgtctcttcctcttctctttcgattcatccctcattcataatcttccaatccaacaacctcagcctcacactcacacatacacacatctgaacgcgtatcgtccctcccatggcttcaaagcgcatcctcaaggagctcaaggacttgcagaaagacccaccaacttcttgcagcgctggtccagtagctgaagacatgttccattggcaagcaacgattatgggtcctgctgatagtccttatgctggaagtgtattcctagtcactattca

SEQ ID NO: 72673 - DNA, 449 bp, Glycine max
atcatttactgaactaggagtaccacacttttacacacgatacggagtcaatgaatctcagggaagtaccagaggcacatcaaaccttggacttgcacatgccaagggcatcgcattcttgatgatgggtgaacgttggacatgtatcataactaacactgatgggcctgacgctggcacagattccgatcaatgtggtgaaaatggcacctgtaccattgagggcgaaccagagacacaagaattgaatgatcacactgatgttgtgagcaacactgacaccgcagcatactgcaagtgtgctgaagggtggcgtcgtgtcatcttcaggactgactgccctgatgcaagctctggcaaggactatgctgaatgcgctcgacagagtgcttgcactatagatgatccatcgagctaagatatgcgatcaatgcatctatgatataatc

SEQ ID NO: 72674 - DNA, 103 bp, Glycine max
aaaaaaaaaaataaaaatttaaaattaaaaaaaaaaaaaataaaaaaacgggaaggttttaaccataatgaaaaaacgggactacactttaaaaagaataaaa

SEQ ID NO: 72675 - DNA, 359 bp, Glycine max
ctacacgctaatttaggatggtaagagaattaacaacttgattgtggcgaagatgactaggaggcagctgagggtaatgatagtgatgaagaatgggacgaagagcatgctttggctggagatcatgaaatgcctctggcatctgattcctacatcaactttgagaatctttcatggactcatttacaggatcttttagttaactgccattctaatgacattgatcgtgacaatgtgcaatcaaatgagagcgaagagcaatatcacatatacagcgaagataggaaggacaattactctgatgaatgattactggcatttgcagtcatcaaatacaccggaaatgtaatattctgtag

SEQ ID NO: 72676 - DNA, 451 bp, Glycine max
ctaaacaccaagcttccctcacgagtttgatggcttagcaccactctcttttccttaattgctttcgtcgcagtggatgttgtcgacacccacagcaacaaaaatcatcatcaccttgtgttcttgtctcttagccatggaccctttaacaccaaaagcttgatctttcttcccgttactcaaggtgagaaggatcataggaaggccacagtggtagggcagatggttgttaattaaacacaacaaccgagggttgtgtgctattatatgttttgcttgtgttatgttttgttttgtatagtgtatttgtgggagctaatggcctaggcctatttcctaatccccttgttgtaaatatttgtgacttgttatagtgggtattctcatcccttctttttttgaaaaacttatgtctcccaaatttgtatagttgatgttcttagtacccaca

SEQ ID NO: 72677 - DNA, 458 bp, Glycine max
tccatttccacatcatccaacccgattacctgtcactgagttacaatctagagagagagaagatatccaccgacctaattcttcagatatgtgttccagtcactatgtcccgccacttaattcagagttgaactgtaagaaaaactcgttcgttgaacagaatcaatgtgaccgagtctggaatcacaatggaaatggggtggtttctctgaaagaaggttcacatcatatctcaccaagttccagccaaccaacaatgaggttgatgggtaaagatgttccaattggtagaagcagccaagagatgcaacaatttgcgggagatgtttggcctgatgaggaatccagaagaaggaattattctgaatatgctgctttagatcattctttattggaaagaagttctaagcaggattgggtatctggttcacctttacaaatatcagctgacaatgtat

SEQ ID NO: 72678 - DNA, 440 bp, Glycine max
  unsure (1)..(440): unsure at all n locations
cccacgcgttcgcccacgcgttcgctcgttctaatctctgtctatctttctctgtgtctgtggcttttttcgtttccctccacagatctctgaaattccatcccatcaaaccctaagtccgggttgatcctatcggcttcgttaactatccatctccgaagccatttttttttcccaatttctgttgtttattcaaactccataatcttcactcattgatgatcctggaaccttcgcgagtctcccttttcttcatgggcctgcgccacccttacgatgcctgagctgcgttcccggccacacataagccgccttgtagacagcgcaaacgccaatccgaccactcagccagcctcgccgncggccgtcggagcctgtcgaaggaagccagccgtcgccgncgctccgaccgggaggaatcgcangctgaacaacgcgat

SEQ ID NO: 72679 - DNA, 299 bp, Glycine max
cggacgcgtgggcaggattgttggaacatgttgatcgatactttggcaccgatgattgaggcctgctgtttgtgtgtcttaaggtgcagacacctcttgagtacgcagctgccttgattaagagtatgacaatcagctaactacattgtattcagatattaaggattctgcaaaaatcagcatgattgtgatttgaggcaggccgattacaattatcaatgcaaacctactccaaggttgatatgcacgaataaatattaaatgtacagatcattcttagcatagagcaacctaaattc

SEQ ID NO: 72680 - DNA, 448 bp, Glycine max
cccacgcgtccgagaatggctcccaagggtttaacctttctggctgtgttaatatgcgtttcagcactgtcactgagtccttctgttgcgggggaagggcaaaataatggccttgttatgaacttctacaaggaatcatgccctcaggctgaagacatcatcacagaacaagtcaagcttctctacaagcgccacaagaacactgctttctcctggctcaggaacatcttccatgactgtgctgttcagagttgtgatgcttcactgttgctggactccacaagaaggagcttgtctgagaaggaaacagatagaagctttgggttgagaaatttcaggtacattgagaccatcaaagaagctttggaaagagaatgccctggagttgtttcatgtgctgatatcctcgttctctctgccagagatggcattgcttcgctaggaggtc

SEQ ID NO: 72681 - DNA, 97 bp, Glycine max
  unsure (1)..(97): unsure at all n locations
aaaaaaaanacnaaaacacttacgaatacgttctaattacacataaacatacaaaccaatcatcgaaaaggtataaaaagaaaacagggagcaaaaa

SEQ ID NO: 72682 - DNA, 453 bp, Glycine max
cccacgcgtccgcccacgcgtccgattgcaatcaaattagttcattctctttgcgcagttgcctacctctcctttcaagatgcacatcttcgtcaagaccctcaccggaaagaccatcacccttgaggtggaaagctctgacaccatcgacaacgtcaaggccaagatccaggacaaggaaggaattcccccggatcagcaacgtctcatcttcgccggaaagcagctcgaggacggccgtaccctcgccgactacaacatccagaaggagtcaacccttcaccttgtccttcgtctccgtggtggcatgcacatcttcgtcaagactctcactggcaaaaccataaccctagaggtcgaaagctctgacaccattgacaacgtcaaggccaagatccaggacaaggagggaatccccccagaccagcaacgtctcatcttcgccggaaagca

SEQ ID NO: 72683 - DNA, 458 bp, Glycine max
cccacgcgtccggagataactagaaacagtgtgatgaaaatgaaggtccttgttttcttcgttgctacaattttggtagcatggcaatgccatgcgtacgatatgttccctctccgaatgaacactggctatggtgcccgtactccggaggtgaaatgcgcaagttggaggcttgctgtggaagcacacaacatctttggctttgagaccattcctgaagagtgcgttgaagcaacaaaggaatacatccatggcgaacaatatacatcagactccaaaacagttaaccaacaagcttacttttatgccagagacctcgaagtccatcccaaggacacatttgtgttcagtatagatggcaccgtactctctaatattccatactacaaaaaacatggatatggcgtggagaaatttaactcgaccttgtatgatgaatgggttaacaagggcaatgc

SEQ ID NO: 72684 - DNA, 438 bp, Glycine max
gtttgttgatcgagataactagaaacagtgtgatgaaaatgaaggtccttggtttcttcggtgctacaattttggtagcatggcaatgccatgcgtacgatatgttccctctccgaatgaacactggctatggtgcccgtactccggaggtgaaatgcgcaagttggaggcttgctgtggaagcacacaacatctttggctttgagaccattcctgaagagtgcgttgaagcaacaaaggaatacatccatggcgaacaatatacatcagactccaaaacagttaaccaacaagcttacttttatgccagagacctcgaagtccatcccaaggacacatttgtgttcagtatacatggcaccgtactctctaatattccatactacaaaaaacatggatatggcgtggagaaaattaactcgaccttgtatgatgaat

SEQ ID NO: 72685 - DNA, 131 bp, Glycine max
accaaataaaagaaaatagtgtttctgcgttaaaaaacaaaaatagaactagggatctaaggtcaaactaaataggtagaaaaggacaagatatacaaacaaaactgtctatctttccatatgatcactat

SEQ ID NO: 72686 - DNA, 188 bp, Glycine max
tcgcccacgcgtccggaagctatgaggtattcattccttgccaaaggtgccaagcgagccccacctgttggggtattgtatgcagttgtggatgatattatagaagagagattgaaagttgagggagatggtgacaggaaaaacaagggtaagagttatgctgaattctatttttcatgaattgccct

SEQ ID NO: 72687 - DNA, 336 bp, Glycine max
cccacgcgtccgcccacgcgtccgtttcttttgcacgttttctagaagtttttgactcactttggtggtgttgatttcatggccacctcttagtcccagcatcgctgcgtttttgtggaattttgcaatttggattaatgggtttcgacatttgcgttctgaatggttcgtgcactcacgaatacgtgaccacttgcagctaaaacattgacctcctgtgatcatttgaaggaatgtgtagtcgtgaatcaattgtgttgctgtttgctggaaagtggtcactctgagttttagatgctattgtctttgctgggaagtattttatttgggccctga

SEQ ID NO: 72688 - DNA, 313 bp, Glycine max
cccacgcgtccggttggtttcgtttcgtgttcctgaggttatcgtttttgacctacaatggtagctgtgtttatagaccatcgaatgaaatgatagtaagaaattatcgcatcaaaaaaaaaaaaaaatcagcaaataaaaaaaaaacaaaaaaaaacaccacagcatagtacatagggacactgatgcttatgcgtgatccagagattgctccaccattacataaagaatacaacactaaacaactaccaaacatctttaaacctcattacatagacatcagcaacaagtgaaccttcactacaacagaacc

SEQ ID NO: 72689 - DNA, 444 bp, Glycine max
cccacgcgtccgcacaagccaagtgaaagtgagaaaaaataaaaatcaaagagcataatgtgagggatcattcacaagattggggagacccttcatgtgggagggcacaagaaggaggaggagcataagggtgagcaccatgctggagaatacaaaggggagcaccatggtgaacacagtagtgagtacaaaggagagcatcatggtgaacacaaagctggagagtaccatggtgagcacaagccagagcacaaagaggggttcctagacaaagtcaaggacaagatccatggtgagggcggcgccgtcgagggcgagaagaagaagaaggagaagaagaagaaggagcatggccatgagcatggccatgacagcagcagcagcagtgacagtgattaaactgctgcatcacctatatatttaaaaggtttatgggaccatagt

SEQ ID NO: 72690 - DNA, 366 bp, Glycine max
gcttggtttgtctataatttcgttgacccgtgtgtgtgaaattgaaaattggaaagggagttaggtctgtgatttgcagagcatatttttacgacatgactgctttgtgtttaggcaactcctcatattgatcgagtggtgtttaaagccctaaccttaaatcattggggtttgggttacgcacacctccatactccaattgtaactcctcagatgtatttttttttttattgcggagttgaaatgaggttcagtcatgttttggaggatcacatattttttttaagaagtgatcaaattattttgttcacccttaaattgaaaacagaacctaatgagattactcccttttttaaaaaataaatt

SEQ ID NO: 72691 - DNA, 418 bp, Glycine max
acgcccacgcgtccggtgtatttccctacctctcccttcaagatgcagatcttcggcaagaccctcaccggcaagaccatcacccttgaggtggaaagctctgacaccatcgacaacgtcaaggccaagatccaggacaaggaaggaatccccccggaccagcaacgtctcattttcgccggaaagcaacttgaggacggccgtacccttgctgactacaacattcagaaggagagtactcttcacctcgtcctccgtctccgtggtggcatgcagatcttcgttaagacactcaccggcaagaccataaccctagaggttgaaagctccgacaccatcgataacgtcaaggccaagatccaggacaaggagggtatccccccggaccagcaacgtctcatcttcgccggaaagcagc

SEQ ID NO: 72692 - DNA, 266 bp, Glycine max
aaaaaaaaaaaaaaaaaaaaaacaaaaaaaagaaaacaataacaaaaaacaataacttaaaaaaggaaaagtggttataataaacgtggacaggaaaccacttctagcaagtgaaccataaccagtcattgataatcaagggataccctctgcatccaatagtaaggtactacgtgtgtacacttaataactgttgaaggaggcctaacactagttatatatcaaaacccgactttctacaggattcaagcttacttactccttca

SEQ ID NO: 72693 - DNA, 197 bp, Glycine max
agagaaacaaaaacaatgaaggtttccattgccaagttccactcccttcccctatgtttttggcttctcttggccttcaacacgaaacccctcctagcagcagaaccagagccagtggttgataagcaagggaaccctttggagccaggagtagggtactacgtgtggccactttgggctgatgaaggaggcctcac

SEQ ID NO: 72694 - DNA, 411 bp, Glycine max
  unsure (1)..(411): unsure at all n locations
cccacgcgtccgggaaatggtgttttctgataacgcggcgtcaacgacgacggagagcgattgcggtgagttggagctgattttcggcggggaaatgtcgccggagactgagtgcggccaggtaaagtcggcgacgacgccggcggtgaagccgaagagtgttgagagagggactaaggttgtgaccggattagcctctcttctcaaggacaaaccatagaacaaaaaaaattgtttttttttaattctggatttttaaaaaattaaaatatanagagaaaatatcggatgaggcttctctttttttttctttttttttcccttattaagaatttttgttttcccttctttggttcgcaaggggaaatttgtaggaagtaacttttttctttctttctttaaattttgggt

SEQ ID NO: 72695 - DNA, 122 bp, Glycine max
gcgttcgatgataaccaggaaagtaaggttaaaatcatgtatgtagatgccaggcttacgtgttacaacgttcaggatatagtatgccgggcttgcttaatctagcatgctgggtgacatga

SEQ ID NO: 72696 - DNA, 424 bp, Glycine max
agcaagcgtacggcaacacgtctcacattgtcacagtatcagcatctggactttgatccttgccgtactcgagagactagctactctatgcacatgcagttatgatatacacacctagttcatttatatatctgaaatcacccatttcttagagcttactattcatagccataatgaaagtcaacccttaattgacacttggtaatgttccaagaaagaagttacttgggtatggcccttattcatcatgcgttctgagacaactaggttgcacgatgaagcgtggctggaagcaaaccatgggatggcgcaagagaggtccacaatacagctatgattttatcagttatcggcttaacttcactgatggtccttcaaacgaccatattcatatgcctccttatcttgcatgaatatatatctt

SEQ ID NO: 72697 - DNA, 462 bp, Glycine max
gtggaaaactcatggagcctattggaaactcttatgagtcttctttttccaaagatgaaagagtggaagctgcacatcttcttgtggaggagttctggttctttgataacttattaaagataacaccaaggatgacaaggtgtcactctgagccttacccttcttccactggcctaatcagccccccagattttttggtgaaggactcaaactcaaactcatcatcaccaagtaaaccactaaacaatggtgctattgtccatcctaagatccagagagcaccatacatgccaccattgagactgagagaagaagaagaagaccaaaaaggaagcagttctacaagaagcaaattggttcaccaaccaacagatcctgttgtgtctcatgcagcaagtaaacctcattgtgcacatatgaaaggacgtcataacagtgattgcggtagaaggaaaagcaaac

SEQ ID NO: 72698 - DNA, 433 bp, Glycine max
agtagttgagaactaagaaggagaagcaaatggcttcctcaatgatctcttgcccagctgttaccactgtcaaccgtgccggtgccggcatggttgctccattcactggcctcaagtccatggctggcttccccaccagaaagaccaacaatgacattacctccattgctagcaacggtggaagagtgcaatgcatgcaggtgtggccaccagttggcaagaagaagtttgagactctttcctacctgccagaccttgatgatgcacaattggcaaaggaagtagaataccttcttaggaagggatggattccttgcttggaattcgagttggagcacggcttcgtgtaccgtgagcacaacaggtcaccaggatactacgatggacgctactggaccatgtggaagctgcctatgtttggttgcactgatgc

SEQ ID NO: 72699 - DNA, 97 bp, Glycine max
tttctttatatgggttgtgacaatgtaatcttattgtgatttgtttggttccctggtttggctcgcatttatggttaagctgtagcttgaatttaaa

SEQ ID NO: 72700 - DNA, 261 bp, Glycine max
ctcttttctttttcttactacttggttttctttcttaccaatctaaatctttgcttcgtgctcttcctcttaccagggaacctttttcaaggacaattcttggttccccaagtgcctaaattcctggggtataactcctggtctaatcttccttaacggacttcttctcttaaaaggtgccaacttgctttttgacccgaaccggtggggggacaaaccataaaccggaccccgggacacgttttcccacacaagctttta

SEQ ID NO: 72701 - DNA, 295 bp, Glycine max
tatgctgagcatacgcttcacgagaggactacgcgaactagcctacctggccggagcctcccatctagctcaggacgaagtaggcaatgcgtctcaagccagacgactttacagagacatcagcggactggttcatacgatctactatggtaacggagtcttagcgttcacgagacacctatatatgccggaattcactctgtgtaaagatcactgtatacggctgtgacgatcatgatcaggagctgatgacattgctattacatggctagaacgaacatgttctgcaaagctt

SEQ ID NO: 72702 - DNA, 269 bp, Glycine max
gcaagctcatcctagagttttaaaaatggcagcagcctcctccatggctctctcttccccagccttggctggcaaggccgtgaagctgggcccatcagcccccgaagtcgggagggtcagcatgaggaagaccgtcaccaagcaagccttctccggaagcccatggtacgggccagaccgcgtcaagtacttgggcccattctctggcgagcccccgtcctacctcactggcgagttcccaggtgactaccgctgggacactgctgggc

SEQ ID NO: 72703 - DNA, 459 bp, Glycine max
  unsure (1)..(459): unsure at all n locations
atgaaaatgaaggtccttgttttcttcgttgctacaattttggtagcatggcaatgccatgcgtacgatatgttccctctccgaatgaacactggctatggtgcccgtactccggaggtgaaatgcgcaagttggaggcttgctgtggaagcacacaacatctttggctttgagaccattcctgaagagtgcgttgaagcaacaaaggaatacatccatggcgaacaatatagatcagactccaaaacagttaaccaacaagcttacttttatgccagagacctcgaagtccatcccaaggacacatttgtgttcagtatagatggcaccgtactctctaatattccatactacaaaaaacatggatatggggtggagaaatttaactcgaccttgtatgatgaatgggttaacaagggcaatgcaccggcactgnccgagactcttaagaattacaac

SEQ ID NO: 72704 - DNA, 61 bp, Glycine max
tcgcaagctgacattcaatgtcacaaatttgaatatccatcaaaaaaaaaataacagaggt

SEQ ID NO: 72705 - DNA, 405 bp, Glycine max
ctgattcgtacattctttattggtcctcttgctcctagtctcacgtgaacaaagaacatggtcattatggtgatggtcggattgggactattggacttactcgttgccggtgtttcattaatcattggtttggccttcattaccttgattgcttccattctctgctgccacagcgttattcaacaacaccaaggatgtcttgtactgagtgctgaatcctcaaatcgatgcacaggagacattcgtgtatatcattgatgcaaacttggaaggaaaatggagatggagacaaggcttcgaatacatgagtaacattgaccaactatgctacacctagagacaccattttggaatacacttgatacctatttcagtttgaatatttccatagggcatcatgcatat

SEQ ID NO: 72706 - DNA, 454 bp, Glycine max
  unsure (1)..(454): unsure at all n locations
cccacgcgtccggatcgagataactagaaacagtgtgatgaaaatgaaggtccttgttttcgtcgttgctacaattttggtagcatggcaatgccatgcgtacgatatgttccctctccgaatgaacactggctatggtgcccgtactccggaggtgaaatgcgcaagttggaggcttgctgtggaagcacacaacatctttggctttgagaccattcctgaagagtgcgttgaagcaacaaaggaatacatccatggcgaacaatatagatcagactccaaaacagttaaccaacaagcttacttttatgccagagacctcgaagtccatcccaaggacacatttgtgttcagtatagatggcaccgtactctctaatattccatactacanaaaacatggatatggggtgggagacaattaactcgancttgtatgatgaatggggtaacaa

SEQ ID NO: 72707 - DNA, 203 bp, Glycine max
ctcaagcgagccaccacacgagccggtacggtgcgaacacgcgatccaacaatcactgccgggtcatattgtaactggagaacggctccgtctttctgatccttaggtccttctcatcgaatcatcatcaatgatactattacatcggaataggaccatgatgtgtccgtagagactgggcaatcacattcaaggatctagga

SEQ ID NO: 72708 - DNA, 272 bp, Glycine max
atatgccatcaactatttcgctataaggttataatgtggttatgcaaaaaaaacaaacggggacaaaaaaaaaaaaaaaagagaaaaacctaaaaaaaaaaacaaaaggccgaccgcttctaaggttccaacccttcaatacccttgctttacccgtcctaaatcttttgcagcacaacctacatttaggccactggccttaatgcttacaacgtcctgaccggtaaatccttgccaccactttacttactcgatttgcaacgcaacccccc

SEQ ID NO: 72709 - DNA, 445 bp, Glycine max
gatcgagataactagaaacagtgtgatgaaaatgaaggtccttgttttcttcgttgctacaggtttggtagcatggcaatgccatgcgtacgatatgttccctctccgaatgaacactggctatggtgcccgtactccggaggtgaaatgcgcaagttggaggcttgctgtggaagcacacaacatctttggctttgagaccattcctgaagagtgcgttgaagcaacaaaggaatacatccatggcgaacaatatagatcagactccaaaacagttaaccaacaagcttacttttatgccagagacctcgaagtccatcccaaggacacatttgtgttcagtatagatggcaccgtactctctaatattccatactacaaaaaacatggatatggggtggagaaattaactcgacctgtatgatgaatggttaacaagggcaat

SEQ ID NO: 72710 - DNA, 289 bp, Glycine max
gtggtataggaggaggagttggtagtggtggaggtgctggaggaggcattggaggtggtgtaggaggaggaattggaggtggacatggtggtggagtaggaggaggaattggaggtggtggaggagcgggaggaggctttggaggtggagcaggtggaggagctggtggtggctttggaggtggtgcacgtggaggagctggtggtggctttggaggttgtgcatgtgggggtgctggtggtggttttagtagtggctggggtttttgaacttaaatatagttttaatt

SEQ ID NO: 72711 - DNA, 321 bp, Glycine max
cacatgtgtcatgacacgcatcctgacacgctgtccaacgacatgatctaccgctgcagtgcttatgctgacgtatcagggtgaattccacggactagtgatcgcgatggaggtcacgctcggtgactcttaatcataacacaagtggtacacttgtgtaccttacacccaaggagattatgatactgagagattcatgctttattgacatggccataatattgactatgacgcgaaggtattatccgcttcggatcattacacctgcagaatgtactgattagatggacacgacgagagactcatgccagaagatctata

SEQ ID NO: 72712 - DNA, 308 bp, Glycine max
  unsure (1)..(308): unsure at all n locations
cccacgcgtccgcgagataactagaaacagtgtgatgaaaatgaaggtccttgttttcttcgttgctacaattttggtagcatggcaatgccatgcgtacgatatgttccctctccgaatgaacactggctatggtgcccgtactccggaggtgaaatgcgcaagttggaggcttgctgtggaagcacacaacatctttggctttgagaccattcctgaagagtgcgttgaagcatcanaggaatacatccatggcgaacaatatagatcagactccaaaacagttaaccaacaagcttacttttatg

SEQ ID NO: 72713 - DNA, 139 bp, Glycine max
acggccactcgtccgtacatcgttggtgaatgttataaagcctgacaagatgtttggccctcggtagagttgacaaaggtccaagacgtacataatgctacataatgccgtgaccagtgactaagctgacctatctatc

SEQ ID NO: 72714 - DNA, 346 bp, Glycine max
gtgagctataagctattctatcgggaggataatcttagatgaagaggtgcgcatgatcttgagcaagttctacaagaacggccatgccatgatctagggctaccaagctgaacgatgatgataatgaaaactggcattcaagacactcttaggagtgaacccacgagcagactggtcggaacccacggatccttgacctgaaagacattcctgagtagcattggaaccaacgcaacactacgtatctgccgaacgcgttagatctgaccctactgcacatgaccggcctgatctcttttatggtactgcactccaagatgctcacgacgacgtagatatgctccct

SEQ ID NO: 72715 - DNA, 242 bp, Glycine max
  unsure (1)..(242): unsure at all n locations
cccacgcgtccgcccacgcgtccgttctctctcacaccgctttagaaactttcctaaaccgtgctctgcattttcccttgtctcttcctttctctctctacaaagagtgtgtgtgagagagagaaggatntggaattttggataactagagcgaaagcgtgacaccaccaaaaaccgaactggtcccagaactctctctctctctctctccttccaccaatcaaattccaattccaaaccct

SEQ ID NO: 72716 - DNA, 88 bp, Glycine max
tttttattacaattacatacactaagtttcagaaaagacaatgctatcctataaacaatattggaatcgcgaacacacatatacctca

SEQ ID NO: 72717 - DNA, 208 bp, Glycine max
aaaaaaaaaaaaaaaaaaaaaaaataaaaaattaaaaaaaaaaaaaaaaaaaaacaggaaagggacaataaaaaaaaacactaataccacaactaacttgcaattatacccccaattttaaatagccactcttgaataaacttaactggtcggcaacccaaaatgccctaggctgaaaaaccccttgggagctccatcttactccctt

SEQ ID NO: 72718 - DNA, 448 bp, Glycine max
cacaaaatggtttcacattcaataatgctagttcagtagtttcattgtgagattcagcattgcagctgtttgatttgttcttctctacactacttttgttgaggttgttgttacttgtgaacagtgcttcaaaccttcacattgcctaaactaagagcaatgcatcacaaaatggtttccatttcattaatgcttgttttttttttttttttattcgtaggaatcaaatatagtataagtggatttacaacactcacacgctgccaatgagctggatccccttggtattaatgctagtttcactgtgagattcagctgtttgatttgttcttctcaactacttttgttgaggttgttacttgtgaaaagagtgcttcaaaccttcacaatgccaaatacatatttcccactaaggtgggagagcactggggaccaatggtggtatgca

SEQ ID NO: 72719 - DNA, 175 bp, Glycine max
ctcacacgttcgctctttctctctctgtcttagctatgcaaacctagagactctactctgggcctatgactatccctaaggcatcctcctacatgaccatcggcggttaacgtggccgcctcatcaccatcgagctgtatacccacgtgactgatagcaccttcgagaactttcg

SEQ ID NO: 72720 - DNA, 356 bp, Glycine max
  unsure (1)..(356): unsure at all n locations
ataaaataacttcattatatataaaactaaaaaaagtacaatgacaaagatgattgactaattagtagaacacccctctcatacctgtttaggaaagggagtaacatataggtttcttcatgaaattaataattgaactaatttcatggtagagaacaagatggtattagtctagtgacaacccaactgtagtaggtgctgcccaaaacatagaaatggccatatatatatatatatatatatagtttatagttccactttgagtagtatatatgaaattgtaggtgaaattatgcttatattttcaattttcaggggcatttgggtcctncacgcttggtcttncagttattgta

SEQ ID NO: 72721 - DNA, 417 bp, Glycine max
gaattttccaggagtgccagtgtctggaatattttgtggtggagaaatggtgcgtccttgtaccactgtgattggtcaatgtgaaggagcaagccccattagttgctgtctgcatgtgtacagcactgtctacttagcaatgtcgtatactcccccctctgtggaagattagctgctggtcatatatatatttttttttcaaggtgtaaatttcttatttcactaggatgcctttttattctctgccgtggacatggatctgactatcttttggcgtatcagatagtttatagtatttaatggttatgaaatttatgctatgctatatgcagtttttggttattattaaagaaaaagtgacttcacaccttctgaagccgaagttctagaaataagaagctcaagaggatgtaattt

SEQ ID NO: 72722 - DNA, 84 bp, Glycine max
gggtaagtcacctaagacactccacgtacctacgttgttgactcttaccggctttaataaatcttctgcccttgttccatattt

SEQ ID NO: 72723 - DNA, 211 bp, Glycine max
  unsure (1)..(211): unsure at all n locations
taaaaaaaaaaaaaaaaaataaaaaaaaaaatttaaaatttaaaaaaaaaaaaaaaaaaaaaagaaaaaggtaaaaataaaaaaaaaaaaaaaaaaaaaaaaaggacattacattgttagattcctatatgggcgtccgttttaatgatcccaagtttccttccccttgcttgccactttttagctcttttttaggngaacttaaattaat

SEQ ID NO: 72724 - DNA, 83 bp, Glycine max
ataacattccgttatttttgctggtgtttgtctttgttttgtatggatatcatcattgttgcgaaattacttgtgttaattct

SEQ ID NO: 72725 - DNA, 266 bp, Glycine max
cccacgcgtccgaaaaaaaaaaaaaaaaaattataaaaaaaaaaaaaaaaaaaaaaaaaaaaagaaaaaaaaaaaaaaaaaaaaaaaaaaaaaaaaaaaaaaaaaaaaaaaaaaaaaaaaaaaaaataaaaaaaaaaaaatataaagaaattaaatacatacatttttatcttctacattatttcatgcttaatttattttctaatcggtttaaaaaaaaattatttcttctaaaacttaaagatatttccatattaaaaacttta

SEQ ID NO: 72726 - DNA, 369 bp, Glycine max
gggccgacccactcgtccgaactggccataaaaccctaaaatagagtgctatacgatagataccagttttgtagttacaggtctaggttaatctcaaccatggtaatgcagacgacactgatgagtttgattctgttgctcgcgttatatactatagatgtgagtgcttggaccggtgatatccatcgaagagtagtttgacacgtttgtggagaatcttctcttggacctgaataccatattctagaatgtgctgacgtagctgttctctgcatcaccaaatctggtgaaactctaaattatcacgcattcactgatgctaaagggatatacacggttgccgaaacaattctctacagtgatcactgg

SEQ ID NO: 72727 - DNA, 302 bp, Glycine max
aactagcgttcgatcccatcggtagcagcgctttacgtaagataccagttttgtagatgtgggatctgctcaatctcttgcatggaatcgcatatgactctgatgcgtgtgactctgttgatggtgccatctactttgtatgtgagcgcttgtactaccaaagtccatggatgatctgcttgcgacgtatgcggaaatgcttctgttgaacctgaagaccatactcttgaaggtgctagggactgcagtctttgcataagcacttgtggggaagttctaaattatcaggcattcactgatgc

SEQ ID NO: 72728 - DNA, 274 bp, Glycine max
tcggctggatgagctgaggggctcaggccctagttggcgtgcgacactgacaattcaggccttggttgatttgagccgtactgagcttattgatctaatttcgatctgagttgtataatgtctatttaacgcaatcttgatgatgagacttatatctacattttcatattatcatgctgcttatgttgatggaccgactctgattgcttagactattaaaggaacaagctatgggcagatgctttagtgcattcaagcagacgtaatcggtcgt

SEQ ID NO: 72729 - DNA, 249 bp, Glycine max
gccatttgtcttggaaaaacaaattgtattgtaagtgcttggtgactagtttattggaatgttagtttgttcaaaaaaaaaaaaaaaaaaaaaaaaaaaaaaaaaaaaaaaaaaaaaaaaaaaaaaaaaaaaaaaaaaaaaaaaaaaaaaaaaaaaaacaaaaaaaaaaaagaataaaactatatacattcaaatactactaggattacatagacatgtacaaaaaccagatataaaccaacgcataaa

SEQ ID NO: 72730 - DNA, 75 bp, Glycine max
atttaattttgataaaaaaaaaaaaaaaaatttaaaaaaaaaaaaaaaaaaaaaaaaaaaaaggaaaagggaaaa

SEQ ID NO: 72731 - DNA, 247 bp, Glycine max
aactggcgttcgattccatcggcagcgcgcttaacgtatgagtccagaacgagagagatggtacggtaaatctctcgcctgggatcacatctgactcagaatcgagtgccgcagttcacggtgccatctaacgtatatgtgagcgcttgtactaccaatgtctatacctactatgcttacgacgtctgcggaagttcttaatctgaacctgaagacgatgctatagatagtgctaggatctacactc

SEQ ID NO: 72732 - DNA, 206 bp, Glycine max
tacaatcgttcgggaacgcgtcagatacattttagatctcttcctacaatggcaacctactggctcctgatgctccactcgattacaataaatagccgtacactgactgcctcctagaccatgatcctacgtctgatgtaccattttgacagcaccttaatcgtcgactcctcgctcacaaatcgccctataggccgcatgtttaa

SEQ ID NO: 72733 - DNA, 192 bp, Glycine max
tcccactcgttcgcaatttttgaaataaaattttaaaattaaaaacaaaaaaaaaaaaaagggacaaaggaaaaaaaaaaaaaattaaaaaacatacaaaaaaataaaaggtcgtcctttttataagatccaagcttacttactcttgcatgcaacttcataactcttttattgtgcgacctaaattcaatt

SEQ ID NO: 72734 - DNA, 262 bp, Glycine max
gtcggacgtccgtatacctcgtggatgctatctacgctgagccttggattgacaaagcaggtgtcgagtgatactggctcttggcatactacttaactcaatgcctggggctcccgtaacattgccacacaacttcaatgtaggctccggtcacatatagaacgttgtgcactaatcttacacagtcatgggaagtgcataacctaaacctgttccggagactggtagaagctcatatacctaatctcgctcatgattcact

SEQ ID NO: 72735 - DNA, 169 bp, Glycine max
gcctttataacttaaacttcatggactctgatgacttgctttgcttgtaacgttaacctgcgattgcataaactttcaatacgctcagtgctcacacttgaatcacaagctttggttaagcacttgacgctagagacccattgacagcctcagctgtgtccaacacatt

SEQ ID NO: 72736 - DNA, 402 bp, Glycine max
gttgatcgagataactagaaacagtgtgatgaaaatgaaggtccttgttttcttcgttgctacaattttggtagcatggcaatgccatgcgtacgatatgttccctctccgaatgaacactggctatggtgcccgtactccggaggtgaaatgcgcaagttggaggcttgctgtggaagcacacaacatctttggctttgagaccattcctgaagagtgcgttgaagcaacataggaatacatccatggcgaacaatatagatcagactccaaaacagttaaccaacaagcttacttttatgccagagacctcgaagtccatcccaaggacacatttgtgttcagtatagatggcaccgtactctctaatattccatactacataaaacatggatatggggt

SEQ ID NO: 72737 - DNA, 342 bp, Glycine max
ctcgattaaggaagaaagagatcgggaggtttagaagaagatttaggtatgtaacacttttgttcctttgttccctctctttatatttttttgatggtacgcacttagtttctacatatcatgctttgtacagtagtgtcaaaggcatcatgcccttgcttgtgtaattaaagactaaccatcaacctgtacaaacatgacttttaccttaataagtcttgatcgaactaaaaaaaaaaaaaaaaaatatagataataaattacaaaaaattatacaatacaaaaatcatatactaaaaataaaattatgataacaacatttaatttcacatgaaaattaca

SEQ ID NO: 72738 - DNA, 437 bp, Glycine max
caagtagttgagaactaagaaggagaagcaaatggcttcctcaatgatctcttggccagctgtaccactgtcaaccgtgccggtgccggcatggttgctccattcactggcctcaagtccatggctggcttccccaccagaaagaccaacaatgacattacctccattgctagcaacggtggaagagtgcaatgcatgcaggtgtggccaccagttggcaagaagaagtttgagactctttcctacctgccagaccttgatgatgcacaattggcaaaggaagtagaataccttcttaggaagggatggattccttgcttggaattcgagttggagcacggtttcgtgtaccgtgagcacatcaggtcaccaggatactacgatggacgctactggaccatgtggaagctgcctatgtttggttgcactgatgcttc

SEQ ID NO: 72739 - DNA, 227 bp, Glycine max
tcaaaacttgtcccaaaaatcatgctctgcgtcgtacctactcttcccttacatataattgaaattcatctttatcctatactttaccgctttcattttaatctcatgcttctacagttccttcaaaacccaaacttgaacttcttgcttattgctcttgtaagcaaatgacatcctctccctgtgtttctgcttccttgtcatacgctgtctgattccgtgactgg

SEQ ID NO: 72740 - DNA, 391 bp, Glycine max
cccacgcgtccgtgtatttttagtttttgttttaatgtttttcaggatgtttgtgcctcacgtagagttgacaaaggtagatgaagttgataatgctagagaagggtgtggtgtggcacttagcttagctatttatgattgcaatttttccaaaaatggaagtttggattcgttgatgttgaccggatctgaataccccatttcactatcaccaccttttagctataggtcatggcctgcatcggctggatttgctttcccttttggcttataagggtcattaaggatggaaaatggcttcctttcacattcttaaatcctattcaatccaaaaagcaagggcttatttaagtgaaggatgaaaaggtttggggtggcagaagggttggaa

SEQ ID NO: 72741 - DNA, 327 bp, Glycine max
agactatctttatataataatataaataagaataaaaaaataaaaaaaaaaaaaaaaaaaagagaaaaggaaaaaaaaaaaaaaaaaaaaaaaaaaaaaaaaaaaaaaaaaaaaaaaaaaaaaaaaaaaaaaaaaaaaaaaaaaaaaatacaaaaatatatactataaaaaacaaaaaaattacacataatattcaagctaaaatattaacagtaaaatccataaatgagcataaaatgaacataaaaataaaacacttgatatcaataaactactgtaaaaaaaacttacatacttaaaaaaagagttctataaaaaatatgtctt

SEQ ID NO: 72742 - DNA, 454 bp, Glycine max
  unsure (1)..(454): unsure at all n locations
tgttgatcgagataactagaaacagtgtgatgaaaatgaaggtccttgttttcttcgttgctacaattgtggtagcatggcaatgccatgcgtacgatatgttccctctccgaatgaacactggctatggtgcccgtactccggaggtgaaatgcgcaagttggaggcttgctgtggaagcacacaacatctttggctttgagaccattcctgaagagtgcgttgaagcaacaaaggaatacatccatggcgaacaatatagatcagactccaaaacagttaaccaacaagcttacttttatgccagagacctcgaagtccatcccaaggacacatttgtgttcagtatagatggcaccgtactctctaatattccatactacananaacatggatatggngtggagaaatttaactcgaccttgtatgatgaatgggttaacaagggcaatgc

SEQ ID NO: 72743 - DNA, 446 bp, Glycine max
ggtttcccctcgtctccgggctcgtttcgttctcgaataatcgatctacgataatgactcatatcctttgatccgttgaaattttactgctaatttttcacaaattgtcgttaatttagggatagggttgactttctgttagaaaattcgaggaaaaaaataaatcacatttcaccctccgctacccccatttgttgtagatctttttggttttaccgcaattaatagtttcattcagtttggatccatggaaactaacacaagaataacacaattttaataattatacctttttttgtccttttcttttcaaattttgtttcctttgccacaatacagacggcgtattcgtggtttggtttgttaagccgttttgcttgttattgctttcaattaactctaaagcgcacgcggtagccagagggatcgtgatcgcgaaagggctc

SEQ ID NO: 72744 - DNA, 128 bp, Glycine max
gtcaactataatctaggttatcgctaggagtatatgaagacaggtgcctgcctcattgctgcagaagttcaccatacatggtcatgacatagcgaatgctaccataggcaccctcttgacataaatac

SEQ ID NO: 72745 - DNA, 411 bp, Glycine max
ctcactcgttctactgaagtatctactatactatcaagggagcgaatgaaggagagtaagaagagagctaagaagattcgtgcagttgctaagactgctgcttacgatgctgccaaggctggagaaatgaaacgtgctgtcaaacatcctgtgttgatttgatggtgctattgctatagggacattctaatggtcattatacttcctattagctatctagaacgagatatgttgctgtaagtgatacattaattgatgatcactagagatataactcgagatctatcactggcacgatcaatgttgagaagctagttgaatgctatgtactaaaatgtttactattgtgattaaacaattaaataaacaattaaaaaaaaaaaaaaaaagtaaaataatgaaaattgaatt

SEQ ID NO: 72746 - DNA, 371 bp, Glycine max
cccactcgtccgtgataaaattgttgcaatatccccaccatggcaaccaacttgtgaagagagaggctcaacaaattattgttgcagactctgctatttagtttctgttttagttaattattgtaatcttgataaaatctcatagttgttgagatttttagcaaatttcaagttgtttgtaaattgattctcatttatggaatatattgccttttgttttcaattctatggcccaatttttatcttaaaaaaaaaaaaaaaaaaaaacaaaaaaaaaaaaaaaaaaaaaaaaaaaaaaaaaaaaaaaaaaaaaaaaaaaattaaacaaatacaaaaacaaaaaccatctaaaaaaatatcacccttatatt

SEQ ID NO: 72747 - DNA, 287 bp, Glycine max
cccacgcgtccgtgcaaagatgggaaaattaaaaagctatatttcagtacttgctgtgacatttgtattggtgataggagtagctgaatgcagaaaaataaaagaaaatgagttagttgacggttttggaggaggtggattaggtggtggtggcggtggaggttttggtggaagagctggtgcatgatgaggggtaggaggcggacatgatggaagcattggatgacgtttaagtggatgtggttgtgttgcaggtggatgattggaacattatgcaggagtttaca

SEQ ID NO: 72748 - DNA, 376 bp, Glycine max
ctggtttctttcgtcatgctctcagtattctcttgctctttaacttgatcttggtcttcttcggactagtatttattgcttacgatttggaatagtgacaagtaaagacaaatcacaactcagggtcatccaattccaagaatagagttagagaagattgattcaccaaaaaaaatggttagaggagaatgatgacaaagagagttgacggagatgaacaaatcaagtggcccagtgcctagagaaaaaataaatttaccaacttggctttgaccaatttgcacgctcatttgactcttacgaattttcattttaaaaacttgatgttgtgactttgtaatgtcattcatattaggaaaatcatcctcttgcatac

SEQ ID NO: 72749 - DNA, 457 bp, Glycine max
  unsure (1)..(457): unsure at all n locations
ggacactgttctatctactaaatgattcttgcccttgcttcttaccgcaagcataagttatgcttgtgttttccttggcctttttctaatttaagagttatttatggacttttaaaaaagaagtagatccgtgtggtccttgacacttttggccttcttggggggagtagccaaaaaaaggtgccacccgatgctattgaactaacaggccttattctacatccaaaattgatacatttttgtacctactcatccttttcttcctcatcatcattttccacatacctcagccaatcatgaggttttttttttagtttttctcttctcacaggctttcttgatgaagttccctactctgggaggatttttcttacaagaatttacatatccccttgcccatttggcatctnctagctctaggtaagggtagaagactagaaccctacatctgatctga

SEQ ID NO: 72750 - DNA, 434 bp, Glycine max
cccacgcgtccgcccacgcgtccggccctgttgaccatgagaattacaagcatgcatctagcggtttcactgtccaccagaatagtggtggagctgtggggattgaaatcagtggattcagtgaggaagaggttccactttcaaaattgcttgaactggtgtttgaagagggacttgaagttgttaattgtctttcaaccaaagtcaatggcagattactccacagtttgcagtgtgaggttgacaattccggcagtgtagatctatctgagctgagaaggaaattttccgatgtcattccatcacttcgttgttctgcgtaactttgtggactggaaattaacacataacacatatatctgccctttctaactggttcgtaatttggttgtgtgagtttgcttgcactgtatatatttggaacccctttgact

SEQ ID NO: 72751 - DNA, 191 bp, Glycine max
cccacgcgtccgactagaaacagtgtgatgaaaacgaaggtccttgttttcttcgttgctacaattttggtagcatggcaatgccatgcgtacgatatgttccctctccgaatgaacactggctatggtgcccgtacttcggaggtgaaatgcgcaggttggaggcttgctgtggaagcacacatcatctt

SEQ ID NO: 72752 - DNA, 208 bp, Glycine max
ccaccaccaaattatcctcatccaaacaaggcacaatttccatgtccctaaccccacccccgtacgacctccagtccttcaaattccccatccgccagctcccttccccgatctcaaacccctccccgccgcccaagttccggaaggtcctccgggactctggcgacagcggcgaggtggtgcaggacccgtggccttacggccctcc

SEQ ID NO: 72753 - DNA, 295 bp, Glycine max
gagataactagaaacagtgtgatgaaaatgaaggtccttgttttcttcgttgctacaattttggtagcatggcaatgccatgcgtacgatatgttccctctccgaatgaacactggctatggtgcccgtactccggaggtgaaatgcgcaagttggaagcttgctgtggaagcacacaacatctttggctttgagaccattcctgaagagtgcgttgaagcaacaaaggaatacattcatggcgaacaatatagatcaagactccaaaacagttaaccaacaagcttacttttat

SEQ ID NO: 72754 - DNA, 279 bp, Glycine max
tctgcactgtgaaagggatagaatcttgtggtttctcgacatctttgtgtatttatggctatgatctttttttccaagaagttcatcatcttgttgttccatgcaatttaaattgagttagttagctggctagaagtagcttttgtgtttgggaatactcgtgaggggtcttcattttgtataattgtttatttgtgggttttgatattaaaaaatatactagaaagataacataatgcaaaataattaaattaaggctaagattatatgatggatgtc

SEQ ID NO: 72755 - DNA, 331 bp, Glycine max
tcatgtcatgccaactcccctcatcaatccctttcatttcattctcaaataccttcaactaaagctatcctaaatattccaaacacattcttccaagtccatctatgatttaatcactttgtccataacatcttccataatgagcctattccataaagcctaccaaacaatctctcaactgatctccttacactaaccaaactcttataatccacactcataccagttttatacacatctcctcaaatcatcttcatctgaaaacaccatctccctacattcaacacccatctttactacttctgcatctctttcaaaacacatttattat

SEQ ID NO: 72756 - DNA, 456 bp, Glycine max
cccacgcgttcggatcgagataactagaaacagtgtgatgaaaatgaaggtccttgttttcttcgttgctacaattttggtagcatggcaatgccatgcgtacgatatgttccctctccgaatgaacactggctatggtgcccgtactccggaggtgaaatgcgcaagttggaggcttgctgtggaagcacacaacatctttggctttgagaccattcctgaagagtgcgttgaagcaacaaaggaatacatccatggcgaacaatatagatcagactccaaaacagttaaccaacaagcttacttttatgccagagacctcgaagtccatcccaaggacacatttgtgttcagtatagatggcaccgtactctctaatattccatactacaaaaaacatggatatggggtggagaaatttaactcgaccttgtatgatgaatgggttaacaaggg

SEQ ID NO: 72757 - DNA, 313 bp, Glycine max
gaaggaacgaattaagaatattggaagagttatgttgcgtcgccaactcatcggaaaaatttgaatttctggaaaaaaaaaaaagaagccattattaccaaccaccagcgccaccagggccaaagttaaaagttccggtcctgttttaaggaccccacagcaccgttaaacgttcggttttggttttgcaaagaccagaccaaaaaaccggaccaccattacaaacaccattttttccaaatgtgctcgttctcgggttcaaaccacattttttctcttcatatacactttctctctcctcctcttttttttt

SEQ ID NO: 72758 - DNA, 362 bp, Glycine max
tccgaaccagaatttgggtttagtcgatggtgcttgccatggtggatgccacctgcggcgatgggtgtgaactttgacgacgacattaagatccgctccaacggcgatggcgctgttcgactgaggcagagagagtcaaagagatagtcgaacattgttcgagttctagatcgacgacgccggtggtccgagcctccgaggtcgacggcgccggagtttggacaacagagggctaactcgatgatgtctactccaatatcaatgatatagagtcctgggaaatggagggtttttacttataaaaaaaccacatattgaaagttttatttcgctaatatcttggttcagtgaagattctaata

SEQ ID NO: 72759 - DNA, 188 bp, Glycine max
taacaatgttggaaataaagttttggggtccaaaggaagtaatgcttcggtacaccagttttaggtgcaaatagcaccagacaaggttcctgaaatgactctttggggaagtaaattggaacctggtcatttatgactttgaaaatttagtttgaaccttttaaaatggcctaataggtgatatatat

SEQ ID NO: 72760 - DNA, 305 bp, Glycine max
cccacgcgtccgatgaaaatgaaggtccttgttttcttcgttgctacaattttggtagcatggcaatgccatgcgtacgatatgttccctctccgaatgaacactggctatggtgcccgtactccggaggtgaaatgcgcaagttggaggcttgctgtggaagcacacaacatctttggctttgagaccattcctgaagagtgcgttgaagcaacaaaggaatacatccatggcgaacaatatagatcagactccaaaacagttaaccaacaagcttacttttatgccagagacctcgaagtcca

SEQ ID NO: 72761 - DNA, 433 bp, Glycine max
gataactagaaacagtgtgatgaatatgattttccttgttttcttcgttgctacaggttcgctagcatggcaatgccatgcgtacgatatgttccctctccgaatgaacactggctatggtgcccgtactccggaggtgaaatgcgcaagttggaggcttgctgtggaagcacacaacatctttggctttgagaccattcctgaagagtgcgttgaagcaacaaaggaatacatccatggcgaacaatatagatcagactccaaaacagttaaccaacaagcttacttttatgccagagacctcgaagtccatcccaaggacacatttgtgttcagtatagatggcaccgtactctctaatattccatactacaaaaaacatggatatggggtggagaaatttaactcgaccttgtatgatgaatgggttaac

SEQ ID NO: 72762 - DNA, 305 bp, Glycine max
cagcgatgacaaagaaactaggcttggacttttgtgtttatgaaagaccacgtgcacatgcgtgaagggtcatagctatgctacaatctcaatcatattcatgtcactggctgtgtcttgataaatgtaatactgtgaaaatcgtgatatttgacaacattctaccattgctttacaacagtgtttaagaatctgccgttctatcatataagactgaacttatcatctatacaaatagaaagtcagtctgaatatcatatgacacttaccctttacatgtccagataattccttagatgctgtga

SEQ ID NO: 72763 - DNA, 113 bp, Glycine max
gacctcttacttcttttaaacaatattaatctcctaattaaaatctttacaaaataattatatcttaaaacatattcccatttcttttctaaatcttttaaaaaattaacttt

SEQ ID NO: 72764 - DNA, 130 bp, Glycine max
aaatgcttggaaaccccgtgagcctgagattcgccaccaggtctgctccatcagcgtctggacctgttactttcaagaccgctgcgcttttctccaagaagaaagcagctccagcttcttccaagaaaaa

SEQ ID NO: 72765 - DNA, 437 bp, Glycine max
attgtttgttgttgtaactcgttcttctttttttgttgttctgtgtttgtgtttggttcggctctcacctgaaaatgtcttgctgcggtggtaactgtggttgcggaagctcctgcaagtgcggcaacggctgcggaggctgcaagatgtacccagacttgagctacactgagtcaaccaccaccgagaccttggtcatgggagtggcacctgttaaggctcaatttgagggtgctgaaatgggtgtgcccgctgagaacgatggctgcaaatgtggaccaaactgctcctgcaacccctgcacttgcaagtgaagtgttgggagagcaagcttcaagcaaaaatagcccttaattatgaataatggataactattaatgggtagctaaaaacctatgtattatgtctgtgatggttttcgtgcactctggtgtttt

SEQ ID NO: 72766 - DNA, 439 bp, Glycine max
gagataactagaaacagtgtgatgaaaatgtaggtccttgttttcttcgttgctacaattgtggtagcatggcaatgccatgcgtacgatatgttccctctccgaatgaacactggctatggtgcccgtactccggaggtgaaatgcgcaagttggaggcttgctgtggaagcacacaacatctttggctttgagaccattcctgaagagtgcgttgaagcaacaaaggaatacatccatggcgaacaatatagatcagactccaaaacagttaaccaacaagcttacttttatgccagagacctcgaagtccatcccaaggacacatttgtgttcagtatagatggcaccgtactctctaatattccatactacaaaaaacatggatatggggtggggaaatttaactcgaccttgtatgatgaatgggttaacaagg

SEQ ID NO: 72767 - DNA, 197 bp, Glycine max
attgttaattgcctgcttcccatttttctattttatcttatttgttctttacatgaaacagaacttttaaaaaaaaaaaaaaaaaaaaaaaaaaaaaaaaaaaaaaaaaaaaaaaaaaaaaaaaaaaataaaaaaaaaaaatacataacaataaaaaaaaactaacacaaaaaaaataccaaaaaacataattaaat

SEQ ID NO: 72768 - DNA, 310 bp, Glycine max
ctttcttaatggagaactgagcgttttcttagtaacattgctaatatctatgtgaaagcgcatttttaaaaaaaaaaaaaaaaaaaaaaaaaaaaaaaaaaaaaaaaaaaaaaaaaaaaaaaaaaaaaaaaaaaaaaaacaaaaaaaaaactcccaaagcactatcatacatattaaccccagagagcgactcttgtgaatgcaaaaatacaaaaatatttcaaattataaaaaaaccaaaggatcttcctgtttgcacaccacacaacgagaaagcaaaacccctaaactatctaattccataaactac

SEQ ID NO: 72769 - DNA, 311 bp, Glycine max
attgcaatgaaagcaagcgaaccaatgtgttataaaattgccagcctggaaaatttattcaagtagtatattttcactagttgttactgtgaaataatggaatgcttgtttctttgggatgttgctgttttctgttgattgatttaaaagaaaatcaaataatggtcttagaaaggagttttagaccttgtcttagttacagggttattatgccaatgatgaatgacccaactgatattgaattgtatcgattgcaaggttttgattccaaaaaaaaaaacaatacattaactgaaacttgatcttttcta

SEQ ID NO: 72770 - DNA, 226 bp, Glycine max
caatactgtaattgagtgatagttttcttgttgtctatttagtgatctggctggtattgagactttagtgagagactattgagggtatttttcactttgttcataattataatataattgtaattatatgaaaaaaaaaaaaaaaaaaagataaaaaaaaaaaataaaaaaaataaaaataaaaaaaaaaacatagaaagacaaaaaaaggccggtcggtttaaag

SEQ ID NO: 72771 - DNA, 187 bp, Glycine max
ccctcttttgctttaccaaattccaatttttaattcaaaaccctaactccgttcgaagcggcaaatcgtgatggcaccaaaggcagagaagaagccagcagagaagaagcccgcggaggagaagaaatcgacggtgggagacaaggctctcgcggagaagaagccaaaagccggaaagaagctttcg

SEQ ID NO: 72772 - DNA, 296 bp, Glycine max
gctagaaaatcgtggggggaatatagagttttttgcgtggtagaatcctgccgtgttttggtgatcaggctcgtgccatggctcactgttcccatgtgattctctatctccaacgcacgctgcttctggcgaggcattattcgaacgtgaaagtcgcctattacaagcttgttgaagaggctcgcaacgtccgagcctatgatctcattactgcctatcgcatgcttgctacaaaggactacattgatggcaaccctttcagctcagagtatgctgcagccaactctcagcctatc

SEQ ID NO: 72773 - DNA, 138 bp, Glycine max
gacaacctcatgttatctccaatgcgaataatcatatttcatgcaattcaaaccatcttaggtttggttccatttatctcaatctcagactgtatcacttaccatctataaccactacacgctatacaactctctcat

SEQ ID NO: 72774 - DNA, 175 bp, Glycine max
cccacgcgtccgcccacgcgtccgcccacgtgtccgattaaaaaaaaaaaaaaaaaaaagaggaaaagcggaaaaaaaaaaaaaaaaaagggcagcctttcttacgtatccatacttacgtacccatgctttcaactacataccttttttataatgtaacctaaattcaattcct

SEQ ID NO: 72775 - DNA, 209 bp, Glycine max
gacacacatacggagacccagattttgaatttattaacggcatcatcattatcgtcactagcctccaccttttcttcaatgttacattacatgttaaccggaaactccaagggtcactcgactactcaattcactaacaaaaatgtacgctattaggtcctcgcttaagacaatgcttagaaacttgcaaagattattttgaaggttga

SEQ ID NO: 72776 - DNA, 279 bp, Glycine max
cctacgcgtactcccaaaccaacatacacctttcttctcaaaatggcctccacacctacaggaaccgggaccctacccacgctatcttatcctacacccttctcttcttaccctacgcacctctccgtcaaaccctcctccctccaattccccaatctcttccaccgtgccgacaccacactcctcaaacgcgtcaccttctacctcaatcaggcgcacggaaaaatcaccaagctcggcgaccaaatcggcatactcacgctcgactaggccaaaaac

SEQ ID NO: 72777 - DNA, 286 bp, Glycine max
gctaggcgtatgtgcacacgacattgcactttgactgacttgtagacactatactctaaggtcactggtatgcacgaaaaatacgtggcatacggccttcttgcttccaacgtgtctctccatgaactcatacgctaaaggacatgtcagcaataggagtagaaccaatgcccatgctacattctatggtgaaagacatgcttctgggacaatagatggtgctagtcagcatcgaaactagcatcgaccatgatatgggactaacacagcagcacttatcactgac

SEQ ID NO: 72778 - DNA, 346 bp, Glycine max
gctaggcgcacgtgcacacgacattgcagtctgaaagcatcgtgaacactatactcttcggtcgcaggtatacaagaaaaaaatggtccatctcggcaactaacttccggcgtgactatacatgatctcacatgctcatggttatgtcagcaacgtgacttgaacccatgcccatgctacataccatggtggaagacatgcttctggaacaacgtatgtatctcgggggcatcgaaaccatgatacacaaggctctgggcctgacacagatgcacatatcactgacttactcagcaatgactagcatcagcactcatgcgtactgatcaagagtgcaaatgaccca

SEQ ID NO: 72779 - DNA, 258 bp, Glycine max
aaaaaaaaaaaaaaaaaaaaaatttaaataaaaaaaaaaaaaaaaaaaaaaaaaaaaaaagaaaaaaaaaaaaaataaaaataataaaaaaaaaaaaaaaaaaaacattttcaaataataaaaaataaattaaattaaataaacggcctttaatttaattttattttttaattttttcgacttcacgaaccttaattatctttttttatatccccttttttccatttcatgttatactttttagacctgttccttttt

SEQ ID NO: 72780 - DNA, 423 bp, Glycine max
  unsure (1)..(423): unsure at all n locations
cccacgcgtccgcgagataactagaattagtgtgatgaaaatgaaggtccttgttttcgtcgttgctacaattttggtagcatggcaatgccatgcgtacgatatgttccctctccgaatgaacactggctatggtgcccgtactccggaggtgaaatgcgcaagttggaggcttgctgtggaagcacacaacatctttggctttgagaccattcctgatagagtgcgttgaagcaacaaaagaatacatccatggcgaacaatatagatcagactccaaaacagttaaccaacaagcttacttttatgccagaaacctcgaagtccatcccaaggacacatttgtgttcagtatagatggcaccgtactctctaatattccatactacnaaaaacattgattatgggtggagaaaattaact

SEQ ID NO: 72781 - DNA, 380 bp, Glycine max
gcaaaaggggagggacaaatggtgagagaatttaaagaggtgaaaattgtagatgcagcaaatcttggtttctttagtaatgcctatgcaattttgtttgtggttttgattaccttttgcattataccagcaatcatcttttcttgcgcggatggtgtatccaaagagaaaacttctgcagcagatcaagagccttatggagctggatgtggcgctggatgtggtgctgggtgtggtgctgggtgtggtgcatgagatccttcttgttactatcaatttcatgcatatacagatctagaagagggatataacacacagttcaagtagaagtggaattttagtgactactgtaatgttagttttttttttttttttttttt

SEQ ID NO: 72782 - DNA, 187 bp, Glycine max
cgtccgaaaaattaaacttaagatagttttttttttttttttaaatactgagtcataatggaaggtgactcagtgcacctgtacagacgtcagatcatttatttgagtttcattttcttaagagttaactgtatcttgaaataccatgttgaaaactactgtgaggaccagcgttatgtgaacacca

SEQ ID NO: 72783 - DNA, 286 bp, Glycine max
aagaaaaaaataaaataaaaaaattttatagaataaaaagacatacttgttggtgggtgggttggcataagaagttatgtgatgaccttcaatgtctacatgttggaacgttgtgtgttgcttgcaacacatgatattatgtattgatccccctcttcatgcgagatgtaatgcattttatatctaccataactctgctgtttgataactttttttgtccaatataattaaaataaaagtgtaacaattcaattttataaaaggagttgcccaaaattaaattgcc

SEQ ID NO: 72784 - DNA, 425 bp, Glycine max
  unsure (1)..(425): unsure at all n locations
cccacgcgtccgcccacgcgtncgcggttgcgtgggcggacgcgtgggcaatctcgagggagggcaaaagtaatgggtacggagatcaatctgtctggatatattanaaaaccgaattccattgtctaatgatgaaactaaaacaaaatatttaactaaaatatatgatcctttcctgaacggacgctttcgtggacaaatcgaaaatgttttttcaacctcaatccaatatgaaaaaaatgaaaaaaaaataccattttgataaataaaattcatggtatccttatttctaataatacttataaaaaaaataatagtaattatccagaattagagaaaaaaataaatatatttgatagaaaatctttagtaactacattttttttttttaatttaatcaagtaatttttaaaaaaattaatatt

SEQ ID NO: 72785 - DNA, 451 bp, Glycine max
ccctacgcgtccgaaaaaaaaaatttttataatataaaaaaaaaaaaaaaaaaaaagagagaaggaaaaaatattaaaaaaaaaaaaaaaaaaagaaccttcaatataaaaaatcctatctttcctacccttccatacacatacatctctcttctttggtctcccttttatttacttctcttgccctctgttttaccaccgtttaaatttgttatcccttttcctctctttactttacttgtctttaaactcctttcctttttttccgtttttccttaattacaatatcccccattttgtttttcctttttatactttcttctcaattttgttttatcataaatttcccttctcttttttctctttttaaatatctctttttttttccaacctcttctttttgatcactttttctttcccccccttttaatttctttactttttttttttt

SEQ ID NO: 72786 - DNA, 173 bp, Glycine max
gcgagtgatagtgagtgcgtggtttttttgcagcagcaaggcatactgacaccgaacagactgaaaatgggtcgcggggtcagtactactagaaaacatagctcctaagcttatctatttggagaggatgtacctgcctacatacgcagatggggctcacactcaaaatgcat

SEQ ID NO: 72787 - DNA, 310 bp, Glycine max
atgacccatgacttatggttggtgacttaacttttacatacaacgggcacggcacacaggtcggagctatggtcctaacaggttcttcttctggccccggcgcagtacagagaggcatgagtgacaaaaaagatgagtcggcaatgccaaaggacgcaaaaaatgtgaagtctttgctgaaatcaatgggcctggaagactactaacctcgcgttattcacaagtaccttgagctttgatatcgatacaacggctatgtcttaaccgacgcacaagtctatacacagcatgctgtataacctgcacttga

SEQ ID NO: 72788 - DNA, 200 bp, Glycine max
gccacactatcaggttaaaacttgtcctagtgtttttacccataatattgcatcgaaggtctagttttatcctgtataagattaacttacagcatcatccttcccttataaattaatcccaagcgtcacacaaatgggactacatcacccttcctaaaaccatgattcaatactttgtacatctacaagattttaaaggc

SEQ ID NO: 72789 - DNA, 179 bp, Glycine max
  unsure (1)..(179): unsure at all n locations
attntggaggatttttttcacggccggggggtaaaccttttagcttcaattcatatagggcccattttccttttaaaaaaaaaacgggcagggctttggaaaaattttattatttggatttgtaaaaaaagaaactttttctctttttaaaaaaaataaggactttgtatacctttttt

SEQ ID NO: 72790 - DNA, 217 bp, Glycine max
cccacacttccgctctagaaaatttccaatgtccaccaccacaccctattttctaggcggtattattattatcttcacacacttcactctctctaactcttctctcgaatctaccaccgcaatggccaacgctaccgagaaactctccgctctcataaaagccggcgtcagatcgaacgaaatcactcagaatgtgaagaacggattcatcagcctc

SEQ ID NO: 72791 - DNA, 220 bp, Glycine max
gagactcgttattatagatttatcatttattttttacatacatacttcacaaggcaaggaaggaacacataacattgaaaagtgtgttcacttcagacttgatcgctattttcctatctgacaaagcctgcgcatttcattcaagtcccatcaaatgcacgctttcattattaaatacataaatcaagttctgaggaacccaactaaaaatacagtcttc

SEQ ID NO: 72792 - DNA, 376 bp, Glycine max
  unsure (1)..(376): unsure at all n locations
aggtgaggtgaccatatactgatgaatgttgttacacacgcgtaatccgnaagtgccagtgtgaatttttagacaatgatagcgtcttctctctccatcctacattcttgttcatcttcctctatcttattcacaatttcactttctaatcccaaaccctcttattccctacctttcatgctccaagcccaagacaggacccgtaaggaagacaggtccgcgcgccacactctcatcataaagaaagtcgaaggcacacccgagaggccgaggctctcccctttgctttcatattgcatttgtttcctctgtggctgatagctaattgaaatcgctcatctaaatctatgatcacaaacagatctatttaaattac

SEQ ID NO: 72793 - DNA, 330 bp, Glycine max
cccactcgtaccactatctgtctaacattaattatcaacagcgccacgtgagcagccggacggcaaaacctgaggccctgctcgggttatacacagggagcgccttcctcttcgcacgcatgattgccggattccgccaaagcctatttctatacaactgtgccgaccactgaactgacgaccacggagacagcgactccgacgccacccagtgcgcgtactcgcgcgcggtgctaatgctcgacatggtacggaacctcatcttagtggatgccaccagcggcgtcctgctatacacgcttctagagcggacagcgacgcccctaaggc

SEQ ID NO: 72794 - DNA, 264 bp, Glycine max
  unsure (1)..(264): unsure at all n locations
ctctgctgcttacgtataggactaagcaagttggtatgctacggnngccttggatnngacgccacgcaggccggtcgtgctttctattctagcttttgcggtgcctcnttgaaaagagctctaagagactcgactgtggatgcctgatgcctgtgtgacaagcttgtgaacctggnngtggggtggttctccttaccttcttttgtttgacaaccgatttggatgtgggccgccgagggtgtactcggtggtcacaagtggggg

SEQ ID NO: 72795 - DNA, 223 bp, Glycine max
gccactcgttaaagccgcaacttgtttatattgctttgaaacagagaggaagggaagcgctgctctgtcagcagagcaatgactagctccatgagtaaactgtgcatgctaaagctcatgctaatgcaatgacaactagagaggctgcaataagtaccatgactagagctacacgaagcgaacctctcgacgagcctagctcacagaaaggtcacttgttaag

SEQ ID NO: 72796 - DNA, 319 bp, Glycine max
gaaattgctaacatttagaaacgaaattttgttattaacaacaatgtacttaagagcaggccggattcattttctctccgcatgtccttatactgtgcactgctcttcccctctgtttaccacattccccctttctcacagggcttggaggctatgccgaaaacgctttaaataaactcggaaaatgattctcacaaagcagtaccgatgcatacacttcactagttgtcaatgtactaaaaggcatttaagtgaagatatgatattcttagtatttcataatttgaattggaatcccaagctaattgcaactctatca

SEQ ID NO: 72797 - DNA, 445 bp, Glycine max
  unsure (1)..(445): unsure at all n locations
nncgcaacattgttacanctcttttcnnttcttctcgtttgttgcnnttcgctgnnttgaatcatgcgatcgagaaggggtcgactttcagcgctctcccagttccattgggaacccannctatctatcggccgttaccttaccaacggcgggtgtctgttcttcggagcccgacttctcgaacctagcacctggagtggtatgttgcccaaccgagcatncggaccaaaatcacttcanngctcactgataactgtataccgctgtgtcgcttctgcgatcgnngctgctgcattctcaagattggtctctgattactgtgccgtnntacttcctcnncatcaacacnnacaatacaactttggaccaacctgcannacagttaaagtttgcttgcaaaaaccttgtcccgactttctcttcatatnnaacaataagaattttc

SEQ ID NO: 72798 - DNA, 265 bp, Glycine max
cccacgccgtccgcccacgccgtcctgaaaaacacttcctttcttcttctgacaccccacactcgccatctcacggggcgcgattgcatcacaacagatgtctgatcaccaattcactctccaactctcgtccaagcaccgccagccctccgccaccaaactaagctccaaagctagaggtccgccagccactaaccactcatcgatctcgcagctaccgactaacacacaacaaccaacaacaaccgtgtacctccgaccctga

SEQ ID NO: 72799 - DNA, 167 bp, Glycine max
attttctaagcttacgggcgcactaaggttactaggctgcgcaggtacgatggacaccgctgaaatgactgcattgctgcggaacatgtccgcacttgaaaggagccaaccttgagcgctgccatttacttgtgttgggcgcgtcagaatctggacactgactcaaa

SEQ ID NO: 72800 - DNA, 329 bp, Glycine max
cccacgcgtccgcccacacgttttctttcttactgtgagagcggcgaagaagaggaagagcaatattgaaagacgccggaaagagccacaatgcgaatgcaaagatgccgccggagacgcggaatgaacgaaaatcagagacggcgctgagtggatcgccaaagaacggatgccacagcaagaagttcacatggatcagcaactgctactagaacttctagatggagcacggtgctatgcactccaaggactcgtactttcaggatctcactgagatcgccgccctatcatcgccgtggtttccggcgacgagatctgaacatactaat

SEQ ID NO: 72801 - DNA, 78 bp, Glycine max
  unsure (1)..(78): unsure at all n locations
ttttgttgcattctaagnaagtatgagagtgtgatcagatccttggccaaagagattaaaagttttattctttgatgt

SEQ ID NO: 72802 - DNA, 283 bp, Glycine max
  unsure (1)..(283): unsure at all n locations
gcgagcgccgcccttacgcgtctgncctttcttttgactatttcgaactccgtcataggggggaccaacaggacggccacgttgtacttattagactcaaacctcaacaacacgacaactttaagcgatgatagaagacacgctcttctcaacttacgctaaaggtaggcggcgtcaccaacacctgagaaaaatgttgtgaaaataataccctacggcaaccggttggcgtagtttcctaatgcttagccacccgacttactcaacagaagtatgaacagct

SEQ ID NO: 72803 - DNA, 225 bp, Glycine max
acgctatgctctaaactaaccaatcttatttacgcgtgcgtgcgccgtattaccggtttgatagttatatcaaaatgcaaaacagtgaacagcagactacaacattaatgctgaaactaccgtgccagctcccaactttgttgcctcatgcaccatattggtttctgcaggtcctgtactatctaagaggcttgccactatcgacattgcgaacagttactcatt

SEQ ID NO: 72804 - DNA, 291 bp, Glycine max
  unsure (1)..(291): unsure at all n locations
tgcaaccagcnnctctaggtgacccattctactcaatctaagaaggggaccnnacaacttccactncaaagcttggtcnnctcgtggcaacgaaatctaatttgactttgtatcaagaagcttttcatctattgagtnntcctttttaaatttttactttttctggctttgcattaatgtgtaacgtatgccttgcaagaccttactattcaaaagagtgcttctnnttccagtctacatttgagtgggcatttgctttggcttttcaaattgaaaagcaaagaaacatat

SEQ ID NO: 72805 - DNA, 134 bp, Glycine max
aaaaaaaaaaaaaaaaaaaaaaatatatttaaaaaaaaaaaaaaaaaaagggcgggcggggtaaaaaaatccagcttccgtctcacatacatccgacttacatacctcttctttcgaggcacctaaattcaatt

SEQ ID NO: 72806 - DNA, 407 bp, Glycine max
gggggggggggggtagattctgctctttttttagaaagttagaacataagtgctggtggctggattgctagcatgtgaataaaggtcagtttgggtaaacagcttgattaacagcttattgaattaatgcttatctgataagtacttatgtataactcgcttctacaattgaagaggaaatagcgttacatcgttttcattatctatgctggagagcttgcttaaattagatgaaaacagcttatggacataatataatctattattctattttcataagctatatcaaacagcatagttaaatcgccgctatagcactattgcataagcgaattacttgcatcttggggaagcaactctgcttactattgcaactgctatgggtgtagaggttgtggcatgcattt

SEQ ID NO: 72807 - DNA, 455 bp, Glycine max
acgcccacgcgtccgcggacgcgtgggttttttttttttttattttatgattgtatgtttactggatatataatttgttgatattaataaaaaggaaacggtttaaaagacagaaaaattattaatgggatgataatggatgaattataaaatgtcaaactaatagccctatttttgctccccttaatcttttgtttttgcactatgttctttgtttccctgtacacacaaatcatatgcattcggtcactgaatgatggatgacacactcttgcttccatagtgtctttggttcaattattctctctttattaagccaattaacaagtgtctaaggcattaaagatgcagcttaattacaagttataacatctgaataagttgctctttgtaaaaattggtgagctagtaaccagaaattcaacatttaagtgtttgctttttattattttttt

SEQ ID NO: 72808 - DNA, 55 bp, Glycine max
aaaaaaaaaaaaaaaaaaaaaaaaaaaaaaattaaataaaaaaaaaaaaaaaaaa

SEQ ID NO: 72809 - DNA, 437 bp, Glycine max
tgatgattctttatattgaagtttgtttgcaatatttatgacggtatgttgactatatcatataattgatgatattaataaaaaggaaacggtagaaaagacagaagaattattaatgggatgataatggatgaattataaaatgacaaactaatagccctatttctgatccacttaatcttttgttattgcactatgttctttgtttacctgtacacacaaatcatatgcattcggtcactgaatgatggatgacacactcttgcttccatagtgtctatgtgtcaattattctatctttattaagccaattaacaagtgtctaaggcattatagatgctgcttaattacaagttataacatacgaataagttgctctttgtaaaaattggtgagctagtaaccagaaattcaacatttatgtgtcagatatttat

SEQ ID NO: 72810 - DNA, 202 bp, Glycine max
cccacgcgtccgcccacgcgtccgcccacgtttccgttaacgcgtccgcccacgcgtacgagaaaagtaaaaaaaaaaaaaaaaaaaaaaaaaaaaaaaaaaaaaaaaaaaaaaaaaaaaaaaaaaaaaaaaaaaaaaaaaaaaaaaaaaaaaaaaaaaaaaaaaaaaaaaaaaaaaaaaaaaaaaaaaggggggacgattt

SEQ ID NO: 72811 - DNA, 326 bp, Glycine max
aggacgcgtgagttgactcgtgcgttttacttttgaacggacactatttcagacgcgagggcgtgacgcatacatctgaggcttggatgtttactgtaggaaatgcacttatagaatcattacaaagactgtgataatataatagacccaggattgtctgccatatattcatagcataattatgaactaataatacaatgtgaaatatagaaaggcgatatcttgagataaatgatggatgaaaacacaatggattaaaaaggaagcatataatctagatatgaatataacatatgactaatacatggaaacatagcactgtacaa

SEQ ID NO: 72812 - DNA, 65 bp, Glycine max
gccatggttgtggcattctatatatggttttatagtagataaataagtttaactctccgttcaat

SEQ ID NO: 72813 - DNA, 146 bp, Glycine max
acgcggacgcgtgggctggacgcgtgggcgtgacgctgtgggcggacgcgatgggcgcgacgtcgtgggcgggacgtcgtgggcaggacgctgtgggatgtggactctatggaatatgcatgggatgcggggcacttacatgagac

SEQ ID NO: 72814 - DNA, 274 bp, Glycine max
cgcacacaatacacacattttatttctcagtatcgttcaccacaccgaacctgccaattgcgtcacacccaccataataatatctttattgatctttgcttctttggtaccattgaaaaaacacacacacacaacatcaacaacagaagaccatgtcggagtgcgagcaccacaaggggaagaagaggaagatctttcggcacgcgttctggtgcatagtggtgctcctcatttctcgtgctagactaaaatcgattgatatgggcaatgctta

SEQ ID NO: 72815 - DNA, 434 bp, Glycine max
ataactagaaacagtgtgatgaaaatgaaggtccttgttttcttcgttgctacaattttggtagcatggcaatgccatgcgtacgatatgttccctctccgaatgaacactggctatggtgcccgtactccggaggtgaaatgcgcaagttggaggcttgctgtggaagcacacaacatctttggctttgagaccattcctgaagagtgcgttgaagcaacaaaggaatacatccatggcgaacaatatagatcagactccaaaacagttaaccaacaagcttacttttatgccagagacctcgaagtccatcccaaggacacatttgtgttcagtatagatggcaccgtactctctaatattccatactacaaaaaacatggatatggggtggagaaatttaactcgaccttgtatgatgaatgggttaacaa

SEQ ID NO: 72816 - DNA, 436 bp, Glycine max
gagataactagaaacagtgtgatgaaaatgataggtccttgttttcttcgttgctacaattgtggtagcatggcaatgccatgcgtacgatatgttccctctccgaatgaacactggctatggtgcccgtactccggaggtgaaatgcgcaagttggaggcttgctgtggaagcacacaacatctttggctttgagaccattcctgaagagtgcgttgaagcaacaaaggaatacatccatggcgaacaatatagatcagactccaaaacagttaaccaacaagcttacttttatgccagagacctcgaagtccatcccaaggacacatttgtgttcagtatagatggcaccgtactctctaatattccatactacaaaaaacatggatatggggtggagaaatttaactcgaccttgtatgatgaatgggttaac

SEQ ID NO: 72817 - DNA, 277 bp, Glycine max
cccacgcgtccgcccacgcgtccgaagcctgtcatgttaaacaaggcactttctactaaattgtgtgactcaagttcgacacaaagtgcagaaatggagaaaaaggaaatatgtgtcttcctttcctgggagtgatagggtttatcgccatggtgtttcaattcaaaagtttgaagtttctttgtctttgatttcatgtttaattttgttagcctgattgatatcatatctattttcttatttaacaattgaaataatacgtgctgcctttctttct

SEQ ID NO: 72818 - DNA, 164 bp, Glycine max
aaaaagaaaaaaaaaaaatttaaaaaaaaattttaaattaaaaaaaaaaaaaaaaaaaaaaaagagaaggataaaaaaaaggacggacggtctgccgctctaaagcttccatccttacgcacgcgtccatgcaacctccttaattgttttatatagcctccttt

SEQ ID NO: 72819 - DNA, 204 bp, Glycine max
cccacgcgtccgcttaaattgatgttttaccttattaaatcagtttttgttaaaaaaaaggagaggaaaaaaaaataaaaaaaaaaaaaaaacaaacaaaacaacgcctctcaaggtctcgccgctctatcggacccaggcttacattccctttcatgccaccatatagctctcatatagcgccacctaaaccacattcactgg

SEQ ID NO: 72820 - DNA, 372 bp, Glycine max
caacattttcggatctattcaaaaaaaaaattaaaaaaaaaaaaaaaaaaaaaaaaaaaaaagaaaaaaaaaaaaaaaaaaaaaaaaaaaaaaaaaaaaaaaaaaaaaaaaaaaaaaaaaaaaaaaaaaaaacaaaaaaaaaaaaaaaaagactgataaaaaataaaaatgaaacgaacacaagaaacatgcaatataaactggacagaaaacaagctataacactgatacataactataacatgattgccattgtgcaagctaagaaaccaagatcttaagaagagctgctttcatgaagcataactataggttaacaaaatattcacttaaagagatgggacctataagagaatttcctaatcaaaaacc

SEQ ID NO: 72821 - DNA, 163 bp, Glycine max
cccacgcgtccgcccacgcgtccggttcgtttgcgatctagaacaaaaaaaaaaaaaaaaggaaaaaaaaaaaaaaaaggacggacaatataaaagataaaaaaattacatacgcatgcatgcaaacgtatatctcttatatagtgttacctaatttcaatta

SEQ ID NO: 72822 - DNA, 254 bp, Glycine max
cccacgcgtacgcacacgcgtccgaaaaattaatattaaatacaaaaaataaaaacaacagcggtgtaaaaaaaaaactatctgagccccatctattcgttcaataattttgactatactcctaaataaaaaatgcttcatcagaccacctatcttcaacatctcaagcatcttctctctcttatcttgatcatatcactcctgcaagacccaatgactctctgctctaatatctactacattcctcacattat

SEQ ID NO: 72823 - DNA, 125 bp, Glycine max
cccacgcgtccgcaccaagaaggagctcaactacttttagaatcgcctcgtctcggagctcgaacggattcagaagctaaggaatcaaatcgggtccagcgagtttcaacccgggcagagcctta

SEQ ID NO: 72824 - DNA, 387 bp, Glycine max
atgacctgaacaagaaagaggttgctctggttaaaattcagggtttgcctaactgaaatggagccatgatttgtttgggaacgcctcgtaccaccatacttgttacctcgtcaaatttgtaggaagccgcgtgctttaggatgcgaacgttccacgaagacgagggatgactttctgtcacagggtttcaaatcgacattatgaggaagtctaagacgaagaagcaatggtacatgtgggtagctgaaactggctcggtaggaatgttctgcagttgattcaagccatactgaggttgaggaaaagtaagaacatgctgcttccgttacaatgactgtgatgtatcgttaaattagatactatcagctacatattttactttgggat

SEQ ID NO: 72825 - DNA, 351 bp, Glycine max
agcaaattcaatcataatgaggtgatactactatagaagagaaagtcatggaaagctgcgtcaaaaagcataaggtaatgcaaaccattacatggttgtcctgtgatgggacgatgctcatattcgacttgaagccgaggtcttcatctgctcataagtcaggtacaagcagtcgttgcggtgcacatataacattgtttgctaaaattggtttaaatcagataacaaacaaacagaagaacgtggttactcatgtaattgtataatgatgtattatatattattttgtaaaaaaaaaatctaacaaaaaaaaaaacaactttacaatacaaaaactaataagttacctaa

SEQ ID NO: 72826 - DNA, 191 bp, Glycine max
cccacgcgtccgcccacgcgtccgagaacattttcacttagttggattagtagtacttgtgaaaaacttgtaacgtgaaattggagaggctaagcagaaatgcttctgcttgatgttaaaaaaaaaaaaaaaaaaaaaaaaaaaaaaaaaaaaaaaaaaaaaaaagttgtactgtaaattattgaaatcaa

SEQ ID NO: 72827 - DNA, 360 bp, Glycine max
cccacgcgtccgcccacgcgttcgaaaaaatttttaataaaaaaacaaaaaacataaaataggggaaggaaaatatatatatgtgaaagattaataaaaatagaatactaagagagtaggtatattgtagatcttcttaagttttactcaattacgagttctttttggaggccaaatatagtataacagttgagttttccatcataactctttagcaagagattcaaattttaaaagcttaaatcttttacataacacgtctaaaactctaccgtgccaataccagttcttattgcataggtaatgttgctgctctactagtatataacttatattagaagttgacaatggacaatgtct

SEQ ID NO: 72828 - DNA, 277 bp, Glycine max
gtcaacaaagttaacagttgcacttgaatgagttttaaaaaaaaaaaaaaaaaagaaaaaaaaaaaaaaaaaaaaaaaaaaaaaaaaaaaaaaaaaaaaaaaaaaaaaaaaaaaaaaaaaaaaaaaaaaaaaaaaaaaaaaaaaaaaaaaaaaaaaaaaaaaaaaaaaaaaaataaataagtaaaaccttaataaaaaaaaaaacaaaaacaatttacaaattaaaaaaaatctttaaaacaaggaaaacaatgaacttattaatgcaccaagtata

SEQ ID NO: 72829 - DNA, 270 bp, Glycine max
tccacatccatatattggataattaataatcaaaatgaagcatttgtctatttttagacattagttgattttctttaaataaagtttttaattttgaggcttatgagaagaaggaaaaaaaaatctatattgatagaatcaattatcccattatagtataaatatttctaacctaaatagggttacctagctagtgtgcgtgatagtgtagacatacaaataaaataaaagcaaaaaacaagtgtctctctccaatatatatcctacttt

SEQ ID NO: 72830 - DNA, 436 bp, Glycine max
  unsure (1)..(436): unsure at all n locations
cccacgcgtccgcccacgcgtccggatcgagataactagaaacagtgtgatgaaaatgaaggtccttgttttcttcgttgctacaattttggtagcatggcaatgccatgcgtacgatatgttccctctccgaatgaacactggctatggtgcccgtactccggaggtgaaatgcgcaagttggaggcttgctgtggaagcacacaacatctttggctttgagaccattcctgaagagtgcgttgaagcaacaaaggaatacatccatggcgaacaatatagatcagactccaaaacagttaaccaacaagcttacttttatgccagagacctcgaagtccatcccaaggacacatttgtgttcagtatagatggcaccgtactctctaatattccatactacaaaaaacatggatatggngtggagaaatttaac

SEQ ID NO: 72831 - DNA, 297 bp, Glycine max
  unsure (1)..(297): unsure at all n locations
gagagaaaatggcagcgcctctgctttcaatttagacccacacgaagaagccatagagccggaacattctccangatgacaggactatggaaatcaatactaactgatgcataccaaaaggcatagaacgtcatgaaaacagaaagatcaaggtaagcactgagaagaccatcataggtaaaggtgcagactctaagacctaaggaaatgtaacgaacaagatcaggaaatcagaaggacccaatgagaatgatcatcaacagctcaggatgcacaacataacttactgcgctgata

SEQ ID NO: 72832 - DNA, 375 bp, Glycine max
aacgaaaggggcactacccactccaaactgtgcctgcatcgtttcacatagcacacgcacgctctctacaccttacccttgggcaggccacaacgcttcatctatccatgggaaaccgcatgctcatacccggtgcaggtccagtagccactgcggatactgctgctgcagacatctagttgattccaacggatcagcaatatctgcatcaaccctgaattcaggttgaacaatgagcgaaggcatgctcgatctgcggagaacttttctgactgagagaagtattgctagcacttactgatgagtatgtgcgcatcagaactacggagatgatgccctgcatcaacagcttattcaatgacacgagtcgcaact

SEQ ID NO: 72833 - DNA, 362 bp, Glycine max
cccacgcgtccgcccacgcgtacgcccacgcgtccgctctagtgcgttgctgcagctaagcctctctctctctctctctctgtcactatcgatctatcccaccataaccattaaccaccactctcataaactattcattccacagatcaccaacatttcccaattcgttcaccctctgaatcacacttctagcactttctaactgcaactcgcctatacacacatggattcaacatgttatggctgcaaggtggacaactgccattgactctaagaggccgtaagagacaataccttgaaaggaaatagatgtcgccaacttcgtcttctatggctgcttgcagcgaaaggaggattgaccg

SEQ ID NO: 72834 - DNA, 293 bp, Glycine max
  unsure (1)..(293): unsure at all n locations
cccacgcgtcctgtacttttgcaaatttatttgaaacctgctgtggnactnnnagtganggatgcatccttaaaaagtggcatgttcacttactcacagacactcattgataagccagttactaagcctatcataataaagcagcaagacatatacaattcacataccaagccacctatcatattcacttatagagcaccttgacatctacaaaaaacaatatcataaatcttcattattctatgataccctccatactcacaactacttaaattctaatctcactacaccta

SEQ ID NO: 72835 - DNA, 257 bp, Glycine max
cttccatggaggtggtttttgtgacaagtcattgcttgcctttttattgtatctgtctgctagtgttttgtaacctttttaggttgacccagttaggaataatgaagtgtatattaatatcaaaaaaataaattaaaacaaacataaaaaaaaaaaatgaaaaattgaaaaactatctatggttgaatagatatgtaaacgaaattgctgagttgtacgaggtccaactgaatattgagtacattctagttgactat

SEQ ID NO: 72836 - DNA, 282 bp, Glycine max
tgcactttaatttaaagaagaaaaatatatataattgaaaatgatcagtgattagttaatataattcaagaaagtatttcttaagttttataacatcaaaaagtttttttaaaatttttcttcacaaaaaatctaaaacacagcatacttttggaattataatgtcacctccatcaatgtataatgtaatgatatgtcttatttctttatgtttaaaataataaataaaagaacaaaaaaagaactaaaaatatagctttaattcaatatacatgtcaatat

SEQ ID NO: 72837 - DNA, 302 bp, Glycine max
gatttttatacaagtaaaaaaaaaaaaaaaataaaaaaaaaaaaaaaaaaaaaaaaaaaaagggaaaaaaaaaaaaaaaaaaagaaaaaaaaaaaaaaaaaaaaaaaaaaaaaaaaaaaaaaaaaaaaaaaaaaaaaaaaaaaaaaaaaaaaaaacaaaaatgaaaaaactgggaatgagtaaaacatggaaagaaggaaaaaaataaagaattaacaaattaaaacattgagacaaatattaaaaaatttatcaagcttaaaaacaaaggaatagggaaaaaacgaacagactaacaaaaa

SEQ ID NO: 72838 - DNA, 77 bp, Glycine max
cccacgcgtccggtgatggtactccacactgttcatcccgctttcaactacaattggttaggacgattcatactaac

SEQ ID NO: 72839 - DNA, 208 bp, Glycine max
accaggcacacactaaaccttagcattcagatgcacatccccaaccttgcctacaggcatggcacgcatgtctgccaagaccgccaacgaacacacctgtatacatactatactacatgaagattactcagatctcaatactaataccaactcaaacccctatgacaaatgctataactacaacctgccctacctcaacaccaaggcc

SEQ ID NO: 72840 - DNA, 161 bp, Glycine max
aaaaaaaaaaatataaaataaaaaaattaattataaagaaaaaaaaaaaaaaaaaaaagaaaagaaaaaaaaaaaaagggaggccgttctaaaggatccagtgctttcttacccttgcatgcaacatcatagttcttttatagggtgaccttatttaactt

SEQ ID NO: 72841 - DNA, 327 bp, Glycine max
gcaaccttcttcatctgtgaaaactcttctttttctcatcattcttactataccatcgaccagttcaagccaattcatgctgtcacacccttacttatctcttactttctacaccatcagatgcaccaccactgataataactatcacaatactactaacaacaacacaaccaatgatgatgcaaactcaacttaatttcaatcaccaatggcatcatcaactaatcccgtagaaatactcttacggataagatctatacatcatgccaaacgactgccatagaacaatgccattcaatccacatctaaagtgatgcatttatactc

SEQ ID NO: 72842 - DNA, 228 bp, Glycine max
cccacgcgtccgcccacgcgtccggtcgcgttgtgttgcgtcgtgtcgtgcgctgttcctctgtctgtcgtttttgttttcagaccaaaccctagctccgcatcgcaaccatgtcgaccaagcaaggtggaaaagctaagcctttgaagaaacccaagtctgataagaaggattacgacgaggttgacatggctaacattcagaagaaaaaggaagaggagaaggcgc

SEQ ID NO: 72843 - DNA, 67 bp, Glycine max
gaattatattatttggctgtatactcttttttatttattcataaaagtactacttaagatggtgaaa

SEQ ID NO: 72844 - DNA, 141 bp, Glycine max
ctataatactcgtggtctttgatggaaattttgcctgcctcatattcatcatacgaagatgcaatgtacagttttaggagtaggccgtatattctctaagcagcattaggagtattggactgtagcgaactcgatctaatc

SEQ ID NO: 72845 - DNA, 323 bp, Glycine max
  unsure (1)..(323): unsure at all n locations
agagtttgttgtgagctataagctagtttatcgtgaggagaatatgaagttgtttgttttctttgttgctgcagtagttttggtagcatggccatgccatggcgcaggctaccaaaggttccctctccgaatgaaaactggctatggtgagcgttcttcggaggtaaaatgcgcaagttttaggcttgctgtggaagcacacaacatccgagcctttaaaaccattcctgaagagtgcgttgaaccaacanaggactacattaatggcgaacaatttagatcagactctaaaacagttaaccaacaagctttctttatgctag

SEQ ID NO: 72846 - DNA, 430 bp, Glycine max
gagaaatattccaagccgggttctgttgccgttaagaaagcctactttgaggctcattacggaagaaaggctgcagagcgagcagctgctgtgatccaagaagcaaacgctcaggctaatggaacttttgaggcacaagttcatgaaggaaactgtgccgattcatcctctgagacaagttcaaatgtggaaaacactgtggccgccaatgaacagccggataatgaaactgttaattaccaagttgttgaatgtgctgatagagaccaacataaatgtgatgcccgacaaagtgatttggacatttctaatgtggaaggagcagaggatgtgccgcgtcatcacactgctacggatcttaatgtggaaagttgcagatttgttgataattctaattctaaccagctttatcttggtgaggacaatacag

SEQ ID NO: 72847 - DNA, 321 bp, Glycine max
gtattctgtctcattataattagctctcagatagtgttctagtgcatggtcacacttcaagaggtacatttcgtcggatactttgtatgtaaaactacaaaaaaggaagtatacgttgttttatcccatgttaaaaaaaaaaaaaaaaaaaaaaaaaaaaaaaaaaaaaaaaaaaaaaaaaaaaaaaaaaaaaaaaaaaaaaaaaaaaaaaaaaaaagaaagaaacaataaaaaggggtggccgttttaaaggatccaggtttacgtacgcgtgcttgcaacgtcttagctcttgtatagggtaacctaacttcaattaat

SEQ ID NO: 72848 - DNA, 447 bp, Glycine max
cccacgcgtccggcctctcactaccatctcttacacttggtggagaatttggctgaggttatcgaacatggaaccccggatcagccgtctgatgcattgatcaatgaatcgagcaaccactttgagaagtgcctgcagctgctaaactcaatctctggctccattagcaccaaggctatgacagttgagggacagaagaagaagctagaggaaagtgagcaattgctaaatcagcgaagagacttgattggcaattacagaaaatctgtggaggatcttgttaggtctgagccagtagagaatgttgtgctttagatagatctcactgtagacaagtgctttgaatttctccattcccagaacatcttgggattatttatgtaaaactaccttggagtatgccatgaacttataattcaatagatattctgcaagttacttatcatg

SEQ ID NO: 72849 - DNA, 353 bp, Glycine max
cccacgcgtacgcgcatataaagaaattttcgttcataggtgcacttacaccttatccagctggaggttttaaactctctaccctatctattacatatcgaaaccttaaaattactatcatttctgagccatctggtgatgataaccattagtcttaacgagtcaagtcttatgtcttaattacaccatcaaattcctactgcacttcttaccttttggtgatgcatactttgctgactccaatgcttagtcaaacgcgtatgaccatatacttttacagcagacacaatggtggtgataagcctgactcccgctcagggcttgtaaaaagccttcacctataacatgatact

SEQ ID NO: 72850 - DNA, 427 bp, Glycine max
  unsure (1)..(427): unsure at all n locations
gttggtcgagataactataaacagagtgttgtttatgaacgtccttgttttcttcgttgcggcgaattttggtagcatggcaatgccatgcgtacgatatgttccctctccgaatgaacactggctatggtgcccgtactccggaggtgaaatgcgcaagttggaggcttgctgcggaagcacacaacatctttggctttgagaccattcctgaagagtgcggtgaatcaacaaaggaatacatccatggcgaacaatatagatcagactccaaaacagttaaccaacaagcttacttttatgccagagacctcgaagtccatcccaaggacacatttgtgttcagtatagatggcaccgtactctctaatatttcatactacaaanaacatggatatggggtggagaaatttaactcgaccttgta

SEQ ID NO: 72851 - DNA, 406 bp, Glycine max
cccacgcgtccgctagtttatcgtgtaggagaatatgaagttgtttgttttctttggtgcggcagtagttttggtagcatggccatgccatggcgcaggctaccaaaggttccctctccgaatgaaaactggctatggtgagcgttcttcggaggtaaaatgcgcaagttttaggcttgctgtggaagcacacaacatccgagcctttaaaaccattcctgaagagtgcgttgaaccaacaaaggactacattaatggcgaacaatttagatcagactctaaaacagttaaccaacaagctttcttttatgctagtgaacgcgaagtccatcacaacgacatatttatattcggcatagataacaccgtactctctaatatcccatactatgaaaaacatggatat

SEQ ID NO: 72852 - DNA, 364 bp, Glycine max
cccacgcgtccgcccatgcgtccgttttttcatccggcaaatgaaggtgtttaagcgggcgatactgaatgggcactacggtattaccacttttcttataatcaacatattctatgttgttccttacaattttttgatgcctatcattgcggaagctgcggttacttatctttctggactacataaaagacgtaataacctttcattctttatctacgattatttgctaccgctacttgacttgacagccttatgatggttgatggagagcgttatacaaactatatcatagggcatgatcgtttgtagccgacttgcaacagtactgcttttaacaactgtatactattgacttccaaatgat

SEQ ID NO: 72853 - DNA, 164 bp, Glycine max
gaatccggtcgcccactcgaagggcaatgcgatcttaatttttcatttcagaaagaggtccataggaaagctgagaatgtggttttggtcgcaggtagcttgtgcaccacaaacggaaggaaaggttccattccctattcacttaccttttatgcgtaactcat

SEQ ID NO: 72854 - DNA, 179 bp, Glycine max
ccacgcgtccggacgatcgtactagagacagcagaggctttttttctcctgtaacgcgcctttctttgcggtcgggttattcgtaatgagaggacgcccccatacagatctagaccattatcacagtttgcacacctgctgacaacaaaaacatcgggcgggctgctaatgtctcgtac

SEQ ID NO: 72855 - DNA, 377 bp, Glycine max
cccacgcgtacgcctgaatctcgcaagtttacagctgcacctgttttggtcccagctaaggggattcatgctctgaacctcaaaattgatgacctcaatagccaaccacgtttcttgggtgcttttgacgtggactatgatgctttgttagcgaggaggaatgctcttctcttgcagcagaagttaagcatgctgcgagaagaggcagctaactatgaagctcttcgcctgcctcaagaatggacgtactgactcctttgataatagtgttcattcaaacaagattcaattcctataagttaatccttgctgaagaaagaaagctagtgaaattagtacgtttgtgatagggaagatggctttttttagttttttta

SEQ ID NO: 72856 - DNA, 424 bp, Glycine max
  unsure (1)..(424): unsure at all n locations
cccacgcgtccgaaacagtgtgattaatttgaaggtccttgttttcttcgttgctgacgggtttggtagcatggcaatgccatgcgtacgatatgttccctctccgaatgaacactggctatggtgcccgtactccggaggtgaaatgcgcaagttggaggcttgctgtggaagcacacaacatctttggctttgagaccattcctgaagagtgcgttgaagcaacaaaggaatacatccatggcgaacaatatagatcagactccaaaacagttaaccaacaagcttacttttatgccagagacctcgaagtccatcccaaggacacatttgtgttcagtatagatggcaccgtactctctaatattccatactacanaaaacatggatatggggtggagaaatttaactcgaccttgtatga

SEQ ID NO: 72857 - DNA, 424 bp, Glycine max
cccacgcgtccgagagacttgagcttgttaatagatcgtgttcttagtggccaaccgtggccatcagagcaaaaacctaggtactttatattcttctccttttaattgtttgataatcttttaagtttaggactctattactttcacgtgcttaaggtcattgtttttctatgcatgaagtgttggatgcagcataaagtggcacccaaggaagaagttttgattgataaactgtaattatctttttcatcaaaagacattaatcagtgagttaaagtttctttttcaggttgctatgctttatgtaatgtcactaaccatattaggatgttacaccttattttctattcattcagtgttcctgttcacctacaatttccgtaagtgtgacttgcaaggaaatgatgtcatttgtggttcttat

SEQ ID NO: 72858 - DNA, 107 bp, Glycine max
ctcattcataaactatttaaaattggattttataatttcgcaatgacaaacttttcccggggcgaatattttttattaacatacgctgcataccgtttctctaacat

SEQ ID NO: 72859 - DNA, 399 bp, Glycine max
aggactcttaatctttttatcccttttttgtaaacgacgaggaggataatgaaggaggcggtgattttataggatagcaacttaacaattgatattaaactgaacaaattgattaaaacgccaagaagacagacctacatatggaagaaacttatcttaatgatactaacaataaattataaaatgattcaccggaaattaagaatagtcatgtgaaaagacaaaatgtgattactgaaaagcctgaatgttaacaaacacaaaagcttgaaattgaaccagcaaacaaagttatcttataagcgccggacactgaaaaatcccaacgacccctactgactactgaattataaaaaaaaaaaaaaagggcgctcactctagatgatccaagcttacgta

SEQ ID NO: 72860 - DNA, 377 bp, Glycine max
  unsure (1)..(377): unsure at all n locations
ccccacgcgtccgaaaataaaaaaaaaatttttttttaaaaaaaaaaaaaaaaaaaaaaggggggggttatttaaaaaaaaaaaaataataaaatatatttttntataantgtgnnantttttaaaaaaaataaaattaaaataaaaattgggccccccccttttaaaaatcccaattttcctcccccttccttccaccgttttactttttttttaggccccccaaattaaattcccccccccccctttttccccccccttccctgaaaaacccctcccttcccccactttattccctttcaaaccatcccccttttccccccttgccttattaccaaaaagcccccccccatcccccttccccaccatttcccccc

SEQ ID NO: 72861 - DNA, 226 bp, Glycine max
  unsure (1)..(226): unsure at all n locations
tttatttttttttttttttannattttttttttttttttttatttccccaactttattttttatccaaccgccaattttaaaaaaaactctctccctatatattcaaaatttatttaaaatatattttaaacaccctttgtaatatcttaaaactaacatcttttttttaaaatataaacactaatcaattcattaaatttggctattaattaatatttccctttc

SEQ ID NO: 72862 - DNA, 161 bp, Glycine max
acaacatccactgtctctctctctctctctctgtttcagcgtttcacaaatcacaaacgcgggggccatctgagtggattagatgtgaaacttcgcagctgattcaccatcgccttttttcttcccttgtgtcttaccaatctttaaatttcatgtttttt

SEQ ID NO: 72863 - DNA, 320 bp, Glycine max
aaaaaacacacatgtttgcaagctttttttgaccatgaagcagttaattcgccgggaagcttaggtaaaggacaacccgatctctggctactccgtaacggaattaatatcactacctactatcgctcgaagttcgcactaataatatcatgctggaataccaaagcagaaagcgtccagatgctattcacaagaagattgactactccatgcagcttaatgattatagaattaaagttcttcaagttctagatgccgtgatcagtactatgaaagatgctgcacttcaagaattgcagaatgtgtgttatcattggcat

SEQ ID NO: 72864 - DNA, 303 bp, Glycine max
  unsure (1)..(303): unsure at all n locations
accacccatccntcattcttatcaaactttagtttttcccaacacaatactctgtcgtcggcgggttcatacaatactatagattgtcacatataccttcatatccacatgataatacctactgtgctcctcatcacagctccctaattataaatcacacgatacatccttccataaatggcacacctaaccaaatttcgaaccacaattacctccctaagaattcttcaaaatacctattgcatacaaccaaacctaaacttatttacatctctcatgaccacgatctatgcactgttaccc

SEQ ID NO: 72865 - DNA, 412 bp, Glycine max
  unsure (1)..(412): unsure at all n locations
tgttgatcgagataactagaaacagtgtgatgaaaatgaaggtccttgttttcttcggtgctacaattttggtagcatggcaatgccatgcgtacgatatgttccctctccgaatgaacactggctatggtgcccgtactccggaggtgaaatgcgcaagttggaggcttgctgtggaagcacacaacatctttggctttgagaccattcctgaaaagtgcgttgaaccaccaaaggattccatcctggcgaacaatatagatcagactccaaaacagttaaccaacaagcttacttttatgccagagacctcgaagtccatcccaaggacacatttgtgttcagtatagatggcaccgtactctctaaatattcatactacanaaaacatgggatatgggtggagaaatta

SEQ ID NO: 72866 - DNA, 285 bp, Glycine max
  unsure (1)..(285): unsure at all n locations
tcgaccccacgccgttntcgatttgcaacaaaaataacttctcntgatgccatatatatgcttcggtcaacgggggggattcggacattcgtttgagtaagcggtacgcctctnnctgattggacaagaacatttgcacattaaaaaagaatttgtcttattcacattctttaaccannaggagaaaccagacatttaagaaactgaaatttcgcttannacaggaaagctttcagnncaccgaaaccttaagttagactactttggctttctcgttttgcaaaa

SEQ ID NO: 72867 - DNA, 361 bp, Glycine max
accacgcgtacatccacgcgttcggaatttatctcagagagaaacccatcatcatcggaggggcactcattcattcccccaaaacccaaaacgatgtcgttttctcaccaccgtcgatctcaatcggagatgcatttccggatcagcgacaacttcgacctcgaggtcgatctctctccgtcgcatcatttccaatatccggccccgctcctccaagattccggatccataccccaatctccgcaacccgaaaccgcccgctccgctcaccatagaagcaactccgccgacgcctcttactccttcttggtcgacggcattgaggccaagaaggccttgtcccctgataagctcgctgaat

SEQ ID NO: 72868 - DNA, 398 bp, Glycine max
cccagacaaaaactaatgatttcattacttccctctaacacatgccttgaaacagcggagggtctcttaaacccttcaaagctaggcatctctacacaaacatgctagctcgcaccaacgaagacatcacgtaaaatacaagtgaaatgcaactgtgcacaaaacaagggtgtgagaccaacgtatttgacactataagaagctgctttgcttgaaatatcacgtttgagcacacatgaacgctatctatgccgcgtaacgatatcttacctgaacttgctaagagtgatatcatatcacgaatgatgtgcaattgaggagctcaacgctaacaacatatgcgattggttgctcacagataagctgacaagagaacagaacttaggctctacggttct

SEQ ID NO: 72869 - DNA, 428 bp, Glycine max
  unsure (1)..(428): unsure at all n locations
cccacgcgtncgcccacgcgtccgcccacgcgttcggtgatagattaatatatatttaaggtatctccaaatgtaatacagatgctgttattggatatgcttatgtgtgtatcaggtgataattaaacatgaaccttttattgatggtgtaagatgattactagttctccattcctgacttatatttttgaaaaatagtaattatatacaaatcattctttattttaaatactccactaacatttctcatttctctctatcttcacatatcataagaaaaatgttacatggacacccattgtgttacttaacacctagagagagagtgaaaaaagagaaaaaaaatataagtaaaataagatttatgatgtaataaaaagagagagagaaagaaatgagaggtgttgaagatatgtttaaaatgatga

SEQ ID NO: 72870 - DNA, 435 bp, Glycine max
aagtagttgagaactaagaaggagaagcaaatggcttcctcaatgatctcttccccagctgtggccactgtcaaccgtgccggtgccggcatggttgctccattcactggcctcaagtccatggctggcttccccaccagaaagaccaacaatgacattacctccattgctagcaacggtggaagagtgcaatgcatgcaggtgtggccaccatttggcaagaagaagtttgagactctttcctacctgccagaccttgatgatgcacaattggcaaaggaagtagaataccttcttaggaagggatggattccttgcttggaattcgagttggagcacggtttcgtgtaccgtgagcacaacaggtcaccaggatactacgatggacgctactggaccatgtggaagctgcctatgtttggttgcactgatgct

SEQ ID NO: 72871 - DNA, 428 bp, Glycine max
cccacgcgtccgctcaatgccctttcgaattcactcttgaagcctgaaaatcgggaagctatattttcactccaacggcatagaagtggtgaaaaatattgttgttttgagctctactagaagctcttactcaaatggatgacccttttgcatgttatattttctctcatgccagtgttttaaatttaagctatgccaactattactgggatcagcggagccaggtataaagatgtttcgaatctgaatcaaaatatcttgagatcagaaaaaaagactttactaagcttattttaagttggcaaatatgactacgctttattcaggtatatttcagagttctcttttgaaaacaaaacattcatagtgaaatcaggaaatactaagatgaatagattatgtaaaagtaaattggctcaatttcttat

SEQ ID NO: 72872 - DNA, 209 bp, Glycine max
tccatccacacgtccgcacgaacattcaatgaaaaccaattttactcctctatgatctcttatacaactcatgcctatgtttacacgtgcctcggggctgaatggatgctacatatactggcctcaagctcatctatggcttcagcaatcaaatagaccaacaatgacattaccttcattgctatcatccctgagaagagatcaatgca

SEQ ID NO: 72873 - DNA, 455 bp, Glycine max
  unsure (1)..(455): unsure at all n locations
agagtttgttgtgagctataagctagtttatcgtgaggagaatatgaagttgtttgttatctttgttgctgcagtagttttggtagcatggccatgccatggcgcaggctaccaaaggttccctctccgaatgaaaactggctatggtgagcgttcttcggaggtaaaatgcgcaagttttaggcttgctgtggaagcacacaacatccgagcctttaaaaccattcctgaagagtgcgttgaaccaacaaaggactacattaatggcgaacaatttagatcagactctaaaacagttaaccaacaagctttcttttatgctagtgaacgcgaagtccatcacaacgacatatttatattcggcatagataacaccgtactctctaatatcccatactatgaaaaacatggatatggggtggaggaatntaatgaaaccttatatgatgaatggg

SEQ ID NO: 72874 - DNA, 249 bp, Glycine max
atttttagctttaaggtatccatctattcaagtgaatattgacaaaaagaaaaaaaaataagagcataaagaaacttctgacgatccttaccggtactgccttaacatccaacacataccacaatagctactataacgtgcggccaccctagactgattcaaatttactatcacaaacatgcgtcattactgttcaaaccaaggtggtcctcaacttaataaactggcataacatcccactttattcat

SEQ ID NO: 72875 - DNA, 377 bp, Glycine max
ggagacgaagaagtgaagagaagagaagagaatggatttggatctgaaaagagaatatttctggaggaatggattcatacaagatcatgtccatagaggattgtagcacagccagagagtaattggagttatatctttgttgaactttcagtatctcatactcattgatcagatctttgtctttgcatataattgttcaagattgtatttccatttgtatacgaatcctatttgcaatattttatttattgttctctcatatttgtagttcatgatatttattatacttggttacttgttatgtgttcttatttttttttattgtaattctagtttatttttatttattttttttatttacatttttatctaatttt

SEQ ID NO: 72876 - DNA, 286 bp, Glycine max
tcttgctcccactcatcctaaaacaaaaaactaaacattaacaaaaaaacaaactaaaacaaaaaaaaatttaaaaataaacaaaaacccaacacatctttaatataacaaatacatacataaacctacttaacaactctctacacctcaaccaactatcaacacaccctatattacacctcacactacccactcacactctcctttaccaacaaatacaatcctacacaaacaatctctctctacatttatacacatcaccatatttctaaacaatatccacatt

SEQ ID NO: 72877 - DNA, 59 bp, Glycine max
gataactagaaacagtgtgatgaaaatgaacgtccttgttttcttcgttgctacaattt

SEQ ID NO: 72878 - DNA, 269 bp, Glycine max
accaagcgtccgatgcggcgataggataaggcttaacgtggagtgtaagactttggctaccaggaactcgttagacatcggctaagcactcaagctgttctagagccattcgtgatacaatctaatcgacatgtaacttggactgatcctatttaaaaactgtggcttacttactatagtaccaccatgaaaatgaattgaattgaccgctaatactcgttcattgtttacggcataacggataaaccattttggcgaggaatctacac

SEQ ID NO: 72879 - DNA, 469 bp, Glycine max
aaaaaaaataaaaaaaaaaaaaaaaaaaaaataatataaattcaaataaaaaataatataaaattaaaaaatgatacaaaaaaatatgtgaaatgaaaaaaaaataaaataataatatattatatttttattttttttattatttatattttctatttatctattattattatttatattatatatgctacttttttttatatttcattttttatatctctattttttttttaatatatttttttattgttttattctttttatattattttatttttatttattattcattttatttttataatctttttttttaaatatttaattttatttttatatttttttttattttattatattttatttaatttaataatcttatcttttattatattattttaatttttttaatatttctttatttttattttttttttttttatatatatttttttattatatttttttt

SEQ ID NO: 72880 - DNA, 404 bp, Glycine max
attgtttgttgttgtaactcgttcttcttcttttgttgttctgtgtttgtgtgtgttttttctctcacctgaaaatgtcttgctgcggtggtaactgtggttgcggaagctcctgcaagtgcggcaacggctgctgaggctgcaagatgtacccagacttgagctacactgagtcaaccaccaccgagaccttggtcatgggagtggcacctgttaaggctcaatttgaaggtgctgaaatgggtgtgcccgctgagaacgatggctgcaaatgtggaccaaactgctccttgaacccctgcacttgcaagtgaggtgttgggaaaacaagcttcaagcaaaaatagcccttaattaagaataatgattaactattaatgtgtaactaaaaacttatgtattat

SEQ ID NO: 72881 - DNA, 64 bp, Glycine max
ctccatcttcaattcccgaatctacccactcatccaacatatcgttcaaacattctatacatat

SEQ ID NO: 72882 - DNA, 197 bp, Glycine max
agcacacataagcagaagcagaggcctgaaggtgctcaacaggactgagttgatcttccatagaacccgactaggtcactaagagggaactatacatcgagaatacaacacattgaccatgagcccaagagagtcgaaccaggcgagcttgactacgataaggacaactttatgcgacaactttgaacgtccgatcg

SEQ ID NO: 72883 - DNA, 72 bp, Glycine max
tccatccacgcgtccgatcaggcgtatcatccttcttaatttgtacattttacatttctttaaactacaata

SEQ ID NO: 72884 - DNA, 109 bp, Glycine max
atcaagcattggatccatcatgatttataggctgcaccatgcttgaaacaaaagctcttccctgttaacaagggttttaagatcatagatatgaatttgctaccattgc

SEQ ID NO: 72885 - DNA, 246 bp, Glycine max
ctcaagcattccattcttgtggagttttgggtgtgtttatacctgagactagtgctggatctggttatccagtgactgatgatcatatatattataagaggcactatatctttatatttacaatggtaccgcattgttagcatggtgtaaagttatgtatatagatatcaagacatctgacgatgtacagtcatgacgatgtgtacaactgcaacgagaaaagtactctgactttatgcttaaacg

SEQ ID NO: 72886 - DNA, 53 bp, Glycine max
ggcacgaccatccgatcaaacatcacttttactttttaagattcacactgttt

SEQ ID NO: 72887 - DNA, 347 bp, Glycine max
aacagacagactgatagcgagaagttgaagattatctatcggcagtggcgtcttctgacctgcccggtcacaatcctgggtggcgtatgctacgtcatcgccgccgtcaacgtgatctcttgcaagaatgatgcattcctgaggaccagaggagaggaactatgaaaatcagtctgctaccaagttggagaaatgtgacaacataagttcgcgtgttgatgtcatttaaaccctgatctatgagctcagtatactgttttgtaagatgcgctacagctagtgaaatatattgagttcatgaatgaaatctggactctggagcatgggccattagtttagaactaacc

SEQ ID NO: 72888 - DNA, 307 bp, Glycine max
aacagacagactgatagcgagaagaagaagatggtctatcgcaagtggtgtctcctgaccggcccggtcaccagcctcggcggcgtagtctacgacatcgccgccgtcaacgttatcttcggcaagaatgatgcattcctcaaaccagaggagaggaactatgcaaattagtctgctactaagtaggagaaaagagacaacagaagctagcgtatcgatgtcgtttaaaccctgatctatgagctctagatactcgttcgcaagatccgctcacgctagttaatcagattgagttactgcatgaagt

SEQ ID NO: 72889 - DNA, 78 bp, Glycine max
atctttctagagcatccaagcttacttacgcttgcgtgctacgtcttatctcttctatagcgtcacctatagtcactt

SEQ ID NO: 72890 - DNA, 161 bp, Glycine max
tccatgcatcacgttggaccctgcgtcacatttttgcttaccatttaatgtcatctcttcttgcaccgggtacctcatcaccggcaccgtgacctatccgtcatctactgattccttatttgctccttactcacgcacacgggattgtggaccttacttca

SEQ ID NO: 72891 - DNA, 309 bp, Glycine max
ctcacgcgttcgctcacacacgctcataggcttaccctaggattatcccatgccttcgttccggtctttgatggaccggatctatctgaaaacgtttcatacgacgcttcataacggtcccgagttaaaagtgttaactgtacataccaccattaacttgtgcagatgctctttatgcttaaatacttgcccaagctgaaatccataactgtcaagtttttgctttgaagcatcctaagttgcctttccgtccaaagtattgtaaatcaatataacttgcattaggactcttagcattgatacatggac

SEQ ID NO: 72892 - DNA, 152 bp, Glycine max
gccaacactgccgaaccttgcattgtatctacccacttctcaaccaacaatggcaatggcaacggaagcgtctctcttgaccccaggcctcgccggtctcaaacccagcgaccgagccaccgtgccatggaaacaatcctacaccctctcct

SEQ ID NO: 72893 - DNA, 199 bp, Glycine max
gccacgcgttcgataggacccagttttacatttgaaactgtcactgagatccaatggctcgccaggctgggtgcctgaatgctgatgtctacgtctattgctaaagccggtaagtctggtgtatctactaggtacacctaccatgcttggtgtctgatcgatcgatactctcaaatatgactctagctctccattatct

SEQ ID NO: 72894 - DNA, 250 bp, Glycine max
ctgcgcacaaacacactaccagtctttcctacatgcaaaatccatcggatactcaccatcttcgacttaattacaaccttaccccttcttaaaaccttcctatactacaaactcttttctataagatcttccacacgaacacccaaatacatttctaacaatgaatctccacttagtcatgatcctaattctcaattactgacttaaaactatcaatcaaagactcaattatacctcataaattcaccta

SEQ ID NO: 72895 - DNA, 219 bp, Glycine max
gcaagaactttctgaagttgctcatttaattcaattgctcgagaaactatcctctcatctcgagaagccatcacaagatgcattaccctttgcttctgaaatgaagattgttcaccatggtcaagggtgaattcatctcttgcaccctgaggatgttgggcatcgatagcatcaaggacttcttttaaaacttctaatgcatcactagcctttagaatc

SEQ ID NO: 72896 - DNA, 413 bp, Glycine max
cccacgcgttcgtccactcgtccgtccactcgtccgaagagctcaaaaattgatgaattgggggcaattaaggttgcaggctaaaatggtaccgtacagtagttcacttcttttcctcaattggttgttgtcatttgttaaatttggaggggtctttcaattgacattatcaaatttcttgagggtagctagtgatctgactaaagattatcatgatggtgaattcacctgacgaaggaaaaggatgcacgtaaaattggatgaagataaacttttttttcccttttgtacaataacaattaccttataggattggcagtaatttgcaaaactgtagtcttcttccttttcccagtcttttggagcactggttatctcaacatgtatacattatttttggtttttaaaaatat

SEQ ID NO: 72897 - DNA, 360 bp, Glycine max
acgagtacgcgtgcgagtcaacccgcgaggcgcccggaaacggactgggaagatgcctgtggggatcgcaccgtcgaccgaacctgataccgtgcgtaagcttctagggagagcatacgtgtcagcacacgtgtcatgaccagctataccttgaactatgcatgaccgaggcaactccggaggaagccctgatggatgctcacatggatactgacctgctgaccggtcgattgactcgaatgactgatcgaacgacttagcaaaccgtttagtacctagtttccttcaagatatccgtaacgctaggtcgagccctatcgcgaaaagtctatgattaaaggcatgattagcggaatgggc

SEQ ID NO: 72898 - DNA, 462 bp, Glycine max
  unsure (1)..(462): unsure at all n locations
tgttgatcgagataactagaaacagtgtgatgaaaatgaaggtccttgttttcttcgttgctacaattttggtagcatggcaatgccatgcgtacgatatgttccctctccgaatgaacactggctatggtgcccgtactccggaggtgaaatgcgcaagttggaggcttgctgtggaagcacacatcatctttggctttgagaccattcctgaagagtgcgttgaagcaacataggaatacatccatggcgaacaatatagatcagactccaaaacagttaaccaacaagcttacttttatgccagagacctcgaagtccatcccaaggacacatttgtgttcagtatagatggcaccgtactctctaatattccatactacaaaaaacatggatatggngtggagaaatttaactcgaccttgtatgatgaatgggttaacaagggcaatgcaccggcac

SEQ ID NO: 72899 - DNA, 426 bp, Glycine max
cgaaaaatcgtgcgcaatgttgggcgtgctctatcagattttgtggaaatagaatcacaggatatagtccagctgagtgtctctgctgatactgatcttggaactatttactctgtcactgtccctgtacggcgggttaagccagaatatcaagaaatggatgaattcgggacattaactaacgttgagtataaggacactggagagagttctggttctgttgatgttagatttgatttctatgttgcagacgaaagttcttgaatcttgatttcttgctcaaatgttaatgtgtgaaatgcttaccagtgaatgccaatccgaggtgctgtatatactctaaaatctggttctgttgatgacagaatgcatgtatttgtactacctatatctgacagcttaggttgatgcatcattgaactaaat

SEQ ID NO: 72900 - DNA, 129 bp, Glycine max
acgcccacgcgttcgcccacgcgtacgcttacataaacgggtggatcatgatttacatctgcggattcgatacctgcatcaagtgaggcacattacgttcttacgtcttagatgctgtgaacactcatt

SEQ ID NO: 72901 - DNA, 311 bp, Glycine max
gccaagcgtacggtagagtccagagcatcacgaggatcagcacgacactgggcatgcgcaagggctagcgcaggtctggctctagaactgactctgaagacctattggaggaactgttgctgacaccgtgtccgaatcgctgtgatcctctacgggctcaaatacgaatacatgctcatggatgtgctctctggagatcaatctctccatgtgaatcttgagctgaatgctgtcggtctagtgcacgatctagtggatgaccacgacgctctctacgacactatggacatgattaagtattatgaagacaa

SEQ ID NO: 72902 - DNA, 410 bp, Glycine max
aggatgcagatacaacttcttatgaagtggattcaaaagtagtatgtatgatcctagaagatgctagcactaacggattgtgggattttcctaacagaaagatgcctctatagcagacaggatattccctagccactactcagcacccgctcagcaacccttgtcagagttagttatgaaatccttcagggtgattggtgaattgagaattatgcagaacaaaatagcaatttgttgtgatagccaaagtgcaatacatctcttaaaacatcaagtggatcacgcgagataaaattgcatatcgatgttggaattcatttttatcggagatgttattgagaaaaatgaggtttaggtggagaaggcattaaaagacaatcctacttatgcattcatgaggacactaactc

SEQ ID NO: 72903 - DNA, 404 bp, Glycine max
cccacgcgtccgatcgagataactagaaacagtgtgatgaaaatgaaggtccttgttttcttcgttgctacaattttggtagcatggcaatgccatgcgtacgatatgttccctctccgaatgaacactggctatggtgcccgtactccggaggtgaaatgcgcaagttggaggcttgctgtggaagcacacaacatctttggctttgagaccattcctgaagagtgcgttgaagcaacaaaggaatacatccatggcgaacaatatagatcagactccaaaacagttaaccaacaagcttacttttatgccagagacctcgaagtccatcccaaggacacatttgtgttcagtatagatggcaccgtactctctaatattccatactacaaaaaacatggata

SEQ ID NO: 72904 - DNA, 220 bp, Glycine max
gagacattggttctacgtttgctgagggtcatgatttcatcatgaagtgtgacgtggaggataatccttcaggacatcataaaaggatgcgtcgtggtatatgtaacgggtcctgcacattctctagtgagaaacatagatgagcatgcatctgagggcactgctaactggctcacagccggtgtacttatatcaatggtggcaccagatattgtgcccg

SEQ ID NO: 72905 - DNA, 160 bp, Glycine max
acgcccacgcgtacgtcgacgcttgctgatcctgctgagattacgtctgggctggcaccatcaggtgatcaagagcgaggggatacagtgacctggttgctgtggaagctacccatggctagatgtactgactgacactgtctgtttacaacgggattca

SEQ ID NO: 72906 - DNA, 270 bp, Glycine max
cgtacgtcaagcctactgatcctgctgtgttaattctggtctgcgaacatggtgtgagcaagagcgaggggatagctgatctgctagctatggtagtgtcccatgcctttaaggtctgactgacgatttatgattacaaggggagttatgacaatcttgacgtgatcatcatgctcgtctaggatgcacattctgggcaacatcctattccacatgctgtcaactatgctccacaatgctcaaaaatgttctggtgtgagctcaatctca

SEQ ID NO: 72907 - DNA, 392 bp, Glycine max
gtgagctataagctagtttatcgtgaggagaatatgaagttgtttgctttctttgttgctgcagtagttttggtagcatggccatgccatggcgcaggctaccaaaggttccctctccgaatgaaaactggctatggtgagcgttcttcggaggtaaaatgcgcaagttttaggcttgctgtggaagcacacatcatccgagccttttaaaaccattcctgaagagtgcgttgaaccatcaaaggactacattaatggcgaacaatttagatcagactctaatacagttaaccaacaagctttcttttatgctagtgaacgcgaagtccatcacaacgtcatatttatattcgggatagataacaccgtactctctaatatcccatactatg

SEQ ID NO: 72908 - DNA, 333 bp, Glycine max
gagaagtttaaggtctgcgagcaatttggtgagaccttcttttgatccggtgactcccaatgctaaatatgatttgagagtaaatattccgcccgccagagtgttggcaggcaatactagttcgtgtaaagatcacagagaactctctcatgaccatgactctgaaaatgtttacaacttgagattgcattttgcggacaagagtgcccccaacagcatattctccagtcctgttactagtccacgtacgtccagcaatgcagatttttatgacattttgaaagtgtcaccggctcaaactgctcatagcccagaccggtctagtctgctcat

SEQ ID NO: 72909 - DNA, 56 bp, Glycine max
gccacgcgtgcgtatattgatagcgcgcgctctatatgatccatgcttacttacgc

SEQ ID NO: 72910 - DNA, 425 bp, Glycine max
acgaattagttcattctctttgcgcagttccctacctctcctttcaagatgcagatcttcgtcaagaccctcaccggaaagaccatcacccttgaggtggaaagctctgacaccatcgacaacgtcaaggccaagatccaggacaaggaaggaattcccccggatcagcaacgtctcatcttcgccggaaagcagctcgaggactgccgtaccctcgccgactacaacatccagaaggagtcaacccttcaccttgtccttcgtcttcgtggtggcatgcagatcttcgtcaagactctcactggcaaaaccataaccctagaggtcgaaagctctgacaccattgacaacgtcaaggccaagatccaggacaaggagggaatacccccataccagcaacgtctcatcttttccggaaagcaact

SEQ ID NO: 72911 - DNA, 331 bp, Glycine max
agaacgctgaaaacggcatagttttgcatttcttgcttgggctaaaattagaaccctgggcccctcagcgagacagccggcgccgccttcttcaataaccgtcgcaatcctctttcggcaaaaaaagaaaacccttcttctcactcatattcttacgcacacataacaagatacacaacacagcaccaaccttggcagcacaacgtgcttacaattcaaagaaacatattcacagacacatacaatggctggtcgattccgcgagctgacgaagaaatacggaaaagtctcactccgtgttcacttgagcggcttcaccgattgcatcact

SEQ ID NO: 72912 - DNA, 182 bp, Glycine max
atcgattactatactagtaataaattgtacaaaaaataaaaatataaataatataaatataaaaagaacaaacacaaattttatgtgattagtcgcggtatttaaaataaaaaatgaaagtagacaaataaaaaaggaaaggagatgtttgaatgaaaaaaaaaaaaaaaaaaaaaaacaaa

SEQ ID NO: 72913 - DNA, 118 bp, Glycine max
cccactcgttcgcccactcgtccttccactcgttcgcccactcgtccggtaatatgctctgccttaccttatcttgttgaaatctttgaatatatcatggtatcatggtcctgctgtt

SEQ ID NO: 72914 - DNA, 449 bp, Glycine max
tccactcgtccgtgttgatcgagataactagaaacagtgtgatgaaaatgaaggtccttgttttcttcgttgctacaattttggtagcatggcaatgccatgcgtacgatatgttccctctccgaatgaacactggctatggtgcccgtactccggaggtgaaatgcgcaagttggaggcttgctgtggaagcacacaacatctttggctttgagaccattcctgaagagtgcgttgaagcaacaaaggaatacatccatggcgaacaatatagatcagactccaaaacagttaaccaacaagcttacttttatgccagagacctcgaagtccatcccaaggacacatttgtgttcagtatagatggcaccgtactctctaatattccatactacaaaaaacatggatatggcgtggagaaatttaactcgaccttgtatgatgaatgg

SEQ ID NO: 72915 - DNA, 403 bp, Glycine max
  unsure (1)..(403): unsure at all n locations
tttgagagaagaagggggttaccgtgtttgtttcttcaccgaacgaacaagcatatggtagcttaaagccctagtttcaatgcgaacatcctataatcttgttcttcttcgctctcgcttccgccgctctcacaatttccacgcataccgttccctctccgtcgtaatcctcaaaccagaccaccatccaccagctatcattccctcaaattcccgattccttcttcccggcttcaatgctcatcgccatcgcagtttctttaccagggctaagccagcaaccaccaacattgaattcaacgatcaccacaggtctcttttattttactttatttaatggctccatttacctgcacctgattnctttcctggtatggtattggagtcagcgagctgtaaaact

SEQ ID NO: 72916 - DNA, 444 bp, Glycine max
gagataactagaaacagtgtgatgaaaatgaaggtccttgttttcttcgttgctacaattttggtagcatggcaatgccatgcgtacgatatgttccctctccgaatgaacactggctatggtgcccgtactccggaggtgaaatgcgcaagttggaggcttgctgtggaagcacacaacatctttggctttgagaccattcctgaagagtgcgttgaagcaacaaaggaatacatccatggcgaacaatatagatcagactccaaaacagttaaccaacaagcttacttttatgccagagacctcgaagtccatcccaaggacacatttgtgttcagtatagatggcaccgtactctctaatattccatactacaaaatacatggatatggggtggagaaatttaactcgaccgtgtatgatgaatgggttaacaaggggcat

SEQ ID NO: 72917 - DNA, 343 bp, Glycine max
tcgcaacaactacatataagcatacccaacatagaaaaagaaaaaaagattgggtgtggcatagctagctggctgaatctatctgctcctgttgccgctagtggtcatgatcgttgtacgattcactttcaggaacagaaaagcccttgtcgctagccatcgtcgcttttattgattgaaaaaagaataccacatatatttatttttgccactagcttcttacttcacgacccttctttttcttcctgtattacccctattccgcttcgtattcatctgagcaaaacttttctgctgctccttctctctgagctttcccgcacgtgcctacagctgcaacaat

SEQ ID NO: 72918 - DNA, 295 bp, Glycine max
aaagtttgcacctcggatggttagtgcttctgccttcaccatagatgaaaagcgtttgactatcatccacgtgggaaagggcaggatctatgagggagtttccgtacatgcacttgatctgctcaatatacatcgtgcattaatttatgctggagatgcatccatcatggacggtgaccgcttcaatgctgggtgttggcaacaaaaacctgtgtataaagccctggtgaaaggaaaaactctctcgcgcgacaacattgcttatacatcatttgtgggatttgcctacagggcc

SEQ ID NO: 72919 - DNA, 307 bp, Glycine max
aaaaaaactaaaaaacaaaagaaaaaaaaataaaagtacaagaaaaaaaaaaaaaaaaaagggatggcaacactggctaaggagagcatactatctagctccatctaccgacgaacactgggctctcctgccctctcgttcccctgttttctgcccccgtcttgcgacgtccttccttcccgctcgccgtctttatcttccactccctgcccgctgggtgcccatggtgggtcttgggaattccttggtggtccccaatttttttccctttcggaatttcctcttcttgtcccttgcttttatccct

SEQ ID NO: 72920 - DNA, 197 bp, Glycine max
acgcgcacgcgtacgcgggcgacaaggctggcgctcacagtatatatcgtgccaacgtctgcggcaggacacctccgcggctggcgacgtgacagcctctcacctcgtacgatggatgacgtcccaaagacgactacgagcagagccacatctgcttcggcggacaagatcgaacgttgcaagggctcgtccagtac

SEQ ID NO: 72921 - DNA, 455 bp, Glycine max
gttcgggacgcgtacgcgtacgcgcacgcgtacggatccttgaaagcattggttgcagccctaatctaatacgatctcatagtaggcacacaacatagatgaccgacgaagacaaatccgatagccttctacggcggacatcacaaccaccctgcgtcgtagccacaacccttacccgccgcccaagatggcgccttccaaggcgtcggcaactacccttcgtcgcagtcgcaccccgtcatcggctatcctcacacggttccgacggccggagccgtcgactcctccgcccctactccgacctactacccgggctaccaagccgttcccggttatgcagttgctgaaggaagacctgttagagaacgccgacttggttgctgtggccttggatgcggctggtgtctgcttatattaggctaccatcttgctggcattccgtggtatgttggggc

SEQ ID NO: 72922 - DNA, 281 bp, Glycine max
ccttatgctatgttcttcatcaaattaacaaagatataatatagctttaatttattatgtccatatcatataattttcttggtcctttctatgtcttaattaaccaaaaaatgtatgtccattttggtcttagtaatactttgttgtattgaagatgccttttggagatagtgtgtgtgtgggctcctctgcatcataccactccttattatggcattgttggcttttaaatgaagtgtgtctaatactgttgctgtcaaaaaaaaaaaaacagcaaaaac

SEQ ID NO: 72923 - DNA, 306 bp, Glycine max
cccacgcgtccgaaaaaaaaaaaaaaaaaaaaaaaaaaaaaaaaaaaaaaaaaagggccgggccttttaaaaatccccatctgtgaggggcgggccttccaaattctacctttttttttggggcccccaaaattaaattacctgccccgggttttacaactaactttctttggaaaacccttgggttaccccactttaagggctttccttccaaaccccttttcccaaggttgcaaaacatcaaaaagcccctccccgttggcctttaccaaaagggccccccctaaattggcatttgaaaccccc

SEQ ID NO: 72924 - DNA, 139 bp, Glycine max
gtactttccaaacttaaaaatgttaaacgcctgtattaatccaacaaaaaatgggcctttgaaactaaagaaaaacaaactaagattggcccaaactgaagaaatacaaaaaaatggcttgagatcaagcctaaccacg

SEQ ID NO: 72925 - DNA, 386 bp, Glycine max
  unsure (1)..(386): unsure at all n locations
gataactagaaacagtgtgatgaaaatgaaggtccttgttttcttcgttgctacaattttggtagcatggcaatgccatgcgtacgatatgttccctctccgaatgaacactggctatggtgcccgtactccggaggtgaaatgcgcaagttggaggcttgctgtggaagcacacaacatctttggctttgagaccattcctgaagagtgcgttgaagcaacaaaggaatacatccatggcgaacaatatagatcagactccaaaacagttaaccaacaagcttacttttatgccagagacctcgaagtccatcccaaggacacatttgtgttcagtatagatggcaccgtactctctaatattccatactacanaaaacatggat

SEQ ID NO: 72926 - DNA, 338 bp, Glycine max
gatcgagataactagaaacagggtgatgaaaatgaacgtccttgctatcttcgttgctgcgattttggtagcatggcaatggcatgcgtacgatatgttccctctacgaatgaacactggctatggtgcccgtactccggaggtgaaatgcgcaagttggaagcttgctgtggaagcacacaacatgctttggctttgagaccattcctgaagagtgcgttgaagcaacagaagaatacattcatggcgaacaatatagatcagactccagaacagttaaccaacaagcttactcttatgccagagacctcgaagtccataccaaggacacatttgag

SEQ ID NO: 72927 - DNA, 342 bp, Glycine max
ggaatacaggatctgactccagaattcaactctaattaaagcattgatttcccctcactaagatggctcaggctttgttgaagctcattctggagttgggtatctttgccattgaagaggtcaaatttaagtcacagtcaccatcagcattttattgtcattttttttgcttgatgcaaaggacaagacataactagctaatagtgaagtttcagtctaattttttagacggcctttaactaatttaaccgttcaaaagtgatgaagttgaaacccgtgggcaaattatggcaatgaaatacttgtcggcgcaatatgctgaaactcagctaggtttgatga

SEQ ID NO: 72928 - DNA, 344 bp, Glycine max
cccacgcgtccggatcgagataactagaaacagtgtgatgaaaatgaaggtccttgtttggttcgttgctacaattttgggagcatggcaatgccatgcgtacgatatgttccctctccgaatgaacactggctatggtgcccgtcctccggaggtgaaatgcgcaagttggaggcttgctgtggaagcacacaacatctttggctttgaaaccattcttgaagagtgcgttgaaccaccaaaggattccatccatggcgaacattttggatcagactccaaaccagttaaccaacaagcttacttttatgccagagacctcgaaatccatcccaaggacacat

SEQ ID NO: 72929 - DNA, 354 bp, Glycine max
  unsure (1)..(354): unsure at all n locations
gggacacattctagtgactaatactttggaggggcatttccatccagttctacatcaagtgaatcgctggatgttgtgattgatgaagctgctccatcctcgccttcaggaagtggaaattgttcaggattggttcccaatgaatttgagcttgaatatcctgaagacacaggaatgaaagattcaaaggcttgtttggatcaacaggatccgttgtgtcatttatcctgtaaagcagatggcttgactgaagaatcctccctcgtgtcaccctcaggaagcgaagacagaatcctgcacaatgagccacatagagatttacctgcaacagatcttangcgtggttttttcccg

SEQ ID NO: 72930 - DNA, 370 bp, Glycine max
ggcaaacaatgtacaactctagacttctgatttcccacatcacacctatcagcgagacgaggcttcctgttcctgaaattcgagggtttaaagaaaagttgcactgtttccagattattactagtcaatttaatcatatatctttagctttatttctgtgggcaacggtcatgttgtcatttgtcggcttctcataatcaatggatactaatgctctggtggagagaaagtgagcgaagaaaaaaaaaatagaaggaaataaatatttgaaattttgtggttgaaagttaacctttcttttctcacttttttttctaatcaaacaaaagaaaatattgtcatccatatttttttttcccccccttttttt

SEQ ID NO: 72931 - DNA, 356 bp, Glycine max
tcgacagtatctatctaaataaaggtgcgatggctctatgggcatcattataaatgcaaaaaaaaagaaaaaaaaaaaaaaaaaaaaagggaaaaaaaaaaaaaaaaaaaaaaaaaaaaaaaaaaaaaaaaaaaaaaaaaaaaaaaaaataaaaaaaaaaaaaaaataaaaaaaaaaaaaaaaaaaaaaagggggggcccttttaaagaatcaaattttaattaccggtgtttggaaattaataatttttttttaagggacccaaaatcaaattaattgggagtgtttttaaaaagtcttaattggaaaaaacttggggttaccaaattttatggttttgaaaaaaatcccctttt

SEQ ID NO: 72932 - DNA, 302 bp, Glycine max
aaaaaaaaaagaacaaaaaaaaaaaaacaaaaaaaaaaaaaaaaaaaaagacaaacagatgggaatgtgtaggctctcaaatgggggcggccagcgtactaggtcttagctcgtgtaaactttaatctaattacaagtcagtggtttacaatgtaccacctggaaaaacgcatggccttgtaaaatcactcgtattgcgaaatatacgcctttccccagctggcgtgtttgggaaaatggccgaatagagcaccgttccaaactgtttagaattctcaagggtgaatgggacacgatctgta

SEQ ID NO: 72933 - DNA, 353 bp, Glycine max
cccacgcgtccgcataattgaagtttttcttttgtgtgtgtggatttgtttggcaaatggtacaaaagttgaatgtttcagctcatgaggtgcgagttttttgttgggttttggcaagattttaaattgcattcgccgctgcgacagcatcaccatccttgctgttgtggaaaattgtggagaaatatgattgatgcagtcgcaagtgatgcagttgcagtgacatcaaaaactttgtcgctgtggtaacggccacaattgcagttacaaagcagttgtgctggcatcatcaattgcagtgactacaaaacattgatgctggttatcggccacaatttcagtttggggttggg

SEQ ID NO: 72934 - DNA, 84 bp, Glycine max
ggtgatcgagataactagaaaacagtgtggatgaaatggaaggccctggtttcttcggtggctccattttggtagcatggcaat

SEQ ID NO: 72935 - DNA, 252 bp, Glycine max
tcgctcacacgcacgatgagcataccgtgtgatgagactggggcgttacaagatatctgagttatcagacatcgcatacccacctcggggtctctaagtcgagccctttacgctgtcccaatccatacatgggacagcgaaaccggcaaggtagccatgctgagctacatacattcaagttcagcattttcgcactcaacaaatcggactcaactgtcgggcttgccttcttgttggcacccatctgttctc

SEQ ID NO: 72936 - DNA, 195 bp, Glycine max
tcctacgcgccactataattcttcttttatttgaaataattttctttatcattcacaatattgatgataccgttcattttttaaggctcaagagagattatcacctattattacaccattgttagcacatatgttaacacatagtataacaccattgttatcacaaatgtgaacacttattataacaactccatt

SEQ ID NO: 72937 - DNA, 148 bp, Glycine max
tgacattcgtccggaacatgtgaatgtgtatggttgtccttcctttgtgtttgctttcctggtgaatcggtggccgttgagcgtttgggtggatggacgatgatcctgaagttttcttttaagttaatttaattatcattttgtgcaa

SEQ ID NO: 72938 - DNA, 229 bp, Glycine max
cccacgcgtccgcagacgcgtacgctgatttgtgacttagctactttttaccgagtcttaggtactattattgctagatttggatttatcatccaccaagtctacctttctactaatctaacctccatctttaccctacactgaattatattcattaattctatattataaatcatatatatttataacaattgaaatatattttacctaataaatttactttccaatt

SEQ ID NO: 72939 - DNA, 61 bp, Glycine max
gttatgacgacattttgatctctcgtaagttgtatttcatgtttttgcaaaagggaaaggc

SEQ ID NO: 72940 - DNA, 345 bp, Glycine max
cccacgcgtccgtagatcgcgaggggcctccttgcaagctgtgagagagaaatacaaacggcataagttcaaatgtgtggcaacaacagcttctcctcccaagatacctctttctttttttgaatttggggggcagattctttggcaattgtaactttgctattcttgatacggctttggtttcaactattggcagaaaagtgtttcctaacactagagatgagagttccagactttctgttgcacttgttgatgcttatatagagagaggtgcttgccatgaaatgcagtgacaatatactatgctggcctcactgactttgtgatcgagcttgtgtgaaaatg

SEQ ID NO: 72941 - DNA, 422 bp, Glycine max
ctagaaacagtgtgatgaaaatgaaggtccttgttttcttcgttgctacaattttggtagcatggcaatgccatgcgtacgatatgttccctctccgaatgaacactggctatggtgcccgtactccggaggtgaaatgcgcaagttggaggcttgctgtggaagcacacaacatctttggctttgagaccattcctgaagagtgcgttgaagcaacaaaggaatacatccatggcgaacaatatagatcagactccaaaacagttaaccaacaagcttacttttatgccagagacctcgaagtccatcccaaggacacatttgtgttcagtatagatggcaccgggtaaaacccttttcctttccttttttaaaaaatttaaatttttttcccccaattttaaacccttttttaacccccc

SEQ ID NO: 72942 - DNA, 252 bp, Glycine max
cccacgcgtccgaaaaaaaaaaaaaaaaaaaaaaaaaaaaaaaaaaaaaaaaaaaaaaaggaaaaaaaaaaaaaaaaaaaaggaaaaaaaaaaaaaaaaaaaaaaaaaaaaaaaaaaaaaaaaaaaaaaaaaaaaaaaaaaaaaaaaaaaaaaaaaaaaaaaaaaggggggccctttttaaaggtcccaattttttttccctttatttgcaatgttaaaatttttttatgggtcccctaaatttaatttatt

SEQ ID NO: 72943 - DNA, 443 bp, Glycine max
cccacgcgtccgttcgttttcgacctcactttccttacggctgcaacaaagtttatgcaagatacttatagcataagagtggcagaatctctagccttaagatggtgtgttgaagtcatgtaataagggaccaacactgcattacacatattttgatggcattatcaaagattgcattcaattgatgcactctttttcatcacctggtgttcaatggataagaagaattattgctaataagttggcttctctagctttcatgctttaggaaagatactaaataaaagaggtttcaccttagaatgttagctatctgcaacatgatgtatgaacctcttttcctcaatttggaatataaaaaaaaaggggaaagggccccaaaaggttttaaaattttttttgtttttcccctttttacccttttttttccccttttttttttt

SEQ ID NO: 72944 - DNA, 204 bp, Glycine max
gggtaaaaaaaacaaaaatggggcgggggaaaatttcggccttggggggaaggggggcccttttgcgccctggctgtcccctttttcttttaagggtccttaaatcccaaaaaaagggggttttgaaccggccctaaaaaattccctgcgcccccaatggggcttcccagggccctctttccccaaaagaaaacccacaggggg

SEQ ID NO: 72945 - DNA, 201 bp, Glycine max
ctcacaaaacatctctaaacgcttgtaaagatctccatctcccaatatgttgatgcaaggaacttggagaaaaaatcaaaggaagaggtgaagaagccagaatcgtgcttagatggagggtccattggtggtgttgggggcattggcggcattggcggtgctggtggaggtggtggtggtttaggaggtggctatggatga

SEQ ID NO: 72946 - DNA, 430 bp, Glycine max
  unsure (1)..(430): unsure at all n locations
accacgcgtccgcccacgcgtccggtgaggcctccccatactcttcattcttcactctggactcttcactcccaaccctaggcaaacgcaaaccattcattcattcagttcagtaactcacctcaccatggccgcatccattacattgtccaggctcgtctcttgcaccctcaccactgcctctttcttcccacccataaccctgccttccaaactctcctctctccgactccccacccgccgccaccccaagccactcagattctcctcctgcaccatcaccgccaccatctgcgtcggcgacaagctcccggaggccaccttctcctacctggactcgtncggcgaaggggggggtttgggccccaaagggaaaacccgggaaacccgggaaccccggggggttggggtttttcccgggggggaaaaa

SEQ ID NO: 72947 - DNA, 271 bp, Glycine max
gcgggtgagaactaagaaggagaagcaaatggcttcctcaatgatctctttcccagctggtaccactgtcaaccgtgccggtgccggcatgggtgctccattcactggcctcaagtccatggctggctttcccaccaggaagaccaacaatgacattacctccattgctagcaaccggggaagaatgcaatgcatgcaagtgtggccaccaagtggcaagaagaagtttgagactctttcctacctgccagaccttgatgatgcacaattg

SEQ ID NO: 72948 - DNA, 308 bp, Glycine max
aaccagacgacgtgcttaattttttttttgttatagtgattgggcatatttgtgacaaatagtgagggtattacttttgccatatttgggaaaacaaaagaaattgttgcaccttaattcattagtttggagaggcttttcttactgtttatgcacaataggttttcttaaacaaaatcggctctgagacccttcctgatgagagcgtcgaatcatcaaacatatacgggcggccggtttaaaggatccacagttacttacgcaggcatgcaacaggattacttttctatcaggagacctaaattcaa

SEQ ID NO: 72949 - DNA, 306 bp, Glycine max
cgttccaaaaaaaaaaaaaaaaaaaaaaaatttaaaataaaaaaaaaaaaaaaaaaaaaaaagggggggggcaaaataaaaaaagggtagggaaaagggggggcccttctggggagcccctctttttttccccgccctgccgccctttaactcccctttttgttggcacctcaaatttaattgcatgacccctgtttttacacagcatacttgggtaaaccccgggggttctctccctaagtgccttgctaaaaaaccccctctttccaagcgccttaaaaataaaaagggccccccccttggccc

SEQ ID NO: 72950 - DNA, 182 bp, Glycine max
tcgaaaacaaaatactaaaaaaaaaaaattaattatacttaaataataaaacgacaatgggtgtaggttttccaggtttacttctgcgggccgccttcatggttgggccaagctaccgtattcttgcccaaaaaggcgttgcacttgtaatcactgacctaacgttgaaaacagctgacgcg

SEQ ID NO: 72951 - DNA, 212 bp, Glycine max
atgcctatattgttcttgtgtgttttgccttctaaagttaaaaatgaatagagacaaattgaaattggcgagtgccctaaaaaaaaaaaaaaaaaaaaaaaaaaaaggggggaaaatttaaaaaaaaaaaaattaaggggtggggggttgggggggaaaagggttatgtttgggggggggtaaaaggaaagcattggctgtgggttagaaaa

SEQ ID NO: 72952 - DNA, 99 bp, Glycine max
aaaaaaaaaaaaaataaaaaaaaaaaaaaattttatttataaaaaaaaaaaaaaaaaatattaaaaaaggataaataaaaaataaaataagggtatatt

SEQ ID NO: 72953 - DNA, 293 bp, Glycine max
ctgatttggtgatcttctttcatggtgatccatccatcaaaatcctgctttatgctcaacctcaatttacctgtcttacacaggcgcgtaatcttttcatacatgtatgtttttttccaccacacagtcgcagatgtattttgtagttctcaagtacatgccagcacatgttctggtaattgaaattcttcacatttcagcatctcgcattttctggggtggatgtttagttcacatccatgtacaaaatatggtttcacaaccagaataacagtacgcaaaatatgcatttt

SEQ ID NO: 72954 - DNA, 75 bp, Glycine max
cttatttcctcacgatgtaaaacttaatctcatacttgtacttcagcatcaataaacataccccttatatttgag

SEQ ID NO: 72955 - DNA, 70 bp, Glycine max
  unsure (1)..(70): unsure at all n locations
ctttctaataataaatagaattggcgnaaataaaaaaaaaaaaaaaaaaaaaaaaaaaaaagaaaaggga

SEQ ID NO: 72956 - DNA, 443 bp, Glycine max
  unsure (1)..(443): unsure at all n locations
tagaaacagtgtgatgaaaatgaaggtccttgttttcttcgttgctacaattttggtagcatggcaatgccatgcgtacgatatgttccctctccgaatgaacactggctatggtgcccgtactccggaagtgaaatgcgcaagttggaagcttgctgtggaagcacacaacatctttggctttgagaccattcctgaagagtgcgttgaagcaacaaaggaatacatccatggcgaacaatatagatcagactccaaaacagttaaccaacaagctttactttatgccagagacctcgaagtccatcccaaggacacnattgtgttcagtatagatggcaccgtactctctaatattccatactacaaaaaacatggatatgggggtggagaaaattaactgaccttggatgatgaatgggttaacaagggcaatgcaccgg

SEQ ID NO: 72957 - DNA, 390 bp, Glycine max
gttgatcgagataactagaaacagtgtgatgaaaatgaaggtccttgttttcttcgttgctacaattttggtagcatggcaatgccatgcgtacgatatgttccctctccgaatgaacactggctatggtgcccgtactccggaggtgaaatgcgcaagttggaggcttgctgtggaagcacacaacatctttggctttgagaccattcctgaagagtgcgttgaagcaacaaaggaatacatccatggcgaacaatatagatcagactccaaaacagttaaccaacaagcttacttttatgccagagacctcgaagtccatcccaaggacacatttgtgttcagtatagatggcaccgtactctctaatattccatactacaaaaaaca

SEQ ID NO: 72958 - DNA, 353 bp, Glycine max
ggtaaactttgaacaaaaaatggtatgctttttaaggccaaacaagagtgacattcacctagcaggagacgatgaagctcccttagcggctatgaccagagagtactttgatggggtcgcaccataacgccgcacaaagactgatatacagagactatttagatccatatgtcaatgctttgtccaatgcccattactcttctataactataccacaaataacacaattgcaacttctacagaacgatcacctcgacaagtgattgctgtacaatgtgaggcacgtaccggcagaatttgtggagacagagtattaccaagatctcaacagcttggacaaacaccaccatacg

SEQ ID NO: 72959 - DNA, 432 bp, Glycine max
aagccaagtgaaagtgagaaaaaataaaaatcaaagagcataatgtcagggatcattcacaagattggggagacccttcatgtgggagggcacaagaaggaggaggagcataagggtgagcaccatgctggagaatacaaaggggagcaccatcgtgaacacagtagtgagtacaaaggagagcatcatggtgaacacaaagctggagagtaccatggtgagcacaagccagagcacaaagaggggttcctagacaaagtcaaggacaagatccatggtgagggcggcgccgccgagggcgagaagaagaagaaggagaagaagaagaaggagcatggccatgagcatggccatgacagcagcagcagcagtgacagtgattaaactgctgcatcacctatatatttaaaggtttatgggaccatagtagcg

SEQ ID NO: 72960 - DNA, 450 bp, Glycine max
aaacagtgtgatgaaaatgaaggtccttggtttcttcgttgctacaattttggtagcatggcaatgccatgcgtacgatatgttccctctccgaatgaacactggctatggtgcccgtactccggaggtgaaatgcgcaagttggaagcttgctgtggaagcacacaacatctttggctttgagaccattcctgaagagtgcgttgaagcaacaaaggaatacatccatggcgaacaatatagatcagactccaaacagttaaccaacaagcttacttttatgccagagacctcgaagtccatcccaaggacacatttgtgttcagtatagatggcaccgtactctctaatattccatactacaaaaaacatggatatggggtggagaaattaactcgaccttgtgatgaatgggttaacaagggcaatgcaccggcactgcccgagact

SEQ ID NO: 72961 - DNA, 186 bp, Glycine max
gaagagaggagcccgaaagggtgcacggcttcggagcccgaattttacttgcagtgaccgaacaggaggaggcttacctgtcttagggggataagaccctaggatttcatcgagactcaacatgatgaatcagaacgaaacttgattctgcactgcatcattatccctatgtatacactgtgccca

SEQ ID NO: 72962 - DNA, 373 bp, Glycine max
cccacgcgttcgggaaacttgaaagcatagcagagagatcacatcgcggctctctcatgtctcaacccaaccacccgctgaatctaaatgatgataacagagagagatgtaagaataccatcaaacagcatgaagataatcttaagtttcttaattctcaatcaaatcaattagctgaatcaatatttgacttgcaaggtaatgaagaaagagaactctgctgctagtatatttagttggctaaaagttaatgcacagacatcaaatttgacattaacaaaagatgttgtgggagttggtgcaacccttgccaaagttgagagcgatgatcttagcaagattctttctgaatttttgggcttggagacaatgc

SEQ ID NO: 72963 - DNA, 452 bp, Glycine max
cccacgcgttcgcgagataactagaaacagtgtgatgaaaatgaaggtccttgttttcttcgttgctacaattttggtagcatggcaatgccatgcgtacgatatgttccctctccgaatgaacactggctatggtgcccgtactccggaggtgaaatgcgcaagttggaggcttgctgtggaagcacacaacatctttggctttgagaccattcctgaagagtgcgttgaagcaacaaaggaatacatccatggcgaacaatatagatcagactccaaaacagttaaccaacaagcttacttttatgccagagacctcgaagtccatcccaaggacacatttgtgttcagtatagatggcaccgtactctctaatattccatactacaaaaaacatggatatggggggagaaatttaactcgaccttgtatgatgaatgggttaacaaggg

SEQ ID NO: 72964 - DNA, 422 bp, Glycine max
cccacgcgtccgcccacgcgtccgagagtttgttgtgagctataagctagtttatcgtgaggagaatatgaagttgtttgttttctttgttgctgcagtagttttggtagcatggccatgccatggcgcaagctaccaaaggttccctctccgaatgaaaactggctatggtgagcgttcttcggaggtaaaatgcgcaagttttaggcttgctgtggaagcacacaacatccgagcctttaaaaccattcctgaagagtgcgttgaaccaacaaaggactacattaatggcgaacaatttagatcagactctaaaacagttaaccaacaagctttcttttatgctagtgaacgcgaagtccatcacaacgacatatttatattcggcatagataacaccgtctctctaatatcccatacta

SEQ ID NO: 72965 - DNA, 296 bp, Glycine max
  unsure (1)..(296): unsure at all n locations
cccacgcgtncgcatgagcaatgtccggcatcaaaaaaagctcctagagttgcctgattcagttgattgcaggagacctcagatttttgaactaaatgaatttggcatacaaatacttagctggacattggatatcataaagggaaaaatattggaactaatagaaagtttccaatcacttgtgaatgatttatttcaatcccctaagatggggaatgccacaacaattgcaacagagagggatgaaaaagttaagtcatctttccttctctccatactaatcctcttgattataa

SEQ ID NO: 72966 - DNA, 150 bp, Glycine max
tcgcccacgcgttcgcccacgcgttcggccacgcgttcgaaaaaaaaaaaaaaaaaagaaaagggaaaaaaaaaaaaaagggaaggggggtattgggcggtcgggcggtattaagggtacatgcttacgtactcggtcttgtaaagtgtt

SEQ ID NO: 72967 - DNA, 148 bp, Glycine max
  unsure (1)..(148): unsure at all n locations
tcgcccacgcgttcgcccacgcgttcgggaaaaaaaaaaggcttgaatttctcacttctagttctagtattggtgttggtgntggtatatgatgtatgggtgaataaatgtgatttggtgtttggtnaaaaaaaactattaaatttta

SEQ ID NO: 72968 - DNA, 453 bp, Glycine max
tctttgcgcagttccctacctctcctttcaagatgcagatcttcgtcaagaccctcaccggaaagaccatcacccttgaggtggaaagctctgacaccatcgacaacgtcaaggccaagatccaggacaaggaaggaattcccccggatcagcaacgtctcatcttcgccggaaagcagctcgaggacggccgtaccctcgccgactacaacatccagaaggagtcaacccttcaccttgtccttcgtctccgtggtggcatgcacatcttcgtcaagactctcactggcaaaaccataaccctagaggtcgaaagctctgacaccattgacaacgtcaaggccaagatccaggacaaggagggaatccccccagaccagcaacgtctcatcttcgccggaaagcaacttaggacgggcgcaccctcgccgactacaacattcagaaggaatc

SEQ ID NO: 72969 - DNA, 437 bp, Glycine max
cccacgcgtccgaaaagtttcttatcaggagctaatcaaatagaagttttatgtgaggaagttgagagtgctatcactgtgaccttcgtcggttgtaggttcttgaagcgtctgtgtgatgttcagaccaggaaggataatgtttggctttattgagagaaattatgctatgacagcaccatgggccacaatggcgtggatatatggcagaattttggctttccactctttccaccgtccaccattgataacactatggtttagagacattataggaatcataaacatcttgtctgagattttggtgcatgaagaacaacatcggattagttggcatgagttattcatgataaatagttgtgtttaaccctgagttcattctagctacatcttgcttgctttactgttattgcgataaaataggttgcagatgtgca

SEQ ID NO: 72970 - DNA, 96 bp, Glycine max
gagtttgtatgcttttctggtacccacgttctttgtcttccctaccctcgcaaactcctctttgtttgccgccactgtatgatccgtttccgtttc

SEQ ID NO: 72971 - DNA, 363 bp, Glycine max
aagacacatactgaaagctgaaccacacaatctggttagtgaaggcagaccacgcatgacagggattatgatacggtggaagagacacaaatgtaaggtattgcggtattaccgttctgtgtctcacatggcagctcttctgcaggtaggattatacagaaatcatcctcacccagaagccaagataatgagtctgaagactactggtcgatgcactaatactcaggatcactcctcttggatagcacccattcatgtggacaccataattcattgtgaaaacctagatgaagtgtttatcgaaggtaccaataccaatcacttaccgacccacgaaatcaattacatgttacaggctgatga

SEQ ID NO: 72972 - DNA, 420 bp, Glycine max
  unsure (1)..(420): unsure at all n locations
cccacgcgtccgcccacgcgtccgatcctctccgagtctctttatgcatttctattttttaaccgcgttagttttattactcataaagtcttctctttttttcttctttcccatcgtactagtaaacctaaacttaacacactatgcattgtcacgaaatatattattggtaggttaagggtcgctatatctataatctatcctcactacaaaaaagccaacccatatgctctgtttctcctctgctcaacacctctcctatgttacctccccctacatcctagtactcacactcactcctctatcatgcgcaacccgtattctgctacaaaaacattcttattctgaataacaatgactgaaacagcaaggtgtcacgaaactccaagcagcagcaccagcaactcctncacctcaaaa

SEQ ID NO: 72973 - DNA, 423 bp, Glycine max
attcctttctcagaatccacatattcacagcatctttttgagccgaatgttatttgtttctatggccgaatttatttgtatctatcttctatcttcttcctcaccgtcaagttgtctctacacaaaaagtactcatggccagttctcttcaaaagcctagacattgaattaaccactcaataaatatggatacattttcacaaaaagtacccaacattattaccagactttatacgatatcacacaatgaaagaagatgaattcctatgttgtcagcttggtttctgggtgtttctgattatatgtctggtgcttgtgtcactggcaggcattgcatcaggcctagctctaggactactgtccttcagccaagtggatcttgaggtactcattaaggccggtcgaccaaaagacacaaaacat

SEQ ID NO: 72974 - DNA, 257 bp, Glycine max
tccactcgtaagtacacgtgcagaaacggatctgtcagttgctgatgagcaaaagactatgtgaatgtgttcacgggttgggagatatatttacaaggtatggaacatctgttgtagcaatgttagcatgatggtcatgctatggtggttttaagttctacgggagactagagacgtgatccaggctttcttatttgatcgattatctgtaggactgagacagagtgtgctacaaggactccttttatgttaccata

SEQ ID NO: 72975 - DNA, 93 bp, Glycine max
aacacgcgtacgtacaacgcggacgagataatcttctcgatgggaacgtagaaacatacaggcagcaaggttagcgtgagggggaggaatatt

SEQ ID NO: 72976 - DNA, 195 bp, Glycine max
ggacatgattgatatgctgttattcaagtgcctcgtgatttcttggctgctcgtttagtctaagagattatcccaatgcatattacaagccaaaatattgtctgcacctgccttgttcaccataaatattcaacctgccagaaagtttgagccaccattttcaaaggtttgcctcatcagcgcaaattttttaag

SEQ ID NO: 72977 - DNA, 259 bp, Glycine max
accacgcgtccgcccacgcgtccgataattttttatttaaatttttcacctgatgttctactgtcaaaagctttacaattttaaccattgttgaaaatcaaaaaaaaaaaaaaaaaaaaaaaaaaaaaaaaaaaaaaaaaaaaaaaaaaaaaaaaaaaaaaaaaaaaaaaaaaaaaaaaaaagaataaataagaagtataaaaaatgcaaaaataaaaaatgcaatgcataacaaatttttagctaaacctaaataaat

SEQ ID NO: 72978 - DNA, 275 bp, Glycine max
ccgacacattgtgggacgcctgtggaaatccatccttgactgacattctggatacaccgtcactagggaccatctgcacgctcacttttatttcttatacattcaatggcatcccactgacacatacgtgttcagtataaattgcaccgctctatccaatatcccatactataactcaacatgcttattgcgaggagaacattacaccctccttgtttgatgctttggtaaacacgggcagtgcaccgttgccgtggctgactcttacgaattac

SEQ ID NO: 72979 - DNA, 206 bp, Glycine max
cccacgcgtgcggtaacgtggaacagctaatgctggtaatgggactgacaacagtatggatcggaaaatatatcttaagaggagaaaacttggaaatgacatatgcacatcaactacttgcctatgaatggaaagggatctagacttggtttgattccttaacatgtgcagagctacaatcgctggttgaagaagtagaggaatag

SEQ ID NO: 72980 - DNA, 85 bp, Glycine max
cccacgcgtccgaaaaagataaaataactgataagttcaatatgaataaaaaaaaaaatgtgtcagttacaaaaaaaaataggat

SEQ ID NO: 72981 - DNA, 282 bp, Glycine max
cccacgcgtccgctaggatactcatagttatacgaacttttattactaagctctcaaactcatttcaaagatcattaatgttttgtcgtactttcgcagcagttgaaggttggttctggtgaagcttcacagtattttttggcttcttttgagggacaagcaatctcttggagcttctgttttttctttatttggctgtcgttttgtatattatttttagctagtaagtagttttgctgatcaagtgaagcattttagtgaatggtggctcactcaaagttt

SEQ ID NO: 72982 - DNA, 192 bp, Glycine max
accacgcgttcgcccacgcgtccggtttgttttaattaaaaggtaaatagactcaacgtgtatagcacttgatatttacaccaaaaaaactattgcacttgttttgctaatgcactcaaacttcctttttttagtatgagtggatttagaaaaaatttaaagcactaaataaatgataaaagctttaaaagc

SEQ ID NO: 72983 - DNA, 422 bp, Glycine max
ataagctagtttatcgtgaggagaatatgaagttgtttgttttctttgttgctgcagtagttttggtagcatggccatgccatggcgcaggctaccaaaggttccctctccgaatgaaaactggctatggtgagcgttcttcggaggtaaaatgcgcaagttttaggcttgctgtggaagcacacaacatccgagcctttaaaaccattcctgaagagtgcgttgaaccaacaaaggactacattaatggcgaacaatttagatcagactctaaaacagttaaccaacaagctttcttttatgctagtgaacgcgaagtccatcacaacgacatatttatattcggcatagataacaccgtactctctaatatcccatactatgaaaaacatggatatggcgtggaggaatttaatgaaacc

SEQ ID NO: 72984 - DNA, 251 bp, Glycine max
atatttcctgaattgcccgagccttctttgttgatctcacaggtcaaggatctggtgggcaataaaatccctgattttgaatcaaacatatattaagatcatgttggagtcaagtgtgtatggctatgcatgttcttgtttcacgccttctaaacatcacaaaagtatttagtagcattagcatgcgtgagactttattactatcatatgtttggatctctccaaaatctaaaaaggaagactttggctgt

SEQ ID NO: 72985 - DNA, 252 bp, Glycine max
gtcacgcgttcgcccactcgtacggagactttttgtgggagagtgggccattcttggggcgatattgctgttgttggggtcaaaaatcaaagctttagcttctgagggataaaggatcgcatgaaagacgctttattctacatggttgaaaatgcccaaaataaataagatggtgtcacttcttcttctattgatttaactcacgaatgttcttatccttctcttggatggcctatttagaaggttactctc

SEQ ID NO: 72986 - DNA, 415 bp, Glycine max
gtttgttgtgagctataagctagtttatcgtgaggagaatatgaagttgtttgttttctttgttgctgcagtagttttggtagcatggccatgccatggcgcaggctaccaaaggttccctctccgaatgaaaactggctatggtgagcgttcttcggaggtaaaatgcgcaagttttaggcttgctgtggaagcacacaacatccgagcctttaaaaccattcctgaagagtgcgttgaaccaacaaaggactacattaatggcgaacaatttagatcagactctaaaacagttaaccaacaagctttcttttatgctagtgaacgcgaagtccatcacaacgacatatttatattcggcatagataacaccgtactctctaatatcccatactatgaaaaacatggatatggg

SEQ ID NO: 72987 - DNA, 422 bp, Glycine max
  unsure (1)..(422): unsure at all n locations
cttctccccgtttgggggcttttgcgaggctgtgcacgccatgctctccaactacaccaacggcgtgcacaagatggaggacgaagggggcagagagagagcgacccattgatgtcttccggcaacacaggggacgcacacatgaagacatctttgccaaacatgggttagttcgccgtgggacagtggtggtggcgctcgcgattatggtggtcggaggcgttgtggattacatctggtcacctcagaatctgcagattcccacaagcggcaatcccgcggagaatgttgtcgctgtagcgctgcagttggagttcctacaaagtggagcacttctaggcgatgaccgatgtgaggccattgtcgacttctcgatcacttncaaggggagcatgtcctggcagaagcaccaaaaagggaga

SEQ ID NO: 72988 - DNA, 132 bp, Glycine max
  unsure (1)..(132): unsure at all n locations
cccacgcgtacgtccacgcgttcgcccacgcgtncgaaattatgcgcccttgttccatnngngagaaaaaaaaaaaaaatatacggaagaacaaaaacataaaaaacccaaactcacaaaaaaaaaaaacac

SEQ ID NO: 72989 - DNA, 190 bp, Glycine max
  unsure (1)..(190): unsure at all n locations
cccacgcgtccgcttggagttcggattctgttttacaagaaagatacattatactccaattgggcgccgaanaccaccagctttagggtgttatactacctatcttccctcatcattcacactctcatcttttcttctttaccctacccttttcccacctcttacccatgttcttcttctctcgcttttt

SEQ ID NO: 72990 - DNA, 389 bp, Glycine max
gtgtgatgaaaatgaaggtccttgttttcttcgttgctacaattttggtagcatggcaatgccatgcgtacgatatgttccctctccgaatgaacactggctatggtgcccgtactccggaggtgaaatgcgcaagttggaggcttgctgtggaagcacacaacatctttggctttgagaccattcctgaagagtgcgttgaagcaacaaaggaatacatccatggcgaacaatatagatcagactccaaaacagttaaccaacaagcttacttttatgccagagacctcgaagtccatcccaaggacacatttgtgttcagtatagatgggaccgtactctctaatattccatactacaaaaaaacatgaatatgggggggaaaaatt

SEQ ID NO: 72991 - DNA, 477 bp, Glycine max
  unsure (1)..(477): unsure at all n locations
cccacgcgtncgcccacgcgtccgaggaaaccttcgtatctcaagaggaaataagggaaccacgtttgtgttacagaagcaaactgagcctaggcaaaggttattgacagctatttcctcggggaagggcattaaagaggcaatagatgaacttatttccttaaagcagaatactggtcaagaagatccagaactagaagagggtgagtggcagatgatgtggaattcacagactgtgacggatagttggatagagaatgctgtcaatgggctgatgggcaagcagattatcaggaagaatggaagaataaagtttctggttgatatcttgcttgggcttaagttctccatgtgtggaaattttgtaaaaactggctccggagtgtatggcgttacaatggatgatgcagccataattggtggcccattcngatatccctagaaactgaaaacaacttcatattggagcttctatac

SEQ ID NO: 72992 - DNA, 82 bp, Glycine max
ctgatgtaatagcaccctttggttatgcacgtcagctgtaaaatagcagagatgaacctcacgtaccaatattgactgatga

SEQ ID NO: 72993 - DNA, 414 bp, Glycine max
cccacgcgtccgcccacgcgtccgtgttgatcgagataactagaaacagtgtgatgaaaatgagaggtccttgttttcttcgttgctacaattttggtagcatggcaatgccatgcgtacgatatgttccctctccgaatgaacactggctatggtgcccgtactccggaggtgaaatgcgcaagttggaggcttgctgtggaagcacacaacatctttggctttgagaccattcctgaagagtgcgttgaagcaacaaaggaatacatccatggcgaacaatatagatcagactccaaaacagttaaccaacaagcttacttttatgccagagacctcgaagtccatcccaaggacacaattggtgttcagtatagatggcacccgaccttcttaatattccatactacaaaa

SEQ ID NO: 72994 - DNA, 358 bp, Glycine max
caaaagtgcctcactcaattcacgttcttggcttttatgtgctgcattttgttaaatgctgtgcgttcaagagggttccatctaggggaccaaccacgaacccgggcgttttacatgactctccagatctgagtcttttttctctttagtctttaccatgatgtgtgctacaaaagattgatgaagttgttggtgtcttgagtccatctttgctcagtgtatacgtatattatatatataaactctctctctctctctctctctctctcacacacacacacagtaacatacttgtgttgttctggtgtgaagtgtgaaagtgtggaatctgtgtccaattcaccatagtgcggaaaat

SEQ ID NO: 72995 - DNA, 381 bp, Glycine max
cgacgatgagttctgctgaaaattaaaaatcgaaataaatccgttaggaagttgttgaagtgggtgggacccaacgaagcagagatggaggctatgctgcattcgcaccgatgcagagctccgtcgatgtgggtttctggcaccgattgtcttctttgaagctcaacaagcatgccattgacgattctccaattcccttattcggtttttatgcaccgtgctctcagtctcatttaactgttttagctgagtctttgccttctgttccagggatactttacaacactaatactgtggataagaatgacctgttgaatacagagaccattcttgatagctgttctgcataattaaatcagagaaggcaactcagatgtttct

SEQ ID NO: 72996 - DNA, 513 bp, Glycine max
aaaaaaaaaaaaaaataaaaaataataaaaaatatttttatttaaatattataataatattataatggtgaataaaaaaaaaaggatggggtaataaaaatataataataaaaaaaaaataattaataatattttttaaataaataaataaaaaaaaaaaataggggccccccttttaaaaaaatcaaattttatttccccttctttccaaatataaattttttttttatgtccccaaaaattaaattaactccccctttttaaaaaactttttatttaaaaaacccttccttttcccaaataaaatcccttttaaaaaaatccctttttcccaattttcttaaaaaaaaaaaagcccctacccattccccctttaaaaaatttttccacttttattttaaaattgaccccccctttttatcccccttttaaacccccttgttttttgtttttacccccaatttaacctcttttatttttcacacccttttaacccccttttttttttttttt

SEQ ID NO: 72997 - DNA, 438 bp, Glycine max
  unsure (1)..(438): unsure at all n locations
cccacgcgtccgtccacgcgtccggcagatgccggtcaagcaagaatccatttatagatcatgaggattcttctggtagcaacctttctactaccaaacctcaaaaggtagccctaatcctagtccctggaataaaggaattcaatgatgcanattactggagggttgaccaggaggttgctgttctagagtgacggatagtaactcttgcttgtttgtatcaaaagttagaccaacaccagtggaccctattcttggttcgcaggagcgactgcagcacattaatgtacagtatattttttgtttcaattatgccttctttctgttgttcacgcttattagacatttgcgtattagagattaagcttgcttttaattctaagttttgccccttcctgtaagtgatttatgggttttcccacatttatggaattagtc

SEQ ID NO: 72998 - DNA, 301 bp, Glycine max
gagataactagaaacagtgtgatgaaaatgaaggtccttgttttcttcgttgctacaattttggtagcatggcaatgccatgcgtgcgatatgttccctctccgaatgaacactggctatggtgcccgtactccggaggtgaaatgcgcaagttggaggcttgctgtggaagcacacaacatctttggctttgagaccattcctgaagagtgcgttgaagcaacaaaggaatacatccatggcgaacaatatagatcagactccaaaacagttaaccaacaagcttacttttatgccagag

SEQ ID NO: 72999 - DNA, 417 bp, Glycine max
  unsure (1)..(417): unsure at all n locations
ttaaatcatctacttgccctctttttgctcaaaaaaaaaaaaaaaaaaaaaaaggggngaattataaaaataatatggggggtataaaattatttttttataataaatttttattttttaaaattattttattttaaaatattaatatttcccccaaaaaaaaaaaagggccccccctcttaaaaaatccaaatttttctccccctcttttccaaataaaaatttttttaaaagccccccaaaataaaattccttcccccccttttaaacaccccttaccctgaaaaccccttcctttccccaaaataatccccttaaaaaaaatccccctttcccccattttctaaaaaacaaaaaagcccccccccaatccccttttccaaaattttcccctctcttattccaaatggccccccc

SEQ ID NO: 73000 - DNA, 384 bp, Glycine max
ctagaaacagtgtgatgaaaatgaaggtccttgttttcttcgttgctacaattttggtagcatggggggccatgcgtacgatatgtgcggctctccgaatgaacactggctatggtgcccgtactccggaggtgaaatgcgcaagttggaggcttgctgtggaagcacacaacatctttggctttgagaccattcctgaagagtgcgttgaagcaacaaaggaatacattcatggcgaacaatatagatcagactccaaaacagttaaccaacaagcttacttttatgccagagacctcgaagtccatcccaaggacacatttgtgttcagtatagatggcaccgtactctctaatattccatactacaaaaaacatggatatg

SEQ ID NO: 73001 - DNA, 101 bp, Glycine max
cccacgcgtccgcccacgcgtccgcttattattgacatatttagacaccttttaaaattatgatgagcatctctaaagcaaggtatggccataatttttcc

SEQ ID NO: 73002 - DNA, 233 bp, Glycine max
  unsure (1)..(233): unsure at all n locations
aaaaaaaaaaaaaaaaaaaaaaaaaaaaacaacaataaataaaaaaaataaaaaaaaaaacaaaaagggggggaaanngggcggccgggggggggttccatattaaagtccaagttaacccacgcgaccatgctattatagggtctataaagaaaaccctaaggtcaaccaactacaacggcctttaacaacaaaaccattgggaaaaccaatttaatacccaagaaaaacat

SEQ ID NO: 73003 - DNA, 55 bp, Glycine max
cccacgcgtccgatgagaaccattatatttttatatattagaaatttgggtcccc

SEQ ID NO: 73004 - DNA, 439 bp, Glycine max
cccacgcgttcgttcctttctttctcaacttgttttcttctttggatattaagatacaatagcgcagctgcattgtttaccaaccatcaaaccatcctaggtgatatgctaagtgattgtaaatctgattgtcaaatgtagtgatgagaatggagaagccaccaatctatggtgcagcatcagattgcaaaccactaaccacctttgttcagacaaactcagatgcattcagggaagtagtacaacgtttaacaggtccctcggaagcaagtgcagcaaaagaaggagatgcaaaaaaggttgcaactatgaaaaggacaacctcaaaactccatgagagaaggaaatacatgaagccaaaagttgagattgttaaacccacttttaattataaaacaggtgcatgtttgtcaccctctaagtcaagaagtctagcttt

SEQ ID NO: 73005 - DNA, 264 bp, Glycine max
ctcacgcgaacgattccaggagagcgtcctggagatcgtgcttgaaaagatgaatatgaaggggaacatcattggtggctgcggttggtgagattgcttttcagattccatagatgatgcaatatatgagggtaggagggatggtaggagtagcactaattggaacattaacagatacttacgcatatactggactgtgtccgctaccgtgaagaaaaccggctagaaaatgagcttgggacagatgtatggacataaatgcgt

SEQ ID NO: 73006 - DNA, 114 bp, Glycine max
gatattattgctagtttacgatactatcactttgtcaccaatattagtttgcctgattatgggaaactatagaggacggattattactgaataaaaatgataccttttacattc

SEQ ID NO: 73007 - DNA, 233 bp, Glycine max
cggacgcgtgggtgaaattttaaaaatgactgggataaacttaagaattcaattagtgaaattgaataagtaaacagtttaattggattggtcgaatggtatcaaaaaaatggagtactaactcccatttcttatttattattgaattaaccgatcaacttgctttgttatcgaacatttcttctttgatttcaaaaattttccggaaaaaatttgaatctatttttatatgc

SEQ ID NO: 73008 - DNA, 65 bp, Glycine max
gcgcccacgcgtacgcccacgcgtccgctcctattcatctatcaatttctttttagttctagaca

SEQ ID NO: 73009 - DNA, 299 bp, Glycine max
cccacgcgtccggtaagcactgccaagggttaatcgaccattgtaggaaaggtgtgcattgcgacttgtctaccacattaatggggtggcaaaaaccttaaaaatggaattccttaataatctggggttgggtgattcctatcaagtaagtttggaaaatgtttggcctgttataaattgcaactgccggggttccactccaattaaagattcctttttgcaccattcgatgccaaaaaaaaaaaaaaaaagggccggccgttttaaagatcccaagtttacttaccctgccttccaac

SEQ ID NO: 73010 - DNA, 432 bp, Glycine max
ctagaaacagtgtgatgaaaatgaaggtccttgttttcttcgttgctacaattttggtaggatggcaatgccatgcgtacgagatgttccctctccgaatgaacactggctatggtgcccgtactccggaggtgaaatgcgcaagttggaggcttgctgtggaagcacacaacatctttggctttgagaccattcctgaagagtgcgttgaagcaacaaaggaatacatccatggcgaacaatatagatcagactccaaaacagttaaccaacaagcttacttttatgccagagacctcgaagtccatcccaaggacacatttgggttcaatatagatggcaccgtactctctaatattccatactacaaaaaacatggatatggggtggagaaatttaactcgaccttgtatgatgaatgggttaacaagg

SEQ ID NO: 73011 - DNA, 319 bp, Glycine max
atagcattaaaggccacactgccacctgtcagattcgacttacggtgcgaaaccgggattggctatcacggtaaagggcctacgactctatctgtatactgaatgacatgtagaacctgcagtataatatggcctcattaagaggattatgcaacaatccaaatggaccgataacatctaacttgcggggacctaatgccaacggtggagttctagaacatgtattgcataacctgagctcacctccataagagagctttgggagcatgaccagtgcactgtatggccattcaccatagcgcatgagagctgcacagat

SEQ ID NO: 73012 - DNA, 388 bp, Glycine max
atcgagataactagaaacagtgtgatgaaaatgaaggtccttgttttcttcgttgctacagggttggtagcatgggaatgccgggcgtacgatatgttccctctccgaatgaacactggctatggtgcccgtactccggaggtgaaatgcgcaagttggaggcttgctgtggaagcacacaacatctttggctttgagaccattcctgaagagtgcgttgaagcaacaaaggaatacatccatggcgaacaatatagatcagactccaaaacagttaaccaacaagcttacttttatgccatagacctcgaagtccattccaaagacacatttgtgttcagtatagatggcaccggaactctctaatattccatactacaaaaaacat

SEQ ID NO: 73013 - DNA, 453 bp, Glycine max
gaaaatttgaaagacaacaacaatgctaatgaatagaagagactaggatagtagaatagcagcttatatatcttttgaacttggtaactttatccattttttaatgctatttgtcattttcaaggaagaggccttgtgtgctatgctgtcatccatagtaggataattgtatgccaatgtttttagtatttagaactttttcttacttcccacttcccattatagctttgtttgccatagcccatatgtaaagaatgattgcattttttgtatagtactaaataatttctatgctcaaagatagaggtttcccttatagatgatgacacgcttgctgaagatcaagccttgctcaaaggatccaagagagtgtcactattgtctttgattttctggatgttgaacatcttctctttttggaacttgatgttgagtttgtctttgtttcctact

SEQ ID NO: 73014 - DNA, 190 bp, Glycine max
cattataggtatagtgttaagattatatagttcattgtgtatattcttattattgtattctataatttttgtttaattatttatattttcatatattttataaaaacgcagactacaaaaaaaaaaaacttgcaaaatacacgaaaacaacataaactaagttaacaagatcttaaactagattactatc

SEQ ID NO: 73015 - DNA, 285 bp, Glycine max
aaaaaaaaaaaaaaaaaaaaaaaaaaaaaaataaaaaaaaaaaaaagggcggacaaaaaaagggaaaaggggcttacagtacacgggcatgcaacaaaaaaaactcttatataaaaaaacatgggctgccgtttattgggacccaatttaaattaccggggcttggaaaacaacgcttttttttaggaaaacctaaatgcaatccattggcctttctttaaaaaggatgatactggaaaaacctggccttatcccaattaaaaccccttgcacaacctttccttt

SEQ ID NO: 73016 - DNA, 344 bp, Glycine max
gtgagtttgttgatcgagataactagaaacagtgtgatgaaaatgaaggtccttgttttctgggttgctacaattttggtagcgtggcaatgccatgcgtacgatatgttccctctccgaatgaacactggctatggtgcccgtactccggaggtgaaatgcgcaagttggaggcttgctgtggaagcacacaacatctttggctttgagaccattcctgaagagtgcgttgaagcaacaaaggaatacatccatggcgaacaatatagatcagactccaaaacagttaaccaacaagcttacttttatgccagaaacctcgaagtccatcccaaggacacatt

SEQ ID NO: 73017 - DNA, 158 bp, Glycine max
cccgggccattttttacttggaaaggaaaattggtactaaacggggccccaaaggtttgttgcaggaaacttgggtccacattttttcctcaaatgacctccatgttaattaggaaaaaagaccttggaaggggcaaagctttaataattggagcttt

SEQ ID NO: 73018 - DNA, 194 bp, Glycine max
cggacgcgtggggaaaaatattaatatcccacataattaatacgtacgtagttctgaacatgagaataatccttttggagcaagtttgtaggccgtcttaaatatatgttcaagttcaaccttgtaagttcttatcacatattagacctcatcgccaaaatagaaacagtcagatcgaatggctagatttatag

SEQ ID NO: 73019 - DNA, 379 bp, Glycine max
gttgatcgagataactagaaacagtgtgatgaaaatgaaggtccttgttttcttcgttgctgcaattttggtagcatggcagggccatgcgtacgatatgttccctctccgaatgaacactggctatggtgcccgtactccggaggtgaaatgcgcaagttggaggcttgctgtggaagcacacaacatctttggctttgagaccattcctgaagagtgcgttgaagcaacaaaggaatacatccatggcgaacaatatagatcagactccaaaacagttaaccaacaagcttacttttatgccagagacctcgaagtccatcccaaggacacatttgtgttcagtatagatggcaccgtactctctaatattccatac

SEQ ID NO: 73020 - DNA, 404 bp, Glycine max
cccacgcgtccgcccacgcgtccgttcactttcttccttgtattggtagcccaggcaaaacggccaatctgactttgcgatgtgtcaacggcgactcaaaagcaaagcccggacatagtttgtcttcacgtgggtttaacaaagggttgcttacagagtttcttggcattctgtccacctccacttcttggccctatctacgtactcggaggtggatatactgccaatagagctgtgttggcttctctttgtcaagcctccgtgatactataaatctcagttaaatacataaacactgttttcccatttttcttttctggctatcaattatatgaggatcccaccggtcgtttgcaaaaaaatgctaagaaatcggataaagagtagaacgcctcgagtcgctt

SEQ ID NO: 73021 - DNA, 416 bp, Glycine max
gaaaatgtcttgctgcggtggtaactgtggttgcggaagctcctgcaagtgcggcaacgggtgcggaggctgcaagatgtacgcagacttgatctacactgagtcaaccaccaccgagaccttggtcatgggagtggcacctgttaaggctcaatttgagggtgctgaaatgggtgtgcccgctgagaacgatggctgcaaatgtggaccaaactgctcctgcaacccctgcacttgcaagtgaggtgttgggagagcaagcttcaagcagagatagcccttaattaggaataatgataaactattaatgtggagctaaaaacttatgtattatgtctgtgatggttttcgtgcactctggtgttttgtgttaaacaaacatccttagaataaaggggcatgtcttgcctttcaac

SEQ ID NO: 73022 - DNA, 69 bp, Glycine max
tcgcccactcgtccgggatgcatttgtgtttttttaaaaaaaaataatacaaaaaagggaaacggaaaa

SEQ ID NO: 73023 - DNA, 357 bp, Glycine max
cccacgcgtccgtccacgcgtccggaagaacaagtagttgagaactaagaaggagaagcaggtggcttcctcaatgatctctgtgcccagctgttaccactgtcaaccgtgccggtgccggcatggttgctccattcactggcctcaagtccatggctggcttccccaccaggaagaccaacaatgacattacctccattggtagcaacggcggaagagtggcaatgcatgcaggtgtggccaccagttggcaagaagaagtttgagactctttcctacctgccaaaccttgatgaagcacaattggcaaaggaagaaaaatatcttcttaggaagggaggatttccttgcttggaa

SEQ ID NO: 73024 - DNA, 192 bp, Glycine max
tcgcccacgcgtccgcaattatcaataattaataactttacaatggactaacgagagatactttgactgcaggcctataaacaagaatcagaattctggcaatctacatacataagtggtgaaagtatctctcgttagtccattgtaaagttatcaattatcaataattaaagtttaagcataaacaacttt

SEQ ID NO: 73025 - DNA, 451 bp, Glycine max
cttccgccattctttgaattggccaaaacctactaacaaattccccatggccattaatggggctcaaccttttcttccccaaaactttgctggtaatattaggctacctgctttaacctgaaccggtaaaggtccttcctaatttccatcaaccagtggccccttatgaatggtaatgataatgggcccatgtgaataaggattcttccggtgggccctatgggaggaccccagagtgatgtcctctaaagctgaaatgtggtactggagtttggtggctgtagtgtgagattggcgggactatataaagcagatagaggtgcacacaattatttcttggaaaagggtgttgttgatagtcgtcctgatcaacatcctgaattctttaatttaaccccatttttttaaaatttttggggaaaaaaaagggggtgggaaaaaattttttttt

SEQ ID NO: 73026 - DNA, 372 bp, Glycine max
caagtagttgagaactaagaaggagaagcaaatggcttcctcaatgatctcttccccagctgttaccactgtcaaccgtgccggtgccggcatggttgctccattcactggcctcaagtccatggctggcttccccaccaggaagaccaacaatgacattacctccattgctagcaacggtggaagagtgcaatgcatgcaggtgtggccaccagttggcaagaagaagtttgagactctttcctacctgccagaccttgatgatgcacaattggcaaaggaagtagaataccttcttaggaagggatggattccttgcttggaattcgagttggagcacggtttcgtgtaccgtgagcacaacaggtcacc

SEQ ID NO: 73027 - DNA, 241 bp, Glycine max
ttcacacacaactgatgatataaactttgatattaactgagctcaaaatgatgcggggattacatacttcactaaaggggctgacaaatacattaatagccaatccttaaatttgtgctacagcaaacctacttacattcctccttaccaaccacctggtctaacaggactcattaccaaatgtattcatccctacataataggctccaatatcacctttcacataatcttaagtggaata

SEQ ID NO: 73028 - DNA, 114 bp, Glycine max
tcgcccacgcgttcgaaaaaaaaataaataaaattaaaaaaaaaaagggcacaaactggtgggggggcaaaataaaaagtgggggcttaccaacgcattcatttttttttatta

SEQ ID NO: 73029 - DNA, 367 bp, Glycine max
tcgtccacgcgttcgtccacgcgtacgttcacgcgttcgaaacagaaatcgtcgatttcttctaagatatataacggggcattggtctgatgttcgaatcgtacttgcgggatcaaacgactgctattggtagagaagggatgcatgggatgcttggaatgcccgttgaagctcatcaacttgatagtgacaatcactggtcttgccatcgtaggctacgggatctatatttctgttgaattctctaaagcttcagatgatgacaacatgccggtcgtttctccagcaagcgatgattcttatctgagtcaacttcgcccgcctgtgcttatcgccaagtccctatccaacgacttttacgatcact

SEQ ID NO: 73030 - DNA, 419 bp, Glycine max
  unsure (1)..(419): unsure at all n locations
gataactagaaacagtgtgatgaaaatgaaggtccttgttttcttcgttgctacaattttggtagcatggcaatgccatgcgtacgatatgttccctctccgaatgaacactggctatggtgcccgtactccggaggtgaaatgcgcaagttggaggcttgctgtggaagcacacaacatctttggctttgagaccattcctgaagagtgcgttgaagcaacaaaggaatacatccatggcgaacaatatagatcagactccaaaacagttaaccaacaagcttacttttatgccagagacctcgaagtccatcccaaggacacatttgtgttcagtatagatggcaccgtactctctaatattccatactacaaaaaacattgggantaaatttggggggggggnttttggggggggg

SEQ ID NO: 73031 - DNA, 366 bp, Glycine max
tccactcgttcgtacaagggtcagtttagatggttctgcggtatagagtttaaaaatggggaaggacacaattgctcgaaagagagagatggtacgttcgaaactcaaacccaaggcttggaataaggaatgtgatgatgatgacgatgatgggacccataagctcactcccgatcatgatttggtccggcatccgatcctaatcgatgatttcaagtgctgactcgagactaacgaaatatacgtatccacggtgtcatcctgtacaaacgagctgacattgcagtttttcttgcagaggcagccgtcggtggcggttgccgactctgcgacccgtgatcttaggcgtattgtgcggcttgaatg

SEQ ID NO: 73032 - DNA, 428 bp, Glycine max
  unsure (1)..(428): unsure at all n locations
cggacgcgtgggggtaactgaagtttgggagaacatggtggacaaaaagttttatccttctgtctcaacatattctgtcatgatccatggtttttgtaagaagaagggaaagctagaggaggcatgtaagtattttgaaatgatgattgatgaaggaataccaccatatgttactactgttgagatgctgaggaatcggcttttgggtttagggtttatagatcacattgaaatactggctgctaagatgaggcaaagcacttcctatgcaattcaagaattggcaaatattatgattggcaatagaacagctcataatactttgggacgtgatgagatggacatagaaagtgactgangaagtgattattgtttctcgtaatactttctcattaagctattttgacaaatatgtggaggcaaccatt

SEQ ID NO: 73033 - DNA, 283 bp, Glycine max
tcgtccacgcgtacgatcgtaatgattaggattgttttcaaagtcaggcacacatgattgactcggtcaatgttggtaatcatgatacaacatacttctatagacataagcgtgacagcacaatgctgaatgatcactatagttacattaactaaaaaggaacgtatcaaaaggcgtcattgtatagagcactaaatgatcatatagacttcaagattgtaacctggtcacatgctgaattaaagtggatctggatcatataggaagttctaacctatggatg

SEQ ID NO: 73034 - DNA, 94 bp, Glycine max
tcgcggtctcgtgggaaaaaaaaaaatataaaaaataaaaaaaaaaaaaaaaaaaaaaaggaaaaggaaaaataaaaaaaaggacaaaggaaat

SEQ ID NO: 73035 - DNA, 242 bp, Glycine max
gggcaagaaaggatgatgtggcgcagccaggtcttctctgtgtctgggtccggtggcatgcacatgcactcgctgtggctcctatagttactgcttctttttccaacacaagtcttgcgttgcaattccaaaagcctatcttcaaattcagcaactcctcttctctcgctcttacccatcggaagctgttaccctctgcactggcactaacgcagccctcaacttcaaaggaagattttgat

SEQ ID NO: 73036 - DNA, 426 bp, Glycine max
tcgtccactcgttcgtccacgcgttcgagcttattgaataaatattggtggaagcacacagcacacagcacaagcctgaaagttgaagcgaaagaaacgtctaacccgaatggtgtaataatatggagagggggtaattccacccaacagaagcagcgacactgacacaccaaactacaaatctgaaatccccctttgactcctctcactttgagacgcctcattcccaactttcctcccaaacacccttttatttttttttgtgagtgatttcaaagcaaacaaataaaaaaccatttaacgctctctcttattattccaatttccaaatcacaaaacaaaaattctctctctctctctctctctctctctctctgaatttatacctccaaattttttttcccccaatttttttttttttccccc

SEQ ID NO: 73037 - DNA, 202 bp, Glycine max
tcggccacgcgtgcggccacgcgtacgatcaggatagcatgcatatcaacatcatgatgaacaatgtgcgtgggtttgcaatactgatggtggctgtgcaacttctggggtaagagagtacaaaaggaaaggctgcgacttgatcccctgtggaggctattccttgtttgggggcaataacattgctgtgaaccaccatcaa

SEQ ID NO: 73038 - DNA, 302 bp, Glycine max
aaaaaaaaaaaaaaaaaaaaaaaaaaaaaaaattttatttaaaaaaaaaaaaaaaaaaaaaaaagggagggggaaaaaaaaaaaaggggggggcggtaaatataaaaagggccggcctttttaaaggtgccactctatcgcacgcgtccttgcaacagaaaactttttttttagggtcccctaatttcatttaactgcccgccttttaaaaccgccgggactggaaaaaccctggcctttccaaacttaatccccttgcaacaaatcccctttttgcaaattgccctattttcaaaaaggcc

SEQ ID NO: 73039 - DNA, 335 bp, Glycine max
gaaagtgcacttgccaggaaaatcagaagcacaggttaggttcaaggtagatgtttgcaaggatttgagtgtggtcgatgagcttggcaacaggaaagttccactgggacaacatctgcttcatgtgggaaacttgaagcatccattgagtctgagggtttgaaacaagtcttcaaatcctcggcactgatttcttttttttgccttcttttatttttgcctttttcctcgctgggttccttaaaagaattcttttatgggacccagaaataagtcagaggtaactgtaacaaaattctctgattggcattatcgctattaaatcacagatttgg

SEQ ID NO: 73040 - DNA, 287 bp, Glycine max
atttgttgcaagacatattattcaacgttttggggtttcgaataaacattccgtttttgtcaaggttatgtttggatttatgattttgcattcagcttgatctatatggatatgccatgcatagggctacaaaagaatggttttcttttcaagggtaagagctttttactgaaatgatgattgtattgctacactaaagagaacacatgctcagataagatcacactctcttctatgcattgagaaaagatggaacgtggaataataatattatcattttgatagcg

SEQ ID NO: 73041 - DNA, 280 bp, Glycine max
  unsure (1)..(280): unsure at all n locations
agcagctccttgagttgacatcaaatgcagttacagatggataaaccggnccattctttggtgcgggcgttataacggcacggccggccaatatatctatcattggaacaccatattaagttgtttttgtcgaaagggaaatacatttgatatcctccatcgatgacatttgctcgtagttgcttccaatgtgagattatatgcgtacacgaatatagtctattatgaacccagtgctttcaataatacctttgagggacaatattttggccatactttt

SEQ ID NO: 73042 - DNA, 186 bp, Glycine max
cccacgcgtccgattataataaacatctaaatacatcattcaattaaataaatatgagagtgaattgaaaaaaaaaaaggggaaaaaaaaaaaaaaaaaaaaaaaaaaaaaaaaaaaaaaaaaaaaaaaaaaaaaaaaaaaaaaaaaaaaaaaaaaaaaaaaaaaaaaaaaaaggggcgccccttt

SEQ ID NO: 73043 - DNA, 440 bp, Glycine max
  unsure (1)..(440): unsure at all n locations
cggacgcgtgggcggacgcgtgggcaaaatttggacatggtgccctgtattctggtgacttttgagaatgaacaaattgtggtttggaggggaaaggattatgagccccggaaggatggatactttcttaaagatcgagaatcagttgacgacattggtggcttgtgtgtgggaaaagagcaacaggctatgtaacaccacaatcaggtgtgataattaaatgaaatctttgtgcaaattgccgccatgaataagaagttcccttgagattggattgttgtgttatttgtacattggaggtgttaatttattgtttttgtcacaaattcacagcacagctaattaggaatcaattcatggttttgctgacagccaagcttggaagagactnntgtaattcatgatgtcagagaataatggaggaaactcagttcaatagt

SEQ ID NO: 73044 - DNA, 329 bp, Glycine max
gcgactacgcgtacatcgacacctgccgttctagatcgtgcgcgctcactctcgaggatccaacgctgacgggacgctctgcatagtcgacgcgcgtgtgctacttatattcagctggaccctacacatttaactaacactggtgcctcgggtaaacaactggcgtgactgcagaaaactctggcggtacccaacttaattgtcttgcagtacatgcatctttaagcagccctcgtcataacgaagaggcaaccaccgatcggcctttataacaaatgggaagcctccatggtcaatgggacacgccctgaagaactgcataaatctcg

SEQ ID NO: 73045 - DNA, 54 bp, Glycine max
gccacgcgttcgtccacgcgttcgtccacgcgttcgaaataaaataaataaatt

SEQ ID NO: 73046 - DNA, 386 bp, Glycine max
cccacgcgtccgaggggacaaagttggggtgcccattaaggtactagtaaaaagagcgggtgataaattggtgactttgagtgtgatcccggaggaagccaatctcgatgtgtaaaggactggtgatgcttttttaatctgtgaactgtgatgcgtttatttctgggttgctgatgagctcaattttgattacaacaaatgcaagtgacaatgttgaaatggagaccatttttgtgatttgattatctcagggtttgtttgtttcaaagttggattcttgccattattttccctattttaccaaaattcaaaccattcaatattcaattagcacccatacgtttaagtggggaatcaatggaaaaggaaaattaaatccttgatga

SEQ ID NO: 73047 - DNA, 451 bp, Glycine max
cccacgcgtccgtgaagacataactattccatttattttttgtttgttaatgcgtaaggtgcgcttgtgttgctgttgtggagaatatgtgtcattttgatgctgatggaaaacgatattacccatttggcagaggttcaggttctcaggttgttcagcagtttggaatacctcatctatttgatctccctattagaccaactctctctgcttctggagacagtggaatgcctgaagtggtagctgatcctcaaggtgaagtttccaagatattccaaaatctaagagtatgtgttgttcagcagtgtgccaaaatacgccaaccaggtttaactgcggtcacctatgataaatcaatcaaggcaatcaaagtgaaagtaccagattcaaaggaagaattctttctgcatcctgcaacagtgagacggaatgatcgctctgctcaaagtgt

SEQ ID NO: 73048 - DNA, 442 bp, Glycine max
gatcgagataactagaaacagtgtgatgaaaatgaaggtccttgttttcttccttgctacaggtttggtagcatggcaatgccgggcgtacgatatgttccctctccgaatgaacactggctatggtgcccgtactccggaggtgaaatgcgcaagttggaggcttgctgtggaagcacacaacatctttggctttgagaccattcctgaagagtgcgttgaagcaacaaaggaatacatccatggcgaacaatatacatcagactccaaaacagttaaccaacaagcttactttttatgccagagacctcgaagtccattccaaggacacatttgggttcagtatagatgggaccgtactctctaatattccatactacaaaaaacatggatatggggtggagaaatttaactcgaccttgtatgatgaatgggttaacaa

SEQ ID NO: 73049 - DNA, 404 bp, Glycine max
cccacgcgtccgcccacgcgtccgcccacgctttcgaaaaaaaaaaaaaaaaaataaaggtgaaaaatatcatataaaatggggttgtaataattaacctcctcttctttttattctttctttttctaatactaaccatcctaatttcttgccctcttcttttaaagttcccaaactttcttcccctttccttcccctttctacttctttctttttgttaccctatttctttttccatttccttcctcttccatcattttcccctttaacctcctttccttttccccccttaatcccctttcttatatattcccccttttcactctttcttcctctttttcttattaattcccccccctcttttctccttttctcactcttttttcccatttttttttttttct

SEQ ID NO: 73050 - DNA, 148 bp, Glycine max
attcgtcgtgttttaatttggatcatgttattgtattttgttctaattgagttgtgggactattgatatgcttgctgtggacaaggaaagtctatatatgcagcacgttatgtgatgaatttgagtgtgatcattaaagttgccttat

SEQ ID NO: 73051 - DNA, 426 bp, Glycine max
atgttagtgtagaactccctgtttaaattatgcagaatcagcttttttacaatatgtttgggtgaacttaaaaaacattttttagaaaatgttgctgaaagtatgcccaaatccaaattctaaaaacaaagaatagtcgctttcagtgttttcctatcatgttccaattcaacatctcaatggttctgaatgctactggtacctctcaacctttattcctcactctcttttgccactcatcatttgctcaaagttgacaaattttaaaaccatttgtcataatatcattttggtccatcccatccattcacttcatggtagccgtggaggcaaaggggatatcttggctctaggtgctagttgaagaggatgttgttttggcaaggagagatggagaagatgagtggaaaatagatggaagaagag

SEQ ID NO: 73052 - DNA, 90 bp, Glycine max
acgttctttgagatgagagtgttgatgaacagtaccattctgatgtattgctttccttgaaagttaatgcatgcttcttatcttctgtct

SEQ ID NO: 73053 - DNA, 386 bp, Glycine max
tgtgtatttccctacctctcccttcaagatgcagatcttcgtcaagaccctcaccggcaagaccatgacccttgaggtggaaagctctgacaccatcgacaacgtcaaggccaacatccaggacaaggaaggaatccccccggaccagcaacgtctcattttcgccggaaagcaacttgaggacggccgtacccttgctgactacaacattcagaaggagagtactcttcacctcgtcctccgtcttcgtggtggcatgcagatcttcgttaagacactcaccggcaagaccataaccctagaagttgaaagctccgacaccatcgataacgtcaaagccaagatccaggacaaggagggtattcccccggaccagcaacgtctta

SEQ ID NO: 73054 - DNA, 93 bp, Glycine max
tattcatattgttgatcatattgatataaaagtctggagtgtacctcaagtggtgaagcccctgtatgaatcagcaaaaatctttgctcaaaa

SEQ ID NO: 73055 - DNA, 284 bp, Glycine max
  unsure (1)..(284): unsure at all n locations
cccacgcgttcgatcgagataactagaaacagtgtgatgaaaatgaaggtccttgttttcttcgttgctacaattttggtagcatggcaatgccatgcgtacgatatgttccctctccgaatgaacactggctatggtgcccgtactccggaggtgaaatgcgcaagttggaggcttgctgtggaagcacacaacatctttggctttgagaccattcctgaagagtgtgttgcagcaacaaaggaatacatncatggngaacaatatagatcagactccaaaac

SEQ ID NO: 73056 - DNA, 212 bp, Glycine max
atatcataatccaacgtgcatatatgacagaggatatggtgctcgtaatgtggctacttctatgtgatatgtgcgcatctgatcatagtacaacgggcggaagcattttcgaaagcctctacaaggtcgttatgcgtcgcaactctgtctacgttaccttcgtcatcgctggcgccttccttggagaacgggctggggggcgttttaaagga

SEQ ID NO: 73057 - DNA, 328 bp, Glycine max
gccacgcgtgcgataaatataagcctcttctgcacatgtctaaagaagacgaggcatcacatgcagggttcaggactacgcacacggatacagtcacggttcatgaatagaataacacggctaatgctgatcaagtggcgcttgactttcagaagcacctgcatcactggcctaatttacacgcccttattaacttcctcacaaatatgggaagttggtgctttttcaactttaaaacatggttctcgcgacttggacaggcgtacaaatggggtgcaatataatggaaggtcactcgccaagaaagctttgtctacctccaaacaag

SEQ ID NO: 73058 - DNA, 367 bp, Glycine max
cagcgtgatgaatataggcctcttctgcacatgtctaaggaagacaagacatcacaggctatgttaagtacaaggcatatggatacagtcacggttcatgaagagaataacacggaaaatgctgatcaggtagtgcttgactttaggaagcacctgcatcactggcctaatttacagtacttattaacttcctgacaaataggggaagttgctgcttcttcaactttagagcatgtttatgttgacttgaaaaggcgtccaaatggtgtgcaatgtaatggagattctcttgctaaaaaagctgtgtctacctcgaaacaagaatgctcagtagttgtagacttgaaatcaattaaagctgatgatg

SEQ ID NO: 73059 - DNA, 417 bp, Glycine max
gttcttcttcttttgttgttctgtgtttgtgtttgttttttctctcacctgaaaatgtcttgctgcggtggtaactgtggttgcggaagctcctgcaagtgcggcaacggctgcggaggctgcaagatgtacccagacttgagctacactgagtcaaccaccaccgagaccttggtcatgggagtggcacctgttaaggctcaatttgagggtgctgaaatgggtgtgcccgctgagaacgatggctgcaaatgtggaccaaactgctcctgcaacccctgcacttgcaagtgaagtgttgggagagcaagcttcaagcagagatagcccttaattaggaataatgataaactattaatgtgtagctaaaaacttatgtattatgtctgtgatgggtttcgtgcactctggtgtttt

SEQ ID NO: 73060 - DNA, 429 bp, Glycine max
tagaaacagtgtgatgaaaatgaaggtccttgttttcttcgctgctacaattttggtagcatggcaatgccatgcgtacgatatgttccctctccgtatgaacactggctatggtgcccgtactccggaggtgaaatgcgcaagttggaggcttgctgtggaagcacacaacatctttggctttgagaccattcctgaagagtgcgttgaagcaacaaaggaatacatccatggcgaacaatatacatcagactccaaaacagttaaccaacaagcttacttttatgccagagacctcgaagtccatcccaaggacacatttgtgttcagtatagatggcaccgaactctctaatattgcatactacacataacatggatatggcgtggagaaatttaactcgaccttgtatgatgaatgggttaacaa

SEQ ID NO: 73061 - DNA, 326 bp, Glycine max
gatctactccacgcgttcgcccattcgtccgcccacgcgtccggagcatatatagcatatagatttagaattttgtatgagcttatgatccttgctaaggttccatgatttatgatctttagcccttcctgatcctaagcaggatcttgatttaatgaccttggctagttccatgtgcattttgtgcttggtacttcgaattcaatatgcttctttattagctgcgtctagtgtaattgtgtctcttctgctttattaagcttcgagatatgctgctcaatcaaatgcatttcactggatttatagtctttcaataattgattctt

SEQ ID NO: 73062 - DNA, 385 bp, Glycine max
cgagataactagaaacagtgtgatgaaaatgaaggtccttgttttcttcgttgctacaattttggtagcatggcaatgccatgcgtacgatatgttccctctccgaatgaacactggctatggtgcccgtactccggaggtgaaatgcgcaagttggaggcttgctgtggaagcacacaacatctttggctttgagaccattcctgaagagtgcgttgaagcaacaaaggaatacatccatggcgaacaatatagatcagactccaaaacagttaaccaacaagcttacttttatgccagagacctcgaagtccatcccaaggacacatttgtgttcagtatagatggcaccgtactctctaatattccatactacaaaaaacat

SEQ ID NO: 73063 - DNA, 408 bp, Glycine max
attgtttgttgttgtaactcgttcttcttcttttgttgttctgtgtttgtgtttgttttttctctcacctgaaaatgtcttgctgcggtggtaactgtggttgcggaagctcctgcaagtgcggcaacggctgcggaggctgcaagatgtacccagacttgagctacactgagtcaaccaccaccgagaccttggtcatgggagtggcacctgttaaggctcaatttgagggtgctgaaatgggtgtgcccgctgagaacgatggctgcaaatgtggaccaaactgctcctgcaacccctgcacttgcaagtgaggtgttgggagagcaagcttcaagcagagatagcccttaattaggattaatgataaactattaatgtgtagctaaaaacttatgtattatgtct

SEQ ID NO: 73064 - DNA, 184 bp, Glycine max
aaaaaaaaaaaaaaaaaaaaaaaaaaaaaaaaaaaaaaaaaaaaaaaaaaaaaaaaaaaaaaaaaaaaaaaaaaaaaaaaaaaaaaaaaaaaaaaaaaagggggcggccgccttaaaggatccaagcttaagtacgcgtgcatgcaacgtgatagctcttctataggggcaccaaaataaaatt

SEQ ID NO: 73065 - DNA, 58 bp, Glycine max
aagtagaagacgcgttccgaaaaagatagaaaaacaaaaaaaaaaaaatttttaaaaa

SEQ ID NO: 73066 - DNA, 266 bp, Glycine max
cccacgcgtccgctaggattgtcagtgacttgagtcttatctgttgtggtaatccacattcgaaaagaaggtggggcgatcatctgctttcatagcttctacactcttggaagatgggggtgttccaaaagcagcatattcttctaccctctttggatgaggccatccatgttattacctggggtgtttaagataagacagaaggggggacagaagttgggtgagtatatggtcagttacctaatatattttaacaggttttaaga

SEQ ID NO: 73067 - DNA, 253 bp, Glycine max
aaaagataaaaaaaaaagatttaatgaatcgggtgagaagtctaaactaaactttttacaagatataatatgatgattacgatcgaagacgaaataaactcatgtttcacattcaaagatgggaagccataacataattaaccaaagggaagctgatttttttaaaaatttaccaaccaaaaaaaaaaaaaaaaaaaaaaaaaaaagggaaagcggaataaaagaataaagaattcatttcaaaagaatgcaa

SEQ ID NO: 73068 - DNA, 460 bp, Glycine max
ggtactgtagctccacagtttacaggcgtgtctataattgaggtagaagaagaagtgcatgaatttactgtatttgatcagtcgcaccctaaatcagatgatatatatcagatgattgacagattagtacaggacctcaggcaggttggatatgttccaatgatacatcagtagagatgaatgaaaatcaaattggttgcattattatgtaagcacagctgaaatgatgcttcaaggaatgaatatgatttttttagttgagcacagtgcattgctggtttactaaaaacaagtaaacaaatcattgtattcatcactaccactggtttagcaacaaagttgtatgcatggctcatggctgaacctatgcttctggtgcaagcatcacagtacggatcccaaaagctctgcttgcagcatggcgtgatatctcttgcatgattttgcctaacacagtaat

SEQ ID NO: 73069 - DNA, 171 bp, Glycine max
ctccgaagaatggcgaccatgactgatgttagccagctattccccatggttttattgagcggatcaagctaaccgcggatcgcgcgtgcggtaaaaaagtaaatttcgcccacacatgccatgcaaccggatggaatggcattgggtctaatgatgataagcccaaacgtt

SEQ ID NO: 73070 - DNA, 426 bp, Glycine max
cccacgcgtccgctttttcgtattcggggttgctgctttctttcgactctattgtcttcttaataaatacagaaagaaacaaaaaaaaaaaaaaaggggaaaaggaggaacaagggaaaaccctaatcctgaggcactgaaagtgtgatatggcaagagtcatttcctcttcctgcgcacgcctcgcaatgcgcctcttctccaccaccaccacagccaccgcgttcgccgtcactttacccaaaccctcatcactctccctctcatcgcgtcgattcctcttccctctctcccatgccatcgtccctccctccacccgcgtcgccggaatccggtgccgcgttaaccgcgccggagactcggcgtactcaccgctgaactcggggtcgtcgtcttcgtcgttcagcgaccgcccccccacggaga

SEQ ID NO: 73071 - DNA, 469 bp, Glycine max
gagataactagaaacagtgtgatgaaaatgaaggtccttgttttcttcgttgctacaattttggtagcatggcaatgccatgcgtacgatatgttccctctccgaatgaacactggctatggtgcccgtactccggaggtgaaatgcgcaagttggaggcttgctgtggaagcacacaacatctttggctttgagaccattcctgaagagtgcgttgaagcaacaaaggaatacatccatggcgaacaatatagatcagactccaaaacagttaaccaacaagcttacttttatgccagagacctcgaagtccatcccaaggacacatttgtgttcagtatagatggcaccgtactctctaatattccatactacaaaaaacatggatatggggtggagaaatttaactcgaccttgtatgatgaatgggttaacaagggcaatgcaccggcactgcccgagactctta

SEQ ID NO: 73072 - DNA, 206 bp, Glycine max
atttttgttaggattaatatttcatttgttttgtataatgcttttaaagctgaactttctttcatgtgggcaaagtttgacggaaaagccatttccctaagtggttttttccaaacgttcctaacttgccgttggaagagacaacttttaacttccccctgggggggtaatattgcctccatttaacaaaaaaggggggacactgt

SEQ ID NO: 73073 - DNA, 151 bp, Glycine max
  unsure (1)..(151): unsure at all n locations
tcgacacgcgtgcggacacacgtacgcacacgcgtgtgntntttatgaactaaattggaaaaccaatatccaaaattggcttttcggattgagaaggcgtcccaagaaggaggacaaaccctcaggccctttttattaaaaaaaactaaat

SEQ ID NO: 73074 - DNA, 472 bp, Glycine max
  unsure (1)..(472): unsure at all n locations
gtgtgatgaaaatgaaggtccttgttttcttcgttgctacaattttggtagcatggcaatgccatgcgtacgatatgttccctctccgaatgaacactggctatggtgcccgtactccggaggtgaaatgcgcaagttggaggcttgctgtggaagcacacaacatctttggctttgagaccattcctgaagagtgcgttgaagcaacaaaggaatacatccatggcgaacaatatagatcagactccaaaacagttaaccaacaagcttacttttatgccagagacctcgaagtccatcccaaggacacatttgtgttcagtatagatggcaccgtactctctaatattccatactacaaaaaacatggatatggggtggagaaatntaactcgacctttgatgatgaatgggttaacaagggcaatgcaccggcacttgccgagactcttaagaattacaacaagctggt

SEQ ID NO: 73075 - DNA, 244 bp, Glycine max
catgtgatccgttcggtccaatgtagcataagcccagcatggtcattgcatcagtagctgtcatctagtgcttcagggggacgcgcctcctggaggcccattccggggcggggcgggtgcatgcccggttcgggtttggtaataagtaagccgtcgtcccgaagaaagttttcagggggttggtgcggtagcttcgataggcccctgtggtatccgggcgccaaggcgcctcgatacctgtatg

SEQ ID NO: 73076 - DNA, 159 bp, Glycine max
tgttgctctgaggcggtgcgcgactcttctgttatctgaatatgtctctgatgcgtggtcactgtggctgatgcagctcctgcaagtgcggcaacggatgcagtggctgaaggacgtaccgatacttgaactgcactgagtcaaccaccaccgagacct

SEQ ID NO: 73077 - DNA, 355 bp, Glycine max
  unsure (1)..(355): unsure at all n locations
gccaagtgaaagtgagaaaaaataaaaatcaaagagcataatgtcagggatcattcacaagattggggagacccttcatgtgggagggcacaagaaggaggaggagcataagggtgagcaccatgctggagaatacaaaggggagcaccatggtgaacacagtagtgagtacaaaggagagcatcatggtgaacacaaagctggagagtaccatggtgagcacaagccagagcacaaagaggggttcctagacaaagtcaaggacaagatccatggtgagggcggcgccgccgagggcgagaagaagaagaatgagaagaagaagaatgagcatggncatgagcatggncatgac

SEQ ID NO: 73078 - DNA, 443 bp, Glycine max
gtcacgcgtccgggaagctctagaaatggccagaatctgagttgccaatgcctgattgaggtgtagtacgtacaaaaacatgcgggagccgtacttcacacggactatactttgagacgagcgatagcgttcccttgaataaggtgaatttcatacacaggctgcaaatgcatgaactctcgtctaagcatatgtgggccttgtaatctgatgatgatgatcagtgtaagtacacaccattagacaatcagattaagcaagagagagatgatgattcagacgatgcatagaattaggaaaaacggcagatgggaggagggaaatcaggatttcttgctgctcttgagctatctgatgcccttgtaaacttacttggtactggagaaagcgagttatcgagaactgatgtcataaaaagaatgtgggatcacattaatggaaac

SEQ ID NO: 73079 - DNA, 134 bp, Glycine max
cggtccgggaccggagtttcgagctaggcgtacgcgtacgctatgcgactgagcttgagtatgatgtcaacatctggggggtgagcactggctggtgctagcacttcgttcgctgaccatgagcatggccgaac

SEQ ID NO: 73080 - DNA, 233 bp, Glycine max
cacgtgatagaaaatgcagacttgcgggatcgtttttgcgaccacagctgcccctaatccagggacgcttagtcaatcttcaggacgcgctcttacaattccccgcattgggtaaagccctgcgttacagatcttcatagattatctgcccactagtcttgattctgctggcactggagcgacatatgacgcatcaatcgctcctaccaaacttacagatgactgcatggcta

SEQ ID NO: 73081 - DNA, 71 bp, Glycine max
tagttctagcatgcgcattttactgtttgtgaaaacgacttggtcattctaatcattttttgtccattcaa

SEQ ID NO: 73082 - DNA, 271 bp, Glycine max
acgcccacgcgtacgatttttactatttttttttttatttttttgttttattatatatttttttgggtaagttttttttattcaattgtattggtgattatttttttttatattcaatatttttttagtaagaacctaatgacaattatttttgaacgggaaaacaaaacagattaaaaaagattcggttatataaacattaaatgcttcattctagttattttaaaaaatattttcgtggtccataaaatatttacactaatattaaaag

SEQ ID NO: 73083 - DNA, 177 bp, Glycine max
ctcactatcatcatacgctacctttagccaccgctgctgtggtgctggacatgcatggtaatcctctgcggaaacggctggcgatatgacatctctcatgttgccaccctacttgaggaagccgtggtgcaatagcactagctgcaactggaaatgaaacactccctgtaactgtcc

SEQ ID NO: 73084 - DNA, 225 bp, Glycine max
acgacagatattcaacatggctctctctacatttgaaagaatggcctcagtctcgaaaaggattaccctgaccgaggcgactagggtaaacgtgactcacataacaaaaatgctatcgctactattgatggccacggatgggatcctactcaacttgaggaatcctcgaaacaaggcattgcaaatcatccagtggccgtacctatttctatagacgactatgaa

SEQ ID NO: 73085 - DNA, 109 bp, Glycine max
aatatcagttccctttctttaaaaaaaacgcaaattaaaaaaaaaacaagataacaaacacaaacatgcgaaggtaaaaatcgcctacaggggtacgggataccagttc

SEQ ID NO: 73086 - DNA, 83 bp, Glycine max
accacgcgtccgcccacgcgtccgaaaaaaaaaaaaaaaaaaaaaaaaaaaaaaaaaaaacaggcaaggtgaaaagaaccaag

SEQ ID NO: 73087 - DNA, 159 bp, Glycine max
acgcgtacgcgcacacatcctacataacctgttcacaatttatgtctatcatgctccttacaagcaatgacaccggggttacaacggacgaagatcggcgctacgacgggcacatctgggactctgttcatcacgcaagcgacaattgctaccctaaca

SEQ ID NO: 73088 - DNA, 472 bp, Glycine max
cccacgcgtccgtgttgatcgagataactagaaacagtgtgatgaaaatgaaggtccttgttttcttcgttgctacaattttggtagcatggcaatgccatgcgtacgatatgttccctctccgaatgaacactggctatggtgcccgtactccggaggtgaaatgcgcaagttggaggcttgctgtggaagcacacaacatctttggctttgagaccattcctgaagagtgcgttgaagcaacaaaggaatacatccatggcgaacaatatagatcagactccaaaacagttaaccaacaagcttacttttatgccagagacctcgaagtccatcccaaggacacatttgtgttcagtatagatggcaccgtactctctaatattccatactacaaaaaacatggatatggggtggagaaatttaactcgaccttgtatgatgaatgggttaacaagggcaatgcaccggc

SEQ ID NO: 73089 - DNA, 224 bp, Glycine max
gctgaacgcacaatggggaaaagcgggcttcgggatcatgaagtggcgacaacgttggatcattgagagccgcagagagagtctgagagctgcacctgtgatgctcctccttgaactttacatgctccttatctattggctttgggacttgagtccaaccccagagaaccggcactacgactggctagtgcacttatgggcggtcttcactccctgaagcacaa

SEQ ID NO: 73090 - DNA, 469 bp, Glycine max
ggatgatttcaagaaaaaggtttgccgatgcgtaaggaagtcacaagaaatgttgtgattcgtcgcgtatgcctcatactgctgctgctctttgtgaactggaggacatataaatgtgtaatggattggttcacctgttactgatgatccgtataagaatcgcattggaagtgtccacattcttcctttcttcagttccatcatgttctctgcatggccatttgtcataacttggaaaacaaactgtattctaagtgctttggccggtcttttgactactttattggaaaatttactttggtcattcgcataagtttatattggatttcttatctaaaaaaaggtttattattttagttttggtacttgtttgctcttattgcgatggctcggctgattttgcactatatagccagttgtagctctcaagttgagtgcggattgagttatttttcacaacagatcaacg

SEQ ID NO: 73091 - DNA, 277 bp, Glycine max
  unsure (1)..(277): unsure at all n locations
tggtgggcttcaaagatgtagaaagagttgcagactcaggtcaattaaccaacctcaaatgagagataaaacgaggaaacttgaggttgtcactcagaagatcccaccattattcaactcgatccatgctctccttggaaacaagtgagattttttttggctttgagatttttcttttgttagaatggttaataatacgaaactaggtttacttatccattcgtgaattatttgagatgaacttctaattaaatgctcaatatttatttgtgtcngt

SEQ ID NO: 73092 - DNA, 118 bp, Glycine max
cgccgccgaccggccgattccggcgacaccgtcgtactgcccaccaactaaaacctcaccaaacagtgtgctattacaggtttcagcagtttgcgcgatgcggctgcgcgcattcgcg

SEQ ID NO: 73093 - DNA, 389 bp, Glycine max
  unsure (1)..(389): unsure at all n locations
cccacgcgttcgcccacgcgtncgcccacgcgtncggaaaaaacaaacaaaaaaagaagaaaaaaaaatgtctatggcatgttcaatcccatgcatcaaaatcccaacacgttcctcttccccatcttgcacttcatccagttcatcctattctttgcgggtctcttcttctaagcctcacaacagtgtcaccataaggaattctcaagctgaagggcctataagaaggccagtggcacccccaataagagaaccatcatcatcatcaagtgctccacagcttcagaagccaacacttccttctcagcctccatcaccatcctcttcaccccctcagaagccagctactgttgttggggatgataagaatgtcattacattggagtttc

SEQ ID NO: 73094 - DNA, 377 bp, Glycine max
  unsure (1)..(377): unsure at all n locations
gaaatattgtaaatgttatcagtaccattcaggccaacaaaataacggaggatgggtcccaggcagcccaaggtttggttgttcgttgaggacgattgagtgaagcaattatctgagtatctagattttattcaggtggaattttttgatcttaaacagaggataagagtgtaatttgttttgttacgatttatttttccatttattttagttggctggtgactctaattatactaatcaactttggtatagccatttttggaaaaaaaganaaatttatcatattttgtaatgttatctatatttaattatatgttatataatcttattataaagtttatttttagttggattgtatctctttttatttttttgta

SEQ ID NO: 73095 - DNA, 90 bp, Glycine max
gttcggtctaaaacatggatattttcacccatttttattgcgaacttttattcaagcttgttggtttaactagcggaggaaaaaacaaaa

SEQ ID NO: 73096 - DNA, 178 bp, Glycine max
cacaatataaaatatagacaataatctattttttatattcttcaaattctaacaataggtggggtaaaaaaaaacctaagggtgtgcaacaaaatattaatcaatatctcaaagtttttatttttgtgtttcttaccatggagatccttactttgcgtatcgtaacatataatttaac

SEQ ID NO: 73097 - DNA, 259 bp, Glycine max
gataactagaaacagtgtgatgaaaatgaaggtccttgttttcttcgttgctacaaggttggtagcatggcaatgccatgcgtacgatatgttccctctccgaatgaacactggctatggtgcccgtactccggaggtgaaatgcgcaagttggaggcttgctgtggaagcacacaacatctttggctttgagaccattcctgaagagtgcgttgaagcaacaaaggaatacatccatggcgaacaatatagatcagac

SEQ ID NO: 73098 - DNA, 348 bp, Glycine max
  unsure (1)..(348): unsure at all n locations
cccacgcgttcgnccacgcgttcgcccacgcgttcgcccacgcgtncgacggccgccgccgaaaactttccggtgaatgtaccaccggtgttgcctcccacgcggttgcctgaagatctgtatccggatcgcgtgcctatcaccatcatcgacacctcttcccgtgctgaggatagtgataaagttgctgaagaattgcagagggctgacacagttgtccttacctatgcatgtgatcggcctgagacacttgaaaatcttagtatattttggcttccacatcttcgcaaactagaggtgaaagttccagttatagtagttggttgtaagcttgatttgagagatgag

SEQ ID NO: 73099 - DNA, 324 bp, Glycine max
gttagtagatcagctcttgttcacattaatcagacacattggcttgggcatatccggacaccaatatttggcatattgtaattttaggaagagaagaagtaaataattttttttgcagaaagtaaattcaaatttgataattatgtaaagataaaaaatatattttagtctatatatatatacacacgcacgtctgtcaagcgaaaagctgaattttgagtacctttttggcatatttctttctcaatatctgaaggggcccacgtaagttagtgtacctaaaattatgacatgaaacaaataaatggctgccacacacacata

SEQ ID NO: 73100 - DNA, 84 bp, Glycine max
aaagatatcagatcgtatactgttcattttaaaggtttcacagtatcatataagaatgctttggaaatattattttgtttgtgt

SEQ ID NO: 73101 - DNA, 300 bp, Glycine max
cttccttaagctccttagtgctgctccttgcagctctaattctatcccctcaagttcttgcaactatgagaatcccccagtgtgcaagcctcccactgagaaaccaccagtttataagcccccagttgagaagcctcctgtttacaaacctccagttgaaaaccccccaatttataagcctccagtagagaagccaccagtgtacaagcccccagttgagaaacccccaggttataagcccccagttgagaaaccaccagtgtacaagccctccgttgaaaaaccaccagtgtacaagcc

SEQ ID NO: 73102 - DNA, 51 bp, Glycine max
taatcagtaattgaagtatcaagtttttcctcaaaaaaaaaaaaaaataat

SEQ ID NO: 73103 - DNA, 391 bp, Glycine max
tgttgttgtaactcgttcttcttcttttgttgttctgtgtttgtgtttgttttttctctcacctgaaaatgtcttgctgcggtggtaactgtggttgcggaagctcctgcaagtgcggcaacggctgcggaggctgcaagatgtacccagacttgagctacactgagtcaaccaccaccgagaccttggtcatgggagtggcacctgttaaggctcaatttgagggtgctgaaatgggtgtgcccgctgagaacgatggctgcaaatgtggaccaaactgctcctgcaacccctgcacttgcaagtgaggttgtgggagagcaagcttcaagcagagatagcccttaattaggaataatgataaactattaatgtgtagctaaaaacttat

SEQ ID NO: 73104 - DNA, 382 bp, Glycine max
tggatatgccgttgagcgtaaagcacgcttcacgaacgcgtgtcgtttttgtgttactgcttcctggcatcttgggtgggaaaaaaggatctctaccggctgctattgatcaacacgcctactgccaaaggagagagcaaaattcagagtgaagacaagcaacgtgatgcagagggagaagatggtaacgatgatgaaggcgacgatgacgacgatggagatggtggatttggggagggtgaagaggagttgtcatctgaagatggaggtggatatggcaacaattccaacaacaagagcaactcaaagaaggcacccgaaggtggcgcatgaggtgcaaaaaagaatggggaagaggatgaagatgaagatggtgatgatc

SEQ ID NO: 73105 - DNA, 156 bp, Glycine max
  unsure (1)..(156): unsure at all n locations
acggccacgcgtaacatccacggcctcccttttattcttatgaagagacgctgagcaaaccagggtgggccatttaaaatgccggcgggaccgntctattctgtaagagaactccgacggacttttaggccgcctcccaacagtatctctatctaa

SEQ ID NO: 73106 - DNA, 186 bp, Glycine max
  unsure (1)..(186): unsure at all n locations
tnaaaaatcttaattgangataattcaatctgatggcttgattcanaanaaaaaaaanaaaggggggaataaaaaaaaaaaaaggggggttgtaaataaaaatgggggggacgttttaaggatcaagcttacaaacgcgtgcattcaacgtaataactttttattagtggtacctaaaatcaattt

SEQ ID NO: 73107 - DNA, 128 bp, Glycine max
cccacgcgtccgaagggaagtcggcaaaatttatctcgtaacctcgggaaaaggattggctgtgagggctggtcacgggggtgccatttcctaacccttctgctgtttgtggtttgttttatcttttt

SEQ ID NO: 73108 - DNA, 410 bp, Glycine max
agagtttgttgtgagctataagctagtttatcgtgaggagaatatgaagttgtttgttttctttgttgctgcagtagttttggtagcatggccatgccatggcgcaggctaccaaaggttccctctccgaatgaaaactggctatggtgagcgttcttcggaggtaaaatgcgcaagttttaggcttgctgtggaagcacacaacatccgagcctttaaaaccattcctgaagagtgcgttgaaccaacaaaggactacattaatggcgaacaatttagatcagactctaaaacagttaaccaacaagctttcttttatgctagtgaacgcgaagtccatcacaacgacatatttatattctgcatagataacaccgtactctctaatatcccatactatgaaaaacatg

SEQ ID NO: 73109 - DNA, 371 bp, Glycine max
aaaaaaaaaataatattaattaaattatttttttttttttaaaaaaaaaataaaattaaaggggatattaaaaaaaaaaaatgggggataaaataaataaatataaaattatataaaaaaaaaaaaaactccccaaaaaaaaaaaaaagggggggggcttttttaaggattcaatttttttttccctttttttggaagatttatttttttttttggggcccctaaattaaattatttggcccgttttttaaaacgttgggttttgaaaaacccttggttttccaaattttattttttttgaaaaaattccttttttccaagtttgggttaaaaaaaaaaagggcccaactcttttttttttcaaaaatttt

SEQ ID NO: 73110 - DNA, 363 bp, Glycine max
caaagcattacaaatgacagttactttggttattatggatgggataaaagctgtctttgacccatgtaactgtgttaacttttagagaaatgagcttgtataaaattgattgtagaggctaagctttagcctcaggggtgcaacaactgattatcatttagttgtgacattattaaaaaaaaaaaaaaaaaaaaaaaaaaaaaaaaaaaaataaaataaaataaaaaaaaaaaaataaaaaataataaaattaataaatttattaaataataaaaaaataataagggggggccgttttaagggatccaattttacttacccgggcttgcgaagtaaaaatttttttttaggggccccctaaat

SEQ ID NO: 73111 - DNA, 411 bp, Glycine max
ggtggttttttttttttttttggtttttttttttttttttttttttttttttttttttttttttttttttttttttttttttttttttttttttttggaggggaaaggggggctttttttttttaagccccgaaaaaaaaaaaaactttggggggttttttttatttttttttggcccccagtttaaaaaaaataaaggggaggttgggcccttttttggacccctttttttttatattaaaaaaaagggccccccttttttgttgggggggggaggaattttttttttttttccggggggtttaggaaacttaaagggcttttttttccttttggggcctccgggggaaacctttttttggtttaaaaaaaccaaaaatttggggtcccggctttaaaaatttttttttg

SEQ ID NO: 73112 - DNA, 318 bp, Glycine max
agtgatttcagtgagtgatcggtgttcacttgatctcatcataatcgtcagcgtcaattgaagaagatgccgatcagaaacatcgccgtcggaaggcctgaagaggcgactcaccccgacacgttgaaggcggctttggctgagttcatctcaaccttcatcttcgtgttcgccggctcaggctccggcatcgcctacaacaagctcaccgacaacggcgctgccacccctgccggcctcatctccgcctccatcgcccatgcattcgccctcttcgtcgccgtctccgtcggcgccaacatctccggcggccacgtc

SEQ ID NO: 73113 - DNA, 382 bp, Glycine max
  unsure (1)..(382): unsure at all n locations
cccacgcgtccgcccacgcgtccgcaagtagttgagaactaagaaggagaagcaaatggcttcctcaatgatctcttccccagctgttaccactgtcaaccgtgccggtgccggcatggttgctccattcactggcctcaagtccatggctggcttccccaccagaaagaccaacaatgacattacctccattgctagcaacggtggaagagtgcaatgcatgcaggtgtggccaccagttggcaagaagaagtttgagactctttcctacctgccagaccttgatgatgcacaattggcaaaggaagtagaataccttcttaggaagggatggattccttgcttggaantcgacgtggagcacggtttcgtgtaccgtgag

SEQ ID NO: 73114 - DNA, 236 bp, Glycine max
cctagctacataataggatgtgttgagtactttaaaacattttcagatactcaaacatatgtcatagcaaatcttatttaccaacttaacgctatagatataaggagaattccacattatggttgagtatacattattaatagaatggtaaatttaaattgtcatatattactgatgtgagaattttttttttcatgttacctttttaaaagcaaaagtcttgattttttcatttg

SEQ ID NO: 73115 - DNA, 303 bp, Glycine max
tcgtccacgcgtccggccactcgttcggtgagctataagctagtttatcgtgaggagaatatgaaggcggttgttttctttgctgctgcagtagttttggtagcatggccatgccatggcgcatgctaccaaaagttccctcttcgaatgaaaactggctatggtgagcgttcttcggaggtaaaatgcgcaagttttaggcttgctgtggaagcacacaacatccgagcctttaaaaccattcctgaagagtgcgttgaaccaacaaaggactacattaatggcgaacacattagatcagac

SEQ ID NO: 73116 - DNA, 367 bp, Glycine max
ctcacgcgtccggtaaagcaaactcctctgacttttccttccatctctggggaaacattcctggcgactccgagcagctcagtctgattttgcattcaatcctatcaatcccaaatttccttgccggagatagagaatcttaacagttccaccactttccggctagacatggccgttgccgtcttacgacccgcccgccataatcctatgtccgacgcgagccttcttacactctgtcccttccggagttcgctcatcgccaatcaatgctccttcaaaacggtgtcttccgtcgacaggtctctactccctccccgacgaaaactccgcctcgatccttgcaattacctctattctccatatgaac

SEQ ID NO: 73117 - DNA, 475 bp, Glycine max
  unsure (1)..(475): unsure at all n locations
tccacgcgtccgaagaaagcagagggataggaagaaggaagaatggagaagtatttcggaaacgcttatcgtggcgacccgggcgtgccccattcggacccggatcgcttcgtcaacatatgggtcggatccgctgccttcgctgttctcacatatttcaatccctacatgtggcagctctctaatcagttcaattggcatgacaaagcaatgttatatgagcaatatcactggaaacaggcaaggaagaagaatcagccatatgagttcttgtggaacaagacctgggacaagaaccaccgggaacattactactacaactggcctatttactttccttaggccacttctatttcatttcttgcatactttgtcctatttattttggctgcaaaacctggatcgtccccccccctctatttttnnaatgctttccttgtgatcagttccttttttttttaaataactacacaat

SEQ ID NO: 73118 - DNA, 286 bp, Glycine max
cccactcgtccgaaaaaaaaaaaaaaaaaaaaaaaattgaataataatataataaataaaagagaaaaataaaaaaagggacaaagataaaaaataaaagagaaaaaaaaataataaaaattaaaaaatcaaataaataaaaattaaataatataaaaggggggccctttttaaaggtccaaattttctgtccctttacttcaaccgtcaaactttttttttaggggccctaaatttaatttaattggcctcgttttaaaaacttctaaattgaaaaacccttggg

SEQ ID NO: 73119 - DNA, 461 bp, Glycine max
tcgctcaaattgtgcttatggattgtatgttcatatatgaatttgaggagcagagtggaaggatgaaagggtgcaaaagatggggaggcttttgcatttttggatagcattcgaagaataaccaacttgagaatgattggttttcaaagactgcagttttttctcatgcataataagactcagaagttgaggaaattggtagggtttttgaaattatactttttacttccatcattaaatatactcattaccctccatccaaattacgtgcttaattttgtcctgacttgcaaagcattagcattgagcaccaattgttgttctccgctatttgaactactttggtatctggcaaaaccaatgtccaggttataaatgacatgtaaagctatgcatggtttaatatatgatatgttataaaataatgttatataatataaaataattttttccatgctatc

SEQ ID NO: 73120 - DNA, 226 bp, Glycine max
ttaggatgaaatctagacaacttttatttcagctgctacaattgtatgattagattgagggaaaaaaaaatattttatatagctaagaaattaaaacgaaaagtatggggcgaaaaaagagaagtgctttctaatataaaaaaattcatccattttaaatatcagcatcctatgacacttgttttggatgattcaatgtaatcaaacttattgcaaagttcccact

SEQ ID NO: 73121 - DNA, 266 bp, Glycine max
  unsure (1)..(266): unsure at all n locations
gagctgaaagctgcattttccattgatgatgtcaagctacctccttggttggacgggatgtgcttggcagaatatcttccaaatctagaagatatctttggggaacaagncntagcngatgtagcttaaaaagtaaaacgaaaagtagggggcgaagaaagagaagtacttttgaatatgaaaaaactcatccattttaaatatcaacatcctatcacacttgcttagtttcatttcatctaaacaaaagctgcggaaaataccca

SEQ ID NO: 73122 - DNA, 196 bp, Glycine max
acgcgctgaagaaaatgtggaaccaagagagccatcatccttctctttctgggtgccacatacggcggcgaacctctcttgggacaaggtagaaaacatctacctttctgacctcaacgagattgaaatagacgccttgactgaactcaagtcaaatctcgaacaatctatctcggcgaacaccctttttgattca

SEQ ID NO: 73123 - DNA, 211 bp, Glycine max
tcgaaaaaaaaaaaaaaaaacaagaaaaaaaacaattgacaaaaaaacaattaaacaaaaagattagggaaaatcacaaacgggtttacgagctccaaaattacgtacccttcctttacagtcatactacaattttttagctgcccctctgtttacaaaactgggtctcgtccaacacctgtgcaactgcaataacttttgttttccccca

SEQ ID NO: 73124 - DNA, 344 bp, Glycine max
cttccacagtgttctcatatccttctcctcttcatcttaaaacctatccacacaaaacatcatcaaacccttcagagttttccattcacatccaacccaaaaagcacttttccattagatgcacatctttggactccattcctgaggctgagtttccaactccagatccttcctcaagcacagtgaacagtgcagagtcctttcccattgagaagagaaggaggtcagagatagtgagagagagaagaggagaaaaactagtgcagccagagccaccaaactttgaaataagttggaagaggaccaaagagatcaacctagagaggccaatagggcatgtcata

SEQ ID NO: 73125 - DNA, 269 bp, Glycine max
tcgaaaaaaaaaaaatgtaatgaaaaaagaaaaaattaaaaaaaaaaaaatataaaaaaaaaaaaaaaggaaaaaaaaaaagggaaatatgaaaaaataaaaagggaaaaaaaaaaaaaaaaaaaaaaaaaaaaaaaaaaaaaaaaaataaaaaaaagggcgtaaaatatgggggctcaattagttattccgaatcttaaaaacatgaatacaaatcataatagacctcctaattaaaacccaaaggttcccattttttacaacctttt

SEQ ID NO: 73126 - DNA, 226 bp, Glycine max
tcgaccagacttacgaacactctatcaaagacgcatgaagagagattatagaacgggaaagatagaatgttcaagttcaaggttctcaagttcaacatctaatcctctattatgcgtgttccgaggaagaacatgaaaaaaccctacgagtcaactctgacgagttgcctgatcgtactgttacatgctccgactctgtgctcttctttgcctttcgaaatcaccg

SEQ ID NO: 73127 - DNA, 192 bp, Glycine max
aaagagacctcaggttctactcatttctcgttctgtactgtttttctcttttttttttttataatgatgggtattatttaatcatttctcaatttacattggtttgatacaatctccattttccaaaaaactaattttctatttttactttgataagaactgtaccgtcatgcgtttatgtgctcccactct

SEQ ID NO: 73128 - DNA, 311 bp, Glycine max
  unsure (1)..(311): unsure at all n locations
tcggtttcatgatctgatcactttgtcatatccataaagaagggagaaaaagaaagtttggaagttgcagaagctttgcaagtatgttaagttgcaatagctgggagaaatgaaccactgtgcaggatgttcaatttattccatccgggggntcattaaaaaacttgctttgatcccggtctactaccggagatgcccaatgagtggaagttggtcttggttgagtttgctttagtaagaaatccctttttcaggttgcagaatctcttggatttattgcgtgagaaataaaaattctattaatgcttgtt

SEQ ID NO: 73129 - DNA, 211 bp, Glycine max
atgagagtacgtcgcttacctacataaggactatgtacattgctggtgcctgacagttgctcggattgctagatgtgtggatgataacacatctcattagagcgctctttatgccctcacgcatgtcatgaacaaatgatcgatgcccatgacatagcgcctactagcgacggaaactatcctgtccaagggatatccattgtgtagatgc

SEQ ID NO: 73130 - DNA, 417 bp, Glycine max
tccacgcgtccggcttttcatcaccggcaagtgcatcctcctagccgactgcaaggtcttgcacaaggttgacaacatcgccgaggttccttacattttcgacatgaacgtcggcacctcaagattgtggttattgtcaaagataacatatcgttttggaagaaggtggatgtcatggaattgagtcatgcaatgtcatggaaagatgttgattcaagtctgatgccacacctattatgagctcctcaagtgtttcttggctcagacttgtaaccttctcgttgaaatggataccactccgaaacatttttaaccattcgcccttatcaatttgtatgccaaattgaaccttttggaagaagcacgaacactgtttgataaaatgtctgaaataaacctcttggcttatggcttttc

SEQ ID NO: 73131 - DNA, 75 bp, Glycine max
acataattgatgtggtgttattcaaaaaaatttttaataaaaaaaaaataaaaaaatataaggtggaaaaataaa

SEQ ID NO: 73132 - DNA, 416 bp, Glycine max
aatgccatgcgttcgatatgttccctctcctaatgaacactggctatggtgcccgtactccggaggtgaaatgcgcaagttggaggcttgctgtggaagcacacaacatctttggctttgagaccattcctgaagagtgcgttgaagcaacaaaggaatacattcatggcgaacaatatagatcagactccaaaacagttaaccaacaagcttacttttatgccagagacctcgaagtccatcccaaggacacatttgtgttcagtatagatggcaccgtactctctaatatttcatactacaaaaaacatggatatggggtggagaaatttaactcgaccttgtatgatgaatgggttaacaagggcaatgcaccggcactgcccgagactcttaagaattacaacaagcttgtg

SEQ ID NO: 73133 - DNA, 269 bp, Glycine max
cgggaagactacactcgtacgcgcagttggatgaattgcatacagatcaatgggcgcttccatctgggctccgtcactggcgctgcaccagcgatgacttgaactgttgcatcccatgtgatacgcgctatctatcctgggactgcgtcgtgactcatagctttggtttggggggccatgcacagaaagacctcgcccgatcagtagcaaaagatatatatgaccacgggacgcctgatatagatcttgatctagatgcgccacccttc

SEQ ID NO: 73134 - DNA, 183 bp, Glycine max
acctccacgcgtacggcataatgacattgacaatacgtacatgatatcacatgagaatctatggcatatatgggaagcacgggggatgacgatgacgaagatagagctgcgtgctcacaaatgatagggctgcttggcagtgaacttgacctcactaggactaacattcttaccaatagacct

SEQ ID NO: 73135 - DNA, 284 bp, Glycine max
gcctcgcaagcaaggatcttctgacaacttatatgatcatttgctttctttctatagcaggcattacatattccaggggctcatgccaaccagatgagggcaaagctacctatatccttctcattattcctcaagccacatcctttacgatatcatttccccaaatcctggctagaatctaatactccacaactaatggttgaagacaggccattcattatattgaaaccttatactggaactacaaaccattctttcacatctcacatgccattttcttacat

SEQ ID NO: 73136 - DNA, 343 bp, Glycine max
gcgggtagaaaaaaaaaaaaggcaaggccattcttgacggttgctggtgcttattaacatagagctgggcttgttccttgcaaaatcaacattgattaatacacacaacgatctggggagtgactaatagcaggcctgggagaatagctaactccttacatgctagctgaggatatacacactctacgctgtatttaatccaagaatttcacatgaaatattgccttcattgccaaacaggattcccataaaacgaatatcagtgtccaggacaagcctaacaacatcccctctgagcaagaaagattcatgatacaagactatacttatctgattgcatgac

SEQ ID NO: 73137 - DNA, 384 bp, Glycine max
gctacctaaaacccttgctcctgtgtcaaattgacatacagccacctcacttctgcaactgattacctttaccggattcttgggccagacactatagggtaccggtgcctaaactctgtattcattattcctaaagccactggcttttcattctatattccttcaaagcaatggcagcatctaaaggacccaatagaaaggttcaagcaagggctttcatgaaggagaaaattgtgacaagcctcacagcatctgccttcacaaacttaatgattgctcctgatgaggccgaggccgacatttcgccttatcttaagaacttcttgatcagcatctccgccggtggtgtagatgttgcttccattatcgaaacagtggttcggg

SEQ ID NO: 73138 - DNA, 402 bp, Glycine max
atttatatctagggccgggtatatgttattgaccgtgtaaacgtagccgatatatgcttggggttttatgaatacgcttttgttaataattgtaccgcgtcatcaaaagaaagagaaagggcaattaatgcatcaaaaacatttgaaccaactaatcctttctgccgagttgtcctgcgaccctcctatttgtataggggatgcataatgtatctgccttcctgctttgctgaaaagaatttgaatggggtttcgggattcatcaaactttagttgtccaacggtagacagtggtctgttcgctgcctctataggggaggtcgagccaagttaatccaatgttggtttgaattcacagtggagaacaatttgggagaaggtgacgtctgtttgtttgagctc

SEQ ID NO: 73139 - DNA, 434 bp, Glycine max
cccacgcgtccgcccacgcgtccggtccttgttttcttcgttgctacaattttggtagcatggcaatgccatgcgtacgatatgttccctctccgaatgaacactggctatggtgcccgtactccggaggtgaaatgcgcaagttggaggcttgctgtggaagcacacaacatctttggctttgagaccattcctgaagagtgcgttgaagcaacaaaggaatacatccatggcgaacaatatagatcagactccaaaacagttaaccaacaagcttacttttatgccagagacctcgaagtccatcccaaggacacatttgtgttcagtatagatggcaccgtactctctaatattccatactacaaaaaacatggatatggggtggagaaatttaactcgaccttgtatgatgaatgggttaacaagggcaa

SEQ ID NO: 73140 - DNA, 217 bp, Glycine max
atctcttattatagccaccgataaagaatgttttaattcagaacagctattcttcaagcaagaagccatcatgggggattagagctccagtccaggatgcccgctaaccaatactgggcttcccacttaaaatcggtgacaaaacattcaagtacttttaaattcccatagtaattatcactagcaaaacactgcggaagaagggcataaaccttca

SEQ ID NO: 73141 - DNA, 365 bp, Glycine max
accgcgcgctcgaccatgtgttggtaactgggtagtttactagtggttgtataatccagaggcttgttctcgtgctcgaattgcgactttattagggtcagctgcttgctgaatgagttacagattgagtaaaaattagtgctgaaatgctgtttgataggcagaacaaccaaaataactgcctaaatttctacggacccatctatagtcacacctatggaaaatgaccaggatgaaagcatgcattcaagagcacatgcaggagcatttgaggctgcatttaatgcagacataagtagagacacttgaactgatactctgtcttgttcagacacaggatgcaacacttgattgagccagtcatt

SEQ ID NO: 73142 - DNA, 375 bp, Glycine max
tcaaatcactatcttcttaaaaaaaaaaaattaaaaaaaaaaaaaaaggaacaaacgcaaggatgaagggaaaaaaaataatagggggggcccccctaaaaagatcctaacttaccgacgcattaaaacaacggggctgccgcttttatttgcaccaacttaactgaataatcctgccgccctttaacattttttctactggaaaaaaaattgaattttcccaactgatttttctatcaaaaaaaccgccaaaacccagttgttacaaaaacaaaaagccctgaaacaaattcccttctcaccatgtggggaaatcaaaaagagaacgggactcaccttctatcccaacattatcccctcctttttgggtattta

SEQ ID NO: 73143 - DNA, 267 bp, Glycine max
cccacgcgtacggttcgattcagatttcatttaaaataaaattcaaatcataccacgtttgggttattaaaaacgaggatgtgcataattaaacaacgagactcatccctatattgaacactcccttcatttattcctatgacagactcatagataactgataatggggacccatacgcgtaaaccggtttaccctaaaccttctttgtccttctcttatttaatcctgctgcatcttcttattctgttgcgcaatctttattattc

SEQ ID NO: 73144 - DNA, 347 bp, Glycine max
ataccgctcgccttatgtagtttgaagtcttttgtttgtgattcacgtcattgatacagttcttgttattattgtggttctaatgctatgtttcttgcctttatgaatagataattttttgttattaaaaaaaaaaaaagagaataaagtaaaaaaaaaaataaaaaacaaaaaaaaaaaaataaaaaaagaataaaataaaataaaaaaaaacaaaaataaaccgggggggccgttttaaatgaaccaagttatcctacgcttcaatccgacgcaataacttttttataggggaacataaataaaattacctggccggctttttaaaccttctaaactggaaaaac

SEQ ID NO: 73145 - DNA, 254 bp, Glycine max
ctcacgcgcacgacatggaggttgcagagcgttgattgtgtaagacatgaaagctctaaggtgtaatcctcacgcgctgcatcatggctgtaaccttttcatcataagctgcatcctgcatagtcactcaaccccaaactgaggaatttttgaagctcaaccaaaccaagccacagaatgatggtatgatacggtagttacacgtgaagcataaaaacataggtgcggtattatctgctacaccagagagttca

SEQ ID NO: 73146 - DNA, 408 bp, Glycine max
tcgtccacgcgttcgctagaaacagtgtgatgaaaatgaaggtccttgttttcttcgttgctacaattgtggtagcatggcaatgccatgcgtacgatatgttccctctccgaatgaacactggctatggtgcccgtactccggatgtgaaatgcgcaagttggaggcttgctgtggaagcacacaacatctatggctttgagaccattcctgaaaagtgcgttgaagcaacaaatgaatacatccatggcgaacaatatagatcagactccaatacagttaaccaacaagcttacttttatgccagagacctcgaagtccatcccaaggacacatttgtgttcattatagatggcaccgtactctgtaatatgtcatactacaaaaaacatggatatggggtggaga

SEQ ID NO: 73147 - DNA, 233 bp, Glycine max
tcgcccacgcgtccgaaaaaaagtaagaaaaaacaataaaagaagagaaacagagaaggcgtaagagaaagtataaaactcgtgagcagcggttctgatatacgtgtaccatctagcttctacctgagtccgttccttggcctccagctcccgaatttttcaagatgctccattccacccaccatattgatcgcttctcctccagttacagatgatggcataaaaagccagct

SEQ ID NO: 73148 - DNA, 440 bp, Glycine max
cccacgcgtccgccaacatgcccaagttggagtcggacatggcgaggcccatatgctgttgctgcggcattgacatggaccccaactgaagcgaacccgcacgtgcgccttggaattcaagtgcacccggaaccggaaggttgaaccttggcatgaaaccactcacactttgaggaaacggccacatctgagtctccgaggaagcagaagacgaagcccccgcggtaacgggaagcatccaaattgtgctaccagggggcccactggcgggagagggtgccacggcccacatcgctgttgcgggaagcaaattgctgggccgaagaagcccagaaccagcttcggattgctgcttcggtaacttatgcgaagacccatcaccatcaccgctctcgttctgcgattgggtattggtgctgttgatgttatcgtctttgaag

SEQ ID NO: 73149 - DNA, 179 bp, Glycine max
atttagcgtaactaaacgcgtccgaccacgcgttcgagagagagagattgagggcgtggagaaagttaactctctgcagttgctgaatcattcttcttaaaccagggcgcccgttctagaggcccaacttcattcacttgcttgcctctgccaaattctccattagtgccacctaattc

SEQ ID NO: 73150 - DNA, 68 bp, Glycine max
atcatcctgtatttttggtttctgttttcggacttcaatggaaattaatggatgagaactaatgaatt

SEQ ID NO: 73151 - DNA, 300 bp, Glycine max
gccacgcgtacgcttacatctaaaatgatgtcatttgtggcccatagacctgcctcaaacaatctttattaagtatcggacgttgagcccttcccttcggctcacggtacttctgttctttcacagatgaagaccgtgtcaatactagcatcaagactgacaacactgatggaatcaatccggggatagctctgagggaaattctttatgcatcctgccatcaaacgtactggcaaggtcccataccactacgggtacaaacactgttgctaatgtcgatggttacagaactatttacca

SEQ ID NO: 73152 - DNA, 141 bp, Glycine max
cttctttaccacttgaaaaaacttgtatccgctggaaaactcctcttttcgagctctttctattgaggaatggagatggaaagggacggatttcatacaacacacattcttactgtgaatgctacaaaccgtttttttcac

SEQ ID NO: 73153 - DNA, 397 bp, Glycine max
acacttccggatgggctactcgtctaccattcgctgaatctactctactagtagcagagtagcatcatcgtaatgatcaaacctgggtgaatcaaaaagaaaattaggcggataatacgttgttggcgaagagacctaatactccaattatgagtagaacaacaagcctgtccgaaatatccttctatctgaacacgtgcttgtacaatgatccgcacaactgcgtgtaagtcaaaggcaccagctaagcccaaggcagctgctaagcctaaagacaaagctccagccaagcccaagcccgcccctaaaccaaaggctgctgctgctgctgcttacaatcccaagcctgctgccgccaagcccaaagggactaagccagctgccaagcccaagccca

SEQ ID NO: 73154 - DNA, 343 bp, Glycine max
ctcacacgtccagattatttcattttacatttccgatcagactgggagacacgcttagaaagcttcgggctgcgtcctttctcacctagcgattccttaaagcactcggcatcctacacctctaaatttttggggaccgtgagcttgaaaactagaattaacttgggttacattatagaagctgtcgcctaatgctcaatgactgttgtaaccacagaggatacttccaccaggaccttgcgtgaaccgggtatccctatccgttaacatatcaggggttcggctgcatttttgggaacgatcaagttgttgtttggcatggaccatgcactgcgaacacctt

SEQ ID NO: 73155 - DNA, 260 bp, Glycine max
aaaaaaaaaaaaataaaaaaaaaaaaaaaaataaaaaaaaaaaaagggaaaaaaaaaaaaagggaaaagggaaaaaaaaaggggggccgaatataatattttctaaacttaaaaccacatgcattcacacgtcattagtcttacatcgtgttggctgggttcatttatgtgtgcacgcgttttacaaccgctttactggaaaaaccctttcttttccaaccttatatagctttgatcacagcccccttttcccacctgcc

SEQ ID NO: 73156 - DNA, 442 bp, Glycine max
cccacgcgtccgctataactcacatatatataacgaacgaggttatagactattggaccacacaatacaacctaacgggatgatcgtgaatggaagcgttgctgtagcttcaaaaactacatctcccatgcatatgaagatggcggatcatgaattaaaaagcagcactaccagttccctactcactgacgaaacgtttatccgtttcgttccctgttggcctatgcatttgaacacttgttctcatgcttaagagctctcatccaaatgaatatggatttcatgctcacagggatcttggagctttcaagtacttggagcatgcaaatggcatttgtgcctgctactctctatttttatatgggattggtgttatacacatgccctgtcactatacacctagcttggactttctttatccttgatcatgtgctgacataca

SEQ ID NO: 73157 - DNA, 450 bp, Glycine max
acgcccacgcgtccggatcgagataactagaaacagtgtgatgaaaatgaaggtccttgttttcttcgttgctacaattttggtagcatggcaatgccatgcgtacgatatgttccctctccgaatgaacactggctatggtgcccgtactccggaggtgaaatgcgcaagttggaggcttgctgtggaagcacacaacatctttggctttgagaccattcctgaagagtgcgttgaagcaacaaaggaatacatccatggcgaacaatatagatcagactccaaaacagttaaccaacaagcttacttttatgccagagacctcgaagtccatcccaaggacacatttgtgttcagtatagatggcaccgtactctctaatattccatactacaaaaaacatggatatggggtggagaaatttaactcgaccttgtatgatgaatgggt

SEQ ID NO: 73158 - DNA, 183 bp, Glycine max
cccacgcgttcgtccacgcgtacgcactgttctaatttatttctgaaatagaattccgttggtctgggtctctatctctcgtggcagggatgggtggcacaattgttgctgacgtacccacaaagaggggaaggggcataaaggccctgaaggagaaaaccccatcaacgaacgatgctaaca

SEQ ID NO: 73159 - DNA, 123 bp, Glycine max
gccacacgttctgtaacaaacacacatagtctatctgtttctagccaaactatatatacttggcatcttcctgaccacacgcggtggtctaagctccagcctggtatccacccgtgggttatc

SEQ ID NO: 73160 - DNA, 330 bp, Glycine max
agaaaacactccttcaggtgtacacatagactatctctgttgagcaaaaccagatagacttggcagcgttctcagatgccacggtggtctaaggtccagcctgataaacaagcatgcaacataaggcgcgttagcactcgtctagcaagcgcatgcaacgtcttatacttatctgacggcccagaggatggttatcaaccaaagtgagcattataatggaaatggatattccacattatggcgttcgaaatcaacttatgtgaaaacgtgtcataaatctgagcaattacccgttgatattatttacaaaaaatgtgccactgaaacttc

SEQ ID NO: 73161 - DNA, 419 bp, Glycine max
gccgtctcggatactagctgccctctatgtaagaatgaggtggaagatgcacgccatttgttttttcactgcagaaaagttacccccttatggtgggaatcaatgtcatgggtgagtcaatttcatgttttcccgaaagacccaaagatgcattttctacaacatgctctaactacgaccagggggtcttcggcccaaaaaatgaaggtgtggggggttagttgtaacatgaaccttttggaaccggagaaatacgatatttttctccaactaggactttgacagcaacaaagtcatggatgactcacttttttgctttggacatggatgaggaatctacagaaggattttcctatgcattttaaccaatggtctagtaacatttctgcagggttcatgtaacagtttgtatctaatct

SEQ ID NO: 73162 - DNA, 227 bp, Glycine max
cccacgcgtccgctcacgcgtacatatgttttccaacctagaatgaaagcgttttggggaatggccaacgacgaacaagaggtgcgtgcatacatcctatacccgtggctcgaacatctcaagaaaggaggatagttctacacatttatagttgtggactagactcactcttgcatcactccttacccatgaaattgcctacttcttgcaaagtgtgttcaaatgac

SEQ ID NO: 73163 - DNA, 317 bp, Glycine max
cccacgcgtgcgatcgatcgttataattgaatagtcggtcatattatgtatctacggtcccgattccgacacgagggtgtggggatactacaatatgttcttctagctggaagatcaaaagtggctatcaaagatgtaatggcggtggactcatctattctagtttttatcttacaagcaacactaacatcggatctcctaccataaaagtggactgcattcatgcaaaaatagatgccccgagtagggaacaacacctactacaatgcactggaacggatatttaacttgactaacatgtgagacgccttggatat

SEQ ID NO: 73164 - DNA, 328 bp, Glycine max
atcgatcgttctgaagttcgattctatgcatttgaagctcgaaatttttgtcagcgtggcggttattatagattattgctgagacatggctgattttatctggtctggaaaatgaaacttggctttatgtctaaagaaggcttctagcgctgtggaactatatttatgaagttattgactggcgtactttaaatccccgtccggaagaattggcctgtatttgaagaaaggaaggtacgcccagtggggcactacccgtgctaccgtttacttgaccgaaattgtggggtgcctatatagtgaccaagctttcgttccctggcaatgc

SEQ ID NO: 73165 - DNA, 363 bp, Glycine max
cttagattgaaatggaggggttaatgaaatcactccagaagatctgagtggtttaaaaagaaaagtgaacggaaatgcactccgcgacatgtggcttgaagcacaacccattttacaaaacaatcctaacatgttacgcattccggtgactgctaataaagacgacacagctctcaatgtatcaatgagtggcaggagcactacttttgtggaagggttggttagccttatgagcccagaagacctgataataccaaggattagtcctatggatacgcacattggcggaccttggttggtgtgacacttacacttctcattttttaaaacttattaaatttataaataaaattttatattttt

SEQ ID NO: 73166 - DNA, 288 bp, Glycine max
aaaaaaaaaaaaaaaaaaaaaaaaaaaaaaaaataaataaaaaaaaaaaaaatgggcatccgggttgggggatccaagcttagggacgcggcgggcggccgctatagcgcatcctatactgaaccctaccttaaatgcactgactgcggttttataaggccgccactggaaaaaccatgggccggccaaactcaacggcgtggcaggaaaaaccctttcggtaccctgcttaattggctagaaggccatgccccttccgccttcccaccaattacccaactggaccgg

SEQ ID NO: 73167 - DNA, 306 bp, Glycine max
cccacgcgtgcgtgcatttgttatgattaaatatcgcgtcatataatgtatctaagatatggataaagaaactacagtatgcggatacaataacagcatttctacattggagaataaaggcgaccccaccagatcatatcgcgttgcactatctgaactgcatattttttcttacaggcatgactaacatcggactccctacggcaaaatagcactgcattacatacaagaatacgtacctggagtagtgcacaacacctactacaatgcaagtgaccgtgactattacttgcatcacaaatgaca

SEQ ID NO: 73168 - DNA, 299 bp, Glycine max
gatcgagataactagaaacagtgtgatgaaaatgaaggtccttgttttcttcgttgctacaattttggtagcatggcaatgccatgcgtacgatatgttccctctccgaatgaacactggctatggtgcccgtactccggaggtgaaatgcgcaagttggaggcttgctgtggaagcacacaacatctttggctttgagaccattcctgaagagtgcgttgaagcaacaaaggaatacatccatggcgaacaatatagatcagactccaaaacagttaaccaacaagcttacttttatg

SEQ ID NO: 73169 - DNA, 414 bp, Glycine max
  unsure (1)..(414): unsure at all n locations
cccacgcgtccgccgaaaatagacggaaatggatgggctaatgagatgactccaaaagatctgagtcttttacctagaacagagttcgtgtgtgcactataggacacgtgggttgtaacacaccccctcttgctgatcaatacttcaggtgcccattcgggctgtactgnaacacacaatctaatgtgcacagagcggcactgagcactacttttggggaaaggaaacttaggcttatccgcccaacatacctgatgataccacggatgcgtgctatggatacacacatggccggaccgctgttgggactaacctcacactcattattggtgccatcttagtactcacttctaaaaagggggataatgttatataagaatgaaaaattgggggcggtctttataaatggtgcca

SEQ ID NO: 73170 - DNA, 443 bp, Glycine max
agagtttgttgtgagctataagctagtttatcgtgaggagaatatgaagttgtttgttttctttgttgctgcagtagttttggtagcatggccatgccatggcgcaggctaccaaaggttccctctccgaatgaaaactggctatggtgagcgttcttcggaggtaaaatgcgcaagttttaggcttgctgtggaagcacacaacatccgagcctttaaaaccattcctgaagagtgcgttgaaccaacaaaggactacattaatggcgaacaatttacatcagactctaaaacagttaaccaacaagctttcttttatgctagtgaacgcgaagtccatcacaacgacatatttatattcggcatagataacaccgtactctctaatatcccatactatgaaaaacatggatatggggtggaggaatttaatgaaaccttat

SEQ ID NO: 73171 - DNA, 339 bp, Glycine max
agataataattattaagtgagacataattggcttggccttagaatatatagcgcttgtctagttatcagtataatcggtgcgatgttggacgatcgataaatatgcttacctagatcgttcggtttgcatggaataaatttggaagggtgttaaagcatgttatatattgtgctcaatgagatgcatataatggatctttatgtctcacatagatttctttcttgaagtacaaagaaattctttttaatcttcttaaaatcaacaagattactattatgccaaatacctagttttttattctaaagtcacatttgtgttcaatatagatggcaccgtac

SEQ ID NO: 73172 - DNA, 264 bp, Glycine max
gaaagccattgtcacagatgtgctaacttcaacaatgggttctagcagattataagacatggtaatacttgcgctggtaagcgtatcatacatgatcattgactcaagggttgtagagggacgtacactgccaaaataagacttattgccttccaaaggtgatatacctactgctggtcctcttacactggtggcaccactgacaaatttgcctgttactctctctccagtgactgaactaccttcagtacctaaagtaccaat

SEQ ID NO: 73173 - DNA, 361 bp, Glycine max
aaaaaaaataaaaaaaaaaaaaaaaaaaatatttaatttaaaaacaaaaaaaaaaaaaaaaacaaaaggaaaaaaaaaaaaaagggaacgggtaaaaaaaaaaaaaaaaaaaataacctactcatataacaacacaaaacaaaaaataaaaaaaaggggccccccctttttaaaggttccaattttacttccccgtccttccaacgaattatttttttttttgtgccccctaatttaatttaccggcccctctttttccaccctcggaactggaaaacccctccctttccccactttataccctttgaaacaattcccctttttccaagttgggtaataaaaaaaaaccccccacccaatc

SEQ ID NO: 73174 - DNA, 448 bp, Glycine max
gtgtgatgaaaatgaacgtcctcgttttcttcgttgctacaattttggtagcatggcaatgccatgcgtacgatatgttccgtctccgaatgaacactggctatggtgcccgtactccggaggtgaaatgcgcacgttggaggcttgctgtggaagcacacaacatctttggctttgagaccatccctgaagagtgcgttgaaacaacaaaggaatacatccatggcgaacaatatagatcagactccaaaacagttaaccaacaagcttacttttatgccagagacctcgaagtccattccaaggacacatttgtgttcagtatagatggcaccgtactctctaatattccatactacaaaaaacatggatatggggtggagaaatttaactcgaccttgtatgatgaatgggttaacaagggcaatgcaccggcactgtccgagac

SEQ ID NO: 73175 - DNA, 290 bp, Glycine max
aacgctcttaaaagcttttgctttactttatgcgcgctgttttcaatgaagctaagctcgggtttgtaaaaccaaggtatgtggacattttgagggttaaggtagtgagtactatcttggagaccacacacactgagattgagatgcgcgtacaagtatgaaatctttgaacttgctgaccagaacaatattggctcttctccgaggggtgtgaagcgcagaactggaagaatagaatgtaggacaaacgcatatatccctaaactaggtgttatactatgaacgttact

SEQ ID NO: 73176 - DNA, 80 bp, Glycine max
accactcgtacgaccatgcgttctactttatgtgcgctgtttccaatgcacatacgttcgggatagtaagacaacggtat

SEQ ID NO: 73177 - DNA, 457 bp, Glycine max
  unsure (1)..(457): unsure at all n locations
tcgncacgcgtncgtataatagagcttgatgaaacggtggatctactggatgactgtgatgttccagagattcatgaagacagtgggtgtcgttttctgcttacagatgaaaatatggaccttgtaggtgctgcttttccagcagaagtcaaaaggttttggcaagagcaggaactgaaaagaagaaagaactcaacatcaagatctcaagaaaatgaaaaatcaccatcaccaaactcaagaagtattcagctaaacattacagagttctacccatcaaccaaagttaaacatcgtcaatcaaaacaaggaggaggagagtcatccaagattgctgatagtcaaggcaatgagggctcaaaaatgaaaaggaaaatgtcaagtcctgataagattccaaaatctgtgaggcgtcgccttttgtttgattagtatgtatatatgcttgagttatgat

SEQ ID NO: 73178 - DNA, 436 bp, Glycine max
gccacgcgtacggtgaagcctatgacgatatgtcacgcattgaacttgcccaagaggtcgggatagaacgcgtaaggggtgtggcaatacctaaggggaagaaacgggcgggagccacacaaattccacacactgctagggggagaaaccatatccttcaactttactgactggcagaacctattggaatggatatattatccgaagggggtgacgacgaaaaactgaaactaccttcgggtgctaaactaattcactgctaaacctgtttcaaatttgaataccataacttatctcttgctgttcgcctaaaattaacagctttccaatcatttccttgagatattgctgaaattcaatgacgcgcattattatgaaatggtaaggaatcggatattgtacttctgcagactgcagcgttcttattgaataattt

SEQ ID NO: 73179 - DNA, 338 bp, Glycine max
gccacgcgtacggttaaaaccatatttgggtgtgattcatctatctcaaacaaccatgaacgatagatcacgctttggctagctctttatcattcgagcgcactccgacggcggtaacgacacctcctcaccgtatccttgcatccgcggcaacggaaacagtggagtgatttctccaacgcgacaggcgtggacgacgatgttatggtttctacactgagacatacatacgacctggggcgaatcttctacatgactgacaaacatgtgcaagatatgcacgcgaggaactagatagaggggctcgaccaacactaattgcgattcgataagagcat

SEQ ID NO: 73180 - DNA, 401 bp, Glycine max
gcgaagcataggtcgacgcgtacaggttgagtgcgtgaccagcaacgttgcctgacagacagccggctactgtcaagggtgatgatggaagtccggtctatgaagctgctgcatttgctaagaattcgagtcacaccgtccaatatagcatcttcaagagtggcgacattgtagcggtgcatggctacctgggactggacgatgaggatgtctatcttgaagacagcttcatgacagagggacttgtctggtttacaggcgggagatgactacaaccgtggggatagatgcacaaatgagacactggttgctccatcagaggaaggagatcggtacgccaatgcacgcttaagaggggcggttgcatccccgtatactaaagctgatgaggcttatgtgac

SEQ ID NO: 73181 - DNA, 450 bp, Glycine max
acttttgatcataacaattattattacaataataataataataataacaataataataatttcatgatgaatcccatgcacatggcatatcttaaccaaccaattgtggccactgcagacaacaacatgtttctgtggtgaagaatctgaaaaaaaaaattaagatttcgtgctagtgtgttgttctgttgggagtttcgtcacggtggaatcattcacgagtgagggtaaggtaaatatttgtggtacctactactagtgtgaggcaatatttattaagatattattattattattattattggagtgtcatcagaacttgcttgctacatttgatgtgatttaaataatggaatcaaatcacatagtggcatttgcttagttctgttgttaggtcaccaaagtggcatgctacttgccattgtccaatgttttggaaaaatggatgtc

SEQ ID NO: 73182 - DNA, 467 bp, Glycine max
tcgcccacgcgttcgcccacgcgttcgatcgagataactagaaacagtgtgatgaaaatgaaggtgcttgttttcttcgttgctacaattttggtagcatggcaatgccatgcgtacgatatgttccctctccgaatgaacactggctatggtgcccgtactccggaggtgaaatgcgcaagttggaggcttgctgtggaagcacacaacatctttggctttgagaccattcctgaagagtgcgttgaagcaacaaaggaatacatccatggcgaacaatatagatcagactccaaaacagttaaccaacaagcttacttttatgccagagacctcgaagtccatcccaaggacacatttgtgttcagtatagatggcaccgtactctctaatattccatactacaaaaaacatggatatggggtggagaaatttaactcgaccttgtatgatgaatggggtaacaa

SEQ ID NO: 73183 - DNA, 368 bp, Glycine max
cccacgcgtccgcccacgcgtccgggaaaaaacacacaatacagcttgaagtttgaacaagctgcaccgaacaacagaatcttctgctttctttctttgttcatgttttccaaccaggttcacgtgttccgctctgcatttcgcgttctgaaatatccacgcacgaaaaccccacccaacacgcgtctcttccttcttctgcttcatgccaacaacaacaacaacacaaacgctggcacatcaccaccggcaccggcacgtcatacttttttggcacccgtgttaacaacccgacaaccttaaacaacggaagatttcacgcgcttctgaacttcggcaaaaagaatgctgcggcaccgtcaccgaag

SEQ ID NO: 73184 - DNA, 316 bp, Glycine max
cccacgcgtactatgcttcagagctgatgctacacaaaagaaatggcttacactcaagcagagggaatggacatactcagttcagcatgcgtggccataaaaagcataaagcagtaactcggatgcgatgtattggccactcacataccatgcattcgcattagaagcggctgtctaactcattgctggatcatcatgtgatctcctccatgacttagacctgtatctcggacctgtatgatgctagattatcacattgcaccatatttcctgatgtctatattcctagcttttcaagctctgtttagagcttatc

SEQ ID NO: 73185 - DNA, 229 bp, Glycine max
tcttaacacaaaggcccctcaaaccacgatcgtcacactcttttagtgggtcgtatctattcctgtctttctgcacaattacgtcgtggaccgaccctttagtgtaagtgcaatggccatgcctaaacttgtatgtgtactgcatctggcattccttggcatttggatgatcacaactcaagttatagtaacagattctgtctctcactcggatgcaaggagttatgga

SEQ ID NO: 73186 - DNA, 79 bp, Glycine max
acgatctagaggatcggagggtacgtatacatgcatgcagcgtactagcgcgtgctatggtgcgacctaaatttaatat

SEQ ID NO: 73187 - DNA, 452 bp, Glycine max
gctagtttatcgtgaggagaatatgaagttgtttgttttctttgttgctgcactagttttggtagcatggccatgccatggcgcaggctaccaaaggttccctctccgaatgaaaactggctatggtgagcgttcttcggaggtaaaatgcgcaagttttaggcttgctgtggaagcacacaacatccgagcctttaaaaccattcctgaagagtgcgttgaaccaacaaaggactacattaatggcgaacaatttagatcagactctaaaacagttaaccaacaagctttcttttatgctagtgaacgcgaagtccatcacaacgacatatttatattcggcatagataacaccgtactctctaatatcccatactatgaaaaacatggatatggggtggaggaatttaatgaaaccttatatgatgaatgggttaacaagggcgacgcac

SEQ ID NO: 73188 - DNA, 213 bp, Glycine max
ctttgacaggcccacatcgaccggcgcacacttcaacctgatctgaaagtcacccaccagtagttgcttacacatcatcaacctgtgtatcgcaaccggttggctcacttccattaccacgaggcatacgtaatattcctcaacgaataccccacaagcgtctcaactggtcacaacgaggaagtcctaccaattgactttgagacactacag

SEQ ID NO: 73189 - DNA, 131 bp, Glycine max
cgtagacacctaagcacccagagactatgaacgagctttatctatgtacatatacaacaatgggcacggttaaatatgtagtttaggacggatttcatcatcgtctcacagttaagcatctttttcgacat

SEQ ID NO: 73190 - DNA, 182 bp, Glycine max
aaaaaatgggtgttaatgtgtatgcacgcaatcgcatagtgtgggtggccaaccttgcctggggaagggtagcaacatcgctccggggtgaagacggagatacttaatgtctagaagcatggatgtatggtaaagctgaagttgtctaagaaggtagatgactactactcatgtcgagcaca

SEQ ID NO: 73191 - DNA, 66 bp, Glycine max
ccaacgcggacgttggcgggtgcaattggcatattatcgtagattcaactactactaggagctgac

SEQ ID NO: 73192 - DNA, 82 bp, Glycine max
gccacgcgtacgctagaagcaagtgatctcagtatcgacgtttatgatgtccaacactttggtgaagagtgcatgattcctg

SEQ ID NO: 73193 - DNA, 410 bp, Glycine max
ggacgcgtacggagttaatatcctaagtcctaccattttcccttttcataatatcttactcggcgcaggattattttacttccgcgtcattgttggtgtgattgttgacgaatctgcctcaccagacactggttcattacgccacatcatacgcatgtcgggatctgacatggcaagcacgggagcaattcacggttgggatgcacaaaccctaacttcaaccctaacaactacaacgtcatcttcatgaaaacaacatgcttatggactatgctgctgctgacggcaccgatgcttttgcccctgctaccgttaccgttaacatttacggctgagaatcctcttcggcggtgccttctgtcctgggcctagcccatccccaggcttagtcccagcccatgatggttaac

SEQ ID NO: 73194 - DNA, 451 bp, Glycine max
  unsure (1)..(451): unsure at all n locations
gtttgttgtgagctataagctagtttatcgtgaggagaatatgaagttgtttgttttcgttgttgctgcagtagttttggtagcatggccatgccatggcgcaggctaccaaaggttccctctccgaatgaaaactggctatggtgagcgttcttcggaggtaaaatgcgcaagttttaggcttgctgtggaagcacacaacatccgagcctttaaaaccattcctgaagagtgcgttgaaccaacaaaggactacattaatggcgaacaatttagatcagactctaaaacagttaaccaacaagctttcttttatgctagtgaacgcgaagtccatcacaacgacatatttatattcggcatagataacaccgtactctctaatatcccatactatgaaaaacatggatatggggtggaggaatntaatgaaaccttatatgatgaatgg

SEQ ID NO: 73195 - DNA, 283 bp, Glycine max
aaaaaacctgctatcgcctaaacacaatgcagctccttgatatgatggcagcttcaatcatgggagcatgaacatatcaagcgtaggatatgtttggtgatctactggtcgcagattatagtacccgtacttataaattctaatgcacctgacggatgttcgctatgtaattacacaacatgttttgatttcacaccattcttgacaagctctgtcaagaaacatagcaataccttcttgtacttcaacataccttcgactatatagtagataattaaagtgc

SEQ ID NO: 73196 - DNA, 86 bp, Glycine max
gccacgcgtacgattacgcttaagcttcatttgactcacagacatatcgcgaggtagacagagacagtgcgtgcacaatcacacac

SEQ ID NO: 73197 - DNA, 77 bp, Glycine max
atcacgcttccgcagacgctgcctgattggccttactaaacaaagcttctgcgctgcttacagagacactgggacct

SEQ ID NO: 73198 - DNA, 406 bp, Glycine max
gccacacgtacgaaacaaaccaaagcgcagcttgggtatactgaggaggccaaagggggctaaacctgaaccccaacttgatgctaagtcatcggcacttactgagcctagcggaacatacgcatctaaacctataaccgatgcccaagggatgaacggcgcctgggaggttcaagagctctacgaacaccagccgttggatcaaagagtgcggatatgagagcgtattcaacgaccaagtaacgctcgaccgctattgccccgtgtgacaagacctgtagccatgccgctgggagattctacccgccgttcagtataacgctcgagacatttgctgattcatttgatacccaacgattgatattatcgccgcttatggaatgatctgtttgctatatagcatact

SEQ ID NO: 73199 - DNA, 416 bp, Glycine max
tgcacacgtgcaaagactcgtgggtatagatttcatgtgcatggcaaagcatatacctggcacattccaatggcttgcagcatggtgctcgacacgctcttggatcttgctctccgacactactcaacatcagtcaccaatgcatgtggcacatgcaaggaccaacactactgcttaatcataccatacatcatggaaactgcaccacggacacatagaatcctggctacgcatgctagatgacactatgactagactaatgttggaaggagatcccgcgtctctaccatgggttacacatctcttatactgttcactacatcatagaccgcactatacgcatgtactgctactcaggtcaaggtgcgtggaatcaacgtggatggacctatgccactcagcgttctactcaatgc

SEQ ID NO: 73200 - DNA, 453 bp, Glycine max
cccacgcgtccggtttgttgttgtaactcgttcttcttcttttgttgttctgtgtttgtgtttgttttttctctcacctgaaaatgtcttgctgcggtggtaactgtggttgcggaagctcctgcaagtgcggcaacggctgcggaggctgcaagatgtacccagacttgagctacactgagtcaaccaccaccgagaccttggtcatgggagtggcacctgttaaggctcaatttgagggtgctgaaatgggtgtgcccgctgagaacgatggctgcaaatgtggaccaaactgctcctgcaacccctgcacttgcaagtgaggtgttgggagagcaagcttcaagcagagatagcccttaattaggaataatgataaactattaatgtgtagctaaaaacttatgtattatgtctgtgatggttttcgtgcactctggtgtttcgtgttaa

SEQ ID NO: 73201 - DNA, 255 bp, Glycine max
cccacgcgtccgaatcggccttagaaataatgtgcgacctttcatgcttctctgctgtacttggaattggggctcaactcgtacgggcagcgttcctataggtacacttcggttgctcgtctttaccataagaagctctggcaccagctcactctcaagcttgatgccaatagaggtcttgtcatctttcacgcatggtgacgctttaatacaattatatcacaaattacatcacatactttgagacggaaatca

SEQ ID NO: 73202 - DNA, 267 bp, Glycine max
aaaaaacgtacgtgccatgtgctagcaatgcaggcagatgcaaatcaagagcagagcaagctatgggagtatgagcaatagcaagctatgcgcgtgcaaatacagctgaaatgaacattgttctaacgcgccaggacgttaccctcctaatgcacgtggtggctgttgtcctggtgatcggcggccatagaataactacacacggtacatgagaagtgcaccataacaccagatcatggcatggtttcaacacaatttaggatggac

SEQ ID NO: 73203 - DNA, 356 bp, Glycine max
cctacaggtagcttgaaaacatggaagtcgttgagctccttgcgaagaccatttttggcgggtgatgcaagcctagctgctgggttgccagctgcgctgattggccttgattgaagggccctgtctggacctcggctaatgctcatgtcctctagcagcactggcttactcttcttccctaggcaacgtgcagcggttgcgaagtatattgacaagaatgcgtactgtgatatgaaggacttgcacaagcctacgttgcatgggaacttgcttggtctatatgcatgtgaacaatactcttctccttatagcaggtaatgacagacctttgctgatctattcagattaaggggact

SEQ ID NO: 73204 - DNA, 124 bp, Glycine max
gtgacgattacgcaggcacgaatggatcgcactcagcacactcttacacagtgcactggatgagaggttatcatgtaagtcagcttgcatccaaggctgcacggaagcctgtagcaacatactg

SEQ ID NO: 73205 - DNA, 284 bp, Glycine max
gtttgatctaaaaaaaaattctgaatattattaattatggatctgagaacaaagtcatttcatgcataattctagttattccataccattcttgttatttaggagtctgaaactacttcacgcaaacaagttcaatacaaagaaaacggacgcgtgggttattattcatgaactagtaatttgagcacattctttttcataaaaaacaaacaaaacttgacgcaaaactgaagcaccaaaaaaaaattgaaaaaacgcacccaggccaaagctaaaggggctgc

SEQ ID NO: 73206 - DNA, 84 bp, Glycine max
tccaagcttccagccgatcgcacatgcgaatgtaccgtgtcactaaaacaaaagcgggctctttctttatctctatcgggtttt

SEQ ID NO: 73207 - DNA, 252 bp, Glycine max
gacagtggatattttgaaactatataccaaaatatatcagcctatatgtatatgtttaaaagggggaaggagactgataagatacagaagcaaacctaataaataggccatgcctataaccgacacaatatgccacagatgatgctcataaaaaaccacgaaagtgctcaaaaggatctgcggatatctattacacaagggcgtccggttattactgttcgaaatgagcatggggattaaaccacattgacc

SEQ ID NO: 73208 - DNA, 256 bp, Glycine max
gccacgcgtccggaaatatatataaactcatgtcatgagaggcatgtatatgcatggaaaccggggttttcttccgacctttcttagcactagagatatttcaaaatttgaataataagtcatattgtgcctgcagtgtgataagttctatagaaaactgatatatccaatatgtactgtacaaatagcttgtcatatatcgagggttttactcgcattgatacaatacattatcatcatcatatatatcaaagaa

SEQ ID NO: 73209 - DNA, 345 bp, Glycine max
atctgagcccaatgagaaccacctgattctgttgatgacatgcactgtgaattgatgaatcggaatgcatagcaatttgaaaatttggtggatgggattcgtatgaaagagcaagatggaacttcttccctgtttgacgctgcgagatcaaatccatttttgtcgttggttagttttaatgttaacccgtgaccaccaaagtcatgaaatcacacacacatttgatatcatttcttgattatagatagattagtacacagcgaagtccttttcatttgattgcaaacttgtatatgtatgtaattatgtacttgagtgatgcctcttcagttttattattctacc

SEQ ID NO: 73210 - DNA, 363 bp, Glycine max
tccacgcgtccgcccgctctctctctcgatcgttatatcctctctttcacccacaggagaagagggattgaatcatagggaatttggagcgtgaattgtcatgcaataaaattcgatcgattttgatattctaagtcgtagtatccagattattactcgaaatgatgaatactttatggagggcttgattgaaccaacaaaagttagtacccaggctctgtttacaaaaaaccaattggtaatatatctaccaacaccactgatgtcatatactgatgtttgacagaaaatatttattaagaaattcagaaatggaacaagttgtaacaaatttacgtattagtgtaatatttgtcctatatt

SEQ ID NO: 73211 - DNA, 59 bp, Glycine max
cccactcgtccgcccactcttttcttcgatccttatatccaatatttaaccctcggaaa

SEQ ID NO: 73212 - DNA, 434 bp, Glycine max
gtttatcgtgaggagaatatgaagttgtttgttttctttgttgctgcagtagttttggtagcatggccatgccatggcgcatgctaccaaaggttccctctccgaatgaaaactggctatggtgagcgttcttcggaggtaaaatgcgcaagttttaggcttgctgtggaagcacacaacatccgagcctttaaaaccattcctgaagagtgcgttgaaccaacaaaggactacattaatggcgaacaatttagatcagactctaaaacaggtaaccaacaagctttcttttatgctagtgaacgcgaagtccatcacaacgacatatttatattcggcatagataacaccgtactctctaatatcccatactatgaaaaacatggatatggcgtggaggaatttaatgaaaccttatatgatgaatgggtaac

SEQ ID NO: 73213 - DNA, 115 bp, Glycine max
cccacgcgtccgcccacgcgtgcgctcagacgatcggccccacattggtagccgtaggaatagcttgcgaatctcagaggctccggttcaaggggccatatatgagtgacaccaa

SEQ ID NO: 73214 - DNA, 359 bp, Glycine max
gtaaaagttctcaaagctattctaagaactttttaagtggtttctggcttaaaaagtaattaggctaatagttcttggggtgctgttcgtaatgatcatcagtgcatgcaaatggcagctaactatctcaattgtagtcagctagctcttccttttgtttaccttggcgtacccataggggccaacccgaggcgagctcatgtttgggaacctattatccaaaaatatgagaggagattagctagggttccacaattggtgatcaacaatattatcaaaatccagcgaagctttctttggtgtggattgcatgataccaaaaagattgcatggatattatgggatacagtttgcttacc

SEQ ID NO: 73215 - DNA, 423 bp, Glycine max
cccacgcgttcgaccacgcgttcggagataactagaaacagtgtgatgaaaatgaaggtccttgttttcttcggtgctacaatttgggtagcatggcaatgccatgcgtacgatatgttccctctgcgaatgaacactggctatggtgcccgtactccggaggtgaaatgcgcaagttggaggcttgctgtggaagcacacaacatctttggctttgataccattcctgaagagtgcgttgaagcaacaaacgaatacatccatggctaacaatatagatcagactccaaaacagctaaccaacaagcttacttttatgccagagacctagaagtccatgctagggacacatttgtgttcagtatagatggcacctgactctctaagattgcatactacaaaaaacatgggtattgggtggag

SEQ ID NO: 73216 - DNA, 245 bp, Glycine max
actatgcttacgatcaagattccctagaatgcttataacccatatctaatgcacagttctgcggagatatgctcaaagcgtaatcttgtgctccagcgaaatactttatcgtactgcgtatagaatgcagactctactaggaaggtctgtatagttgagatcttggctgaccctcttgatagagatctgccgttcacctgcaaaatccttgataatacttctgaaccaattctaagcatggactc

SEQ ID NO: 73217 - DNA, 112 bp, Glycine max
cccactcgtacattctcacttcccatatctcgatctaccccctaaatcatatactgggttaagggtctcaatattccgggagattgactcctgcatcactcattcattactc

SEQ ID NO: 73218 - DNA, 54 bp, Glycine max
tccacacatacagccaatcttccttaaaataatccagactgatatgaaattcac

SEQ ID NO: 73219 - DNA, 209 bp, Glycine max
cacactcgagcgccctcatatttggcggaggtttctaagttccgtactttattgatactacgggggcttaacttttggcaattgaggcccaagccttcttccttcactatcctatcatcatctactttcttgctactctctagttctattgtactgttgactatcacttatcatcttaacatttaatagcttctgtgtacattattatt

SEQ ID NO: 73220 - DNA, 53 bp, Glycine max
cacactcgaacattctctcatccgctttctctatacactactcatactttact

SEQ ID NO: 73221 - DNA, 155 bp, Glycine max
cacacgcgagcgttcactcgatcgatctaattttttgctctatacggcttcctaggggtcttagaatctctcctttgggaagctcacttttccgattactcatatttcaccttcaaaaaggtaaacttattctaaccaaacaatttactcatcaa

SEQ ID NO: 73222 - DNA, 59 bp, Glycine max
atcactcgtccgaccacacatctgacaacgcgtagcaaattgcttccactatcacctcc

SEQ ID NO: 73223 - DNA, 187 bp, Glycine max
cagaatccaactcattacagttccctctaattttggaatagcttgagcgtacaatcgtgaagtggccgaattcattgggcatgtaggataatgattaagatatacgcgtacatgaggtggtatgagatagatgttcattacgatattactgatcgtatgaggttcgatgtgcacattaacgactaat

SEQ ID NO: 73224 - DNA, 303 bp, Glycine max
gcttctattgaatacttgggatcttggggcattttttatcgtgtgctaggaaaatggggtcacttggatagaggagctggacattttgaattataaacacaaggaaatatgaaattgaggcagttatgggatccaacatacctatatggttaattaaggacccatcatttatgtccaaaggaggttagcagctttgaaactgttgatcttactcctaaagctggaacatcctggtgtcatagcttataatgccttgtctttttaagaaaccaatgtttgatatttagcatgggtcttttataa

SEQ ID NO: 73225 - DNA, 389 bp, Glycine max
tctacgcgagcttcttcttgctctcgtacttcatatggcgtgtgatcaagtcatcacacaagggctctctgcattggctctagctgaaacttacccttcaacatgtcaagtggcgcatggaaaagtctactgcgatgactgcactcacaactatgacttatctgatatcaaagcttctattaagggtgatggtaaaaaaactggctatggctactacagaaaatgatagctacttcaagggtgatcttaccgtagaccacacaataccttcttcttctgggaatgattgcctaacaaaacttctaggagggccagttcatctttatgtctaaaggtataaccaggtgtaccacattatcaagggcaatgatcagaacagttacaccatc

SEQ ID NO: 73226 - DNA, 317 bp, Glycine max
cccacacattacaccactgcacaatttcttgaatcagtgttcattgcacattatcacagaaatgggtgatgagaacacggacgcaggacggtcatcagggaccacacatgcaaagaatgaataagagtaaaaggatgaagagcccctcataatcatactcaacgtggatatgcactgcaaagctcgtgcatggaacgttgcacaagcattaaaaggatttgaaggagtctatgaggcgactgcatatagcaaggctagcaaagtcgtactgaaaggaaaggcatcagaccccataaacgtgtgttagagactactca

SEQ ID NO: 73227 - DNA, 227 bp, Glycine max
acattccaaaccgacgtcaatggcagcctgattctccttcttgaccctcttctccgtcctccgtgggtacaaagccacggcctactggcatgatcactcgcttaccactccataagctacatgccaagcatcagtaccaggaccaccactcgtcggcagagctgtccgacgaggctgacccgtcccacgcgcatgctaacacgctcttataccagtcgtcgtacaac

SEQ ID NO: 73228 - DNA, 440 bp, Glycine max
agaagaacaagtagttgagaactaagaaggagaagcaaatggcttcctcaatgatgtcttccccagctgttaccactgtgaaccgtgccggtgccggcatggttgctccattcactggcctcaagtccatggctggcttccccaccagaaagaccaacaatgacattacctccattgctagcaacggtggaagagtgcaatgcatgcaggtgtggccaccagttggcaagaagaagtttgagactctttcctacctgccagaccttgatgatgcacaattggcaaaggaagtagaataccttcttaggaagggatggattccttgcttggaattcgagttggagcacggtttcgtgtaccgtgagcacaacaggtcaccaggatactacgatggacgctactggaccatgtggaagctgcctatgtttggttgcactgat

SEQ ID NO: 73229 - DNA, 279 bp, Glycine max
tccacgcgtccgcgagataactagaaacagtgtgatgaaaatgaaggtccttgtggtcttcgttgctacaattttggtagcatggcaatgccatgcgtacgatatgttccctctacgaatgaacactggctatggtgcccgtactccggacgtgaaatgcgcaagttggacgcttgctgtggaagcacacaacatctttggctttgagaccattcctgaagagtgcgttgaagcaacataggagtacatccatggcgaacaatatagatcagacttcaa

SEQ ID NO: 73230 - DNA, 320 bp, Glycine max
cgcacgcgtgagacattatcaacatcacttgattaactctacatggcaactttattgtaaaacggataatgtgattacagacttggtttcttgatcttgaaacggatttgcaggctgctactattagtcctgcttctatagcggctcttaaatagggtcagagtggataatctctgcacgactctagcttgaacgatgtatcagcatcagaacgtattgaagctaactgtatcgtttctgcatttagctacctgacgaaattcgtactaaagctctgtgctgagacggccttaacagttgttatagactatgcagcaaat

SEQ ID NO: 73231 - DNA, 260 bp, Glycine max
agtagatctgatatcacagattctttaatgcaaacggtgagtactggtctgtaaatcatggttggtgctgaacagttctatcacggtactagcagcaggctacacactgttgaagacagattatcagaaaatattcagatagtgcaagttaatacaatgcaatcggggatcaatggagaagcttattcctggaactatttacatcgcttgaacagttcgagtatggacgctcgtggttagtggcgtacgcagggaaaata

SEQ ID NO: 73232 - DNA, 317 bp, Glycine max
caaagatgagtttgctgagattactttagactttttgctagcacaggagaagaaagagtcattgtggcaaataaatggggaatcgggactaagctcaagctagtgacactactagctcggctgactgtaacctcctgagatagcttagtatgtacattcaatacctgtggacgagtattgtcacaggaatgctccattaggttccttgactgggccaattttggtcgctaatggaatatagatgatacaacttttagtttattttagaaatttatgaatgggatccacttaaactgaaaaaaatatttaagtttaat

SEQ ID NO: 73233 - DNA, 189 bp, Glycine max
aagaaacgagcgctctgagattacatggcaataatggactgcttaaccgcaggatgtatcattggcaacgattattcgggactggggactaatcctatgctgatcactacagctattttggcagactgcaacggccaccgttacttcattgtgaccattagctcgtgacgttctttaacgttactagaa

SEQ ID NO: 73234 - DNA, 219 bp, Glycine max
gccacgcttaagatcactcatgagagaacgcaagacacacgaaacaacacacagagagagattgaggaagggctcatcaaggctgcagactcgtactgggccagtgatagctcttaacgtagcagcttcgactataaacttaaaggtagtcatgatcatcacaacgaagcacacttttaaggttcatgagagggcttcagaacagcctgcaatggttca

SEQ ID NO: 73235 - DNA, 350 bp, Glycine max
cacacgcgtccgcccacgcgttcggtatcaacatctataaattttgatacctcgggcgttcatgcttctcttcatctgtgaatatatttactactgcatgccttaattacgctatccccagatagtaccttatatacatgcataataaccctatgttctccgtcattacgtatcattaatcaaagacgatatgtatcatgtatgctttacaaaagataagtcaattagtctattcttatgattgagtgaattgggtaatcagaatttttcatcactctcacttattaacttccattaaaaagggctgccattccttaggttccaagcttacttacgcgttctttccaatt

SEQ ID NO: 73236 - DNA, 427 bp, Glycine max
cccacgcgtccgcccacgcgtccggataactagaaacagtgtgatgaaaatgaaggtccttgggttcttcgttgctacaattttggtagcatggcaatgccatgcgtacgatatgttccctctccgaatgaacactggctatggtgcccgtactccggaggtgaaatgcgcaagttggaggcttgctgtggaagcacacaacatctttggctttgagaccattcctgaagagtgcgttgaagcaacaaaggaatacatccatggcgaacaatatagatcagactccaaaacagttaaccaacaagcttacttttatgccagagacctcgaagtccattccaaggacacatttgtgttcaatatagatggcaccgtactctctaatattccatactacagaaaacatggatattgggtggagaaattt

SEQ ID NO: 73237 - DNA, 421 bp, Glycine max
gtgaggagaatatgaagttgtttgttttctttgttgctgcagtagttttggtagcatggccatgccatggcgcatgctaccaaaggttccctctccgaatgaaaactggctatggtgagcgttcttcggaggtaaaatgcgcaagttttaagcttgctgtggaagcacacaacatccgagcctttaaaaccattcctgaagagtgcgttgaaccaacaaaggactacattaatggcgaacaatttagatcagactctaaaacagtttaccaacatgctgtcttttatgctagtgaacgcgaagtccatcacaacgacatatatatattcggcatagattacaccgtactctctaatatcccatactatgaaaaacatggatatggggtggaagaatttaatgaaaccttatatgatgaatg

SEQ ID NO: 73238 - DNA, 232 bp, Glycine max
acgggcgacattgttgctatttctctcttaaacttgaaaccttcgctaaagttatctccttctacaggctctgggtgtatcaccaaacgagctacccatggggccgcgttacatggatctcccacctcggtctcagggggtgccacattctcatcctctttcgggtctcgttttgaagacaccatcacgaagaccgtaaatgagaactcactggacacgcattccataacct

SEQ ID NO: 73239 - DNA, 167 bp, Glycine max
cccacgcgttcgacagtacctggatgccactggtgatgaaggtgactatcttgcggacgaggacgtgcaagagcatggccgacatgacatgtcacctagaacctggtaacgtatcgccgcggctcaaagacgtgtctcatgccacaacttcctgtcgcaacttaatt

SEQ ID NO: 73240 - DNA, 183 bp, Glycine max
ggttggtggtggaactcggtcttcttcttttggtggtctggggttggggttggtttttctctcacctgaaaatgtcttgctgcggtggtaactgtggttgcggaagctcctgcaagtgcggcaacggctgcggaggctgcaagatgtacccagacttgagctacactgagtcaaccaccaccg

SEQ ID NO: 73241 - DNA, 387 bp, Glycine max
gcgttcggtgatggactcgtgaaatccatatttctttgctttacgtggtgcagatgactctgcacgggtacatgaccagcgataatggcggtgggatttagcatgactttcacatcaccctgttaacacatatatgcctagacactgaattgcgccatatcatgtacatattactggatgggcttactcaagctttggcgaactacatgcgccttatcaagatgagctcacatatgcgtcttgaaagaatctgcactcttattcttcatctccatctgctacatatgaggatttgaagaatattcatgaggcacaggtttactcatgccacatgaatgcacagacaatgtccggagtgaataggtctggccgccatgatgaatatgt

SEQ ID NO: 73242 - DNA, 250 bp, Glycine max
  unsure (1)..(250): unsure at all n locations
cggaaacccgggncgacccacgcggccggccacgcgaacgaccacgcgaccgagaaaaaggcggtgcctctacacacgaagaagaacgcgaagaagagggggaagaagggcaagaggcggcagagcgacaggaaaacggcggacaagacaaaccggcgcaaaccaaagggaagagaaacccgccggaggagaaagagcaagggaggcaccgagaagccaaacaggggatacgggacaaacaagaagaccc

SEQ ID NO: 73243 - DNA, 82 bp, Glycine max
cttaatctcggtcttatattttaacaaaccgtattttactttctccaaacaatacatatatctatcggactagattttcccc

SEQ ID NO: 73244 - DNA, 474 bp, Glycine max
cccacgcgtccgctttgattgaaaggttgcgaggtccattgatcaataggagttctagctgttggacagtcacctcagttgttgagtacttacatgtgcttccttattctgaaatactctcagagtggatttctagagaaacattctcaaatagtttgcaaggttcaaggctgtcagagaaaaacacgatgatgggctgccctgaagtgaaaaaatcatatataagtagtgagggcatgtctattggcctcgatattaagccaagcattgatgctattgaagcacttaatcagaacgagaacaatggaagctgtgcagttacatgttctgcttctatcaaggattcccagaatgtgtatgtggacaacactttagcttgtccatctaaaaagtaagaagaatgccagcatattgccaatactttacaagttaatgaagatcaagaaatagaaaatccatttgtacaacattact

SEQ ID NO: 73245 - DNA, 289 bp, Glycine max
acgcgtccggcatgcgttcgccactcgaactggcaagatcacatgtgccattatgataatctcaggccacgtcgccaaaggctcaaactcggacgggaaattcttacatgtcatcctaccggggataaattatacacacgatgagtgaacacttatcatatcatgatcaaggttcgagctcttgaaacgggagtgaagtatcagacatgtggactggttgcttgctaggttccgttcatgatagaacgtgggatctgaacgactcacccgatcagaggattaacatgga

SEQ ID NO: 73246 - DNA, 100 bp, Glycine max
cccacgcgtccggtggatctctatctagggtctgtatgaatctgatacgacaagatgtcgcaatgcacgacctacagccgacgccacagttatactgcca

SEQ ID NO: 73247 - DNA, 146 bp, Glycine max
tcggacaaacccatatgtagagagagaaactggcagtcgcatacatgacttacttcgatgccttcgcggacgacttgaacatcgactcttcgttcactcgccatcacgacgatgacgaggacaacttctctggctacggcagctac

SEQ ID NO: 73248 - DNA, 76 bp, Glycine max
gcttcttgtacgaaatgagatgtataccttgaccatgtgctagagttgcaaactatgaattagacttgttagtaaa

SEQ ID NO: 73249 - DNA, 73 bp, Glycine max
  unsure (1)..(73): unsure at all n locations
gctcttgnacgaaatgagangtataccttgaccatgtgctagagttgcaaactatgaagggggacgggttagt

SEQ ID NO: 73250 - DNA, 447 bp, Glycine max
gctagtttatcgtgaggagaatatgaagttgtttgttttctttgttgctgcagtagttttggtagcatggccatgccatggcgcaggctaccaaaggttccctctccgaatgaaaactggctatggtgagcgttcttcggaggtaaaatgcgcaagttttaggcttgctgtggaagcacacaacatccgagcctttaaaaccattcctgaagagtgcgttgaaccaacaaaggactacattaatggcgaacaatttagatcagactctaaaacagttaaccaacaagctttcttttatgctagtgaacgcgaagtccatcacaacgacatatttatattcggcatagataacaccgtactctctaatatcccatactatgaaaaacatggatatggggtggaggacattaatgaaaccttatatgatgaatgggttaacaagggcga

SEQ ID NO: 73251 - DNA, 202 bp, Glycine max
cccacgcgttcgatttatgaaaaaaaaattaaaaatttaaaaaaaaaaaaaaaaaaaaaaaaggaacacggaaaaaaaaaatctgggggggcttgaaaaaaaaattctttcacacttttttttctcttatttcccaccaccaatttagacttttttattaaatacacaatttctttagtttataacccctcttcttttaatt

SEQ ID NO: 73252 - DNA, 410 bp, Glycine max
  unsure (1)..(410): unsure at all n locations
cttctatatttttcagtattttgttatggatgattttggtggtcctccccaccttcagggtccttcccgcaccctcaggttattcctctattggtttggggaattggattgaagcactatggttttattaatgatgtgaaaagaattaggattttcttctgactcgcataattatttaattagcacctttctttcatctatcaacaccttacattgaacctttgttactaactatttcctgcgtccttgtttgttaacttttggcctctaatagggtgaacgtaacgcttgggcctcangtggacagaatgatgatatctggactgcaccaccgtgaagacatattttgttgcagctgtggacaacctcttggatggaaatatgttctgacacatgaaaagaatgaaata

SEQ ID NO: 73253 - DNA, 351 bp, Glycine max
ttctctttctctttctctgtctgcttcttcactttctctcgtttcaatcgaaaaaaatcatgggcagaaaattcttcgtcggtggcaactggaaatgcaatgggaccactgaggaggtgaagaagattgttactactttaaatgaagctaaagtccctggagaagatgttgtagaagttgttgtgagccctccttttgtgttccttccttttgtaaaaagattgctgcgccctgatttccatgtctcggcccaaaattgttgggttcgcaaaagtggtgcttatactggagaggttagtgctgaaatgcttgttaatttgggaattccttgggttattattggtcactctg

SEQ ID NO: 73254 - DNA, 276 bp, Glycine max
tcggtcgaacagaacagaaccaccacataactgtgcttttcaaaggcgggaagagcaatggcgggcataaataaaaggggaaatctggtcaagacttctgctgccatgcacatgaatcaaaaattgtcggcgcttacaccgatcacttttgcaagcaataaaaaccatgtcatatgcaaagctatccctccgatgtatttcctaccgcactgaagatatgagtttgccagagactttcgcttcttatggcaaaataattgatgtcaaagatattat

SEQ ID NO: 73255 - DNA, 275 bp, Glycine max
ccgcatgcgcgccacgcgtaacgctattaattaaagataggagcatggaacaacacaaatcgacaacccaagctatcaatcccaatccatacctaaccatgatactccctcgaacagcaaacttacaaggacaggcttatcgagctacacgcggacaataaaacatattaaacggacattgctgatctaaagcaccaacgacaggcgagtgatacatcaacatcctatgaatggagctgaaaagctcaagaaagagtatcttgagaagctgaact

SEQ ID NO: 73256 - DNA, 317 bp, Glycine max
cccacgcgttcgcccacgcgttcgaaaaaaaaaaattaaaaaaaaaaaaaaataaaaaaaaaaaaaaagggaaaaaaaaaaaaaaaaaaaaaggaaaaaaaaaaaaaaaaaaaaaaaggggggggagattaaaaagatttataaattaaaaatatttgtataaaaaaagggggggggccgtttttagggatcaaaatttatttcccggggcttgcaaagaaaaagttttttttttggggaacttaatttaatttcatgggcgggggttttaaaacggggggtttgggaaaaccttggggttccccaatttatttgct

SEQ ID NO: 73257 - DNA, 482 bp, Glycine max
  unsure (1)..(482): unsure at all n locations
cccacgcgtccggccaagtgaaagtgagaaaaaataaaaatcaaagagcataatgtcagggatcattcacaagattggggagacccttcatgtgggagggcacaagaaggaggaggagcataagggtgagcaccatgctggagaatacaaaggggagcaccatggtgaacacagtagtgagtacaaaggagagcatcatggtgaacacaaagctggagagtaccatggtgagcacaagccagagcacaaagaggggttcctagacaaagtcaaggacaagatccatggtgaaggcggcgccgccgatggcgagaagaanaagaaggagaagaagaagaatgagcatggccatgagcatggccatgacagcagcagcagcagtgacagtgattaaactgctgcatcacctatatatttaaaacggttatgggaccatagtagcgagggctgngccttatttctctctctcttctctctcttct

SEQ ID NO: 73258 - DNA, 199 bp, Glycine max
tccacgcgtccggccacgcgtccgttcttatgaatttaacgacaccacctgcaaaattgggaggatcgacaacgaactccgacgcttacatgatggccgaagcacaactgacaataaccatattggatcttgcgcgacaaggtgtcaaatacacgcagatcaaaaaggaatgctcttgaagcgaccaaggctctgttca

SEQ ID NO: 73259 - DNA, 345 bp, Glycine max
tccgcatgcgcgccatgcgtaacgcttgaagcgtgactgcttgtacattcaatatcctgtcttgactgtcttaccagaactataatgccagaccgctgactgttacacaccgtagcatggtattatcaaggatgcacattttattactcgcgacgcactttaagccatgatttaatgagatagacaatgtcgcggggcgaggatacatgcttgttgggctcttttgcgatcaatggatcaatgacgttttgagactcacacaggcgaatcaggacacctaatcatcttactcaatggactacattgagttatacacataactatgtataactctagatagaacat

SEQ ID NO: 73260 - DNA, 176 bp, Glycine max
ctttcatatgtttcaacatatcttcctccaaataaacttatgacagaataatacatccatatgtttcaacatatcttcctccaaataaacttatgacaagcaaaatctgtaaagacgagagatgatgaaacatatggatgtattattctttcataaatataaaattttgcattttt

SEQ ID NO: 73261 - DNA, 361 bp, Glycine max
tagactcgtacgttctcaactacggttctttaattttgatacaataatcgggtggctttcggggggggactggtggatacaggggccctcacatgcacaaacaaggttactcattgcgctccctgaaaagcgtgtggcgcgttaaacccgggcacgaaacctcaagaacccgagtcctacgctgttccacatgtaccccgatcacatcactctttaagatttcgcgcattatgacagactccgtctcgaatcttccttcatatcaacacaccaaggtgaggtgtgaacggaacaaactccgatcttgcacattgaccatcacgaaatagctttttcccctctcagagttccctacatttgc

SEQ ID NO: 73262 - DNA, 266 bp, Glycine max
acggggaaagcgagaaaaaacaaaaaacaaagagcatgatggcagggatcatccacaagattggggagacccggcatgggggagggcgcatgaaggaggaagagcataagggtgagcaccatgcgggagaatacaaaggggagcaccatggggaacacagaagggggtgcaaaggagagcatcatgggggacacaaagctgggaaagaccatggggagcacaagccacatcacaaagaggggggcctagacaaagtcaaggacaag

SEQ ID NO: 73263 - DNA, 345 bp, Glycine max
actgcttctacacttcacaaacagccgttttacatggtcaccgatggcgtccttgcgctgggagggtttttaaacgaacacggggctgttcttataaagttacgagtgcaacgtgtggagattcgaaagccggagaaatttaacacaagaagttccgtcataatcactgttggagaaagccccactttggctaagcgcaaaacgaatcacaactagttaccggctttattatactttgttccaaagggaaagcctctttggacaacctctacagggcttatatacttggcaaataaatctatgggacagaagaatggaggacaatatttggcttgaggactccat

SEQ ID NO: 73264 - DNA, 392 bp, Glycine max
  unsure (1)..(392): unsure at all n locations
catatgcatacatgccatatttgtggtggtgcttaagctgattgtctattttctgttggacttctgtgattataaatgtaatcctctgttgtctaccattnaaaaaaaaaaaaaaaaaaaaaaaaaaaaaaaaaaaaaaaaaaaaaaaaaaaaaaaaaaaaacaaaaaaaataacaaaaaataaaaaaaaaaataaaaaaaaaaaaaaaaaaataaaaaataagggggggcctttttaaagaattaaagataaaaaaacccgcctacaaacgaaaaatcttttttaaaaaccccccaaattcaatttcacgggccaccgattaaaaaccgctaaaatgaaaaaacctggccctttccaaattaaatttttttaaaaaaaatccccttttccc

SEQ ID NO: 73265 - DNA, 181 bp, Glycine max
aaaaaaaaaaaaaaaaataaaaaaaaaaagcaggaatatctgaatggatacatacatacatacacaaaggcggcaaacggggctcctactaaatgggggcacccttaatgtactccactattccagattatttacatttggcttaactacgaaaagcctggtgctaccgggctgaaacgcc

SEQ ID NO: 73266 - DNA, 195 bp, Glycine max
cccacgcgtccgcggacgcgtgggaaaaaaaaaaattttaaaaaaaaaaaaaaaaaaaaagggaaaatggggaaaaaataaaaaggtgaaaagggaaaaatgggggggcgttttaaaagaatccaatcttaaatacgcgtgcatgcaacgtctatatcctttttataggggcacctaaaaaaaatttaactggcc

SEQ ID NO: 73267 - DNA, 105 bp, Glycine max
agcactctttggtgttctctctgatactctaaattatactgaaaactctatagtgggccccgcatatggccaacagtatcgtccacagaaaactcattaaggaaa

SEQ ID NO: 73268 - DNA, 134 bp, Glycine max
ttggaattcgagttggagcacggtttcgtgtaccgtgaggcccaacaggtcaccaggatactacgatggacgctactggaccatgtggaagctgcctatgtttttttgcactgatgcttctaagtgttgaaaga

SEQ ID NO: 73269 - DNA, 63 bp, Glycine max
aaaaaagaacactgatgattacaaaacgatcaaaatttataaacaatacacaagaggatattt

SEQ ID NO: 73270 - DNA, 259 bp, Glycine max
gtcaggcgtacgctacgcgtacggcattgcttgaatccgtagatcatagttttggaaacacacatgggactctcttcaggtttgatctcatagagacatgctgagattaccaagccaattgaataccttgcgaccaaatatgagcttggccaacacaaaaacctcccttactgccatcatggtgtactggcatcactgacagatcagaaggacacagttccaccgctgcaaataccacatcaagctgtaccagctgatg

SEQ ID NO: 73271 - DNA, 162 bp, Glycine max
acggctgaatgtacataggctataaggctatggatctcacttaatagcgctactgagatattaaatgttatgcgtatggttaatatttttgccatctttcccaaggattctgaacgattgagcttgaaataaaatttactgttgtgcaaaaaaaaaaacata

SEQ ID NO: 73272 - DNA, 118 bp, Glycine max
acgcacagacatgcagcgtgtatcacttgctcttcgattcggatcaatgtaatcaagtcatcgttgatatcaaatgaataatggcatgccagagaatggaataaattatcttttcaac

SEQ ID NO: 73273 - DNA, 245 bp, Glycine max
acgcgttcgcgcgacactagctttgtgctctcgttactcacgaagggcgtcaacgatgtcaacgctgtccatgagcaacgccacatgcgtcaacccagtgttccaacacaagtagcgctcttgaacaatctattcatgacctggagatcaacctactaaagggcctcatagcctcacggcgatgcacttaactttaagagcggacagctgtcgcaggaacattccatacaactctaggtacctgc

SEQ ID NO: 73274 - DNA, 203 bp, Glycine max
cggtacgcgattcggaattcgagggtacgacgtcacgcgtgactgtcatagagcctatcgctttggatgacactcaatagcgcatctgggatattaaatgttacaggtctggttaatattttggccatcgttcccaaggattctgaacgattgagcttgaaataaaatttactgttgttcataaaactgaaaactgtaatggc

SEQ ID NO: 73275 - DNA, 405 bp, Glycine max
gttattttctgcactggctttgatacagatttcaggttgagtttgtttcgttatctcttaatgacaaccttgtttcttaaggtttatattttggagtttacgtagtgatgaaaaaaaaaaaaaaaaaaaaaaaaaaaaaaaaaaaaaacaaaaaaaaaaaataaaaaaaaaaaaaattaaataaaaaaataaaacggtctcacatatctaatgatctaacctttactaccatttacatctcattcaaaatctactatataggtgaacttaatttcaattacttgcccttcatttactaatacatcttctagaaaaacccttatcacaccaaactaaattagttgactgtaattacactttttacaagctctttatacaccaataaggacaattacttttacaatt

SEQ ID NO: 73276 - DNA, 271 bp, Glycine max
aaaaaacatacgagagaacaatgacacaatgaaacaatatcactaacacaaaaacagtaactacggaccggaatactagacaaagcagggcatggtacaccccttcaacattcacaactaagaattccttgctctaaagtgcctgaacttgacggatctcataacaccatatgatgtttgttaaaactcacttaaatcaaagaccttgctcgtggcaatcatgcagcttgtcctgaaactcctgctgaataccctggttatgctgctactc

SEQ ID NO: 73277 - DNA, 205 bp, Glycine max
aatacacgtcgcatgcggtcgagctatgtgtacgttcatagctgaaacctcaactcgtcgacataggggcatagattgaacaacttttggatgaacgtcaacatcatcagctacatgagcactagtgaccttttcagctgtggaaaggcttggcatgccaaagtacttagccaatggagacccatcttgcacgtagtggatgcgt

SEQ ID NO: 73278 - DNA, 211 bp, Glycine max
aattccagccacgacgtcacgcgtccgatcacgcgtccgttcactctatcaatcatctccttttccactctattgactcctctatcccggtactggctataagcattatcaccccaaaacccaattttttttactaatacaactgctcttattttgatcttctccatgaagccacgtcagcagcgcgatacgaataccgttcatttgttca

SEQ ID NO: 73279 - DNA, 272 bp, Glycine max
acgccacgcgtccgtccacgcgtccgctggattccagctagcaaccttgaaagtgcaactgcaaaagagagggcagatgcttttaaggcagcatgggaacgttattaagagggttgcagaatcggtgttcattgtccctggagggcttcgcagataaatgactgcaagaaaaatttttggccgccaattatgcccgtaaaaacagtattccatcccttggaattaatcttggcatgcatattgctgcatagaatttgcaccatcctgtcttg

SEQ ID NO: 73280 - DNA, 404 bp, Glycine max
gcaagcttggatccatggtagcgtgcatcatttcttgagactgacatagagatggacgtggatcattaggtggcagaaactgctgctgatacagatgcataagacaatgcaactgaccatttcatatgctatgctagagtcgatgatgaactgtatgatctagatggaaaacaggcagtgccaatatctgacggtacatcataaccaagatctttactaagggatgcagctaaggctgtacatagcatgatccagagaaatacacactccttcaactactatgtcatcgccaagggcatgaaattcgggtagatattgatttaggcttggagggatcattgagtatgcttagatgttactttagtaagtcatctaggaagcaaagcattatgcactgcagatta

SEQ ID NO: 73281 - DNA, 105 bp, Glycine max
agatatttggccgtcctctatttttccacgtggttctcgtatacttgtccatgttaagacagattccagtaatgacgtttcggtggtttatcgaaactaatggtt

SEQ ID NO: 73282 - DNA, 302 bp, Glycine max
gtttattagaccactacttaatggtacaatgagatagtatagccagtgaatatagttagcagcttgtgatgtatatatatgcgttactgatgcccaacaaggttctatatatgctatatcaagctatacatgcacacacatgtatacataatgcaacactttactgcacatgctacttcataatgttaacccgctgtatgcttgatcccattcaatataatttctttactattaggcctgatttgctgtagtacgttgatgcttctagttataatatcttccacagaaaattgttgtaaaac

SEQ ID NO: 73283 - DNA, 445 bp, Glycine max
aaacactaaattataaccatcatgggtgatgttctaagccccttcaccatctcatcccctcctccagcctcctctccatcaaccaagagcaacagcatgcccatgttgtactacggtctcgtggtggtcggaaccgccgccatagtactagccatatacaacctcgtcctcctaagacggagccacacgcgccatgcgctgccgtcgcaaagtactgggcaaaatagagatattgtacgagtgcccgagatgagaacgaggagcttcgaggacagccaacaaaggaacttgttgtcgagcttcaagtacaagaaagaagttgtggccaaagaagaagaacaagaagaagaagagcaagatgatgatgaatttgagtgctccgtttgcttatcggtttatgaagaaggtgaagaggtgaggaagcttccacagtgcaagcactatt

SEQ ID NO: 73284 - DNA, 311 bp, Glycine max
atgatcacagcatcggatcctcaaataatcagcataaaaatatatgctaccctttttacagcttgtgcatcaatctgttactttttcttttctacttttgaatcaatttaagcattttcttattcaatcctgaacggaaaatggagaatataaactcatatttggttaataagtaccattcgagtttgatccttgacgaaaaaaaaagacctaaactaaaggcactcttaatcaaaactcgaacgaacactttacgctgtcatagggaactctattgaacaatcaaaaattctattgaattgcattggaca

SEQ ID NO: 73285 - DNA, 365 bp, Glycine max
actaccacttctgattccgaaactgtgaatcattagacattctgaaccccgaaccctatgagcagagcgagactgacaaccacgttcacgacgcgttcatgactcgcaggcgcattgctgtcatgcacctcgtctcgtctcacctgacggtttgtgaaatcctcagcgatagctaggaatcccacgaggcatgctggggcaaagggaaatggaaggatgacatgctttgagaggaattgcctgcgtacagattacagagtgattgcatttgcgtagatcgcttggctagcaccctcaagcataccggctatcaacggtaaaagtctgactggcatctactttgatagcattgctgctgagcttgc

SEQ ID NO: 73286 - DNA, 422 bp, Glycine max
  unsure (1)..(422): unsure at all n locations
tcttcattttacaacgtcgtcaacgcttaggagttaggacagtgaatttctcaaacctcagctgtcgttataaaatccagcacttcccttctcagtttcgttcggttctgttctattctctgaacaatggcgtctctctctcacctcaacaaactcctctgcatgcccccgctcaactcttcaccctctatttcgccaccacgcagcagcgtcggaatttggaccaaaccctctctctcccccaactctccacactctcctccgccaccttccgccgncgaacgcaccctctcctccgcccgacgatggacccgcaaccgccggaaccttccgcgcccgccgcctcggcggaggacttcgtccacgtcacggatctgaagatggagagcctctccgagagcatggttcgaatcgacgagcct

SEQ ID NO: 73287 - DNA, 188 bp, Glycine max
gataaaccgaacagcactaacgcggatgatgtctttaaccttcgggttcaatatcaatgagaccctgcgtgcacctgtacgagaccttcggggcgaaatggatggtaaccaactacacaaaccggcaatgtccttgaaggttactcatgcaagagcccaccatgagtcacggtggacatactactaga

SEQ ID NO: 73288 - DNA, 418 bp, Glycine max
ctagttctagtcgcgactccgccctttgctggtcctccccaaaaaagtagattttgatcattttttgaccccatttttaaggacctaaaagaagaaaccgaaccattttcaatttttcactttgcgagtcctaaaagttttacgtgaaaagttgaactggttcctaactatcttagtggaaaaagcaaaatggattagcaaaagtattatcgaaggaattcttagaagtatcttcaaaaggattctaagcctaacgaaagtaaaacaattttgaaaatggctctttattaaattgaaattcataaggatcgatgaattgagcgactataaagaggattgaacatttattaggattaatccaatgatttctgaaacaaccatttcaattcaatcgttaaattcagtaaatggttcattg

SEQ ID NO: 73289 - DNA, 154 bp, Glycine max
cccacgcgtccgcccacgcgtccggctttgtgcatcattttctcagacactttgttgactgatatttgaagaaaatcaaatgatgagggaaaattttctataaataagatcaatatatctagacgacttctctcctgcaaaaaaaaaacagaat

SEQ ID NO: 73290 - DNA, 285 bp, Glycine max
cccacgcgttcgcccacgcgttcgatgatcttgaactttgtgttcgggggagtagacgactaggtgaactgctttaaggaacattatgctgaaggacgtcgagacacaacgctctgatagaatgtgacagtgggacataagtttttatattagtggcatgatgttagtctattttattttatttcactgatttaataaaatatctctgtaaattttgatggccttaattttgagccaaatatgttttaataagttttaattgataatagtgaagtgaatgtgaac

SEQ ID NO: 73291 - DNA, 418 bp, Glycine max
atgcgtacgtcacgcgtccgctcacgcgttctgccaagcgttcgctgtgaggcaaacataatgttgatgtaggaaatcctagatgatcaattttgagaccttctaacggataaaacgaaagttcgtgcttgatgtatagaagccttaagtgtccttaaagctgttctcaaattaaagagttcaagcagggtgattgaccactttgcacatctctacattatttttaaaccaaagcaatgcatcgtgtttgggtctttattcaaccgacatgagatttgctatcatgtcttggggttgatccatggaatctgtacccccatcactggatctgtgaaggattatatgagcatcccctatacgaattggcttccatagtattcagacgaacgtgattccatttgtgtatgacagcatgttt

SEQ ID NO: 73292 - DNA, 449 bp, Glycine max
  unsure (1)..(449): unsure at all n locations
gatcgagataactagaaacagtgtgatgaaaatgaaggtccttgctttcttcgttgctacaattttggtagcatggcaatgccatgcgtacgatatgttccctctccgaatgaacactggctatggtgcccgtactccggaggtgaaatgcgcaagttggaggcttgctgtggaagcacacaatctttggctttgagaccattcctgaagagtgcgttgaagcaacaaaggaatacatccatggcgaacaatatagatcagactccaaaacagttaaccaacaagcttacttttatgccagagacctcgaagtccatcccaaggacacatttgtgttcagtatagatggcaccgtactctctaatattccatactacaaaaaacatggatatggngtggagaaatttaactcgaccttgtatgatgaatgggttaacaagggcaatgca

SEQ ID NO: 73293 - DNA, 440 bp, Glycine max
cccacgcgtccggagtttgttgtgagctataagctagtttatcgtgaggagaatatgaagttgtttgttttctttgttgctgcagtagttttggtagcatggccatgccatggcgcaggctaccaaaggttccctctccgaatgaaaactggctatggtgagcgttcttcggaggtaaaatgcgcaagttttaggcttgctgtggaagcacacaacatccgagcctttaaaaccattcctgaagagtgcgttgaaccaacaaaggactacattaatggcgaacaatttagatcagactctaaaacagttaaccaacaagctttcttttatgctagtgaacgcgaagtccatcacaacgacatatttatattcggcatagataacaccgtactctctaatatcccatactatgaaaaacatggataatgggtggaggaatt

SEQ ID NO: 73294 - DNA, 354 bp, Glycine max
cccacgcgtccggtctttgcactcttccatgtgacatctctaacacaagttcctttactactaagactcaaactactttcttggtggcttcactgagaacttcgaattctcattcttttctatcgacatctcatctcacatccactttattctacaaactcgggtcctctccccccattgtcctaccacacctactcagtactgaaattctttattctcataactgccatcaaaaaatctttctttgcaatcattatgccatgacaaatagctgcttcgtttaaaagcttttctctgcaaattattagattctgtacaactggtggtcatcccaaaggaaaaatgaaaggttct

SEQ ID NO: 73295 - DNA, 170 bp, Glycine max
tcggtgtctctgacggtctgtgacacacacactttcttacaaactcaaggctctggccatttagggttaccgtatattgaacatggtgcacatattggcttcctctactcaatgacagattataatcgcaaaatcctcttccaatgcaagtacccattacatcatacatg

SEQ ID NO: 73296 - DNA, 251 bp, Glycine max
cccacgcgtccgtccacgcgtccggtaggtgacacaacaccaacaagtggatggagctctgtttgcttgggaagttgaaaactttgaacacagtacaagaaccgcttaccagggaaacaacccaataccacttccaccattaacaatacacagataacccatttattgctaacatcattatctttccgtccattaaataaaacacacaaactgggccttactctcaaggtactttcctactgttcctattt

SEQ ID NO: 73297 - DNA, 424 bp, Glycine max
tcgcccactcgtccgcccacgcgtccgatctctcttttgaaatttatactatttcatggcttttagagcgtgtcaaacaaatcatacttctattattcattatatcctattgttccaactggctcatgtttacgtatgctatcttcatcttcaagtaatgagtaactttttcttaagatgcttaaatataatgaacaacagtgtgatcagggaacagccataaaaaaattgcatcatagaaaagaaaaagaaaatgtttgtcatttgatatgtacttcaactttgtattccacattaacggaaatgtcacaacgtttattctgtgagatgaatgaaacttggtttcatcctaacatcacctttgattttaatatttgtgctgccaaaattttgattattgaacccattttcaccttacttttga

SEQ ID NO: 73298 - DNA, 422 bp, Glycine max
gatcgtccggatgcgacgcgaagcgtaacgcccacacgtccgatcgcgagcggtgaaaacaacgcccaattacggatcccggagcagacgtggggtgcgcgtcttcagccgacaggctcactagatacggggcgctagacggatagggtggggaggatcactgctgcgatgaacacggtcactgaggtgatgaccacggacacggcgaaggaacaagacactaccactccgatgatgatggcaatggagctgataggaaaactggaggggggagccataaactactctgttgagggtcaggagaggatgcacaggtgcatgagagagtcatcggtgaagatcgtaaagaatttgaaagatgtcgctctgctgactcatgttattccgacaattgcgacgatgacgacagtctacatgatggt

SEQ ID NO: 73299 - DNA, 363 bp, Glycine max
cggacgcgtgcgactacacgtccattcactcaagcgcagacttgcatcttgaaagagaagatggttggaggaatggtagcatacaagaacaagttcatagaggattggggcactgccagagagaatctggagttcaattttcgttggactcgtcgcaaccttgctcttgttggcatcttcagcatcgctattcccgtcctcgtctacaagggcatcgtacgtgaattccatatgcaagatgaagataatggtctgccgtacaggaagttcatgtgagagagtatggagagtcttttgtaataattcgtcaagttagacctttgatattatgaggctacaaaccatgttttttttttcccttaa

SEQ ID NO: 73300 - DNA, 135 bp, Glycine max
acgtaacctaacagattctctccttttacacaggatttttagagcacttaatgcatgggaggcaccatgggaatgtctgtcaccagtggcttcacatacaatacacttgtaaagaaaccctgtgctattaatact

SEQ ID NO: 73301 - DNA, 409 bp, Glycine max
cgagataactagaaacagtgtgatgaaaatgaaggtccttgttttcttcgttgctacaattttggtagcatggcaatgccatgcgtacgatatgttccctctccgaatgaacactggctatggtgcccgtactccggaggtgaaatgcgcaagttggaggcttgctgtggaagcacacaacatctttggctttgagaccattcctgaagagtgcgttgaagcaacaaaggaatacatccatggcgaacaatatagatcagactccaaaacagttaaccaacaagcttacttttatgccagagacctcgaagtccatcccaaggacacatttgtgttcagtatagatggcaccgtactctctaatattccatactacaaaaaacatggattatgggtggaagaaatttac

SEQ ID NO: 73302 - DNA, 438 bp, Glycine max
ggtttgtgcaatctcgtcatcaccgttctcaactctctcgtttcggcgtctcgtcgtacgcaatgcgacgccgtctccgtgcaagccgcgtgccgttaaacccttaacggcacttccgagcgcggggcggaggcagttgctgttttttctgacggcgacgacggcgttgacggcgagggaagcggcgtccgtggcgcaggacattcccttgttcgggatacggaagagtctgaagaaggtggaggaggaagcggaggagattgtgagagagggatttgaggctgcggataagggattggtggcggcggagaaggggctggagacggcggagaaggggttggtggcggcggagaaggggatagaggaagcggagagggagatagaggagacggtgagttttggggggttggcgcaggcgggagcggtggcgggagcgga

SEQ ID NO: 73303 - DNA, 285 bp, Glycine max
cccacgcgttcgaaaaaaaaaaaaaaaaaattaaaaaaaaaaaaaggaaaaaaaaaataagggatactaaaaaaaaaaaacgggtattctattatataatatctactataatgtactaataatcttcattctgtaggcttttgttttcttctttgtcgttgactacataaattttttgtctcattttaaatcgccttttttccatacatttattttctgttgatatgtttgagattaggcattgtagttgttgatgttcttgcatattgtgaaagctggatttca

SEQ ID NO: 73304 - DNA, 113 bp, Glycine max
cccacgcgtccgtgaattctctgaaaaaaaatacaaaaacaaaaaaatatcaaaaaaaacagggaaaaaacaaaaaagggaaacgagcaaacaaaaagatccttaaacaaaca

SEQ ID NO: 73305 - DNA, 89 bp, Glycine max
cccacgcgtccgcccacgcgtccgatcaagggggtcatattagaaccgcaagaatttgacatggaaagagatttggtgactgcaacact

SEQ ID NO: 73306 - DNA, 214 bp, Glycine max
attcattcaacaaattcctgcagcacccagacaaatagtgcccaattacaattaacaagatggatattatgttggaccgattatgtattcataactatagtcatattaaggagatgattcatttgtagtacaaaaaaagaactatgtctattaagtaatgtacaattgttataacttgaattgattcatattcttaatcatgaaattatgatgt

SEQ ID NO: 73307 - DNA, 410 bp, Glycine max
acggaaagcttcgaaccagaatgtgggttaagtcgatggtgcttgccatggcggttgccacctgcggcgatgggtgtgaactttgacgaccacatttagatccgctccacggcgatggcgctgatcgactgaggcatatagagtcaacgagatagtcgaacattgttcgagggctaaatcgactacgccggtggtacgagcctccgaggtctacagctcctgagtttggacaacagagggctaactcgatgatgtgtactccaatatctatgatatatagtcctgagaaatggagggttcttacttatcaaaaatcccaatattgtaagttttatttcgagaatatcatggttcacagaagattcttatattcaagagcaaaacaggcacttatcttcaaataattgtag

SEQ ID NO: 73308 - DNA, 357 bp, Glycine max
aaaaaaaaaaaaaaaaaaaaaaaaaaaataaaaaaaaaaaaaaaaaaaaaaaaaataagggatattaaaaaaaaaaaaaaaaaaaaaaaaaaaaaaaaaaaaaaaaaaaaaaaaaaaaaaaaaaaaaaaaaaatgggttccctttttaaagaatccatttttacttacccttcattgcaacctattactttttttttaggttaccttaatttaattttattggccgtttttttaaaactttatatttgtaaaaaccttgattttacccaatttaatcgcttttaaataaatcccctttttacaaatttgcgaaataccaaaaagcccctaacctaactcctttccaaaaattttacc

SEQ ID NO: 73309 - DNA, 395 bp, Glycine max
ttaattatcatactctttatgttacattgctgggaagtataacataacgttttgattgcaaaaaacactaaaatataatcttaatgttggggtctttacttcatatgcgaacgatcgatatttggtaaatattcttagacctcaaatgtgatggattgacttggcgtaacttaatgtgtacattagtaatactcaaaaatgatccatatatctcggtcttattatgatattaatggtacaaatgatgaaattcaatcttatgctttcttgaattaattaaatttcttttcataatcttatatatttctgacgcactaaatactattattcctgttatttcaatatttcattatttttgtcatttaagtaaatccattattttcactattctttta

SEQ ID NO: 73310 - DNA, 216 bp, Glycine max
taccggtccggattcccgggtcgactccacgcgtccgcttgcatgcttggcggcccatccgtcactaaccggttggcagtatcaacgcacgggggatcactcgtattgaatgctgccaaagctttcaaaccacaaaaggtcacttatatacaattacattaatggtaacaattgaacgaggaactacatcttcgccactgcgaaaaccgctgctgt

SEQ ID NO: 73311 - DNA, 59 bp, Glycine max
acgcgagaacacacgatttagagcagattgaagagaatatcggggggggatttttgaaa

SEQ ID NO: 73312 - DNA, 189 bp, Glycine max
aaactgtggtttgcaatttgcaaatttacatacatactcttatctattttgcatagctatcactttgtgcgatcaccatgatcatctatttgtaaaccatttaatacaagtatattgtttcttgcatgatacatgacttgtatcctaatacttttaataagttaatccttatcaaggcttacgtaaaaa

SEQ ID NO: 73313 - DNA, 207 bp, Glycine max
tactcatgggggggcttatcacaacacatggttgggtatctactataatcaacttaatgtatttgttactcaaagatctaatcctgcatcttataactgtttgatcagaaactaactattatagcacatattctcacgataccatttttacttatgctactacaagactgaccataatgcttgtccttgaatcaattactttactat

SEQ ID NO: 73314 - DNA, 355 bp, Glycine max
ggaaacaaagagaacccaggacagacatatccactgcatgagatgcccaaagcaaatgcatcatactataattaatactacaacattcacttacttcactctgtttccatgcttccgatcctagaaaccgctactttctctattattatcatcaagtgtgagatgcatgctcctgacaaattcccaaccccttttgtgcgagtgagacccatctaatcaaattaattaactcctaaacccggttcattaaccaaaattgagtacttgaccaaatttcacaagcttcaaaccaaggaacccaccaaacctaagaaacatcatcgtcagctccgaaagatcgcaagcttgttgcggt

SEQ ID NO: 73315 - DNA, 365 bp, Glycine max
ctctgctgtcagtcctatctgcagccaatttggagatggcatggatatgaaatagttgtgtattatataactgcgaggactcttctttatcatttctcttgtccctttgaagtttttcacttttttctatcggatgagtattgataacagaacttgaacaattatggattatttattggtggacatgatgtgtccccttctgctgtaggaagtccttatatttctagtattaatgtaattgtatcctttaaagtatcttgactgttgtatggggattttaggcaaggtctttgtacgcgacacgtttatgacacttgaattgacttcagatttctgctaaacctattgagaagctgattgtccta

SEQ ID NO: 73316 - DNA, 138 bp, Glycine max
gattggcttctggaagtggactgtacatcaagcggcgggattatcaatagcggcggccgcgattgaagcatcgtattatgcaaggttcctgagtgggttgatggaggaaagagttgacgctgcaaaggtctttaaatc

SEQ ID NO: 73317 - DNA, 398 bp, Glycine max
gaaggtgcaagagtttgttgtgagctataagctagtttagggtgaggagaatatgaaggtgggggttttctttgttgctgcagtagttttggtagcatggccatgccatggctcatgctaccaaaggttccctctccgaatgaaaactggctatggtgagcgttcttcggaggtaaaatgcacaagttttaggcttgctgtggaagcacacaacatccgagcctttaaaaccattcctgaagagtgcgttgaaccaacaaatgactacattaatggcgaacaatttagatcatactctaaaacagttaaccaacaagctgtcttttatgctagtgaacgcgaagtccatcacaacgacatattgatattgcgcatagataacaccgtactctctaata

SEQ ID NO: 73318 - DNA, 379 bp, Glycine max
gcagttttagatatggaagcaggagtacttggttcaaattcgtgacttagtgggtctgcaaagaagcgccgatcgatgcagtctgctcctattcaggagcaagtaatagcagatggactcaggctaattactaagttctactcatcatgtaagcaacaggatatctcaaggtttgaggaagcaaggacagaacttggaaaactcaagtgcaagccaatactagaaacgatattcgagtgtgatagggaaccaattctgcaggcttctgctagtcgtgtcttacaagcagtttttcccaagaaagagatatatcatcaagttaaggatactatgcaacttcttggagttgtaaaatcctcatcactactatcatcaaggc

SEQ ID NO: 73319 - DNA, 193 bp, Glycine max
agtccgtgagtcattcctttctctcactcttcgggcaggcttagatcaactgcgggcacagcacgtgactaaaaactatggtgtccaaacctaccgactctgcttccaaacttcgtaaacaacatgtacagccagcaaatgatgcaattggaaacttgtccctcaagataaatcacgtgataaagcaaatcca

SEQ ID NO: 73320 - DNA, 248 bp, Glycine max
cccacgcgtccgattattactgcggatgggggttacataatttaaagtgtaatgcgcggatataattataacataaaatggatgcccaaaacataaatctcaagatcaactaagtttttaagaaggacccactctaatgattatctgtagatgatttaagtacaaataacacatacaaaagatcacaattagagcacaacaacaacaaatgaatggaaaagatacaaagcaaacaaaaggcaaagctt

SEQ ID NO: 73321 - DNA, 223 bp, Glycine max
cccacgcgtcctcccactcgtccacccacgccttccaattcgagccaccactttttttgtcattcatttttatttttttttcgtactcaataacccttatcaatcattaatcaaccatattcttatacaacactataataacacacctccctctaatatacccacattcatacatttaccatctattctacaacaatcgccttatattaaatactcaaattaa

SEQ ID NO: 73322 - DNA, 399 bp, Glycine max
gcaagcaacattagcagctgaagcaaatgctcaatcccttgcgttaatggtggattggcagatttaattcgattgtgggaacaacttatcgatcccccaatccgctgtgaacagatcgagggcgtggcctgtttgatttgaactgaatttcggattgaaggatctcattttcttggagcattaaagcagaaatttctagttaaggatgccccgaggcctgagggaattttaatgacttgagagaggcagaaaagtgtgtaccttgctaaagaagtgcattagaaaaaaggaagcaggaaattatttctttgttttgcattaatgtgccatataaatttaactgctcaagcttgacatttttttataaacataaaagattaaaatgttatatctcaaaat

SEQ ID NO: 73323 - DNA, 394 bp, Glycine max
gtccctaattctcaatttcttggcggctctcacagtacgacacttcacatgtgacagtttactcaactccttgtttggttagaaccctctatcagtcaaaatcctatgtaggtagctcttttcgagacctcgacaatttgcttcagttgctttcaagatcaatgattgtttccataaaccatgaaaattaagttgctttctagaatttcttaaaagtaaaagtatggaaactattttcaagacatttacttatatctaaacatgaaaatgttaacaacacttttttttactctctctttctaagattctccctatattttggtgaagcgtaatggaagttaccaattttggtggcctcacttttaaatttggtgagaaaatttttaaatgaaaa

SEQ ID NO: 73324 - DNA, 90 bp, Glycine max
tgggtacacaaacaacgattcgcacgaatcaagttgttggtttggtagagaatataagcaataaatcaatcaatcaaatcattcttacat

SEQ ID NO: 73325 - DNA, 77 bp, Glycine max
atatatatatatatatagacaggaaaaattatcagtacttgaatatgtagttagactttcatatgaatatttcttcc

SEQ ID NO: 73326 - DNA, 354 bp, Glycine max
tcgactagcgctagatattactagtagtatgaccggacagagtgaaggtcacagtctgtgctgacacctctgaaaattaacaacgttgccttgtcctacatgagtttcctccgcaggttgtgcccctgtttgcacaagggcggcgcatccttccacgacggcgatgacgacgacatagatcgcaaccaccctggcgactccttcgacctaatcttcggcctccacactctccaactcgacaccaacttcttctccgacatcaaccggctatgtcatggaggctgtggtcctgttttcaggggattgatgccaaatggtcaagaagtggcggttaataagctgtcattggaatct

SEQ ID NO: 73327 - DNA, 212 bp, Glycine max
agatcagattagtattggtaatggtcagggattaaaatcaattcataaggtgtaacctccttttaattcgcaaactcctcttgttcttaagaaccggctatttgttccttctataaccaaaaacttgatgagtgtcagtcagttttgtagaaataactctatttttgagtttcattcttagttttgcttggtcaaatctcttgtctctaaag

SEQ ID NO: 73328 - DNA, 190 bp, Glycine max
gacacctcaattcacgcagggctacccgctaaggggaagcatatcaaaaaccggcggactaaaagatccaagcttacatacacaaacctgccactctataggatccaaactttacgtacgctaacatgacaacacatacctcttctatcatctcacctaatttaaataaccttgccgtaacctaacaaaa

SEQ ID NO: 73329 - DNA, 173 bp, Glycine max
actcattcttctattgaattgttggctcatcaagtatcccaattaatttcatgatgagactctgtgtgcacgtgtgtgcatgttaatttttattttctttatatttgccaatatttctttattatattatttaattacttaagcattactaatatttaccattcttatataaa

SEQ ID NO: 73330 - DNA, 209 bp, Glycine max
attcccgctggacgccactcatccctctaatataattctcactaacttttctttccagaaaactttatagatatacaggaatgtctcttcaacaagttgtttgttcaaaaacctttaatccttctttattactatttttataacattccaattccatacttacaatattttccctctcctaatttacactccctcattttcccttactt

SEQ ID NO: 73331 - DNA, 158 bp, Glycine max
tatgggggcgaagataggtaacctatggagtgggctgtggtggatagagggagaatgcgcagtgagctctttttgtggacccattttgattgtagagccctgcttgagtaggggtgtgcattgcatatgttgttgatgtggtattgtgccatgagggg

SEQ ID NO: 73332 - DNA, 358 bp, Glycine max
taccgacggagaatgttgctgagtaggcagtttatccatttaggggggcgttctagctacccatagtctgatagtgatatactgctacacatatcaatgggatcccacatggcatgatgggactctacccacatagatgctcaatcaaccacacttaaaaggtaccgatcactcaccacagatcaaatagatgcttactggcaatcaatgcagaagatagcataagaacaccttagagctatatccaacttgtcacagactattcacgctagcaaaagcacataacctgagaacaagttgcataactcaatgaccatgcctgagacctgttcacaggactaccataatatgttcatat

SEQ ID NO: 73333 - DNA, 372 bp, Glycine max
cttttaaattttagaaccctctcttctaccccgtggacgtaatcatactacatcgggggcaaataaaaacaaaaccctatgatccaacaaccgctcacatatccaccatcacaaatcaactacgcctgccttcaattccatatctctcttatcgtcacacctataaacaattcaatgtactccgatctccaacgctccgaatcccaaaactactctcttctacccatcttaatatccttctactaaattttactaattccacttaaactcttcacgaaaaaacccgaacactttaatttttccaacccacattcaatcttcattgataaacgaccaaaaccttaacaagcttcttaaacatcttaccatttc

SEQ ID NO: 73334 - DNA, 393 bp, Glycine max
ggtctttcacccaggccaacaacatcaagaggaagaaggcaaggaggagaacatataatagcagagagaggaagcgccaagaacgaatacactgttactaattaccctatatttctctcgccagaaactgcacgtgtcgatcttccttcttctcacgctccaaattcaaaccttcagctacgctcttctctccgatctatcgtctttatttctctctttattttctcgggttttccattggaagcgagggttgaattgaggcgaagcatttgcagcatgagcatcgacagccccgagcaaggggacagctaggttttcgaggttccgactgtggagggcgagatttccatgggtgatggaggcgtcgcgtgcatgcatttgcagtatattatg

SEQ ID NO: 73335 - DNA, 330 bp, Glycine max
ttactttaaggcttttttctctacaattcttgctgtctgcttcttcttgcacgttgttttcgtgctcttgctcttcccttcttcttctttcccccctttttttctctttgtagctccgctacctatactttgtttattggctccatgttcttcttccctcactgatttatcttttgtcagattcgatttgtctcatttggtttgcataagaatctttggcaataagctggtgtggtgtttctttcatttcactttatatgagtacatataattttgaagggttttaaggatctgcatcatgttacgctcattacctatattgccactccc

SEQ ID NO: 73336 - DNA, 274 bp, Glycine max
atatcccatatttagagtcctttttgtatattatatgaatataaataatctcattggaccataatacataacaattttttgaaatatggaaaataatatcttaatattaactagcctctggttatatttgatttgttttaagaatgactttatttattcccgtctctttttttcctgtatgaaagaatctttcctttatactatattttccaagagtctagaaaatattcattagaataatcgttaatagtttcacatataatcacgtaattca

SEQ ID NO: 73337 - DNA, 374 bp, Glycine max
tggttctagtgtgtgattgtttgttgttgtggctggttcttcttcttttgttgttgtgtgtttgtgtttgttttttctctcacctgaaaatgtcttgctgcggtggtaactgtggttgcggaagctcctgcaagtgctgcaacggctgcggaggctgcaagatgtacccagacttgagctacactgagtcaaccaccaccgagaccttggtcatgggagtggcacctgttaaggctcaatttgagggtgctgaaatgggtgtgcccgctgagaacgatggctgcaaatgtggaccaaactgctcctgcaacccctgcacttgcaagtgatgtgttggaaagccagcttcaagcatagatcgcccttaattagga

SEQ ID NO: 73338 - DNA, 113 bp, Glycine max
agggggagaggatcgggatccgtgattttgattcatctgtacttgtagagcctttttctactgcaaagggatggatgacaagtgctaactaagcactttcttcttcttcttct

SEQ ID NO: 73339 - DNA, 384 bp, Glycine max
cactctccaaatacgtagttgagggaggatctgagaccgtgacagacaagtccaacaatagttgaaacaaaaccaacaaatctccataccgctacctgagtcagccatctagtcattttgatggccaaaagcgtcatgttttttatgtaatgagtaagagttgctttaacagataatatatacagactacagagcaatcatttctggcttaggatgagaaacccacctgtatcttcagatgaaatttcaaggaaagggacaaaaaccttatatgctataataaattataggataaagatccgtccacatccatgctattaattagacactctttaaactcatatgatatatgattagaagaaagatatataaaatgaacttaaa

SEQ ID NO: 73340 - DNA, 300 bp, Glycine max
acgcttccgactgctgctaaaagtctactaaatggtatcatgtttctcaaagaagttatgcttcaaggtagtttagcgactgcatataattaatttccaatttaattaactacaattacaactactaatatattttaaatatagtccgtaactaataagcttacttacaattttttgtctcacaatttgaatcagtcaattcaatatcaatacaagattaaattggaacaggaccagaatgattcatatattcttaatggaactctaattaaacaattctgatcatgttctatactatta

SEQ ID NO: 73341 - DNA, 198 bp, Glycine max
ctccattgacgaactgtaattccaaataacatattcttttcactctaaggagattacaatcttttagtgatccatctacatttaccaacactttaacatctttttaacttctacattataactctatcactaaatacatctctcatactcgctaatcaaatgatcaaccttattgacttcattcattcatactctttt

SEQ ID NO: 73342 - DNA, 374 bp, Glycine max
gtacggccgcgcgaacacgaccgacagaaacccacatactgatacatctaaacacccctcgaggaggttaatatatcacggagagacgcaacgtctctcactttccccatcaaaaatcaccataactataacgacatatgatcaaccactatgaatctcacactcatatcttcttaatccaacgaatcctctacaatctaagtccctgattcctattctctgctgcatctcatacacaccgaatctcccaccatctctttttattcctcttctcatcatatatccctaaacatcaatgacaaaaatttataccccttcatcatataagcccttataacttataattatatcctaccactatctaattacctact

SEQ ID NO: 73343 - DNA, 205 bp, Glycine max
attccgcgctggacccactcatccgctaagcttttacttcttccgcattactttataaccaagacgaaaggccacttggtgtgtctttcttcagggacggcagcgtactattattttagccttcattatctcatcccgtttgacgctaattactcacataaatctctgcagataacttctataaacttccttaattccgtacaat

SEQ ID NO: 73344 - DNA, 420 bp, Glycine max
gttgttgtaactcgttcttcttcttttgttgttctgtgtttgtgtttgttttttctgtcacctgaaaatgtcttgctgcggtggtaactgtggttgcggaagctcctgcaagtgcggcaacggctgcggaggctgcaagatgtacccagacttgagctacactgagtcaaccaccaccgagaccttggtcatgggagtggcacctgttaaggctcaatttgagggtgctgaaatgggtgtgcccgctgagaacgatggctgcaaatgtggaccaaactgctcctgcaacccctgcacttgcaagtgaggtgttgggagagcaagcttcaagcagagatagcccttaattaggaataatgataaactattaatgtgtagctaaaaacttatgtattatgtctgtgatggttttcgtgcact

SEQ ID NO: 73345 - DNA, 144 bp, Glycine max
cggttcactccaacgagaaaatccacccactgtgatgcaactacatgctattggaccaatgatgcctcacaccgaatcgcccagtgcatacagtaaacagtgctcatctaatgacgatgccacactataccagctattctattg

SEQ ID NO: 73346 - DNA, 398 bp, Glycine max
caacgggacacaatgatacatgttgctaattgattttttggttgtctcacatgattagttcactgataagactcgaatttgtttccgagatgccctttaccgtcttgctagaaatacaaaacaacatgtactagaggacctggatggagatcttaacatgcatcatgaaatgccagactcagtttacaatgataccatgaggtctgaggacagtaaaccaatggaatcagagaccaacagtattgacagagcaattgcaaatctcatgttcaacaagatgtaaattaacataatagatcttacccttacaacactagtaaacttgaataaagaagtaattggaagtgaaggtcttcaaggacatagctcaaaagcctaggatgtgacaaaaagatctt

SEQ ID NO: 73347 - DNA, 345 bp, Glycine max
agatgtcgatacgttctcatattttgatattaacaatgatcgtgtcccatcccaatttccaattcctctttgaaacaattccatttcatacatcatttaacaaattagatggaacacatcctacaccaagccagatacttcaacaaataccccaatttataccattcatcataaaccaccctcaaacttattgttttcttattgactgattaaacgatcattattgattacttagccctcaacaaaagcatactttagaaaccagcttaaccagctcatcttccaaaactataatccaccctatttaatctcacatacccttttagttaccttctataattctaa

SEQ ID NO: 73348 - DNA, 306 bp, Glycine max
agaagacgacggcaggggatggaccactccggtattcctgatgtagcaaggggttggggcctatagataagaacggatgtacaactaactttcgagggcatataggactagcgtcttgactgtgatagcttgaaatgcaatgtgacctataacgtgattcgcgaaaccgaagttcaattgaaagaacaacattcaggccttaatgggctatatcatgctttacttctgcagtggaaaatacgctagtccataaatgattagtgagtttaaaaagagaggaataatttgagaagttgaaatgaacaa

SEQ ID NO: 73349 - DNA, 301 bp, Glycine max
aaaacccccaaagggttcttctgcatagaagacgacagattgctacggcggcttaacgactacggaagggactcattctgcttctctattgctggctcatcacgtatcccaattcatatcatgatcagactctgtgtgcacgtgtgtgcatatgagctctcattatatttcgatagatctagattcttgagtgatctcatttacttactgaaacatacttaatatttaccatgctgagataaaatagcaaaattctgtagaaaaatcatctgatgtagcactgacactaagttttttcaca

SEQ ID NO: 73350 - DNA, 366 bp, Glycine max
tggtgactggacgtagggacaagggtgtagccgaaccagtataaaactgagtttacattttctcttcccttaatctcctttatttattattgctttatattcatattcaaattgttttatttgaattaatatttaagaagattttcattaagggaattcataacttaaataaaaagtgaaatagatttttaattagggcaagtagtttggaatatcttaattcaaccccccaccccttcttaagatatctgaggccacttgtctaacaagtggtatcaaagcttcattcttgtataaagtttagaagcttcaagaaaaagatggtctcagcaaattccttattttcagaagggaattctatcaata

SEQ ID NO: 73351 - DNA, 347 bp, Glycine max
cccactcatcctcgcacacaaccccacacaactgtacttgtactaaaattaacttcttactcacgcacgtacttataaacacatgcatccacttccctcactcattcaaaatacccactttcatatttctattcattttttcttatcaattaattcaactagccaaactcatctctcattccccatacaacctctttagcgatactcacaacttcttaattcaccctatatatacaaagcagtcacttatacttctcattactcacacgtcataccatacttcactgattcccccttataaataaatatattattttctaacatctattaaaacatttacctctcca

SEQ ID NO: 73352 - DNA, 321 bp, Glycine max
cggtgttaggaggtgaatacatggaaaaactaataataaaagacaaaaacagatatatttcaagacaatgttttgtgataaaggatcatgtaattacccggaaatgtggaaatgagaagataaacattattcttacctcaacaagctcggacaattttccttctaggcttgatgcattcatgtccaaccccaatctctcaagttcagcttcaagctcagcttcaattttgctcatggactcagaactttgttctaccttttgatgatatgattctttagagtcaattcttggagagttatccaagtgcttttcaggggaaa

SEQ ID NO: 73353 - DNA, 390 bp, Glycine max
  unsure (1)..(390): unsure at all n locations
ggtgaccgnctttcaccgtccatgtgtgtgtaggcctgtggattataaaatctgtaaatgagtttatattcattcaaggttttgtttttcatcaatcatcatagcgaaagataagtcttgtaattgtcttttgggttatcattataatcgatctttcgctctccggtcaaattcagatatatttccacgatcctttaagtcggcgacttaatcaaatttaaaattctgtcttttttctctctgcaataacgtattctgaaagtatattcaaaccttctttcgcagacttagcgtgatccatcaggatttaatttgatttgcattgtattggaaagacaaatggcgatgttgagaagatatgttacagctagtactattgcattatttgca

SEQ ID NO: 73354 - DNA, 387 bp, Glycine max
  unsure (1)..(387): unsure at all n locations
tgttcaatcaagttagaccatcttgatttgtgtagtagttaatattataaagaatataagtaaaaaaataaaataattattttaaatttttttgtacgacagttattatggaagggagaaaatactaaaaattgcttcaatttttatgtaaatgtaaatcacatggactttaagtataattgaattttgggattcaatgctcttgtggtactttacatagcggcaccattattatttgcatgacaataatgtgctatgattgtactaaaagtttcggaatccaacaaacaactgccttaaacattaattattcaacggctccagcattcaacctanagaaattaatgcactattttaaaatttgttttttaaaanaagaacaaaatt

SEQ ID NO: 73355 - DNA, 302 bp, Glycine max
gttacacatgactattcagaagtacgtccgagcccatggatcgtacctaatgcataatcggatattaattggccatatctttatggtatggacgcaacttctataaatcattgtggttgcactggtaggacctggtatacatattttgacgcatttaaactacgatgtagactaattgtatatagactatgatcgtgtgcatgtacaatgctatgctcaattcatttctaacagatttaggatgatcgttaggagattctacttgttgtgagatcattcttatactcgctacatgacatcac

SEQ ID NO: 73356 - DNA, 369 bp, Glycine max
ggttcgagtgtgtgattgtttgttgttgtaactcgttcttcttcttttgttgttctgtgtttgtgtttgttttttctctcacctgaaaatgtcttgctgcggtggtaactgtggttgcggaagctcctacaagtgcggcaacggctgcagaggctgcaagatgtacccagacttgagctacactgagtcaaccaccaccgagaccttggtcatgggagtggcacctgttaaggctcaatttgagggtgctgaaatgggtgtgcccgctgagaacgatggctgcaaatgtggaccaaactgctcctgcaacccctgcacttgcaagtgaggtgttgggagagcaagcttcaagcagagatagcccttaat

SEQ ID NO: 73357 - DNA, 303 bp, Glycine max
tcccgctcgacccactcatccgcccactcaaccatacaaccgctcttatatcactgacaacacaacttcatcagcgcaggttttactaatcaggtcattgattttcctttacacaaaatcagatttacttctaaaataaaattcatttcttaatctcccgataaaacagatccctattatctccttcttcatcacaattcattacaactctaaatacatcaactatatacactctaccaacacaatctctgttaacatttattctcacactaccaatcttttaactatctacaacatattcta

SEQ ID NO: 73358 - DNA, 378 bp, Glycine max
cccacgcgtccgagacgacagaagggggggttaacaagcaaactaaacgtacttcggaggtcgcactctgcgaaacccaaacactgtctccgtcttgatggctgcgtcgcgaatcgtggcccatcctccgccctatctccaccgtcaatctccgccatcagacgccgcgccttccctcaaccttacactcctcccaaaacggtaccgtaacctcggcatttgcgcttcccttcgcggcgataagccccactccgtcgaactgcgagccaccacctccgacgtcgtcgtttcccgagatcttctctctcttccgcggcctttgtcttcgactcagttatctgcttcagtttccgatggctcttgcctttcgggtgcata

SEQ ID NO: 73359 - DNA, 340 bp, Glycine max
aacatatacttggattacatgtaaataacgaaggaatagaaaataattttcctgtagaagcagctgcattgaataatttgattcaaatactaactgttgatttttcatgacatttaccatagatgttcaatacctggggtcacactgtatgttttgatttagtaatatttcattttaatgactgcactaagtattggatgctggatggaatgaattctatatttggtactggtaatgctaaatgctcaagtctagttcatttgtgtgaccaacaacaatggctcccaggttccgcctcaaagtgtagctggttatgccacagttgctactacagaggatg

SEQ ID NO: 73360 - DNA, 162 bp, Glycine max
cttaaatccaacttatataagtttcacagatgtaatctataatcattaggtcaattatatttcaccatccctacttctctttctattaccatctattcctttgaatcacttcacctttttcacatacttctactactacattaatacttcaatcccaccaat

SEQ ID NO: 73361 - DNA, 274 bp, Glycine max
ctatcattcaaaaggccgcgacatttctacaccccttcttatatctctatgcctcgatacaaactataattattccactctactacaaatacctaataaccttcatgaatccaccacttacacccattcctacattccttccataataggtaatcttcataaactagatattccttctcttcatgatcaactatggcatctaccatagaaatatggtcctttatttccccttcaatttaaattaacgccagccatagtcgtttcctctccaaaa

SEQ ID NO: 73362 - DNA, 132 bp, Glycine max
tcctcatgcgataagactacagaatgctacgactgctagaatgctacttaagggtacggctgtgacacgactacagatgtgtacgggtgctataatactacagaagggtacggatcctacactaccacagac

SEQ ID NO: 73363 - DNA, 93 bp, Glycine max
gatgattatcaaatatcaattgaaagaaccaaccttccaacttccaagtgaaaatcaaaatcccctggtaagtcatggaaaccaacacacacc

SEQ ID NO: 73364 - DNA, 305 bp, Glycine max
  unsure (1)..(305): unsure at all n locations
cttattaaactatgatattaccatgaattggcattaatcaaaattatcttcgtgtgcaatcatatttatcaaagtacattaccaaaaattatgcatcaggatccattaccaaagttagaaagtttattagtgtagctaagagtagcagttctcattgcccagctggcagatgttaatacacgtggcaaacaattattagatagattcattttgataagtgatgttcagttagttataactaatgcagagttatgctattgtaacagntacagacttgtgataagataaccccctctctctttata

SEQ ID NO: 73365 - DNA, 319 bp, Glycine max
ggttgcagttgcagctctgttggtaggatagagaatctcttacttcattcaattcagtttcaatgtctatctctccctccctcactcctcttctctgaactcaaccatgtctttttctcctctccactcaccacttcattttccccagcgcccacttttcacttccattcgccccattccaaaccgaacattcatctccaacccccgccgaacgccacgaaccccactctcactcgctcctatcaccttcgccgccaagtccacaccctccccgaacgacgacgttttgttcaaacgcctcgttcgcgcgctgttctgc

SEQ ID NO: 73366 - DNA, 128 bp, Glycine max
ggagagtggaggcagccaagaagcagatcgagtagcaaaatgtgcattattgaattgaattcctctgttctattcgattccatgccagacagagacagaagaaaagaatttattattaaaacaacagc

SEQ ID NO: 73367 - DNA, 53 bp, Glycine max
gagacctcaggtcatgcggggctacccgctgagtttaagcatatcaataagcg

SEQ ID NO: 73368 - DNA, 410 bp, Glycine max
tatagtatttggaagactctacttcaagcaagttttaaaacaccagtttcaaagtttatattttatttttcttttattcttaaagtttttgttgaattttacccttttctagacaatgtaagaatttatatattgcttcccttctacttatagtgtgtaaataatgtgttaataactcttgtctcactagctttgttttgtgcttatttttttaataggacaaaggaatttgtccagtatagttatgtggcactgtcatttagtagttgaaggactttgtgcttatcccatattttgtctcttttttttcttgattatctcatatcagctcttattcctgaaactatgttttaatcattcctccaatgtaaaccacttgaacttagatttgacaatttcacaactttaat

SEQ ID NO: 73369 - DNA, 417 bp, Glycine max
gagggtgcaagagtttgttgtgagctataagctagtttatcgggaggagaatatgaagttgtttgttttctttgttgctgcagtagttttggtagcatggccatgccatggcgcaggctaccaaaggttccctctccgaatgaaaactggctatggtgagcgttcttcggaggtaaaatgcgcaagttttaggcttgctgtggaagcacacaacatccgagcctttaaaaccattcctgaagagtgcgttgaaccaacaaaggactacattaatggcgaacaatttagatcagactctaaaacagttaaccaacaagctttcttttatgctagtgaacgcgaagtccatcacaacgacatatttatattcggcatagataacaccgtactctctaatatcccatactatgaaaaaca

SEQ ID NO: 73370 - DNA, 361 bp, Glycine max
  unsure (1)..(361): unsure at all n locations
gagtcaacaattgttgactagttgtcgattgtggtctgagttcgcggtttcagtgaaagatccccgctctgttggacctctgattctgattccatgttagggttttaagggatccaattccagcttcctctttcccatggaattgaaaaagggcaagcttgccaggttctacacggatggtaaaaagcataagcaatcgttttggggagcaagagcaactgagcctncagcacttanacctagcaatntgctaccactggggaaaaatagaattgctggaacatttagaattggatgatccgaagtgttcccggaggaccatgagccgtggcgtaaaagaatacttgacccgggtagcgat

SEQ ID NO: 73371 - DNA, 305 bp, Glycine max
gacccaactcttattcaaagcccatctacacactccgctcctttcgttttgtgttttgagtttgagaaatgaatttattagtaccatgtctgtgcattgggtgtacgatggaaggggacatatgactattaccagagctcctaggaataccggatccaagcaatcttttactagacttgaaggaggtcataataatcagtttagggagtgggggtacagacgggcatgcagaaagaattgtttcgaaaggaagtcgcgagagaaatatagtcaaaggtaacaatgatattgctgagacgggagaa

SEQ ID NO: 73372 - DNA, 233 bp, Glycine max
gaaggtgcaagagtttgttgtgagctataagctaggttatcgtgaggagaatatgaagttgtttgttttctttgctgctgcagtagttttggtagcatggccatgccatggcgcaggctaccaaaggttccctctccgaatgaaaactggctatggtgagcgttcttcggaggtaaaatgcgcaagttttaggcttgctgtggaagcacacaacatccgagcctttaaaacca

SEQ ID NO: 73373 - DNA, 366 bp, Glycine max
ggcagttcaattccaatatattccattctctctgtgtatttggctacctctcccttcaagatgcagatcttcgtcaagaccctcaccggcaagaccatcacccttgaggtggaaagctctgacaccatcgacaacgtcaaggccaagatccaggacaaggaaggaatccccccggaccagcaacgtctcattttcgccggaaagcaacttgaggacggccgtacccttgctgactacaacattcagaaggagagtactcttcacctcgtcctccgtctccgtggtggcatgcagatcttcgttaagacactcaccggcaagaccataaccctagaggttgaaagctccgacaccatcgaatacgtc

SEQ ID NO: 73374 - DNA, 62 bp, Glycine max
ctttcgattgttgtcagacattcaacatgaaaatgatagtttgctgaactggttatgatttc

SEQ ID NO: 73375 - DNA, 387 bp, Glycine max
cctatgtcagatttaaaaagtcttattttgagttgttttttggctttagttccacaatgttttaacagtttgacaatgatttccaacaggaaagactgattgttctgtctgtcactctagcactggtgtattttgtagagcctgtctcaagattcgatatggtgaatgtgagaaaaaatagttcagccaacgataaggggcatctaaacaaggcaaacaaattaaaattgcattaagaaaaatccttggtttcacattaactttggttgtacagtaagggtattcatgacttagcttttgttaacttatattgagtccacccctggccaatctttacagcttgggtttatatatgcttgatatatagtagtataatatatgtaattg

SEQ ID NO: 73376 - DNA, 445 bp, Glycine max
ccccggactgacccactcgtaccgaccgttgcgagaagacaccaaacggatattacataatctttacaacataggatcatatctgataatgtgcgagcttctcatattcgaatagccttcttatgtctacattctatcacagaaatccgatacatgtatcctcatcatgattcgttcaaatcattccttcagattattatttgtataaacaatggttagtactctacgttcatgaacttatcaatacattctactgcatctcagttaatacctaatatcatctcaataccttactctctaagatctctatctctccttctataccttaaaaccatactttcaacactagtgatctgctatgtatagacacactgaaagaatacacgttcttgtcatgttcaagccaaagaactcactctcctaatgctagatgtcaattcatact

SEQ ID NO: 73377 - DNA, 431 bp, Glycine max
  unsure (1)..(431): unsure at all n locations
gaactacacagtaaactctagttatagggcgttgtgtagattgaagagggggagccattttgatgagatgagaagtttcatgattatggagggcaaaaataccaacaaaagtggcacaatttgcttggagattacttaaaaacaggctgactgctaaagataatttgaagaatacctatgccctttttgcagacaaatggagatgactagttcacatctctttctctcgtgctcaaagatccaaaagttgtgggtagagtactatgcatcatggctcgtctaaatgctgnttttcaaaatgatgcagtgactcaagaaagagagatgagagaaatgcatgcgtgtttaaggaagtcattgatacaacaagaattatgctcacatatatcttggacatggtttagaagcctggaggcagattttagcaacag

SEQ ID NO: 73378 - DNA, 302 bp, Glycine max
acgacagaagtggcacaagtgagtttgttgatcgagataactagaaacagtgtgatgaaaaggaaggtccttgttttcttcgttgctacaattttggtagcatggcaatgccatgcgtacgatatgttccctctccgaatgaacactggctatggtgcccgtactccggaagtgaaatgcgcaagttggaagcttgctgtggaagcacacaacatctttggctttgagaccattcctgaagagtgcgttgaagcaacaaaggaatacattcattgcgaacaatatagatcagacttccaaac

SEQ ID NO: 73379 - DNA, 51 bp, Glycine max
tcgcccacgcgttcgcccacgcgttcgtccacgcgttcgcccacgcgttcg

SEQ ID NO: 73380 - DNA, 412 bp, Glycine max
  unsure (1)..(412): unsure at all n locations
tccctttttagttttttttaaccttagacgctgcgtttcgctctctctgagttgaagaggatgaggctattgccttgcctcgctcgttgaattgatggtggacaccctaataatattattgcgtttctgccttgggtttgttcctcgccgtttgatttattgtggttattaaaatgcatgtgccagtctcgcccctaactctttttccctatttgtccttgctccattcttaagataatactgtatttcgtctttttctaaccataaagactgaaattcaataagcttatcatatttttttcaatttcttttatcagtttttttaagatatttttttaaattttacaaacttaattaactgcatacaattttactttaagatccttanataatacatatcatgangtcatga

SEQ ID NO: 73381 - DNA, 411 bp, Glycine max
accggtccggaattcccggtcgaccacgcgtccgcctttgttgtcttgggttgggtttgttttttctctcacctgaaaatgtcttgctgcggtggtaactgtggttgcggaagctcctgcaagtgcggcaaccgctgcggaggctgcaagatgtacccagacttgagctacactgagtcaaccaccaccgagaccttggtcatgggagtggcacctgttaaggctcaatttgagggtgctgaaatgggtgtgcccgctgagaacgatggctgcaaatgtggaccaaactgcttctgcaacccctgcacttgcaagtgaagtgttgggagagcaagcttcaagcagagatagcccttaattaggaataatgataaactattaatgtgtagctaaaaacttatgtattatgtc

SEQ ID NO: 73382 - DNA, 193 bp, Glycine max
cgacccacgcgttcccccaccccttcctaccttggagaagacaactaattggggggccagaaggttataaaaatggggaccgggttggacccaaaggggcttttttttcttgcttggcttcggggggccatttgagaagaaaaaaaagtattagggggggcggcccctgtggttcctgttgtgggaatggaat

SEQ ID NO: 73383 - DNA, 156 bp, Glycine max
ggtcgacccaccccttcctaccggttggaaaaaaccaccaaaagggggtcttttttttcaaaaaatttatttggggttattaggcccgggaaaaataaaagggttttccaaaaaacaaagccgggttggggtttttgtttccctttccaaatcggg

SEQ ID NO: 73384 - DNA, 186 bp, Glycine max
  unsure (1)..(186): unsure at all n locations
aagaataaggaccatctacaaanaacgagagcgagtttttctttcttttttcgcttccaaatcatacgatcttaatcgaatcaactacattctccataaccacttttaacgaccctctccttccacttttccccccatcacctccttctccaacaattccaacctccaattctaataatctcaaac

SEQ ID NO: 73385 - DNA, 137 bp, Glycine max
gtttctatgtgtgttcagttgaagaagggataaataaatctttttagcttccaataaatctcacactcttattcttaaaaccatgggcctggattccatggcccgttccatcggagtctcgggccccgggctacgct

SEQ ID NO: 73386 - DNA, 323 bp, Glycine max
gatggttttgcctatttgtgggggccgggggggctttggatttccttggggcctaattcaatttcatatgccgggggggggatttggtcaactggattttggtggttattagcatgatgaggaggatccgcctttgtgctatcattatttctctaaaacggatgtttttgttttagggttttgagttcacaatactagattgctgtgcaatttttcttgaagtttgagattacttttcttacatcttatctttaagttgaagcttaagtgcttggattgcctcgggttttgtagtctgagcatgttggtttaaggtatttttg

SEQ ID NO: 73387 - DNA, 352 bp, Glycine max
gacttgaacaagaggtataagagggtgaatgatattctgggcaagggaactgcttgcagggttgtggagaatcagaacttgttggattcaatggacttgtctccaaagatgaaagaagaggttaagaagttgctcaattccaggcacttgttcttcagggaaatgtgtgcttaccataatagttgtggaaatgggaataacaatgctccacagcaaggagagtctggtggtgaagtgtctcagcctcagtctcagtctcaagctcaacctcatcatcaacagcagcagcaaccgcagcaacaacgatgttttcattcatcagaggtggcaaattttgggggttcaagtgtgg

SEQ ID NO: 73388 - DNA, 348 bp, Glycine max
ggttctagtgtgtgattgtttgttgttgtaacgcgttcttcttcttttgttgttctgtgtttgtgtttgttttttctctcacctgaaaatgtcttgctgcggtggtaactgtggttgcggaagctcctgcaagtgcggcaactgctgcggaggctgcaagatgtacccagacttgagctacactgagtcaaccaccaccgagaccttggtcatgggagtggcacctgttaaggctcaatttgagggtgctgaaatgggtgtgcccgctgagaacgatggctgcaaatgtggaccaaactgctcctgcaacccctgcacttgcaagtgaggtgttgggagagcaagctt

SEQ ID NO: 73389 - DNA, 332 bp, Glycine max
ggcagttcaattccaatatattccattctctcggtgtaggtccctacctctcccttcaagatgcagatcttcgtcaagaccctcaccggcaagaccatcacccttgaggtggaaagctctgacaccatcgacaacgtcaaggccaagatccaggacaaggaaggaatccccccggaccagcaacgtctcattttcgccggaaagcaacttgaggacggccgtacccttgctgactacaacattcagaaggagagtactcttcacctcgtcctccgtctccgtggtggcatgcagatcttcgttaagacactcaccggcaagaccataaccct

SEQ ID NO: 73390 - DNA, 312 bp, Glycine max
gactggttttcatgggcaaaaaaattcgccatggtgttaaaccggagggtgccgattttcgtccttgaaaggaaaaaaccttttttttaaatgttcattttttgcttaaaattggtcaaccattgtgaccccaaaaaacttcttcttattcttaggaccaggatttggtcactgattccaggttttaggtggtttcctaatccaagataaagtttttttaattaatttttggctaggcaatccaaggtagtttcctaattaagattaataaatttagcttaatacttgccttgttttcagtacctttgttcc

SEQ ID NO: 73391 - DNA, 422 bp, Glycine max
ggtcctagtgtgtgattgtttgttgttgtaacgcgttcttcttcttttgttgttctgtgtttgtgtttgttttttctctcacctgaaaatgtcttgctgcggtggtaactgtggttgcggaagctcctgcaagtgcggcaacggctgcggaggctgcaagatgtacccagacttgagctacactgagtcaaccaccaccgagaccttggtcatgggagtggcacctgttaaggctcaatttgagggtgctgaaatgggtgtgcccgctgagaacgatggctgcaaatgtggaccaaactgctcctgcaacccctgcacttgcaagtgaggtgttgggagagcaagcttcaagcagagatagcccttaattaggaataatgataaactattaatgtgtagctaaaaacttatgtattatgtct

SEQ ID NO: 73392 - DNA, 55 bp, Glycine max
ggagacctcaagtcaagcggagctacccgctgagtttaagcatactaataagcgg

SEQ ID NO: 73393 - DNA, 247 bp, Glycine max
  unsure (1)..(247): unsure at all n locations
aggtaccgctgccaaaaaaccaccaaaagggtccggttccaaaaaaccaccgaaaggtaccggttccaaaaaaccaacaaaaggtaccggttccaaaaaaacaccaaaaggtaccggttgcaaaaaaacacaaaaaggtaccggttgcaaaaaaacacaaaaaggtactggttccaaaaaaacacaaaaagggacctcangtcaagccgggctacccgcctaatttaaacatattaataacggaagg

SEQ ID NO: 73394 - DNA, 215 bp, Glycine max
aattcgagcgggcgcttttttttttttttttttttttttttttttacccaatgcgggggattattaaaatcaatggtgaagtgccctttaaccaaaaaaagggggggggcccttacaaacccaaagtgttttattttaccaaaccaacttaaccttgaacttcgttaaaacccgtggccaaaataaccaccccttgtcccttaattaattccaaa

SEQ ID NO: 73395 - DNA, 109 bp, Glycine max
aggtgaagatcctgctacaaaaacatcaactccccaagggaagcgtgctgcctcttgaattgaatccaaaagtttcaattccaaacaagatgtttccaaaaaccaaaac

SEQ ID NO: 73396 - DNA, 414 bp, Glycine max
ggtgtgattgtttgttgttgtaactcgttcttgttcttgggttgttctgtgtttgtgtttgttttttctctcacctgaaaatgtcttgctgcggtggtaactgtggttgcggaagctcctgcaagtgcggcaacggctgcggaggctgcaagatgtacccagacttgagctacactgagtcaaccaccaccgagaccttggtcatgggagtggcacctgttaaggctcaatttgagggtgctgaaatgggtgtgcccgctgagaacgatggctgcaaatgtggaccaaactgctcctgcaacccctgcacttgcaagtgaggtgttgggagagcaagcttcaagcagagatagcccttaattaggaataatgataaactattaatgtgtagcttaaaacttatgtattatgtct

SEQ ID NO: 73397 - DNA, 321 bp, Glycine max
accatgatgacatttgcaggccatgttgtgtagtctaggtcttggaaaatacgagctgttagcaatttggagacttcttgccatactgcttgacacctttcttcctccatctttctttttctttgaactataggttttgcttctcagcatatggagagtttgtgacaatggaataaaatatcggtcaaactcccctaatcaataaatgtcttttgaaccacgcacttgttgatctcgacactgatcaccactggatcgtcctgaaccggatatatcgccttgaaatcagatgtggtaaaagtgattggtggcttttttggg

SEQ ID NO: 73398 - DNA, 90 bp, Glycine max
  unsure (1)..(90): unsure at all n locations
atgccgaagaaaagctattagccaaccatgttgaacgtgaaaactatgagacctcaggtcaggcggggctacccgctgagtttaagcnna

SEQ ID NO: 73399 - DNA, 105 bp, Glycine max
agggggtccatctcaaaagggcccctacaatacaaagtttaagggggtccttctttacagcttcattaattgggttttcccgtctcaagttttccttcctttctt

SEQ ID NO: 73400 - DNA, 274 bp, Glycine max
ggaaacaaccattgggtaatcctcacttggtgatactactaatcctgagaatgatacctccaacttcgcaataaccaccaaacttccctataaattaactttctctctttctttctttcttccctccctctcttctattctcttcttggctttacatcacaccctcttttccccttttgccaaagcttgatctttttcctcttccatccccgtttctccacttttcttgatcaaggtgccctcgtttcttcagttctgaatcatttttttgtct

SEQ ID NO: 73401 - DNA, 442 bp, Glycine max
  unsure (1)..(442): unsure at all n locations
attcccgggtcggacccacgcccgtccgcctcaccgcccgtctcgtacccggctgcngnnagaagaccgatncagaaggtnngatctattattaccaacnnatgagagtgtcctcgtggnnatgtcatcnnctgtaaattgggacgccgccccaagcctnntgtcaagaaggggttgcttcnngagcctattgcnctcaactcnntggtttnntggaagtnngatcaacaacccaacaaccccgaggagaatntgtcaggtgnnatgaagaaaggagnnnatgcaggnntgatgannagttgagaaaccattgtnnacatgtattttcggtctctttgaaatggaccacngnnggatgaaatgctcnncaagaatnnttgttacncattttcctgcnnaatagaaatttttcnttttttaaaattcaagaaagaaattttag

SEQ ID NO: 73402 - DNA, 209 bp, Glycine max
  unsure (1)..(209): unsure at all n locations
cccaaacacnacaacaggtgagagtaccgtcagaatgttacattcacaaatttggctagtcttaatcgttgtataagcaaaatccttaatcctgccatgcaacataatatctatcgacacataaacatccatcaaaaccatcatggtgacccatatcttatcaagattctctatatctcaagatatcactactctataactcctacctc

SEQ ID NO: 73403 - DNA, 218 bp, Glycine max
gactgagttggtcttagaggaaaaaattgaatacaatgatcttgtaaagtcagttcctgatgggaactcttcaaatgatgatgaacacgccaatatccagacagtccagtcagataaacaaaaggatgtggcacccaaaaatgggatcctgattgggctgatgtcaagcttgcacaagctaaatatcttctattccggatagcaaaatttaaaacact

SEQ ID NO: 73404 - DNA, 256 bp, Glycine max
  unsure (1)..(256): unsure at all n locations
ttccttganntgggaacctnncttcaaatnngatgatgnnaacacgcncnnaatatcctagacnnagtccanngtcagaataaaccaaaaggggatgtggcnnacccaaaaanntgggatcctnngattgggctganntgtcaagnncttgcacaanngctaaatatttcttcttatcnnccggattagcaanannatttaaaaccactttgatatttcagatagaaatatgagtgcattacncnnngaagtcatt

SEQ ID NO: 73405 - DNA, 316 bp, Glycine max
aattaccttcttgttttaatttgtttttcatatgtaagtaggaagctctaaatagctcaaactttgatcacgcatgagctagatttcataattattcattatttccaattagtgcttatacatggcaatacatatgaattggtttttttaagtttgatacagagaaaaatgttaaagttggaattgtatattatgtgccttcattgatagattctcatggaatcaaatttatggttggataatgcattgatcaagctgtttgttttaaattcttcgcttctattttccaggtctatgttgctgcaattcgcaacag

SEQ ID NO: 73406 - DNA, 361 bp, Glycine max
  unsure (1)..(361): unsure at all n locations
gtgtagcctttgttgggccaaggcgaanaatttctttaatttcttagggataataaaaaagatgaagaaggatgttcatgcacttaagtgatcatatatccttcttaatctcttgaatatccatgaaaaatgaaagaaaaagatgggagtagctagagacctcgtttggttactggtgagaaagggtggttgagaattgaattgggaattaaattctcgggagagagaaaacgggagtgctatgactgtgagggtgacgagagattgaatgtgagtgatgattgcatggaacccccaagcttgggcatttattattgtggaaaattaatgagtgggaaagagagagagcgtggtgaatgtc

SEQ ID NO: 73407 - DNA, 334 bp, Glycine max
tggatagtaggcggtgtccgaccattgcggcttcgacccctctttcactttgggtgacatcttttctcaaacgttgaagttgaattcttccacttattatacatattttccagtttgaaacaatagtttactcttacaatgtctttcgttgttttctttcttttagtgcaactggattggtccatgtttgacattttagttgtacgtgtgtatccgtgttggctaccctcgagctctaattaataattgtcttcttttattttaatttttaattggtattattttcaagagtcaaatacttcatgcaggtcctctctatattaacataggaaga

SEQ ID NO: 73408 - DNA, 438 bp, Glycine max
ggattcgaaatgcatgctaaccccttacgtggagagcttctaccctgtatccatgagctactaccccatctctctccctttgccatctacttgtaagccttcatcaaacataactctcttactagagaaacatatatatctgtatagcataggacttattggattcttgttaatccacaccacaagggtaattgacatgggatcaagcttctctagttggtatgagggagaatctgtgtctgcttctccaaagccaaccaaagcggaggctactaagggcggttcttgttacaacagggtctctatcacggacttgagttttcctggctcaacgctttcagaggatctctccgattgtgtagcggggtctaacctgcatgtgatgcactcgctgagctcaagatataacgcacggtttctgttggagtaactttctcg

SEQ ID NO: 73409 - DNA, 363 bp, Glycine max
attctttctcaaattgaccttaaccgtccatgacaagtgtcaacatgctaggtgagaacatatattatctagtgttcagaccagtatttacacatttatcttaattaatctcactcacactttattcacacttgcccattttgataataggtcatacactaataaccattgtctgtacttcattggtatatgtcatcttctacatctattcatatctcttaaatacatgctccatcatcatgcatttcattcataagcttttgaactactaatttcatatatcataccattaaattctattaataggctacattcacactatataatatacattgacttatcctataattatctttcatcctt

SEQ ID NO: 73410 - DNA, 81 bp, Glycine max
actacttgtcgcaagaaccatctaaagatgtattgtcagaggatgggggaatacgcaaaagatgaggaattgctgatacat

SEQ ID NO: 73411 - DNA, 99 bp, Glycine max
ggttctaagggattaattgttggtggtggaacctgctcctttttctttgggggtcctgggtttgtgttttgttttttctctcacctgaaaatgtcttgc

SEQ ID NO: 73412 - DNA, 414 bp, Glycine max
ggttggattttggtttgtatctgaagaggcattaacatgaaccgttgaattgaatttgtttgtgttgcagatttggctgtggacttgtgcaagcacccttggtgacaagctctggtcttcttactaaagtttggagtgttatctcttctcgtgatgaagacatagtttcatactcaggaaataatggactgtccttgaaagtttctgaggattcgggtttgacggttgttgcgtttgaggtcaacccggattttgatcttcaatctacagttgtttctttctctgatcccaaggagaataatttgaaccgctttgagtttctttgtaccaagaaacatccagatttctctgtcaacaagtctgtagttgatcttttttctaaaaatcttccgaggcttgatgagttgaagtcca

SEQ ID NO: 73413 - DNA, 337 bp, Glycine max
  unsure (1)..(337): unsure at all n locations
aattccctngtcgacccactctacctttacatcccatattcgatcaaaccttcaatttccttaaatatattctaacacttcagtctagttcaaattacaagcccgctcataagaatccatcttcataccagatcaacacctataaatctccatcttataacaatcctccaccctacaacaatcttcccaaacactcctccattaccatatttaacatatccaataataccattgacacttacaacatctacatattcacatttctcaatcacttacatacctacatcacaatctctatcaaatccatcttcattatcaacatcttcatcaactacat

SEQ ID NO: 73414 - DNA, 57 bp, Glycine max
gagacctcaggtcaggcggggctacccgcggagtttaagcatatcaataagcggagg

SEQ ID NO: 73415 - DNA, 328 bp, Glycine max
  unsure (1)..(328): unsure at all n locations
gtcttgtgcttttgtgtaaaagcaatacttgttgatgtcgtatccttgcttagttataacatttcttttaagcccatcagcttgctttcttaatgtttcagaagcattttcatcaccaatgattgtatctttaaaccaatcagagaaagtcttgttatgcattttcaagacccagttctttgacatttttggttgactttggttgactaaaccttcatgctgaagtatgtatggcaaagcttcattactggtgntcaacacatacaagtgagcttgtaacaaatcttttagacttggagtgataacatgcaatccttttgaaccctta

SEQ ID NO: 73416 - DNA, 335 bp, Glycine max
accggaggggcgctacatacttagtttatcattaattgggtcatcacagctcgggacatacacaacgtaatcatgctactgaacatactagaccttcctatcactcacatccatatccatggggacgcagtaagcataagcaatcaaggaaccaccaagtgcgaggcccaaactggagaagccgatgatcgcactatatggctagctcatgctcatgcatctctgcattctcatgtgcacatgctgtacaatctaatggctactttgcatctaacttcttagaatatgcgtactgatataacatatcatcggcttgacgatcatatacttcgatg

SEQ ID NO: 73417 - DNA, 93 bp, Glycine max
gcttctcctttgtggtgtcgagctgagaataccagatgctccagtagccggcgctaaacaacatggcggacaacgcggtcaccatcctaacca

SEQ ID NO: 73418 - DNA, 350 bp, Glycine max
gacatttggagggctatgtgactgcattaacccccggtactttgcggatcaatcctgacgagatacaaagccatgctagctgggataaacgacatcaatcattgttataggagataacaacatgttgtgataacggagtagccagccgctaggccttatatgctattattgatacatgttctgcacttgacaacattacacaagctgcttagaaatacagaaacgtattcaatcaggaacatgttgagcctaggataagcagggtagcattatatggatgtgctgcataattgtaacggtacttacgacttattgctgtcgcaccatatcttgcaagttaaggatctgat

SEQ ID NO: 73419 - DNA, 148 bp, Glycine max
tggtctgccctagtctttttatttccaaggggggtaattcaaccaatcgcgggttaaccgctggaggtaccttttcttttttaatgtaaccaaattccttgattttcaatttgtgacccgccttaattgatttaccggatatccactt

SEQ ID NO: 73420 - DNA, 405 bp, Glycine max
cgatcgcaatgttaataatatggattgatgcttggtatctcttcctctcatgtatgtcttttgcacttttatattttgcttcattggatatgaatgtacgctctcgctttgcttgttcacatgacctgcactccagagctgacagtagagtctgccagattgaaaatcgcacattctgcatgattggtgggggtgccataaccgttgagtaaaattgaacaaaaacacttgactgattgtttcgctgaatgaaagttaaatacaaacatgcatgcaacctcctgttatcatcttcagaagttttgcgaaaaatggacagtcattttggttatgataggcaccatgagcgagccttgagcaaacctagaggaagatgggaaatgctcgcccggtaggttggaaacc

SEQ ID NO: 73421 - DNA, 116 bp, Glycine max
actcgttagaacacctcagagaagactacagaatgttatcactatgtaattatacttgggctatcggcattaattaaatcacgtcgtaactactctacatatgacgaatgcatata

SEQ ID NO: 73422 - DNA, 189 bp, Glycine max
gactcactgactcggtgactgactcgctcgctcgtcgttgacactattcaaattaaaaacctcttcctttcactctctccatcctcttcatctttctccttctctttttcactttgacggtttctagagagagatagtttgttatctacagataatgctcccttctccttttcatgactcttgcttaca

SEQ ID NO: 73423 - DNA, 330 bp, Glycine max
gaagaggatacttgttggtgcggcgcacctaaaaagtatgcctcttcctctgcgtcgtcgtcttcaaactcgtcttcctcgtcataataatcctcctcatctccaaactcaaaccctccaaagcactcttcttccaactcctccacatgatcatcattatcttcttcttcttcttcttggtgattggagaaagtgaggacaaggcgaccatcttggcgctgaatgctgaaattgttgtgagaaggaacagaaacagcttcgagaaccaaccttccattgtcacggtgggaacgcatgtgagttactgaagaacttgcttggtgatgaaag

SEQ ID NO: 73424 - DNA, 396 bp, Glycine max
gcgagaatacgacaaaacgggaataatacaacagaaaataatatactacagaggtttgtggtataattaaaaaattagttgatattttcagagataggagacaaaatttacatggatggtaagtactgcttgggctgctttaatggtagttgtgccattttctatttccatcgtaacatgggtaagaaatgtactatacggatactcaaaattgacttaacggatcaaagtacccattctgatatctacttgggtcattcaatatcttaactctaactattgtattaaaatatttcatttatactaattaattgagtccaaatatacactattataatatacatctgcattttaggttgctattatattctagtagtgtaataataacctatgtat

SEQ ID NO: 73425 - DNA, 226 bp, Glycine max
ccaaatccatcatcatcttaaccactaatcaaatcacttaaaccacatccacacatatccaccaccctcattctccttcctcacccaaatacacataacctcacttctatttaactattaccacatctcctttccactactcacttaccacctcaaaaactcacttatctatttccctcaacaacatattcaccatctaattcttaatccaatcataaaactaacc

SEQ ID NO: 73426 - DNA, 461 bp, Glycine max
gcgagaagactacagagggggttctagtgtgtgattgtttgttgttgtaactcgttcttcttcttttgttgttctgtgtttgtgtttgttttttctctcacctgaaaatgtcttgctgcggtggtaactgtggttgcggaagctcctgcaagtgcggcaacggctgcggaggctgcaagatgtacccagacttgagctacactgagtcaaccaccaccgagaccttggtcatgggagtggcacctgttaaggctcaatttgagggtgctgaaatgggtgtgcccgctgagaacgatggctgcaaatgtggaccaaactgctcctgcaacccctgcacttgcaagtgaagtgttgggagagcaagcttcaagcagagatagcccttaattaggaataatgataaactattaatgtgtagctaaaaacttatgtattatgtctgtgatggttttcgtgcactc

SEQ ID NO: 73427 - DNA, 250 bp, Glycine max
tataacaccacctcattagatccaatttttgattgtttgttgatttaactcattcctgtacttttgttgatctttaaaagtgggggatttttctctcaccttaaaatatcttacttctttggtaacttccgttaccgaaactccttcaaatgctgcaacacctgcttatgctgcaagatgtacccagactttatctacactgagtcaaccaccacctatacctttttcattttatattcacctgttaaaa

SEQ ID NO: 73428 - DNA, 231 bp, Glycine max
gctctaaaattcagttgcgtgatggttctatagggaacctagatgataatgcggggaaccttgtattgcaagctctccatgaaatgtcaactagcgcattgcgctgattgggatcttcatacatggatttactcctcaaattatgaaatctacaatggtaattaagttcaatcttctcaactgcatttgcttaatctcttcaactgtctattaatcgaatgatcacttaaa

SEQ ID NO: 73429 - DNA, 421 bp, Glycine max
ggttctagtgtgtgattgtttgttgttgtaactggttcttcttcttttgttgttctgtgtttgtgtttgttttttctctcacctgaaaatgtcttgctgcggtggtaactgtggttgcggaagctcctgcaagtgctgcaacggctgctgaggctgcaagatgtacccagacttgagctacactgagtcaaccaccaccgagaccttggtcatgggagtggcacctgttaaggctcaatttgagggtgctgaaatgggtgttcccgctgataactattgctgcaaatgtggaccaaactgctcctgcaacccctgcacttgcaagtgaggtgttgggagagcaagcttcaatcatagatagcccttaattaggaataatgataaactattaatgtgtagctaaaaacttatgtattatgtc

SEQ ID NO: 73430 - DNA, 180 bp, Glycine max
acgcgtacgtactgctcccataagacctctcatgcataatctgattacatgggaagaggggcgatcataatccctttgcgcggatccatagacgggcacttctcgttcctgatctcgctgttactacagctccaatagctgatatttaagttttctccttttcctagctcgtatttatac

SEQ ID NO: 73431 - DNA, 238 bp, Glycine max
aactcgagcgaccacacttcataagggaacttttaaatcttacatgcgtcaccccatcttgggtaaatggggtacgttttgcggcacaatgtagattcgtacctattatcgtttatatctcatatctaatatcccaatccgtaaattattcatcgaccgctatcaacataattcgaactgaattagtgacgtctattcctttatagtcctcactatattaatctttaaagtctcccta

SEQ ID NO: 73432 - DNA, 424 bp, Glycine max
aagacgacagaagggggcagttcaattccaatatattccattctctctgtgtatttccctagctctccctgcaagatgcagatcttcggcaagaccctcaccggcaagaccatcacccttgaggtggaaagctctgacaccatcgacaacgtcaaggccaagatccaggacaaggaaggaatccccccggaccagcaacgtctcattttcgccggaaagcaacttgaggacggccgtacccttgctgactacaacattcagaaggagagtactcttcacctcgtcctccgtctacgtggtggcatgcaaatcttcgttaagacactcaccggcaagaccataaccctagaggttgaaagctccgacaccatcgataacgtcaaggccaagatccaggacaaggagggtattcccccggaccagc

SEQ ID NO: 73433 - DNA, 161 bp, Glycine max
gactgctcatggtgctccgaaatatgggtgcctggctcaattgaattgaagcatgacttacaatagtccatccccgcgtttcgggaacctatgctgggccaacatcgtgagaaaagcggctacggccattgctctcgctccgaacgccactctatgcgcca

SEQ ID NO: 73434 - DNA, 353 bp, Glycine max
gggtagttgactagttgcaagttagtgagttcacgtattaatctcttttggcgtgctgcttgttggacataggataaacttttagtgccacaataacaccctatctctctctctttctctgactgcctctccctttgattcaatttccccctgcttattctggaacaatgtctgataaaaccacagctgataaccttattgaaaatcttgtggacacatttgttgataagaaaaaatctgtatcattctttgaagatgataagtcagactcagtgagttctcagatcaatagactgtttggacgccagaaacccgtgcaccatggtttaaggggttgaaaaatttgcgatgtc

SEQ ID NO: 73435 - DNA, 367 bp, Glycine max
tggcggttcctgcaattggtcaaatcccgaaattatcatgtaccttgctgcgaattgcgcacaccattctttgctttccttcgaaactctacgaaatcccactaccgcgctctctatctctcataaaggcgccaacgtttatttcgcgtaactgctctgcacctaaaacttatatctccattctacaacttcatttattggaactggaactctaccctttcaaagctgttaaattttcgattcgcgatggacaaatacgagctcgtcaaggatataagatctgggaatttatgggaggccaggctcatgcgttacaaagacacacaagagcttggtgtcatgaaatacattgaacggtgtcacaaga

SEQ ID NO: 73436 - DNA, 422 bp, Glycine max
ctattttgttgtgcaaaactacgacgtctgtagtttagtacttttgatacttcatccattttttcttttttttacaagtttcacttctttggttttcgccagttgccggtcagatagcaagatcgctcggatgaaattagcgaccttatctttacttagcttttcattttcaataaaagataagtaaagaggggcaactattagaccctaatttcatccatgaactatcattcattgatgttttgattctcgctaatcgaaaggtgttgttcgacaccaatttctacacaaggcgtgagatcgttcgacattttggtcaaggatgcaaaaaatacccaagagaaggggcaaaaaggtcatttcaggcaattttctggaccctggcttgcccaggctagcctttggcttgcctgggccccaaa

SEQ ID NO: 73437 - DNA, 388 bp, Glycine max
cagggaattctttttcttcacagcatttatttattatttttttttctgttcttctctttttattttattccgatctatcttttttttttcctgtactttgtttgttttacattctcttttttttctatttttttcttggcccttttttcccttgatcatctccttctgaaaaccgaagccaacttcaaacaccaccacaacaatgtcaatattgacatttttagttttatggcttttatctttcttgttagggttgttatgatatacatatgtgatttttttattacatcttttgttttggataagatatgcatgttattggaagtaaatattgatttatccatgttattacaggttcattagcatcatcaattacaaaattgcattt

SEQ ID NO: 73438 - DNA, 428 bp, Glycine max
cttcccgggaaaattgtctataacgtccctctcaagctgggttaacaaataaaaatggcaaagacagtgaggttgcattttagtatatatatgatctaaggtcaagcggaattcaaatatgatgggaaatgacaaaaatatttctaatgagaaaaataaaagaaatgctgatcttctttcgtttatatatttttacacatacaatactactattttgtttatcacttgttttgatcaagatattcctcaatgttacagctgctttatcacttgtgcaaatcaatcatcttttttgcactcccactaatcaatgcatataattataaaacattaagaaagtatataaaaaattatgttcaaagggggacatatataaattaaatatgatgtaggttttataaaatataaaagttttaagaataatctta

SEQ ID NO: 73439 - DNA, 160 bp, Glycine max
  unsure (1)..(160): unsure at all n locations
gatctcacttattattattattattaccacctcggaacttttgcttgattaggtccgaaattcaaganaataaaattattttcaacaaaaatggctttttatctgttgtcaatgttagatttgggtgctcttcgttagcgaaacaaaaagttcgttcagt

SEQ ID NO: 73440 - DNA, 53 bp, Glycine max
gagacctcaggtcaggcggggctacccgctgagggtaagcatatcaataagcg

SEQ ID NO: 73441 - DNA, 337 bp, Glycine max
ggagggatgatctgtaattttggggttgggcgagtgtgttgatcggattggaggcaggcaaagtgcaaatcaagcgattatcaatctttggggcggtgctgttgaattctgcaatggcatcagcagcgcctaatgtcgatctcttcgatgcctattttcgccgtgcagatttggatcgagacggccgtatcagcggtgccgaagccgtttccttctttcagggctccggattgcccaaacatgttcttgcgcagatttgggcatttgcaaaccaaagccagagtgggttccttgggcgggcagagttttacaatgcccttaatcttgttactgttgc

SEQ ID NO: 73442 - DNA, 423 bp, Glycine max
  unsure (1)..(423): unsure at all n locations
actgggccaatacgcacaccaagacaaagaaaaagaaggataaaaatggaggaagaaagaaattttcagtaacaataccaaaatccttaaattttggagggtaccatataaatgaactttctctagatcttaattatcataattaataaggttcgtctgagattttaaatctaattgaataacaaatagtcgccaataatatatacaccacaaaatataatgtgaaccttctcctcatccaacttaataacgttgccactcaaaaaattattagctagttaaagtataactacagaattatcatttatcttgtaatgatctaacaagaaccttatcttcattaatcttcacatcttgtaccttgtattgggtgcttgtcttcactaatcttcattgtctggactacgtanatgcatgaagtgc

SEQ ID NO: 73443 - DNA, 429 bp, Glycine max
gacaacaacacattaacacaacacagacacagaagcaaggagagagaaagagaaagagaaagagaaagagagacggctctaacttccaacgagtattcatattctacttttcagaccactacgcttacttcttccctttccctcttctacgttacccactctcattctaatcacattttctcccaaattcacctccctctacaacaaaaaaagcttttcattggatcacgtcacccatctttccttttgctctctcctgcctctgaattgagcatttacgggttccattgggctctgatcgaattgggtatgtgcaagatctgcggcttcgtttgttggtggcaaaaagatatgatcttggtggtgggaccaacccaattatcggattggatacgatcggggtagaaacaacgccatcagatggcgctg

SEQ ID NO: 73444 - DNA, 338 bp, Glycine max
  unsure (1)..(338): unsure at all n locations
tttataaagttaaatttctcaccatnacccgcgtaacatgctcctcactcatgattccaaaaccaaaagtgataatgatccaccatcaccacaccataatgatgtcgatgaagatgacaatcatcatcaacaatctaaagcacatcaatacccaacgtttgttgtctcacatacattataaatcccagatgacgtaaaccttgctcatcttaattacatctttcattgcgaaagccactctttttagatatacacttcacaacattgtcttctcaactattaaaaagaattttataaatattttataaatccctttatcaatagaatcacctatctta

SEQ ID NO: 73445 - DNA, 257 bp, Glycine max
ctaacaaacccatgatgataaatctacatctgctccaagactaactgctttttgcaattcatccacacccataaattctgaatatgcctaaaacacttccttgcttgaaactacttccctgatctgctgtgcaatgtgctctatctgccagagttcccattatcattggggataatactaaagcgttcaaattactagacgaaatgtttattcattagattcacaacgatgcggtgattaggttttataaacaaagg

SEQ ID NO: 73446 - DNA, 99 bp, Glycine max
gaatttacatcacatttcgttgtgcctttgatctctgatcccgttgcgtctctcgtaatcatgcctaagcaaatccacgagattaatgatttccttttt

SEQ ID NO: 73447 - DNA, 360 bp, Glycine max
attgttatggagattgagtttaagtgcaaagttgaatgtggtaaattgcgagatacacgtaaacatgagatgattgattgtgacataatgagatgtgaaattgtgaacatgagttttagttgtaaataagtttgtgattaacacttgatgtgactaattgtattgtgagctgtgaattatacaataactcgaccagtatttatattgagaaaagtgtttatgcgcagtgttaaagagaaagtgtagcttcttagttaggaaataatgttaaatggtaacgcaatatgttaaacgtgtttgaaacacgagtgtgaggtcatggatattatattatttatgagcagtgtctgcttgcaaata

SEQ ID NO: 73448 - DNA, 383 bp, Glycine max
  unsure (1)..(383): unsure at all n locations
ggaattcataaccatatcagttaaattcagattacaatgttttagttgctgggtgggttagtgtttattcagctttttgaattattacatacatacacccaaaattaagtaaattaaaattactgttggttgcccaatttgaaataataataatggttttgggtaataaggcttttaactcccccggggacccttgtttttccatcaaaaggagaatcccaaacaaccttagttcctccaaggagaagtttgactagatcaacatttacctctaagacctcaaggcttgcagtctcacaatcagagaacaacaatcccgcctctagaccagcaagaagcagttcagtaactcgctcttgcatctnaacttcacactcacagta

SEQ ID NO: 73449 - DNA, 216 bp, Glycine max
acacacgcgtacgtccactcattttaatacaaccgaactctaatgcataccacttgcttcctttaataaattgggctatcgcactaccccccaataactatttattattttaccaccattcaaaccttttcgatcactccatcattctaactcttaatgcctaccaatcctgctttccattaccatatcatcctttccatttttacattctactca

SEQ ID NO: 73450 - DNA, 232 bp, Glycine max
ccacacgtgcgacggggcgagaatgacgacagaagggcaagttttaaaagtatggagatggcggacacattggtatttacctcacaatccgtgaacgagggacaccctgacaagctctgcgaccaaatctacgatgctgtcctcgacgcttgcctcgagcaggacccatacagcaaaattggctgccaaacatgcaccaaaaccaacttggtcatggtctttggagaaatta

SEQ ID NO: 73451 - DNA, 427 bp, Glycine max
ggttctagtgtgtgattgtttgttgttgtaactcgttcttcttcttttgttgttctgtgtttgtgtttgttttttctctcacctgaaaatgtcttgctgcggtggtaactgtggttgcggaagctcctgcaagtgcggcaacggctgcggaggctgcaagatgtacccagacttgagctacactgagtcaaccaccaccgagaccttggtcatgggagtggcacctgttaaggctcaatttgagggtgctgaaatgggtgtgcccgctgagaacgatggctgcaaatgtggaccaaactgctcctgcaacccctgcacttgcaagtgaagtgtttggagagcaagcttcaagcagagatagcccttaattaagaataatgattaactattaatgtgtagctaaaaacttatgtattatgtctgtgat

SEQ ID NO: 73452 - DNA, 422 bp, Glycine max
ggttctagtgtatgtgattggggtgactcgttcttcttcgtcgttatcttcttcttttgttgtttgtgtgtttgttttttctctcacctgaaaatgtcttgctgcggtggtaactgtggttgcggaagcgcctgcaagtgcggcaacggctgcggaggctgcaagatgtacccagacttgagctacaccgagtcaaccaccaccgagaccttggtcatgggagtggcaccagttaaggctcaattcgagagtgctgaaatgggtgttcccgctgagaacgatggctgcaaatgtggagctaactgcacctgcaacccctgcacttgcaagtgaggtgttggagagctaaagcttcaagcagaaatggcccttagaaataatgataaaaactatatgtagtttcaaaacttcaaaattatgta

SEQ ID NO: 73453 - DNA, 423 bp, Glycine max
  unsure (1)..(423): unsure at all n locations
gtgctggatctttattggtggcaatttcattttcttctgtttttggtggttggttaccatgcaaactgtttagttccaattcaggtacttttgaaactttgagttacagcatgtatgcagcaatcttcaatgtgggctgggccgctactcangtttcacacatgtaataatttcctctgattcatcttttccatttgatgctgaaaattaaaaccataagtttgaatgtcaaattataagtggttggctggtttggttacttataaaatgatattccaacttgtgctcttggtaacttaaactttaaatttgaagtatctaaacatcattgaccttttgatagttatgtgatatctatattgggataagccataattttgttgagaaaagccattcaaatgaaatgatgatgactggtatgtg

SEQ ID NO: 73454 - DNA, 406 bp, Glycine max
  unsure (1)..(406): unsure at all n locations
ttcttgcatttatgtgatctttaacactgtttttcaggggcaagtgactattgctgcaaaacctggcttgaaattggaaattcctgatggggtgacgattgagaataaggtataatactaacttcagtacgggctttggagtctctttattacaaaacttcaccttttcattggttttattttctctgttctgttggtgctgtttgtggggttgtgatttgtaggttggatgcgtgttgggagaatttgttttgtttggactgtttttttatcagcgtttggacttggtataatgggtaccttttgtttcttgtttgctgatcaaagcatggggatttgtaattgttnttgtcatcattgactgggagaccctttcagttggatagcctgactgtgcaagcttaag

SEQ ID NO: 73455 - DNA, 395 bp, Glycine max
tagtctctaactttaatttgcatttgaccttattacaacaacgcattttgttttaacacaacttatttgttgtgtgctgatgtgctttacatcccggttgactcccccaaatttggggcaaattgccttgaaccatctgctctcctagaatctaagcaaggtatctggagatattcattcaagttcaaggttcaattttgaaaatgtaatttagctcacaaagggtgcaaaggatacaattataattcaaggcaagctttttggtcaattggcttgtatatacaatcatggccttcatcatgtccatattcatacatttcattctaaaattcagaaattgatacaaagactattactcaatgctagtcattcactcacagtttaagatcacactc

SEQ ID NO: 73456 - DNA, 95 bp, Glycine max
ggttctagtgtgtgattgtttgttgttgtaactcgttcttcttcttttgctgttctgagtttgcgtttgttttttctctcacctgaaaatgtctt

SEQ ID NO: 73457 - DNA, 222 bp, Glycine max
cgacatgactactgaagagggatacatctacaatggaaagaatcagatatacagggtgggggatggttaaatgccaggcgaaatgataaatccatatttatctcttcgttcaaacggcagattctatcctccctacattcccatctcattgtttctctcgaggatccattgaaacgacaagtctatgttggaccatcctgtgtatccgattgccgttttgat

SEQ ID NO: 73458 - DNA, 181 bp, Glycine max
aggtataataccacataaggagacaaactattaatgtgtatctaaaaacttatgtattatttccagaatagtgtgtctcacactgtgctgttttgttttaaacaaacatacttagaataaagtggtcatgtcttgcctttgagcaaactcaactgatatcaacttctgacgcctgtaataa

SEQ ID NO: 73459 - DNA, 149 bp, Glycine max
tggaaccacccttctcctattaactctgcaacgagcaatgtgagcaactgcgtgaacaacaacaacagcaatggcatccaaattccaacaccaccactcactcccaaaaccaattccagatctgattccaacccttaccctaccacttt

SEQ ID NO: 73460 - DNA, 324 bp, Glycine max
ggttctagtgtgtgattgtttgttgttgtaactggttcttcttcttttgttgttctgtgtttgtgtttgttttttctctcacctgaaaatgtcttgctgcggtggtaactgtggttgcggaagctcctgcaagtgcggcaacggctgcggaggctgcaagatgtacccagacttgagctacactgagtcaaccaccaccgagaccttggtcatgggagtggcacctgttaaggctcaatttgagggtgctgaaatgggtgtgcccgctgagaacgatggctgcaaatgtggaccaaactgctcctgcaacccctgcacttgctt

SEQ ID NO: 73461 - DNA, 222 bp, Glycine max
tggccaattcaatataaatggctcctgaattaacacctgctagtagtggtttacttttaacggaggttcataaaactttacatagaaaatgatccctccacacaaattcacataagcgactgctttttaaaggaaaaaaaataaaaattggttttttatcaaagagtcctaactttaggaccttatattacccacccttgctttcttctttttttttttaaa

SEQ ID NO: 73462 - DNA, 408 bp, Glycine max
atgggagtatttacaggttgagtctaagtttctgcaaatatcatcaccttttgtgcaatcatgatattattctgatatcattgtttttttcatgggtattagtttgccacttgtggtcagttaatatttaatagatttttgaacatatcactgtaaaaattaatacttgacaacttttcacgagtatgatagccatcagattaccaatacaagctttatcatgttagctcacatcttgttcctctctgcatctgttcaattagattagttgtttccaaatgcatgttttgtcttaagtatacgtggttctgatttattttgttttcatagtttataatgtggtttagtagtgcgccttttacaaaccttgctcatgagggttgcgatgagaaagaaatcatttatgtg

SEQ ID NO: 73463 - DNA, 190 bp, Glycine max
atttagagggtgagaaagattcatatagaattatgaatatacttgattgtatgctaattaaaaggattaattctataaacatattgatgcaactttagacccaaaatccccctaaatatgatactctattatgtatctggaaaatgatcattaaacattccaaattgaaaatagatcctctatgataaat

SEQ ID NO: 73464 - DNA, 130 bp, Glycine max
ggttctagtgtgtaatggtttttggtggaacctcgtccttcttctttggttgtcctgggtttgggttggtttttctcttaacctgaaaattcttggttccggtgtaacctttggttgcggaagctcctgc

SEQ ID NO: 73465 - DNA, 481 bp, Glycine max
gaaggtgacattctcatgtgattgcctatcacatttccattgcccaagaacattagtgtggaactagtttaaagcttcttgcagattcttctgaattttcatttgtaaaaagcttcaagtttttcctcctagatttttatatcagtgctgtacatgttgtcttcggttttgtggagaggagcgtgattcgaactcgtgttgattatttagttaattgtacagaaaaacattccagttatggttaaaccctttcttccctgtgtaatgctaatttcgtgaaacgattttgaaggtgcttcagtcactcaatggaacaagattgcctcaactcaactaaccaaggcacggatcataacatgcatcccattgttgaaatgtacatatatggagctctgaaatgggttaaaagtgacgtgttagacacaacaacaacgaatagagtgtgatcgcgtcatttgaaatgttacaaaatatttaacga

SEQ ID NO: 73466 - DNA, 365 bp, Glycine max
  unsure (1)..(365): unsure at all n locations
aagacgacagaagggatattgaacgaattaattgacttttctttttgaaagtttcgttacctgttangcgtttgatttctgctagtttttgaaatatgcttactatagttacattccaagactttgcatgtgtgtatggtgctactgttacttaactttcttaagcatgcttctttttttttttcatctacttggcttccttttatgttggcagatctaattccaaagctggaaggttgtgccatgtgccatgtgcacttaatacctctggaaggttgtgccatgtgcacttaagcattccaagactttgcagttttgatctgatcctagcatgttatacatggatagggacgattctgcaatac

SEQ ID NO: 73467 - DNA, 398 bp, Glycine max
tgggcaattaagggttttggggaagcatatacgttaagagagccaaattttgagtctgagaatcttctcttcccgttccttcatctttaaagaatgacttgtatataattgttaatcatttgttcatcaatttaaagtggcatatagtgaatccaggagggccattatttgcgagcatagaaattggattatatctgatgtgcctttttcatgttgcagtctgatgttaacactgtctgctttgctgatgaatctggccatctaatatattcccggagtgatgatagttttatcaaggttacattcataacttggttatgttgaatttgctaatatccacttatatctatgttggcagcaatatctgtatttaatggatgtctttattccaatattgg

SEQ ID NO: 73468 - DNA, 202 bp, Glycine max
  unsure (1)..(202): unsure at all n locations
cgcgtgcgtgcggaagaccacataagggatatcgaacgaattaattgacttttctttttgaaagtttcnttaccttggaggcgctatatttctggtaatttcttaaatatgcttactatagctacataccaagactatgcatgtctgtntggtgctactgttacttaaactttttaagcgtgcttttttttttttctaatct

SEQ ID NO: 73469 - DNA, 366 bp, Glycine max
taccggatcgacgcacgcgtgcgtccactcgtctgtacggatacgacaaactacacaatgtttgtgcctgcgacaccttattcaggtttcgcggccatcatctgtggatgggaatattctctccccccaccttcatctctgaagaatgacatttatattattgttcatcatatggtcaccaatatacagcgtcctattccgaatacagcagggccctcacttacgaccctataaattcgcttatatgttgtgtcgcctttatacagttccgggctcatttatacactttattgttttgtgtacaatctagacaccttaactattacccattggatgacaagtctattaacagcacactcataaatt

SEQ ID NO: 73470 - DNA, 195 bp, Glycine max
gggtgtttaaaattaaaaccgagcctctgggccaaatgagagacagagcgagagataatcgtaacaaaagctgtatctggaagtagatcgacatacgattttagccatttgatcaacaacaccctaataccgatcataatatgctattgctcgtatggcaaacctcagcactattcttttcacggccgatgccgc

SEQ ID NO: 73471 - DNA, 429 bp, Glycine max
  unsure (1)..(429): unsure at all n locations
ggtagagaagagttaatggctggagcgtgaacagatcagaggcatacaggtggcaagtaagggaaattaatgcgagttacaggtgcatacatgtataccatgcttgtgatggcacagctatgaatgctggtgtcagtttcaatatggctttcttcgtgtttacattttccataaggaaatttgtcaaaggataattctcaaatttaatttccatgagtaatatcttcatactgtattaaatggagaaagtattgacttttttatatttttaatattgtttttattagaaaaaatcacaaacaaataataggaaatttataagttaaaaatatatcttatttaatcaattgagtttagactcttttatttttttaatatattaatatattttaatttttatntaatatttatatttaattacaactcatt

SEQ ID NO: 73472 - DNA, 143 bp, Glycine max
  unsure (1)..(143): unsure at all n locations
tgtgtggtcctctaccaccaaagtggtatctgcgctggcttagcctgatcacgagttagtgggaaacancttctctagtggagcacaagcttttaatgcaagcagaaattgagctatattaatgtgaagatgtttagttattt

SEQ ID NO: 73473 - DNA, 233 bp, Glycine max
cactgtctcaattaattctgctatttgccgtctagagttctgttcgctgaaggcgctctttctcgaacattcttcttaattcttgcaatacctcatgcgtggtgacgaacccctcggagctttgctcaagaaatgcaacttgtgcatcaatttctctggttgaaaccattaattattctctgaatcgagttctatgatagctctctttggaatgtgatcacattgatgaatcc

SEQ ID NO: 73474 - DNA, 422 bp, Glycine max
tcgagcatcatcggaggttggtaaatctatgggtggttgtgttatactattgtagtcatgggcttggtaccgcatgccttttattgcaccaagagtcccacgacccgaaacaacgtttccactggctaaaaggttatttacatatagcgaaatgtaaatttttttatttcaatgacttgtattataacattacaatgaatactgattttgtatgttttacatttcagattgagtggtggtagattagaatatagggccacacctcatggtgacttagtcggatataggtctcatatagatcatatggagagccataaggtataatactatcatgatctgcaccttaaatatgtacatacatactaacatgttgccttgttggcatatatttcagttttcttgggtcccatatagaggatttg

SEQ ID NO: 73475 - DNA, 250 bp, Glycine max
gacaacaaaaagataacattaataacaattaacaaaccctggtctctattttcacttcttttcttttcttctttttaaggatccaccccttctctctttatgctctttcttggggaatgtatgtgtgtggaacaataaccaatcttttcttgctaaagcaacttcctttcatctcttcttgttagctttcaacacaatccatgaccccacaacattagtctctctctttctctttctctctctatatctc

SEQ ID NO: 73476 - DNA, 279 bp, Glycine max
tattgggatggtgcaagagtttgttgcgagccattagctagtttatcgtgaggtgtatatcatatcggttgaactctttgttgcttcaatagtttttttatcaaggtcattccattgagcatgctaccaaattttctttgttcaaacgaaaactgtctttcgtgagcgttcttgttaaaaaaattcacaagtcctaaacttgctgaagaatcacacatcatatcttcctttaaaaccatttctgaaaaatgcgatgaaccaacctaatacttcattaac

SEQ ID NO: 73477 - DNA, 417 bp, Glycine max
agaagacgacagaagggggaagagtgaagagaatggctcccaagggtttaacctttgtggctgtgttaatatgcgtttcagcactgtcactgagtccttctgttgcgggggaagggcaaaataatggccttgttatgaacttctacaaggaatcatgccctcaggctgaagacatcatcacagaacaagtcaagcttctctacaagcgccacaagaacactgctttctcctggctcaggaacatcttccatgactgtgctgttcagagttgtgatgcttcactgttgctggactccacaagaaggagcttgtctgagaaggaaacagatagaagctttgggttgagaaatttcaggtacattgagaccatcaaagaagcttggaaagaagatgccctggaagttgttcatgtgctga

SEQ ID NO: 73478 - DNA, 426 bp, Glycine max
agaagacgacagaagggggaagagtgaagagaatggctcccaagggtttaacctttggggctgtgttgagtatgcgtttcagcactgtcactgagtccttctgttgcgggggaagggcaaaataatggccttgttatgaacttctacaaggaatcatgccctcaggctgaagacatcatcacagaacaagtcaagcttctctacaagcgccacaagaacactgctttctcctggctcaggaacatcttccatgactgtgctgttcagagttgtgatgcttcactgttgctggactccacaagaaggagcttgtctgagaaggaaacagatagaagctttgggttgagaaatttcaagtacattgagaccatcaaagaagctttggaaagagaatgccctggagttgtttcatgtgctgatatcctc

SEQ ID NO: 73479 - DNA, 394 bp, Glycine max
tatatatatttttaaattatgtttaattcggaaaatatgaatgacagataaaattgtgactaatactttaaaataataatatttcatgttacaattttattatttttattatggtaaattttatgataaatattattttgtgctttaatgttatatgtttataatacatataaataatttttaatataaactattatattaaatatttaacataatagtttataatacaatattagaataataatatttaaattttattataaatttaataataaaatattaatattgtatatgttatctcttaaataattagaattccaataaatattaatttggtaaccgtcatgttgatatgcataattagaatatttaaataattatattagactggttc

SEQ ID NO: 73480 - DNA, 340 bp, Glycine max
aacaacacaaaagggtgcaatttcaaaaaatatttcttaccctaaactcactgcggcatttgatatttggggaaatcgtatcttacaccttttggtaaccactttgactgacacaatagatattaacaaaaatactcatattataatcataagagaatgccatcaaccatgaaacttcgactttcatttatctgattctaggacaactgatctactttatatattatacttacttcattaccaactttttaccaaatctacaaaaaaaaatctactgaatggaaacaaatactaccttatattgtttcactacttcatgctaatctcatcatttattaca

SEQ ID NO: 73481 - DNA, 247 bp, Glycine max
gatgctcctattaatacctgtctcatatatattaggccatcttttctatcctgggagacacacttaattattataatctccaactattctctttaaaatccttttctaatataaatattatataccgattgaaatgtaaccacacgcttaaattaagcatattatgaaagcattcttatgcacagctacttattcttccactcttctatcctcttccaatttcttcataatgaaacacgtttataaa

SEQ ID NO: 73482 - DNA, 241 bp, Glycine max
ccgtctcgactcacgcgttcgacccacacatcactacagaagacaacacacgtcgacccatccagaatatattcactgaatagggactctcttaggttcaaccactatgacgcattaccataaacttgcatactgcacatatgatcaaactattaacgtcaaacacttattttcaataacatcgatctaattatattacagataatgagatcactatacactactgcacataatatattct

SEQ ID NO: 73483 - DNA, 447 bp, Glycine max
  unsure (1)..(447): unsure at all n locations
ggttctagtgtgtgattgtttgttgttgtaactggttcttcttcttttggtggtctgtgtttgtgtttgttttttctctcacctgaaaatgtcttgctgcggtggtaactgtggttgcggaagctcctgcaagtgcggcaacggctgcggaggctgcaagatgtacccagacttgagctacactgagtcaaccaccaccgagaccttggtcatgggagtggcacctgttaaggctcaatttgagggcgctgaaatgggtgtgcccgctgagaacgatggctgcaaatgtggaccaaactgctcctgcaacccctgcacttgcaagtgaagtgttgggagagcaagcttcaagcagagatagcccttaattaggaataatgatcaactattaatgtgtagctaanaacttatgtattatgtctgtgatggctntcgtgcactctggtg

SEQ ID NO: 73484 - DNA, 353 bp, Glycine max
cggccagagagcgtgatcatattatgttctaaactgcctataccggacccatggtctactatgattttatcaataaccactcaaatgtctatcgcattgttcataaggatcttaactccccgaacgccatcaattgcccttctgaggtcacctctatcgccttagatcatctcttcaaggcgacctatgacaagaatcccctagcaacgaccagcaccacactgcccagaactaacatcaacgatatgactgttctacgagaaaagcctaccatcatggacattgtaaacacatacgatgcttgtttcacggaaagtcatatcagatgtgccttacgaatgcacacatatctc

SEQ ID NO: 73485 - DNA, 404 bp, Glycine max
gatgaaaacaaaaggtgcctgtgggcatagctgagagatcggtgtttattttaagaaaggacaacgacttggcctgaaatttgacgctcaaattctccacaggcgactatcattactttcttcttaacaaagcaaacaaactaaatctcatggttccacggttcacacccaccacaaaagtctctggatacatcaaatgctactatttctatcacacccactgccaaaccgacatcctcatcttcacccaaatgtcagatctaattccccacagaccttgaatacatcggagaatgcattatggatattgcaacacctgtttgagcttttaccatgtttcatgaacaatggatgcatcgaacacagcgggtaccactatcaaatgctactgtatctagcttttc

SEQ ID NO: 73486 - DNA, 392 bp, Glycine max
ctcactaacaatggacttatatacgagctttagtggatttagtgtatgaatggggaaaaataatgatttttgtatattcatgatatataatttaaactgataagaggaacaaaaattattacttctttataaattaattagatgactatatattagacccttcattgtaactatattaaaaataataataataatttttgattacaatataattacactcatcaatgatttcatgcctaataaactcaattttaatttatgttaaagattgtttggggaaaaaaagagagatagattgagaacaagcattacttagatttattcactgggtagataatgacagtgccgaatcttgattctttaacgatgttcccgaagacaacctctgcgaa

SEQ ID NO: 73487 - DNA, 330 bp, Glycine max
ctcttgtttcaagacctagatgaactctatagaggcatacattgggatgtttttctctatggtagctgagtcatagatctacatatatcacgccgttgctggagatgttatactccttaacattgtgtgatcaagtacttgctattggtgactctatcactgtgcattttaatttctgtagacttaatttacacagatttttcataacatgattatcctgaaaaatctagagaaccttttttgatatatggatttcaattggctcatcctagactttctatgattgttaaatttgctgatattaatactctatggaatcttcttatgtcc

SEQ ID NO: 73488 - DNA, 335 bp, Glycine max
aacacgacagaagtgggagaagacggcattagggtgtagaaaggaatgaatgcctcccagggggacaacctatctaaccgcctcaaagcgggctataccactgctacaccagactttttccttcataataacgactcaaataaagcctttacttgaacatgtacacggaatcaatcactcactctctaaacatcataacagaacacgctatgctcgactacatactccacaataacactgctttctacgatctgatgaaccattttcattattccgctcttcaaaagtaaaatgcttaactagtactaatactctcaacaaatacactttgttcc

SEQ ID NO: 73489 - DNA, 92 bp, Glycine max
gttgctgagagggttgttgtttctacaaagagcccaagatcagataagcaatatgtgtgggaagcagaagctgacagtagctcttatgtgat

SEQ ID NO: 73490 - DNA, 444 bp, Glycine max
ggcacaagtttgttgagatagctagaagcaataagatgaaaatgaaagtgcttgttttgtttgttgctacagttttggtagcatatgaatgccatggctcagactaccagaagttccctctccaaatgaaaactgggtttggtgggcaatacagcaatgaggtggcatgtgccagttggaggcttggcgtggaagcaaacaacgtagtcaagtggcaaactgttcctgcagcttgcggagagtacatagctgactacgttctaggagaccaatatagatcagattccaaaacagttaaccaacaagcttatttctatgctaaatccctcaaactcaccaacaaagatgtctttgtcttggacgttgacgacactactctctctaatctccagtattttgctaaccatggatttggtgtggaaccacacaatacgacggcgttta

SEQ ID NO: 73491 - DNA, 138 bp, Glycine max
cacatgtttgttgttttcggtagtaatgatctggtacatagatacaagagatcgttattaattggaggccaaaatcctcttaatatacaaaatatgccattggcttgcacaatggaaaaaccattttaaggattaccc

SEQ ID NO: 73492 - DNA, 410 bp, Glycine max
  unsure (1)..(410): unsure at all n locations
gacccacgcgtacgaacacccatacaaacggctgcaaaagacctccaaatgctaagcctcaataccgggcacaatgggaaaacttgattagttgcgctctccacanatgaaacaacactaaatcacgtatattcaacactactcatatgtgaaccttttcaaaaaaaaactgtttttttatcactaacacatcaatgaagatgcattccaaatatatgcttccctaaaccaacaacgaacaaacagacacacatctatttccaatattagacaaacatacctgactactctcttgggaccaatatatatcacattccaaaacatttaacaaacaagcttacatatattctaaatgcctcacactcaccacctaatatatttttgtatttgacaatgaaaacactactatc

SEQ ID NO: 73493 - DNA, 316 bp, Glycine max
cgaccccaaagatcactatatactggttacaatgtgaagcattgaacagactgtcattgcaaagagggaagtctattaaattcttcagccacacaagctgaacaaaattcattcaaatattaacttatggtgggaatatttccatgaatgagaacaggttgtccaacatgactctttgcatgaccaagtctatcatgcccaatactattacacctattacatgtatttacatgatcatctctaactaaatttatcgtcattaataatcatcaactatcatacatgttgacgcacacacttatctgtatcttgaatc

SEQ ID NO: 73494 - DNA, 218 bp, Glycine max
cttcctacaaacattctaattatccgacaaacccatccacttatttgccaccatttcagcatactaacacatttccacctaaaaaccattctaatattcctatatgcgaaattttttcttccttcctattctccccctatttttactttacctaccatttttttttctctctcactcaccatatatggtctttttcacatcttctttacttgtccaat

SEQ ID NO: 73495 - DNA, 397 bp, Glycine max
attgtcgattgacttttctttgaccttcccatttgggtatcaagcgatcatgagattctacgggactcaatcggacatccgacttaattattattgacggaagaatttactcagagctactattttcaattacgagcggctcgatatattacaggactcaatctgacatgctagttaaaaattatttttatttgattgttctcacagatttccattacaattacgagcgtctcgatatgtgatgatgacataacctagggcctacgaccatgaatcacttgaaggttccatgaccagaggcagacttaaacaagcccaacacgttatagagacaaggctggtcattctgatagctggcatcgatgatgattgaaggcccagaggcagaggcactacc

SEQ ID NO: 73496 - DNA, 402 bp, Glycine max
acgcgttcgaacacgtctgaaaacacctcttaaaagactacagaaatatctggtagaagtcgaattggagtctcgagcagacattcgaaccattgtaaaaacccaccacacgaacctacttcacttgttattcttctataccaaccgtcctaaatcacttctcacttattaatacatacctaatgcatccctttaaaaccttatcttccgaacttaaagtcataaacctccattgctctatgatagagtacgaatttccctggatatatcaccatggattcttcatctccattaagagtttgacgcaccaatcctatattgtgacataaagcctcataacatttagatggatgaattatagacttcttacatatctcatttctgtctttcaaaactttttat

SEQ ID NO: 73497 - DNA, 52 bp, Glycine max
taccggtcttgaattacccgttcgacccatgcgttcgaccacacgaccatac

SEQ ID NO: 73498 - DNA, 416 bp, Glycine max
gagagtagaggctgagattgacacgtctactaaaccaataaaactcatatcaacaattgtttctttttcttattatctagtaaatttgttctgagtcattacatggtacagtgaagatttatacaaacgaagacttccaagaaacaaagcaaaagatgcagagaagcctttccacttatctgtccaagataggagctcaagatgcaaattgtctttcttaaaacttatcctattgataaccatatgcggcatttttgtaaccctcctatactctccggaagtttacaataccaaccatttatcaagctctggcactcggtggatatggggtggttcagatcctcgttacatgtccaatgtagccactgactgggatgacatactgaaaattacggagaaactgacaggggaagatg

SEQ ID NO: 73499 - DNA, 369 bp, Glycine max
cataattttttaattttttctaacattaacacttctgctaaactgctaaaactgatatcaacattaataattttaacatataatctaataaatatgaactgaaccattacatcttacataatatattcatacatacgaagacttctaatttacacaactaaacatgcaatgcttcctatccactaatcttatctaaatatgatctcaaaatgcacattcaatttcttacaacttatactatatataaccatatttccccataactacaaccattctatacttttaatatgtatacaataccaaccatttatcaaactctttcactcattaaatattaggtggttcatatccttacctcatatccaatat

SEQ ID NO: 73500 - DNA, 422 bp, Glycine max
cattttgattgcaaaaagcatggtaatataattgtaatgggtggatatttactgtatatgcgagggatcaatatttagtaaatgttcttaggttccaagtgcaagaaatcgacttacgataattatgtgtgcatcagtaatgttaaaaaatgatttatacatgttagtcttattaaaatactaagggtatgaatgatgaaatctaatcctatatcttcttaattttattcaagtcgttattattgttttcatgatttacatatttccaacacactaaatttcgtatttttcttatttcagttatttacgtaaatccgatatttttactttaagttgtctttagttaatcaaaccaaaaccaatgacattgaattaaatttgtacataactattaaaatgataacctttatccgaatgaatta

SEQ ID NO: 73501 - DNA, 377 bp, Glycine max
ccacgctcgaccgacgcctacctaccgataagacaacacaactttaagagtttatgctcatatttacacctttggtaaacccgttaaactgatatcaacagttttttcattctattattatataataaatttcttctgaatcattacactttacagtgaagatttatacaaacgaagacttcccataaacaaaacaaaacatgcataaactccttttcacttatctctccaacatatgagctctaaatgcaaattgtctttcttaaaacttattctatttataaccatattccgcatttttttaacactcctatactcttcggaagtttacaataccaaccatttatcaaactcttgcactctgaggatattgggtg

SEQ ID NO: 73502 - DNA, 384 bp, Glycine max
ggtcacgaggaagggcgcacgggctaaccctgacgaaaacgcctttcaattccgataactctcgttgtgccgaaaccctaaccttaaccggattttctcgttggttgggattgaattgacatcggatggaggcgatcgattgcaaaattggttgtatgtaatttagcgttgaacaacgatatctgctgctgtttgctagaagcaagacatctttatacgaagagcttcctgcttctccgacactctacaagaagctccagtgttcctcttcgacaatttgatttcctcctccctctcacgccaaccaactatgacctctctttccccacatggacaacttgattcttgagagacctctccaagaatgtggcaatgatataaatg

SEQ ID NO: 73503 - DNA, 433 bp, Glycine max
gtatctgaaacaaagtcaaattctgttcaacaatgcagggcattagcaagttgagatacaggatatctagtctgttgaaaattaaaaggatttaggtagggaaagaaggaaaaaaaaactcacagttataacctgaaattgcatcaatttgatgtcatacgaaacacaaagtactaacctaagtatcacatgagaagaaagataattgctgttatcttagtccatgacattcattatatgtctagacctcaactgaggcaatcttccatgataaatcaaaataatgttattttaaacatttttatctgtatcttctcaatcaaagtgaaacagaaggtacctttcactttttgtctatgttgagttttggaatcattctaggaacatgcagcaatcatagtaaggtttccatcttgagggactctcatgatat

SEQ ID NO: 73504 - DNA, 310 bp, Glycine max
ttcccgggtcgacccactcgtcacgtacagccgcccgaacacgctccaatatacactatccaatctacttattaacttattaaatagcactaattgagacacttgggctcatcctcttcattattcaaactaacacttccttacatctttcaaaagttttatatccttttctatcattatctacaactccatctatatactccatctatctttcaccagaacctcatttacacctctttttttactcattatcattaccttttctaatttcatcactacacactctacacttaccataactccttaccta

SEQ ID NO: 73505 - DNA, 451 bp, Glycine max
catcggaaacgaaatagttgttgagagtagtcaagatgagagacagcaagaagaggaatttacagaaaagtttaatgaaaagttgaagactccacaaaatgataccgaggagactgcagaaacaaacaccaatgatactgagaaacaagggattgaggatgatggaaaattcgatcaagaaaaagcgaaagggattgaagaagcaacaaaagaacagttaccagaggaagaagtcaagacagcattgcccactgctgcctttgtccaaggcgatactgatcaaataccacagcagcaaacactgccggatgatgattcagaagtgattggtattgcgaagaacatcgacactccagaaattgaaattggcggaaggtccacttgtgttgaggaacctgaacaacccgaaaacatggacaacatcagcgaggagactgcagaaacaaacacc

SEQ ID NO: 73506 - DNA, 298 bp, Glycine max
gatctaaatgcttgtgcttaaaaatggtcaccaggaaccataactggccgccgttatcactcacatccacaccaccgccttgttgaaatttgaacgtaccattacggtttattctgatttctctatccatttttgcaatctccagctcattttaaatcatggttcgctcttgttcttcaatttcattgcaccaccatgcttaaaaatatagtctctttatcatgtcgaggattcaaaattctgacggtgatgtgctctttctagacatcagagagcaaagagttggagcataaacaat

SEQ ID NO: 73507 - DNA, 375 bp, Glycine max
accacacgtccgaacggcattgaaaacacaatagatgtggcgactaatcaaggggagatacgagcatacggggtaactacattaaaagattaatgaaaagcctaaaactctacataatgataccgtcgagactgcaccaaacaaacaccaatgatactgagaaacaacggcattgtggatgatacaaaaaatcgatcaagaaaaattgaatcggatggaagaaacttcatcttaacttgtaccatgatgaagaattcaagactagattgtccactgcttcctttgatcaaggcgacactcttcaaataccacaccattcaaacactgccctatgatgatttctaaatgattgatattgcgaataacatgcacact

SEQ ID NO: 73508 - DNA, 387 bp, Glycine max
gtgtgcaaccaaatatagggttgtttagaatggttgcaaagacttgaattccttaataagtccttattgtatgaacagccaaaaatggctagtggtttgccaaaaatatttgtactttggtagtaaaaaagagttgaagagtgttttgttttacctttacatggattccaatgtacttaaacaaagaagcaacaattcatttctattgagtaaacgtgtgtttggatggttgtaaacagaaaaacaaacgcaggccaagactttgagtcacaataatacgagccaataatactctaatgatattaacatgttggacgtacatgaagtaggttccaagagtttccatttataaatgaggtaaggtcatgattaatataattttcttct

SEQ ID NO: 73509 - DNA, 216 bp, Glycine max
gacacatatccttctttttgaacgacttattgggggaaggactagatttgggggctacaactcttactgaataaagatacatcaacatgactctttaagctttacatctctctgtcgatgcattccccatatctgatttcctagaatctgtattacacacttattctataactcttaactcccttttcaccaaaaaaccttttacaatcatcacac

SEQ ID NO: 73510 - DNA, 104 bp, Glycine max
gactcttttgacaacacgtcaagaggattcccatgcgctgggaccactaaatggtcctgatgcgaaaaaacgacctaacattaccactgctaaaaaacgaccta

SEQ ID NO: 73511 - DNA, 323 bp, Glycine max
gccgctgctgcagcttgtctctgtgttcaagtgaagggagcctctcccagcatgcctgataggaaatctgttttggatcttcttaattgtcaatgataatactcgcaaaaggtcacaattcgaactatcaggaatagaataactgtgtatggcagagggaaagacccttgaaaatggcagcaaggaaagcaaaaatccttttacagagtatatctgcaagatggattcttcaacataatagtttgttgtcattgtaataagattaggacaaacactttaccgtttggtaatggaaggaaaatgaaaagaaaaatgtttatatg

SEQ ID NO: 73512 - DNA, 210 bp, Glycine max
aggcgtgcgaagacaacacaacggaacgcatgtaacgggagatatccaagtcatgtggggacattcaagtaaagggtgccgtactttgttacggactgatgatgagctaataccttccccgtacttaaattcaacttcggaacctttcacttaaagagttcctagattgcgtattttacagttattccgacacttttatgaaattaacga

SEQ ID NO: 73513 - DNA, 393 bp, Glycine max
ggactgacatgttctcgaaaaacgtgcactatgggaactgggtgtaacgatggttgcctaacatgaatacttccccatgctatgaatgtgttgtttagcaaacttgggaccctaaagcaccagattgattatcagttgcctgtttcctttattgagattcttaatgaagaagtatgagactggctgcatcccttctccatgagtaaaccagaaactgctaacggacatgcaggaaaaatgacctctactgagaagccaccaatacaaatttgtgagacctcaaatggtgtcatcaccctcgcatgatctactgaaattagtgtatctacactaatagaaatggctgcttgcttgtaacatgtatcattgagcagaccaactgggatcacagat

SEQ ID NO: 73514 - DNA, 274 bp, Glycine max
taatgggattctataccacaatgaacccagtgcaaaaattggactatgggcaacaattcacacatatttctaaaacactatcttacaaaccccttcattctacatataccctctctattttgtcacacttattaaatacacttcccccatatacacatcttactgtctaccaaaaccccttagattcaaaccaaaactactttcttgcatatcaacctttaccatcttgctcacataatgaaccctcacaacccaatctccgttcctctcacaa

SEQ ID NO: 73515 - DNA, 224 bp, Glycine max
cggaattcccggctcgacccacgcctccatatgcatgacaaaaaacgacttactgtcagtgtctatcaaaataaaaccaatgtgaacattgtaatttctgaaataacttaaataatatacatcatactatatcaaaatacctatgatccgcaatttatgaagacttctaattaaagcttataaattatactgccccatctgaccctgtttacaataaatcaaaa

SEQ ID NO: 73516 - DNA, 288 bp, Glycine max
cattacatgcgccatttacgtgtgcaagactacagtgatctctgaagtaacggtggaacacgtacgattgtccacaacacgttgaaacatatgtgttatatacttaatgacattcatcaaaactcatgattgatgtgaagataattatagcaaacctaacgtatgatacataaccatactactggagacatattgattgcctacaatgtaattatacacttgcttaatatcttctttgcttaaataatactcgaactatcaattccttaactataatttaaactcctt

SEQ ID NO: 73517 - DNA, 80 bp, Glycine max
ttcttctgcaagaagaccacatatgggtacgggtgctattagacgacagggggttactgctgctataagactacataagg

SEQ ID NO: 73518 - DNA, 329 bp, Glycine max
tatttgccctctctccatcactcttcctcttagcacttcggtacaactaagacctacggtttctactttttataaacacattttaatctctacaatctatacaccctcctcaccaatcacttcataaattcccaaccttttcatctataaccttatcccctttctctttataaaccctgttacaaccacattatacattactcaacctacctcatacactcacaacacctcttacccatttactattaacatcactcattatcctccccacaaactttaacaactcaacaccttctttcccacaatactcacctattcactacacccac

SEQ ID NO: 73519 - DNA, 392 bp, Glycine max
  unsure (1)..(392): unsure at all n locations
gatgtaaaaagtgtgtgatgttaattagtgagtgaggaancattnaaatttagtggaaattaaagtcaagaatcaaactgaccaaggagtattcaggtatgctaattccttcaacttgaaactcctttcattctttgcttggacctgcatttctcatttctggtcgttaatgcatctatttgcattcaattgaagagttcatttcatttcttacccttcttgcatatacatgttaattgattcccatggtgaaagatttacatatatacctcttatacattcttgcatgcccaaattgatatatgtaagcattttatgaattgatatacatatattaaccctcacattcttcttctttttagtctataaccgaatgcctgacacgctcaagt

SEQ ID NO: 73520 - DNA, 250 bp, Glycine max
tcacttctctttcaccacattctaaacataacactttttaccccatcatccccaataatttcttcttccccaaccttttcttttattaccatcttctcttctcttttttaacctatttcctccacaaaattattactcaccacctcattcaccacaaccctcttaccatttactttatcaaactcatcttttcccacaactttcatacttaacaccctcttcctcacatcctttacctttaattccccac

SEQ ID NO: 73521 - DNA, 384 bp, Glycine max
gatccaattggaatgagaagaaccaaaattatacaactagcatatttaagggtccatttgctaagaagaaaagaaataggtacaaattagccttttttttatttttttgtttttgtaagtttatttttttaattttaacacaaacttatgtaaacaaaaatttaaaaaataaacttggaatgaaaaaaattaaaaaaaaatgctaacttacaaattataaaaatatatttaagcgaaaaaaaaacgatggatgaaagtagggaaagggaatgaaaataactaaatggttatctcaaaattctcaacaagcggcacttttcatacttcacgtcattgattatctcaataaaaccttaattaaatcatgggcacacgttttatttt

SEQ ID NO: 73522 - DNA, 376 bp, Glycine max
  unsure (1)..(376): unsure at all n locations
ttattctataatanatcataatcataaagaaccttttaaattctaagtaacaccnaccattntcctttttttttctcttttcttcctttccatttttattattacatctttatctttctctcccactcaaaatttttatttttctcaaaacaataacaattacctttaataacatacttaatctaattaacccccatcttacccctctttttacaatcctcatcattcttattctaatcccaattatctttctttacattcaaccaaaatccattttaatttcaccccttctacaaactattactttacataaaaacatgaccattaatcataccaaaaatctcaaaaaaaacctttttaattttcccctttttta

SEQ ID NO: 73523 - DNA, 360 bp, Glycine max
tgaattgccgtgtcgaccgactcatacttccactcgtccctacagcttcttttatacttcagtaaccgactcaaacatatgagtccccggttaaatatttaagctagttaccttattctatctcatggtaaatttttccttatccaatatcctattcatccttctttccacacttaacacttttctcaatgttatttcttgtacctattgcccttaccttttttcctatcctccaataacaccattcttttttaatcctcctattaaaaaaccaccaaatcttttatcacctcctctttcatcttcaaaactaccctatatacacctctcttatttttcataacctaataactaccttaa

SEQ ID NO: 73524 - DNA, 200 bp, Glycine max
ggagtgtgtgagagagcgagcgagcgagcagtttcaaagagaggatttgggattgggaaggcgagggattgcgctgcgtctcttcctcttctctttcgattcatccctcattcataatcttccaatccaacaacctcagcctcacactcacacatacacacatctgaacgcgtatcgtcccttccatggcttcaaagcgc

SEQ ID NO: 73525 - DNA, 312 bp, Glycine max
  unsure (1)..(312): unsure at all n locations
tacataatnctattcaacaactattaaatttttatatacactggaattagttctaaaaatgatttcccctaccacaaccaatantcattaaacaatatttccccaccccattaatactacatattccacaacagcttttacatgctcttattacttcaactatttcatactcctttttattcaaactcaactcttttttcaaataatcccacccaataatcaatcactttttactctatttccttcccacaataccatgttccttacaataactttcactacttctaattcactcaaattctacttaaaccc

SEQ ID NO: 73526 - DNA, 323 bp, Glycine max
ggttctagtgtgtgattgttggttgttgtaactcgttcggcttcttttgttgttctgtgtttgtgtttgttttttctctcacctgaaaatgtcttgctgcggtggtaactgtggttgcggaagctcctgcaagtgcggcaacggctgcggaggctgcaagatgtacccagacttgagctacactgagtcaaccaccaccgagacctttggcattggaattggcacctgttaaggctaattttaagggtcctgaaatgggtgtgcccgctgagaacgatggctgcaaatgtggaccaaactgttcctgcaacccctgcacttgc

SEQ ID NO: 73527 - DNA, 370 bp, Glycine max
gaaggtgcaagagtttgttgtgagctataagcgagtttatcgtgaggagaatatgaagttgtttgttttctttgttgctgcagtagttttggtagcatggccatgccatggcgcaggctaccaaaggttccctctccgaatgaaaactggctatggtgagcgttcttcggaggtaaaatgcgcaagttttaggcttgctgtggaagcacacaacatccgagcctttaaaaccattcctgaagagtgcgttgaaccaacaaaggactacattaatggcgaacaatttagatcagactctaaaacagttaaccaacaagctttcttttatgctagtgaacgcgaagtccatcacaacgacatatttatattc

SEQ ID NO: 73528 - DNA, 174 bp, Glycine max
ctatatatacacagcggtcaaataaatacaactaattcctcttatccctttctcactccttcctaattgtatcttctacgtttcacaccttcctttaccccaaaccattcttcccttgttttaaaaccttccatacacaaccaatcatgtccatactacttctttgtccctatc

SEQ ID NO: 73529 - DNA, 242 bp, Glycine max
ggcacaagtgagtttgttgatcgagataactagagacagtgtgatgaaaatgaaggtccttgttttcttcgttgctacaattttggtagcatggcaatgccatgcgtacgatatgttccctctccgaatgaacactggctatggtgcccgtactccggaggtgaaatgcgcaagtcggaggcttgctgtggaagcacacaacatctttggttttgagaccattcctgaagagtgcgttgaag

SEQ ID NO: 73530 - DNA, 394 bp, Glycine max
  unsure (1)..(394): unsure at all n locations
attganggaccgaccgacgcatacgtccactcatcctcccacacgtccttccacttttctattccaataatacaacagggggtgtgagctcattacaagcagggtcacacgtattcaccacataaatttacgccaaataaaattccctacacggatgacttatgaccaactttcatgataaacaatttcttttttctaatcaataatcattaatattattgtcgacaccccactaactcacatactcaataccaacacctatatccatcttacctcttctactacaaacgacctttataagcctaacttcaaacctatcacttttgatacgactatccaaaacaataagtatctcatcccaaatcaccatgactatctcatttactatcttatg

SEQ ID NO: 73531 - DNA, 301 bp, Glycine max
ggaattgccgggtcgacccactcgtacttccactcatccgtacgcgagaatactacattatgttgaagattaatctcctgggttgcgagagatacatgggaaggtgcgtaatttaatactatctgctcaagatcctgcaaatactcttgcaattgatgcctattaaaaaataatagattctcgatccgtctttctaagcaatgtagactattcatgcactcctgaagaaattcaacttcattctcagtctactgtaacacgaaacaaactcaccattcaaactgttaagattgtgcaacct

SEQ ID NO: 73532 - DNA, 389 bp, Glycine max
ggcagttcaattccaatatattccattctctctgtggagttccctacctctcccttgaagatgcagatcttcgtcgagaccctcaccggcaagaccatcacccttgaggtggaaagctctgacaccatcgacaacgtcaaggccaagatccaggacaaggaaggaatccccccggaccagcaacgtctcattttcgccggaaagcaacttgaggacggccgtacccttgctgactacaacattcagaaggagagtactcttcacctcgtcctccgtctccgtggtggcatgcagatcttcgttaagacactcaccggcaagaccataaccctagaggttgaaagctccgacaccatcgataacgtcaaggccaagatccaggacaagga

SEQ ID NO: 73533 - DNA, 394 bp, Glycine max
gtcctagctaccttaggatcatatgtatgtaagtcacctggtttggacctagtcatacataacttagtggtaacataaataacaaaaagaatactctaccaggacattattcactatattgagtgaaatggtacagaaaatggaaaattgtcccaaatttattttttaaaaaaatcaggaacatcatagcaaatatctaaaaatcattttttattttttgtaatttttggcgacttttaaaaatcatgaaaatagaaaaaaattgaaaaagtggtttaaatcatcgaattttgttgtattaattttttcccacattttgaccaattttcaggccatttgagctagttgtaggtgaaatgaccaaaatatccctgcatctaaaactcctacttat

SEQ ID NO: 73534 - DNA, 315 bp, Glycine max
ggagccagctgaaggcatacttttgagggttgaaagtctgacttgagaaggaaatgaaattcacaatataagcatcacacaaagtgcccttactgtcactagtgaagaagctgggacaggggaacaagccaagaagatagtccttatgttcttggagagattgtctcatccattgggccttccgaaatcaaacaaacagcagagaaacacagacatgattgctcgtatattgccttacctaacctatggtgaacctgctacaatggatgcgcttgcccatcattttactccttacttgcaagattggagtacatt

SEQ ID NO: 73535 - DNA, 346 bp, Glycine max
  unsure (1)..(346): unsure at all n locations
ggggatggctggccgctgaaccggaccggttcggcttggagagatcttgttgggctcggaaacacgcatttgcggcggtgatgagagggagctgctgctgctggaaccgtcggacagagcagcggttccgcctcctcgcgatctccaccgttaaatcactcaagatcaagcttctcctcttttgctgcgtcgccttcacgcttctcgccttttccaccaacgcttcttccttcgtactatggatcaacaaccaaacgccgncgtcttcgncaactagctttcccgattccgggttctatttctttctctgtctcttttatacttcattcaactacttaatatgtac

SEQ ID NO: 73536 - DNA, 365 bp, Glycine max
accactcgtacatgacgatgcaagcagaccacgcaatggaagaacatgaatggaataacggaaaatatgcgaacacaggattctgtataccaggatgtctagaatgaaccgaggaatgtggtcgtagcatgcgaatttgacaccagtactgtgcacttcataaagaatgcagatcacgaagagttgcgatagctgcgttctggtacatctgggactgggtaccatggaaaatggacaggatcaaatgatgcatttaaaatgaataaagaaatgctgcttcgctggtcgatcttgagaacaagaaatattgaccatagagttaatggcgggaagcatgacatactttccaagctgaaccatccaaa

SEQ ID NO: 73537 - DNA, 358 bp, Glycine max
tgcacgtaccggtccgtaattccaggctcgacctacgcataacaccacacatccgcacaatcgttcgtcaattaaccgaacacgacagacttggggtaacatggttcaatgtgtataacactgtatttactatttatatgacatctagctactctataatcttactctcgaactagacattgtgattatcatcctaaactatttgcatcgaataatcactcaatatcataccatatactttgttctaattctccatcactcttcatatatttcacaccatcaattcttatctaaacctttggcttaacatccataatccaacatattctttatctcaatttcgaaatctctcttacta

SEQ ID NO: 73538 - DNA, 382 bp, Glycine max
gtatagcatgatccaatgtatataaactgtaaagagtctttattttttctctggctgtgctacaatattgtcacgtactgaccattgtgatgaacatttaagtttaaaacttacactaattagggttgggatattctttgtagtgctatgttagtcaattggtttttatatatttagattaaccactgttaagcgatatacttgctcaatcataattaatcctacatactactactagctaggttgtattaaccaaggtaatttgcatatgcaacttgatctggttttctttctttgttgacccagtaattaaatgttcttatatatggtaggttgaatatggtattgccactgatatatataaatggtatgagtcttggca

SEQ ID NO: 73539 - DNA, 317 bp, Glycine max
ggcacaagtgagtttgttgatcgagataactagagacagtgtgatgaaaatgaaggtccttgttttcttcgttgctacaattttggtagcatggcaatgccatgcgtacgatatgttccctctccgaatgaacactggctatggtgcccgtactccggaggtgaaatgcgcaagttggaagcttgctgtggaagcacacaacatctttggctttgagaccattcctgaagagtgcgttgaagcaacaaaggaatacatccatggcgaacaatatagatcagactccaaaacagttaaccaacaagcttacttttatg

SEQ ID NO: 73540 - DNA, 363 bp, Glycine max
gcaagggttatgtgggatcagaagactgttcatgcaatgcgatttggatgcgtttaattccgtacccaacaagatgcacaacgctgtatacatgatttgactgatctgtggcttggacgtagacagatccgttggcactcgacgacacacggtgctgttggctatgaacagaagcagagactaaatgcaaaaagtgtggtgcaactcacgaaggtctcatctagagatggtaaacacacatgtcacatggactgctctgagaacaattctcattatactactggttatgtgggttaccttgctacataggtaactaaactcgatctccgatcccagttgcatgctcttggcgctaggactgat

SEQ ID NO: 73541 - DNA, 126 bp, Glycine max
ggctacccgatgacaatttaccgctgaaggtttccaatgtcacattgggtcacttgggtacccttgctagaatacgactgatgcttactaccatgcaaacatacaaccacggctatactcttacat

SEQ ID NO: 73542 - DNA, 308 bp, Glycine max
gacgcacacgcatacgcacgtgtgagagacgacttcagtacgtgatagtgcatgatgctacaccgtggcagagcgggtctgtctaaattcttgattagactcattagcacttcttcaacacacacattctaaaagggatgctctcacttctaactaaaacccatcaaatgatacattatcaacacaacaggatgatcctttctagtgaaagagctagccctgttaaaatgctcattacactcctactttgactcatgaatgccaccttgcgagtacactacttcacttttccaaagttattccatact

SEQ ID NO: 73543 - DNA, 356 bp, Glycine max
attccgtcgacacgctcgctgcaaaacgacgaggggtgaattgattggtggacaggattctagagccgagtcatcactcggtgctcgcctgcttgtcacaccgccgtgtctaccgttgaatggccgtgaagtgttcgattggcactgagcgtcctgccggacgtgtagagccactgaccttatattaagaagaaaatacatcaagtgcagaagagattgaagcatggaagagggaagggtttggaagatacagaacaagatcaatcgcagtaccttttaaacgcaaatggttgctaagaagcttcggctattgtctatgcgatctgaatcgtctcaatttctcagtctggagcttt

SEQ ID NO: 73544 - DNA, 418 bp, Glycine max
tatgcgaggagatcatgagggacataggccttgccaggctctacaatatggcggattctttcttcttccagagacttttgcaagacaaaccttacataagtgaaacactgttagccatgattattatatctttagtctggtggacatttcatccattcatatggcagaacagaaagatctactcagttctaatactgtgcacggttctatcactcttactagcttctcaagttctgcgaatagatcacattttattatacacaacttccagctccaaactaccattgacaccagggttctaaacttgccacattgccccatacagatactgaccttgaagtgctcttgatctattatccgcgtggcgttgtctatggatatagtgatttgatattatcatcacacatgatctttactc

SEQ ID NO: 73545 - DNA, 281 bp, Glycine max
gaggggatcgatgtataaaaatatcatgaggtacctctgacataacgagagatagagagagaaagtgtctgtttatttgagttagctattcgtgatcactgattcgttggcccagcttggctaagcgatgactctatatctatcccttatgcaactcatgtgcgactctcatgtttacaatcatccctcatcatcatcgtcacactgtacccttttctcttaatgactctttccttgtggaatgtcccattgactgactgggctggacacttggatctaaa

SEQ ID NO: 73546 - DNA, 161 bp, Glycine max
cctcacattaccaagttctatcaatgacatcattggatttatgagaacacctcgacccaagggggaagtccctactaacccactaactatataacttgatcatatcgctacagattttaacatccgatgaaccatgatacactcttacaaatgacattcta

SEQ ID NO: 73547 - DNA, 414 bp, Glycine max
attcatgatgataccaaaaagttgcttcgttgggatggtcaccttcaaaattattgggaagcctctccttattttctcgaggacaaaacctccaagaagagacaaagtatgcacatagctaaattctcggacaggaagaagaatgatttcactcgtgactctctctcacaagttttaatgttcaatgatttccctcaggagttagttcaaggtgcatctaagcgtgcgtcgagaagaaaaaagtttcgatggaacccagagtcagagatgaagaaacttgatttctttgaacaacaagagaaaacaaaccagggcaaagaggaaaatgatgaaaatgaaaagaaagatggagaagatggagacgaggatgaaaatgcacaagaggaggatgaagaagatattaatgatgatgat

SEQ ID NO: 73548 - DNA, 189 bp, Glycine max
ggattgggtttggttcttagggaaccctaatacaggggcattaggacgaagaagcataataagatgaaagacagtaaccgagtgatctacagataattccctagttatgctcactgatagactcactgagtctatgcatcgtgataccgatattcatttttgccggaacaaactcatgctacgatcata

SEQ ID NO: 73549 - DNA, 358 bp, Glycine max
tggaacaacataatagagtttagctgaaatcatagtttcattaatattttgtatcatacatgggcaatcttagtaacacccccctttaatttgatgtgtgcctactgtgttttgatgcaattttctatcctttttcttttatctgttgctacactatataagttttccttttctttatccctttaagattatttaattaaaatttaaaaaaaatactgtggtcactgggtatgattccttcgctataaatgcatcggctaattaaattgcttatgctttgatatccttccccattgattgatgtggactggaatttgatagtatgagacctaggttcaaatttctttgtattcataga

SEQ ID NO: 73550 - DNA, 426 bp, Glycine max
aagtgatgttacggaatgagttgtaaaatgatgtgaattgggctaagttgagcttggtatacttatgttatatatatgtgctattgtatatctctgcatgtttaggaatgtaataacttactccatgtgtgttgttagtgtctggatcctatgatgatatctgaccttgtgttcgtgagatcaaatgattagatagatgactataaagaaccttatgctaaatgacgatgaacactatactctgataggatatgacattagagcttaggattttacattgattttatcatatgctatgataagatatgtagttgaacatgatttatttttatatttctcattgaaatatcagttgtaatatcatcaagtttcacctcttgaagttctcaaagtagtagttaccctttcgtacatgtctactatagc

SEQ ID NO: 73551 - DNA, 194 bp, Glycine max
gactactgatgggggaactgttaacctcttagattgcacagattctgctccatggggctgaagcactagttgaagcctctgcacaacatgcgaatatatagaattcattcccaagacaaggatctggatttctcaacatagtcggcatcatagtttgcaaaatatcttagtatgaattacaaactgatgaactt

SEQ ID NO: 73552 - DNA, 271 bp, Glycine max
tgggcatctctagttttaattatgcaggggactgtcggctgtgtgtaataatcgggctggcaataaagtaagccatctttggctttaggggaattttatttggttgagaaaccttggtccaaattggttggaaattagattccggaaaccaccaaggaaaaggtaacctctcaatgggaattaaaaaaatccttggcaagttattacacttttataaatggaaaatttgcaaattttatctttcaaaaggatatatttttgaaagggtttt

SEQ ID NO: 73553 - DNA, 443 bp, Glycine max
  unsure (1)..(443): unsure at all n locations
ggttctagtgtgtgattgtttgttggtgtaactggttcttcttcttttgttgttctgtgtttgtgtttgttttttctctcacctgaaaatgtcttgctgcggtggtaactgtggttgcggaagctcctgcaagtgcggcaacggctgcggaggctgcaagatgtacccagacttgagctacactgagtcaaccaccaccgagaccttggtcatgggagtggcacctgttaaggctcaatttgagggtgctgaaatgggtgtgcccgctgagaacgatggctgcaaatgtggaccaaactgctcctgcaacccctgcacttgcaagtgaggtgttgggagagcaagcttcaagcagagatagcccttaattaggaataatgataaactattaatgtgtagctaanaacttatgtattatgtctgtgatggttttcgtgcactct

SEQ ID NO: 73554 - DNA, 420 bp, Glycine max
catactagacttataactgctgataatttgtgccgtccactaagggatttagatacaagatgccaatagggcacagtcaatgttcacaagatatagagtgagtcgcatctgcaacagaatgacatgacttataaaatatatattcgcacctacgcaagctagcatttttccttctgtcagtccataaacttaatgtgaaatcttccatagttactgttagaatgtgttaggacccaattgcaaggcatgggactagagtaccactcctcacatttgaagcatgggattccagtgagatttatagggtctagcgctctacaactacatcggctaacatttgtagtatgtttattcaaaggttctaatatcaattggcatcacagctttccaccatgtctttcagccacaaacgagctgtgc

SEQ ID NO: 73555 - DNA, 407 bp, Glycine max
  unsure (1)..(407): unsure at all n locations
gccacatgcaaaacaaaatcaagttttaatcaattaaatacagaatcaatgtttaatactttaatttaaaaactgaatcaaatatccctcatcttttttatttcaccgcctccacaccactgtgtatatttcttggtgttgctttatcggatttctcctcgcgaaattaagtcctcgttgaccaaaaagaggttgtgaatacaagagtacatgcatagtgggaaaggaataacataagaaggggattgggtttagttaagtttagtttggttttggccattcttcttggaagcttcatcgttgttggtgggaccgatgtagcttattctgcactgctcaattctgtctcccatgcatgccactgntttcttttcatgaacggagtggaattaattaatattactaat

SEQ ID NO: 73556 - DNA, 220 bp, Glycine max
attccacggctcgacccaagccttcggtccggttacaaaagacaacacaacgtggagagcaaacacaccatgattgagacgattaggatccacagacgactactacgtgcattatagaaacatcagaagatacattaagatcacattcatcatcatctactactatcttcaagtattacacttactcagtatcatcgtatgtctctcaatgactctatat

SEQ ID NO: 73557 - DNA, 316 bp, Glycine max
aggcgttcgaccacgcctgcatgcggattagagaacgacacaaggagatgagttctaaggtctcattcggacctttttgatatgtggtcaccacttcttctatttctatgcctatctatgcctctgtttgtgttgtccttattcaaatacccgtaaacctttatgaatccaccacttccaccaggtcctatatgccttcccataataaggaatcttcattaactaaataatccttctcttcatgagcagctatggcctctctcaaagaaatataggcctttattttacccttcatttcgcttaaagccagccctaa

SEQ ID NO: 73558 - DNA, 322 bp, Glycine max
aggcgtgagaacacctgagagaggacaaccgaagagtgccgctaggatattgcggctgataggctatgacatacaggaatgactgccatggatcctacctatgccgctcagcatatacgcatccgataactgatgcttaatgcttctgctgatatgaaccggcctaattacgatctcattatgaacgtttacaaggaatcatgcactaagagtgacgacataatcatagaacaggtcgtgcttatatacagctcgactataacactggtatgtatatgctcaggaacatactacatgacatgatgctcagagatgcgatgct

SEQ ID NO: 73559 - DNA, 427 bp, Glycine max
cttgttttaaaggtttacaaaaataatgaaagatttacgtactcacttaagatcccaggatgtttatatgtgtgtgatttatttatttaatcaaaaaatttgtgtttaatttttattgagtacaaattttcttggtcaattgcaatcagaaaaatttatgtttgaaagctaaaatcagctcttacaacaccactaacaaaactgggaacaaaatcaaaaacatgaaagctaaaatcctcttccatcgcatattataattaaaggagataacttcattttattttttacaatttttttttattttacctctaatcaatacatatacactcaagtaactacttgtgacaaaaaaaataaaattatccataggcataaactgatattaaagtagggtcgtaaggatgttcataacttaatcaaaatttca

SEQ ID NO: 73560 - DNA, 218 bp, Glycine max
agcagtctctacggtgtctcaacttgtaacagctccgcaacctcaggcaccacctatgcgagggatcttttccatgtgccaacatgcaaaactattctgattcaaacgggaacactgtgactactatagtttctaccctgaacagtatctagcgttcatttacccaggatgaaacatatgacctcctgaaccttcctagaacaagctcttggattcct

SEQ ID NO: 73561 - DNA, 399 bp, Glycine max
caggcttgacccatgcatacgaccaccgaacgacgactgcaataactccactgattgaggttaacaccaaatagaaatgagacacctaggtgatctatttactctgattccaataacactgttttatatactactatgtgcttatgacatgatcttctctatatacatcttctaccatcaaatcactatttacataatctcaatcctgagtctttctctaatgacctagtatgcattgactatacttcgggtatcgaagtcagatctctgcccaatagtgctttaattctaactaagtgcaagtacattatggatttgtcgcgttaaacaaagatggacttagctaatcatatcatttactcaattactagtgcttactaatcgtccaagttagggcat

SEQ ID NO: 73562 - DNA, 246 bp, Glycine max
  unsure (1)..(246): unsure at all n locations
accggnccggaattcccggatcgacccacgcgtacgaccgcttctaaaaaaccaccaaaagggatatcttcatcatacaaagcattgcattcaaaggctgaagttcattccttgggggttcctttcttcctcaaaaccaaacatgtcaaacacatgctgcaacttcaactgcacttactagactagctgcaccaaaggaaactgctattgtattattctaaacactgacaacagttacatccatac

SEQ ID NO: 73563 - DNA, 420 bp, Glycine max
gaccaccgacaggatgctcattaggaactctcttcattcacatcgagctgatttccatatgtcggagaggcctagttctccccctcttcttttcctgaatcctcaaaagtatcacgcattcatcttacaatactcacaataaaactttcatgactctttttcaaatatcgatagcacacgctattattgatattaataactactaacgttttactacctttctcccattcctgttactccttacatagaccctattacagcgttactatcaatacaatttcgctaaaaccacataaattaacaaaagagttaatgatatccaataacactttcattcccatgttatttacatatgcacaaacaatacatatctttcatgaatatgcacactttgccttacgaagcttaatgtatttcttt

SEQ ID NO: 73564 - DNA, 235 bp, Glycine max
acaatttcaatctcttattcaccaattaccattatctactcctcatataaacattcatatcaatccttttttaaatcccacatctacaactcctcaatcatcattgataacaatactctttttgtatcaaagtaccaataattttacttttaaaatgttcccaataacaatctttaagcaactactttataatatacttcaactacaaaaaccttctttcatacaatcttctaac

SEQ ID NO: 73565 - DNA, 216 bp, Glycine max
gtcaaacttttattggctcatatttcatacctcgtcagccatatactaataagggcctactaatctacgatatgcttctattacttgcaacaattcgtacatccagacatttcctacatacagtaacctttcacactgctgcttctttctcgctcattctagagacaactctaagaactgaaacatcttattattcagatgaaaagaaagctaatg

SEQ ID NO: 73566 - DNA, 366 bp, Glycine max
accggaattgaattcccgggccgacccacccatccgttcggtgctacaacacaacagaatatgtatttttatcaaatcttctatttctccagcggggattaaaacactggttggtccctctcatcctcaaaccctaacatttccaacacattccgcaccttcaactgcgcttacttgacttgctgcaccaaaggaaacagctatatttttattgtatagactcacaacacttacatcaatactatcatcatctatgttccaccaactaagcattatttgaacttcaaatgtggcactaactacactttcacaaactttacctgttggcattaatcaatatctattaaaatctaatttacatgtttt

SEQ ID NO: 73567 - DNA, 180 bp, Glycine max
  unsure (1)..(180): unsure at all n locations
cgagaaacgacagaaggggtatgaaagtagtataagtaattatagtaccggtatagggtgtaacaataattatagattattttatgattcaagtttagttgttataaaagaaaattaagatcatatgtattgtgatagaaatttcatgtatgttatatttataaaaataattattngacg

SEQ ID NO: 73568 - DNA, 62 bp, Glycine max
  unsure (1)..(62): unsure at all n locations
aaaaanaaaanaagaaacaaagaaaaaaagaaaagaaaaaaaagaagaaagagaagagggag

SEQ ID NO: 73569 - DNA, 191 bp, Glycine max
aaacgacacaacgggtatgaaagttttataagtcattataattccggtctcggggggaacaataattatagattattttatgaatcaagtttagctgccataaaaaaaaattaatatcctctttattgtgaatgaaacttcacgtatggtctctttatcaaaataattattagacgaaaaaacacctaatg

SEQ ID NO: 73570 - DNA, 202 bp, Glycine max
acacgtgagaacacaccagcatgcgttttttcgattactaattacacaatccggccggtttattaacaacgggaggtccttattacttcaacacgccttcatttttagatgaattattcgctctgtcaataccttaataaaccgaattagataaaacgcacgtcttgaaaacaaaaattctctacagaaaccattaccacaa

SEQ ID NO: 73571 - DNA, 204 bp, Glycine max
ttggattccaagcagtacctcctctcaatccgacgcattcttaaaaaggggcggtgttatacaatacaacattcattacacatactcaaaatatcttctaaattcgattccttttccaacaccatgaagaaaaattttcatcctttttgacaatatattttccaactaacactaccaccatttaattttgctaaccggattccc

SEQ ID NO: 73572 - DNA, 202 bp, Glycine max
tgcttttctcaacacaataccatacccactaatacgaccttttttataaccctgctacctcttatttttacatcctctttcatcattcttaacaatctttcatcatactacataccaatacctaatccacctttctataattcttcactctactagccctacaaatacaatccttccttttattaaccaaaaccacccattt

SEQ ID NO: 73573 - DNA, 148 bp, Glycine max
ttaaaccaccttctaatatccaacttactaccctcattcacttcataactctttatatttacctaaattcaattactcccatcttttacaacttccttacttgaaaaaccctacattacccaacttaattccttcatcacattccctt

SEQ ID NO: 73574 - DNA, 153 bp, Glycine max
gaaactacagaagggtgatagagggacaggtcatcgcgtccaccgccttttagtagaagcggcaactccagaatgcaaaagactccaaaaaactgattgtggtggattttactgcttcctggtgtggtccatgccgtgttatggccttttttt

SEQ ID NO: 73575 - DNA, 271 bp, Glycine max
gaccaccaaaagggctcatgctactttatctaccgttggggattatctaacaggctaaattatcccaactacttttaatcatgattctctctgttaaattactgattgtgctcctgatcagaacgaagataatgctttccctggcatgattaaaccttacaaagctgttatcttccacaaaacctgtgctcgcctctaataagacgctcatactgtcagactatacgatcataagcttctcctgctggcctttagccctatagataaacaa

SEQ ID NO: 73576 - DNA, 290 bp, Glycine max
agaattgggagtggtggcattgccactagtggggggctttggtttaagaggatcgcaactattgttggcaactctctgtctgtgaaaactgtttctgatgatgataaggctcgctgccatggagggggtgctaattctccttctatggctagacatactaacaacatatattcacctatcaatgctaccgtggcaaccaacctcaaaccaaagccagcgtcaaatctaaaaatgcatacagttttgtttaaaattaggggccctgcattggctggaaactgccacaacat

SEQ ID NO: 73577 - DNA, 280 bp, Glycine max
catctctatatcatttttaacttcatattttatattaagcacataaaactcttcttactttacatccatgaatgactaatattttcttttatttgaagacaaatatttactattcatcccattaataattatctttccttatatttaccaatatttttttacatctcaaaattctaacctttctcatccttccaccatctttcacaattataaaccattttatattccttatatataaaattctatatccatattttattcatttttgtatcctattttt

SEQ ID NO: 73578 - DNA, 92 bp, Glycine max
aaatatcatactcattatatatttataaataaaaaattaaatatcatactcattataaaaaaaagtatacacatatctcaagtcaaatctct

SEQ ID NO: 73579 - DNA, 401 bp, Glycine max
agcatagttcccgtccctgtccccgaattagcggtggggggtttttgatgcccatccccgtccccgcgggaaatttttccccgactgcaaggccccgaatggggcagtccccgcggggatccccaagttgtggggagaattgtcatgcatacccgcacccgcttacacccctaattttttttatgtcttttattatttattgctttgaatttttttatctttctaaaaaaagaaaaattaattttttgttaataaaatttgtatttaccccacaaatttacttgaactaaaaaagggtttaagttaacataaattagaatagaattacaaagaatacaataatttggttttaatttgttttggtttgaattttttttatggcttttattaggtattccttt

SEQ ID NO: 73580 - DNA, 118 bp, Glycine max
agaaaacaacacaaaggtactttttcgagaacacgacatatggtttcggcggggatattactacagaggggtacgtcttctacaacactacttaagggttctgcttccaaaacactac

SEQ ID NO: 73581 - DNA, 254 bp, Glycine max
  unsure (1)..(254): unsure at all n locations
gggancgacgggnaacaaaaagaggaggaccacttacaggaggggggggagcggnaaagtgccaaatataacattttgaagggggcgaaccaacaggaggggaagaaagggaagatgagtttgaggactcttgcaatgctactggggtgggcggaaagacaaagggggagactaaaaaaggaccaatggacaggggttggaagaatccaaaaaaacggaaacaaggagagaaaaaagaaaaaggggagggaaag

SEQ ID NO: 73582 - DNA, 340 bp, Glycine max
tttgcgtagttttaatttgacggggggttgtgaatccttacattttttaagtagcttttattgttttagttagtcttgcttgaggacaagcaagactctaagtttggggtgttgataaatgtcaaatttattggatttttatatgtattttgtgacgtttatttggcattttatgttttagttatttttagtgattttttgttaattttccagcaaaaatatcccgcttaattaagtgtcagagctccaatggtccaaaatcaacagaaagttctagaaaaagaaattacgagaattgtaaattaaagttaggaaaatcaaaagcaaaatatttttcaag

SEQ ID NO: 73583 - DNA, 307 bp, Glycine max
gaaattaaaggagggtaaaagaaacacacaccggggcttatttatatttggctggcgcaccaacagttttctacttcacacctttccactgatcatctgcaactgccacaatgattcaaaattgctaagatctttgacatggcacattcatcattgaccaaattgcaattttttcaaaagaatagcaacaatttatgaagtttctgaaacaataaggagtagtggacacaaattaagatcattggtattataggagaatttgatggtaatcatacacagttgctaggaaaagatataatggctactg

SEQ ID NO: 73584 - DNA, 438 bp, Glycine max
  unsure (1)..(438): unsure at all n locations
gaatncccgggccgaccgacgcgtacggccagatgacaacagacggcgacgggtgatttttctagctatgggcgaattcaagcactgcggcattgttaagttcgcggagggcttctccttcaacgacctcacaaaatgaatctcaaagttggtcactaacattatctctttctaatcctttgaatgaggacaatacattgatagcctacatatcttcagacactgtttgactcatgcattcttgatcacattcaacacaaaagaacactattttgcatttcagagccaccccaatcatatccagttctcgacatacttttcggcaactattgagaatattgcgctactggatacaccatctactctcgtgacagccccatcctgatcctacacatattcatgcaatacagattacccttttaaatttaaataatgcat

SEQ ID NO: 73585 - DNA, 128 bp, Glycine max
  unsure (1)..(128): unsure at all n locations
aaaaaacaaaaagcnaaaaacaagaaaaaaggggaagataaaaggagggaaaaagaaaaacaaaaggggggtgatagaaaaaggggggggggaccaacagatttgtgcttgaagcctttacagagggc

SEQ ID NO: 73586 - DNA, 163 bp, Glycine max
gtgaaaacagcacgacagagggggcaccaacacacgccgttgcaattatcctaggcgcgcactccctgatgagtgaagagaatctctctcctttttactagacccatacaatttagggcgcgctttttcccggccttccctcgccaccgcatatacatacata

SEQ ID NO: 73587 - DNA, 433 bp, Glycine max
gaccaaacctcaatttataaacactctagaataagcctgagggcaagattcacacactcactcctgtcacttccctacactcctgcatggccgaaccactatatctagaggaagattacaaaccaaaagattatacccctgaagccaaaagtctatccttccttgcctctattgttgcccttttcatctacatatgtgtcttctataccttcaacctatctacctattctatcctcaacaacaacatcttttggtttttcatgtccaataccctcaatctcatcattgctgctgactatggagcatcctcttcaaacaaacataaacaagatctctatgaagagtatgtgcgacatagtcaagcaagaaactgtgactcgtcatcatacgtgcccaaatatgatcatgaacaattttataaaaaatgcattta

SEQ ID NO: 73588 - DNA, 319 bp, Glycine max
gaaccaacacacgctgtttcaattattctatgcgcgcactccctgatgagtgaagagaatctctctcctttttataaacccataaatttagggcgcgctttttcccggcctcccctcgccaccgcatgtacatacatcttcgacacgtcgcctcctctctctctcgcttttcgaaaatatacttcttctctcgctcctagaaaggagcttctcaacatgcgcagagcttgcgcgttgattcgccgcaacatcggcgaaacctaattgcggccagtcaaacggcactttcacaacaagcctcaattttgtcactccaatc

SEQ ID NO: 73589 - DNA, 329 bp, Glycine max
  unsure (1)..(329): unsure at all n locations
ccggnccggaanncccgggtcggcccacgcgtacgcccacgcgtccgaacacctgcgaagacgacccaaggcgactattccctcctacttcctttgggtgtttcgcttacgctttgtagggtcttttttttttctattgctctttccctgtgtcaaaagccgacaaaggaggtcaggtgcttgtgaccacaaaaacctccgcatcgaacaaggacacagacagggataagaaaaggcctacctctcattcatccccagctgcgatccactttccagaatgtcctgaccataaacagtcgaaccaacgggtgcacagcaataaacctttg

SEQ ID NO: 73590 - DNA, 217 bp, Glycine max
aaacccctaaaagttactattctctacttccacaatctcgcaactttcctaagccgaacctaaattctctcatcaaaccctcacttatccaatccccacccaaataacacaaatcaacctcactcacctaaaataaaccatcgcctgctctctcaccgacgaaatcatcgcatcgccgcctcccctacggtaggtatctgatgggacacattatact

SEQ ID NO: 73591 - DNA, 440 bp, Glycine max
  unsure (1)..(440): unsure at all n locations
aagaagaaaccagcagcagagaagaaggaggaagttgaagtgacagaagggaagaaggaagctgaagtcatagaagagaagaaggaagtggaagtgacggaagagaagaaggaaattgaagtaacagaagagaagaaggaagctgaagtcatagaagagaagaaggaagtggaagtgacggaagagaagaaggaaattgaagtaacagaagagaagaaggaagcagaagtgaaagaagagaagaaggaaggggaagtgacggaagagaagaaggaagttgaagtgacggaagagaagaaggaagcggaagtgatagtagaagagaagaaggaagttgaagtgacggaagagaagaaggaagtggaagtgaccgaaggaaagaaagaagtggaagtgatcgaagagaagaangggaacagagtgacagaagaaaagaaaga

SEQ ID NO: 73592 - DNA, 327 bp, Glycine max
aagaagaaaccagcagcagagaagaaggaggaagttgaagtgacagaagggaagaaggaagctgaagtcatagaagagaagaaggaagtggaagtgacggaagagaagaaggaaattgaagtaacagaagagaagaaggaagctgaagtcatagaagagaagaaggaagtggaagtgacggaagagaagaaggaaattgaagtaacagaagagaagaaggaagcagaagtgaaagaagagaagaaggaaggggaagtgacggaagagaagaaagaagttgaagtgacggaagagaagaaggaagcggaagtgatagtagaagagaag

SEQ ID NO: 73593 - DNA, 327 bp, Glycine max
ggttctagtgtgtgattgtttgttgttgtaactcggtcttcttcttttgttgttctgtgtttgtgtttgttttttctctcacctgaaaatgtcttgctgcggtggtaactgtggttgcggaagctcctgcaagtgcggcaacggctgcggaggctgcaagatgtacccagacttgagctacactgagtcaaccaccaccgagaccttggtcatgggagtggcacctgttaaggctcaatttgagggtgctgaaatgggtgtgcccgctgagaacgatggctgcaaatgtggaccaaactgctcctgcaacccctgcacttgcaagtg

SEQ ID NO: 73594 - DNA, 290 bp, Glycine max
  unsure (1)..(290): unsure at all n locations
acttgttcaaacactccanaacctacatttacttacaaattcaataaaactacaaggtcggcattctttataaataaaattttactcttaaaatcttttttttttacacaaaaaaatcattccttctctacatactaataattatattaaattactacaaacaactcacacatttattcaacttcaaacaatcaaccatacatcatttaccacaaacctcttctattccaaacattaatactttcaatataatctaataaatattaaaatgcattttccaaatttctttt

SEQ ID NO: 73595 - DNA, 420 bp, Glycine max
aggttcctatttaggaaccagtgttgaattgtagcgcaatatgttgtgcgtgcttaagacacgagtgtgaggtcgtgggtattgtataattcactagcagtgtctgtgtgctaaaatgattttaggggctggacctgaatcaggagggagaggccctgatagactcttcggagtgtacgccttgggggtcatcgggtttgagtgcttctttaagcctatgttgatcccatatggttggagcattctcgcaaaacatcgtgaccctgactggtctccctatgatcttacttagtgagagtgacctgacaaacccattgtgtggtgtgtcttgttatgtactcctaagcgccgcagggtggttattcactgacatggtaccacattgcatgtaggcttgagtcttagcataattgtctcatg

SEQ ID NO: 73596 - DNA, 256 bp, Glycine max
tcattgttattgaaatatatactatcaagttctctgctctacaatgattttaaattcctttcttcaattcctacgtatagaatctgatatactcaacagtttttaagccttgaaacccattaagcaccttttccttgttaagccaccgttaattccattcatatagatcatatacacagatcattctacccataactaaacacactatgagcattatttctccaactgacctaacccacctattcagttcctttct

SEQ ID NO: 73597 - DNA, 148 bp, Glycine max
gacaacatttttctctctccgcgtctttttagccacgatcggttcacgggtccctctcttcccttggtctggtctggttgctctggttggttcctaagaaaagaaaaaggcctaattggggtcccttatatttatttttctttactct

SEQ ID NO: 73598 - DNA, 77 bp, Glycine max
gtaaatcaaaattataagagagaaaatggtgcttttgtactacagattactataaataaaaaacttttatggtttcc

SEQ ID NO: 73599 - DNA, 342 bp, Glycine max
  unsure (1)..(342): unsure at all n locations
ctaagcttttcccattcatgtgtggtggttatngngataacattggagttagaaaccgtgcctataccgtcgcaacttcaattggaagaaaatgctataatcaatagtggatggtggaataaatcaaaatcagtagcttcgcgcaatatctgttcatggtatggtatgtccngcaacgtcgctggaaacgtaactagaatcaactatcccttttatacancctggattcgattagcaacactaaacctcttttgttttaaaaatttaaaatggcttgaggtcttaaacttgggactacaaaagactatcccatctgatattggtaaatctcctaaactcact

SEQ ID NO: 73600 - DNA, 277 bp, Glycine max
agggacttaagttagtaagatgtctcacgtgaggaacaaacttgtactaataaaagactatgataccggatttatcaaagaatcccacatgaatattcactaaagtaccataacatcgaagcttgcacaacgttccaactgatgtctggctcaaaaactcgtacttgtctttgagatccgaatataacgaatttcattaacaactcctaaggcgccttccaatatgatgagcttacactaatggctctccattaataggatatggagagactaaagt

SEQ ID NO: 73601 - DNA, 370 bp, Glycine max
cataactttatttatatctagtttcaaattacttggttagcacttaataatcttgagcccttcaaccaacatatttcattttatttagtttataggttagactgaaatgttatctttgtgtattcaaatacgtgaagctgacatctttcgacttttttttgcagatgatctttgtttaaaaatttattggaagtttgcctcttgattaacattttatttgtttaaaataatatcatctttaattattaatgttgctcttcttatccttttaatattgctttgtaaaacaatttttttggggataaatatgatatattaacttttttttgcttgattcacaaaattctgcccatacctaaatttgcaacta

SEQ ID NO: 73602 - DNA, 239 bp, Glycine max
acgcctacaaccactcatacgtacatttgctaaatgacgatatatgggtggtcttcagataccatgtccataccatactataccattcaattatactgttgtcagagcgttatctctgtattatcttgtcctctgtctagaactatcttgcaatcaacgttcctttatttacctctcaactatatttatactactaatatatttattcaattaatatataattaaaatcctcacattat

SEQ ID NO: 73603 - DNA, 154 bp, Glycine max
aaatttaaaaccatttttcataaatttttaatccatttccctataattttttcatatttcttttttttttttctaaacctatccatctcattaaaatattttatttaaaaccctaaaaaaaaaaccatatattcctaataaacccaaaatttaa

SEQ ID NO: 73604 - DNA, 268 bp, Glycine max
ccacgcgtagaagcacacgtacgggcagttgctagaagacgatagatgggtggacgccaggtgccatgtctataccatgctataccagacaattgtactgatgcgagagagatatgtctgtactgacttgttcactgtctagaactttgtggcgttgaacgtttcttaattgccttctggactattcttggactactaatggatatattcattccacatacagttattatgcccacattatagctcagtaccttgctcaagacactgt

SEQ ID NO: 73605 - DNA, 336 bp, Glycine max
gatagcaaatagcgggcccaaaaggggagctacctacccttcaaacctttcactcttctctcctttaacaatcactgcaataatattgcttaaagatattccgaaaccatggtttacgccaatcctatgattttagccgttgagaatactacgtaaccccgtctacttctgcagcttcttagcaccacgacctacaatctatctacaattgtcataagaaaaccaccgaatgttttccatcacatttcttacgaggctgcacacttcacttcaatgctttagatattacatgcttacctaaagacaggcgaaatacttctcattaccattaacaca

SEQ ID NO: 73606 - DNA, 180 bp, Glycine max
gctgattttaatacttcatatgcgagttcatagggtgatgatgtaattaatccagctcatttatcttaccaactgatagctatttaacacttaactaaactttgtgataatataaacgtctgcagcaagcttgacttgtaaaaatcattaaatcatgagatggattacgtcaagaatata

SEQ ID NO: 73607 - DNA, 219 bp, Glycine max
cgggaggatagtgagactgcatatggggttacatatggttaggatgtgattaatctaactgattcatatttcatataataaattcctcgtccacctgaataatatctgggtcattgttgacttgtggagtatcctggacatgtggagaatatttaacctgtaaatcctgcatattaaattaatacatgatgtctcatatgatctgattcttgcataata

SEQ ID NO: 73608 - DNA, 400 bp, Glycine max
  unsure (1)..(400): unsure at all n locations
gacacctttgttcactcttcttctcttgcggctagggttttagcgcagcttcttctagatttaaggaagatgggtaaggaaaaggttcacatcagtattgtggtcattggccatgtcgactctgggaaatccactaccactggtcacctgatttacaagcttggaggcattgacaagcgtgttattgagaggtttgagaaggaagctgctgagatgaacaagaggtctttcaagtatgcctgggtgctggacaaacttaaggctgagcgtgaaagaggaatcaccattgatattgctttgtggaagtttgaaacaacaaagtattattgcacagttattgatgcgcctggacatatggatttcattaagaatatgattactgggacatnccaagctgact

SEQ ID NO: 73609 - DNA, 419 bp, Glycine max
gccatcggacttgattatctctggatgaccataagttgtctctgtgtgccaatgaactcgcttgtctctggttggcaaaggggagattgcaatagtcttggtcgaaagacattgagtcttcaacaaagggagcagatgacgaagggaagactttaatagtctcggtcgaaagacattgaagttttcgacaaagggagcagatgaccatatttgtctttgcgtgccattggacttgattgtctctggatgacgaaggcgagactttaatagtctcagtcgaaagacattaagtctttgacaaagggagcagatgaccatatttgtctctgcatgccaacggacttgcttgtctttggatggcaaaggagactgtaatagcctcgaacaaaagacattgaagtctttgaaaagggggtaga

SEQ ID NO: 73610 - DNA, 307 bp, Glycine max
aggcgttcgaacacgtcttataggactatatatatatatatatctaagactatcttagacaacgtggaatcatacttactacaaaatactgtccagttcaaaatactgagttatatatgtatttgaatgatgatattgaacattaccactctcagtttgacattctgaattgatcaaaattgaaagcatataaatatcatattttttaatttgttatctagagatatctcattagtcattcttgtttctactgtataattttactgctctatttcatacaaattgttaattactttcaagttgaaat

SEQ ID NO: 73611 - DNA, 427 bp, Glycine max
  unsure (1)..(427): unsure at all n locations
gctcttgggcaagtagtgtgcctcttcttcgcagagtccgcgactcataaattctaaggggttccccgaaatgggaccgcctgtatcggaaaagatcacagaaagggggcgccaggcggaaagaaaagggtgcggcgtgccccacaagaagaaagccccggtttcaaaggtgcccgtcaaagcccggtcttctcaattctcccgtctggaaagaatatggcccgtnntatttgaagaaaagggaaggtaccgcctcagannngtgtcggtacccggtggcttcccgtatacccttggcttgcagttcttcgagataccctnnagctgccgaaggtggctttgagnnttggctgggaaatgcccagcacgttgaccaacccaagaagaaccagggattatntctcaaagaacacgttgcccttttggc

SEQ ID NO: 73612 - DNA, 368 bp, Glycine max
tactttagaagacgtgctgcagcctgcgggttttctcattgaaatttatgatattcttggtaacctcaagaataaaaactcgtgaatgaggaagagaacaccatcatcttttcttctttttttttgacaatgaaccggcgtcattgaaaaaagaaagatgatgaactaaagcttaaacttattcttaaaaagggaaataaagttgaaacctgagaattgagatgatgaaaaattacattatttggctgatcggtaagaagctatggaaattacaattaccgatacagagcacttttcaaattaaaaaagaacgttacagcatagtgaagttcaactattaccgttcatgtattgcaatataatgaact

SEQ ID NO: 73613 - DNA, 387 bp, Glycine max
catcctcaccacttgtatttttgaaatctttcatcttgttcttctctttattgtaaagaaggcttcctggtacggaaagctaaatcctctgttggatcttccctgtaggtacctgatgtaaatatatttttatctatttaatgatgttttgtgtgttctctatgctatctgcttttcattccaatattcctttaccttgatcacgtagatgcatgctttgttagggtcattcaacagtggaaactggtctgactctaaagtccttgatagtacagggctaagttgtcgtactatcatgaggaatcggggtgcgatagcttagttgtgtatgactgtcttaatgcggtcctggttgagcttagtcttacaagaggaatttacggacgc

SEQ ID NO: 73614 - DNA, 381 bp, Glycine max
agctggcatagggcgaacccaaaactagagctgcctgtgataataacctaatactcggatgtcctattacaatcacggtattaatatactatagagacagtctaaaaccatggcacacgctatcactatgagaatcggaacgggaatactaggaaaactggacaacaaaaggagtcaactagcactcagtctcaacataggagacagtgcatctgacgacgatcacggaaacccagccatgtcttcactacgctggcgcaacttttacactaacacggcttactgcttaggtctacatagttacgtctgtaagacatttatgactggatgcctaattctttttccagatgctgtcaccttattcattacatggtggtatat

SEQ ID NO: 73615 - DNA, 450 bp, Glycine max
cggtccggaattcccgggtcgacagccagccggcctcgttgccgccgacgatcccgtagacggccagcatcagcgacccggtcacggtgatcgcgcccgcgacgtcgagccgcgcggcgccggccggcgcgcgcatgcgcggcagcagcgcggcgcacatcgcgtagaccgcgatgccgatcggcaggttgacgaggaagatccagtgccacgacagcgagctcgtcagcagcccgccgagcagcacgccgatgctgtcgccgcctgtgcagacgaaaccgtatacgcccatcgcgcgcgcccgttcgccgggttcggtgaacaggttcatgatcagcgacagcgagacggtcgacacgaccgcgccgtcgagcccctgtaccgcgcgcgcggcgatcagcatcgtctgcgattgtgcgaggccgcatgccaacgacacgagcgtgaaca

SEQ ID NO: 73616 - DNA, 428 bp, Glycine max
agaagggtctgaacagtataataactcttgaaaaatctattttggagtaccagaggtatgtggcggccttttaagtgttcatatttgtatgtgtttcttcaaccggcacttggttttgtgaaattagtttttttactctatgtattcactgtgcagataccctcataagatgcatcaatcatttagttttggactccgctgattcttctgaagtaccaggcactattcaaatgcatcttttaatttgtacttttagtctatttgattattaaagaaccagattctgaaacttgtatttttttccttcttatcttagtagattttccccgacatgtttttaaaatcttgttatacctcattcctctatggaagaatattgaggaacgggtgaattttggggcaaagaaaactttattataataactttt

SEQ ID NO: 73617 - DNA, 279 bp, Glycine max
cgacataacaaaagtacactgtcgctctaactgcgcgttaatctaatattcggaggtactacttcagttctcctactctcttctgcttcgcctaactattttcatattctaacacatgatgaacctcgggttaccgaacaacctacagctcttttacgcaagactggttattcgcatatggcttaacatccctagtatccagcctcattacaccccaaacccttatcacgattatgacgcacaccttgaaagtgattcagataccgtttaatgatcaaa

SEQ ID NO: 73618 - DNA, 279 bp, Glycine max
gccacacgaccacacaactgtcaaaatacaacacaaaatgcagcttcaatgggctaaattgagaatcaagagctaatactataatacactgactgaataaactatccctaatcttacatataatactatctccataccactgcctatattccattactattgctttaacagatttctcatccagaaactaatatcttgactaacaaacctaggatgataatacttcaattcatgcaaatatccaatagaataacaccttaaaaggatctgaccaagtta

SEQ ID NO: 73619 - DNA, 250 bp, Glycine max
acccaaaggtgcactcatgctgatgctaagaatatatttatagagtacattattgtataataggactctctctaggtttcatcctaacttactcgcgccttcttctgtcaaatttttctatagtctatacctatatttattttattgactttcatattacatcctttatactttgaaaaccttctcaatacttaacttatttaatcgtcatcaaatacttttttatataattaatactattacttacata

SEQ ID NO: 73620 - DNA, 187 bp, Glycine max
agatgtcagaacactacataacgacacatctaataacattccacatagcggtatttgggacatagtgcatcaccttcatacttacattcattatcccatgtttaaactaaacaaatatatattattccactaatcattatacctttcctctataatactacatctaattctatttctcactatattt

SEQ ID NO: 73621 - DNA, 295 bp, Glycine max
gatattaacagccttaaaacattggatttagggtgggatcttataataagatgaaaattgcgcttctcagattgacacataagaatgtttaaccaatagtatgaatggaggtacaagtccagcttaagttgaactttattaagggaaaaaacacctatataaccatcatgacctcatgttgaacagcgtagctgttagtcctttactatgcagggcaattactactagcgctgacatcattattggactagcattgaaatagtcaccaatttgaatcagcttgtgcgactgaaca

SEQ ID NO: 73622 - DNA, 397 bp, Glycine max
ttatcaattataaggcttggttcaagtaaagcgtaggctttgtatatcgaaggaatcgattaccatttatcgtaattgattacaaagcatctaaaacacttagattgcttgttggacattgaaataattgattaccacatattgtaatcgattaccacgattctaaaaatgcagaataatggtatttaattaatcgattacagttacttgtaattgattaaatctgtttttttttctactaaatctataaatacctcacttgttctatctcttatatgactttctgcgaaactatcacttcataatatttctaatagtcatctaaagaggttttgatgcattttccctcaagagattgactcagcataaatcttggaatcttcatcatgggttgatc

SEQ ID NO: 73623 - DNA, 348 bp, Glycine max
gacaagtgagtttgttgatcgagataactagaaacagtgtgatgaaaatgaaggtccttgttttcttcgttgctacaattttggtagcatggcaatgccatgcgtacgatatgttccctctccgaatgaacactggctatggtgcccgtactccggaggtgaaatgcgcaagttggaggcttgctgtggaagcacacaacatctttggctttgagaccattcctgaagagtgcgttgaagcaacaaaggaatacatccatggcgaacaatatagatcagactccaaaacagttaaccaacaagcttacttttatgccagagacctcgaagtccatcccaaggacacat

SEQ ID NO: 73624 - DNA, 52 bp, Glycine max
  unsure (1)..(52): unsure at all n locations
tgcacgtacctcggtccgnngaattcctcgggtcggacccacagccgtccgt

SEQ ID NO: 73625 - DNA, 174 bp, Glycine max
aaattaaagtccttgttttcttcgttgcttcaattttggtagcatggcaatgccatgcctacgatatgttccctctccgaatgaacacttgctatggtgcccgtacttcggaagttaaattctcaagttggaagctttgctgtgaagcacacaacatctttggcttttagacca

SEQ ID NO: 73626 - DNA, 131 bp, Glycine max
gactctattgtaagcgagtctacggtaataccagaagcacaggtagatatatgggcatgatgagaatgactgcacttacatggacctagctaaagattgacctgcatgctatagcttagagaatcagtaga

SEQ ID NO: 73627 - DNA, 188 bp, Glycine max
gaccacctaagggtacctttactataccttgcatgcggggtttttggggggctatggatttcattggctatcatctccttcaaggatcttaaaacctcaataatcgatttctctaatccggattaatattgtgccataatctatatttacaatatcgtacttttgactgaacctatccaccaacatta

SEQ ID NO: 73628 - DNA, 200 bp, Glycine max
ctcgattacttaacgactacctcatcatacacatgggtggccaacgacacttgctgatgctcacgtaaacaagtacgatgaagcagacggcatgattcatcgatgccacaaaagccggacagcatttgagttgtaagcacggatttggggatagatgtcggtaaaccattgttagattaacggatctcaataaggattgg

SEQ ID NO: 73629 - DNA, 98 bp, Glycine max
ccatgcatgctttatatctaagagagactatttgcacagaaagttttattgtataactataagattgaacttatgaatgttaatattacatcaaaatt

SEQ ID NO: 73630 - DNA, 371 bp, Glycine max
ggttctagtgtatgtgattgttgtgactcgttcgtcttcgtcgttatcttgttctcttggtgtttgcgtgttcgttttttctctcacctgaaaatgtcttgctgcggtggtaactgtggttgcggaagctcctgcatgtgcagcaactgctgcggacgctgcaagatgttcccagacttgagctacaccgagtcaaccaccaccgagaccttggtcatggtagtgtcaccagttaaggctcaattcgagagtgctgaaatgggtgttcccgctgagaacgatggctgcaaatgtggagctaactgtacctgcaacccctgcacttgcaagtgaggtgttggagagctaaagcttcaagcagaaatggccct

SEQ ID NO: 73631 - DNA, 427 bp, Glycine max
ggtgtgcttctcgtgccttctttcactttataacgcactctcaccccttccctcatgtgatttcttcttccccttctgcacttcttcatctccttcttcactcacacatcaaaataaccaaattctcaaaaattaccctcaaaatatcaaccacagcactaaatctttgatgatgccccctcagcaagaaacctctattacatcaaacattccggccatccccaaccggccggaaaacagctacgtccatgccgaaccaccgagctccgccaccaacgacattaaacccactttcacgagcaatgacattcacagcaataattcttctcagcaccaccaagcagctccttcagcacccagattttctgttcttcagcaatccttgcgccctgttaccctcaaatttgaggatgtttcctacagcata

SEQ ID NO: 73632 - DNA, 308 bp, Glycine max
agtctttcttggtgtgatattatgcagtttgggaggatgaatgtccctaatagtgatcataatgcgccaactgatgagaagactgagctgctgtagacactgcaatggacgtgaatggtcctcatgagagtaatccagattactgtgttcttgccggtagctgatgcaccatcggaggctactgtcgttgtggtggccaccatttagcatgattgtcgatgttcatgagtaactgatgcataagatcaactatcattacaccaatggctaatgcttgaatgcctaaaaattacactattactactcct

SEQ ID NO: 73633 - DNA, 315 bp, Glycine max
aggcgtgcgatgacagcagacggcggaaggcactagtgcccatcctacactttatacttcaatgtactgcgtggcagcatgtaacatcaacaatcccgagggctcttggacatcatcttctggactaccacacatggatggccataacattaatgcataccatcatcaccccatccacgtggctaaatgtaactagcatgccccttatctagataccgatataacatcgaacattcggaacatgctcaaccggactgaaagcagctcacagcatgccagtccacctagctcgacctgcatctgcatcataacaag

SEQ ID NO: 73634 - DNA, 449 bp, Glycine max
attatggtttattaatgccactagtgactgtgcattagtgcttcttgttgttgaaacagctttgtctttcgaggtcatacttattacttgggggagttaatggcgtagcattgaggtaatttccttcgtccattttatgtgtagttacaattataaatgtgtctgtttccgcgtgtttaatagatatctagagtttttttcgtaaaaaacaaaattttcgtgcataaatatgtattttgacatttttgaaactaaattttaaattttaatcttttagtaacatttatcacgaaattaattgtcaacataagcatgctgaatagattggaaaaaaatgttaataagatctcattattgaactaaaatgtctctaattttttgttggacgaaaatgtcaataattttgtttggacaaaaatatcagtcatttttaatttggatcaaaatgt

SEQ ID NO: 73635 - DNA, 431 bp, Glycine max
catgccaccactcctattctactattttttgtgcctgtggttcaataagcattagtcaaaattctaatccccctcagcctaaatgtaacctcctaagttcctcattcacactagtttcctatctcaataatttgttttcttttaaaattcaacaattgatttaactctcattataggtgttgcccatgcttttataatcttgtgaaatatgttgagttgcaggattatcacagtcaacaactattatggggcaaattattattgactttttgggagttttcaatctaataaacatttgtcaggcatgtggcgtggttttatgttgcataagcaagattgagagattttgtgccttcctatttttaagtattgagtctcaacatgtcaatgttattgaaacttttctaaattgatggcttgagaagtagtat

SEQ ID NO: 73636 - DNA, 353 bp, Glycine max
tcatccacaactattaaatttccatacacactaagatccatttggaaaattagtatctatacaaatccacataaacattaattcccaatgccccaccccattaatactaaatatcacttacactttttacaggcactaactcattaaactatatgatactcctttttatcctaactgcactctttcataatgtaattccacccactcatcaatctcattatactctcttaactttcccttccttacattcctcctcttattctatattttctacttacctcaaattattctttaaccctaataaaatttctttttaaatcttcaaatacaaaaatcctctatacacttcaatt

SEQ ID NO: 73637 - DNA, 452 bp, Glycine max
aggcgtgcgaacacgtccgagaggaccacacaagggaagtgttgttacggggtgagttgtaaaatgaggggaattgtgctttggttagcttgttatacttatgttatatatatgtgcttttgaatatctatgcatgtttaggaatgtgatatacttactccatgtgtgatgtttgtgtttggatcctatgatgatatcggaccttgttttcatgagatcaaatgatgagatatatgactataaacaaccttatgctaaatgacgattaacactatactctgatatgatatgacattagagcttatgatttgacattgattttatcatttgctattataacatatgtcaatgaacatgatttatttatatatatctcattgaaatttcaattgtaatactagcaagtttcacctcttgaaggtctcaaagaagttgttaccctttcgtacatg

SEQ ID NO: 73638 - DNA, 301 bp, Glycine max
atcgatttgcattatcgacatatactgatacactcagaggatcatccttccagggtgaaccactaccttctcctatacttatctctccttacttcaacactcattatatacttcactcatgccattcctttcaataaacaattgtacacgctcatctccatcactataacattaatttcaccaacatcacttcctacaactctatataaaccggttattattctctttataacattctccatcttacctaataattgtactttcattaatccaattcttccttatgtcctatcttcttatc

SEQ ID NO: 73639 - DNA, 385 bp, Glycine max
tccatcgcctcctcctccacgttacagcagaagaggaggagggaggagtcccagccctaggggccgctatcctccccgtccccgacaacaagatctccctaccagccttcttgttcgtaaccttcgtcatgactgtaggtacacatggactcacactcgcctctctttcccttccctttacttgtaccttatctgtatatatcattccaacgaacgagtgagcaattttgcaggcctgaggatcttcgcagaccttttggtcaatttggtcctctcaaggacatttaccttcctaaggattactacactgggtgagttaccatactcccttcccttctttccttttcactcctccatgtatcatgcattctctatcatattttta

SEQ ID NO: 73640 - DNA, 338 bp, Glycine max
taccgtcccaatgaccgggtctaaccacacgttcctacctgttctaaaaaaccacatatgggtcacgccaagagtatctccacgttctgtaacattgtaaactatcgcattcacaagttactgttctatatcctccatataccatacaacatttacacaaccctcaatacatgcttcaagcttttgagcgatataaaactttctgattcctataacatcattcttatttctccacacttaattattttgaaagactcattatccattccacagtttgtcaacaaaactggcttgactctacccctttgtatatatatatagagtattcatctactatt

SEQ ID NO: 73641 - DNA, 387 bp, Glycine max
ctacggggggctgctgggtacattactactagctagctttactgattgctatgaaccctatactgcttgctccttgctccttcgttagaaccctccctatctgcttgctgcttcgtatgaaccctacctctatttgacattgaagccctaccggttctttcattgaagcttcatcacttgatcttccattgaagctactaccccttcttgcattgcagctcctttacctcttcgactttatcgatccaacttctggatcagtgtattcaagtttgacaatttactggctctgaaactattagatggggaattgtttgcacatgatcaatcaggctctataagattgcgaattcatcatacgctcagttctaacgtgactgggaagag

SEQ ID NO: 73642 - DNA, 431 bp, Glycine max
agggagtatttgatttgcacaatcaaataacattagtcctataacttcttcttcactaattaattaattctttttttttgagaaagtaggataattacaaatcaatttgagcacaaatagaatgtaaaatacatctggatccatggaggacaatgtatatattggaagtgcactagctctctttgatttgtactgtacttaggatttgtagaagccatgaagtgctgtaaggtgactagtgaatttgatttgaatggcaggtacagtgaattatccactattaaccgacgccattaatcaggccaacaagagatctttatgcacgtacactccacatctggatttaatcaatttctgctttgtaacttctatgttctacacttgacacgaaattttccttttggttcccttctaaatgtgtttttgattct

SEQ ID NO: 73643 - DNA, 424 bp, Glycine max
gaaggtgcaagagtttgttgtgagctataagctaggttatcgtgaggagaatatgaagttgcttgttttctttgttgctgcagtagttttggtagcatggccatgccatggcgcaggctaccaaaggttccctctccgaatgaaaactggctatggtgagcgttcttcggaggtaaaatgcgcaagttttaggcttgctgtggaagcacacaacatccgagcctttaaaaccattcctgaagagtgcgttgaaccaacaaaggactacattaatggcgaacaatttagatcagactctaaaacagttaaccaacaagctttcttttatgctagtgaacgcgaagtccatcacaacgacatatttatattcggcatagataacaccgtactctctaatatcccatactatgaaaaacatggatat

SEQ ID NO: 73644 - DNA, 400 bp, Glycine max
ccacgcctacccacgcttccatacgactacaaaaagaccacagcataatgatactagcttcactatcataacactgggttttttaatacatacgtaatcaatctcatacgaaaccaaaggcactactaaacttcttcttcataacaatcactgcaacgctctatttacatacgtcactctgaaccagaacaattcttaaaacacatatcttaagactacctaaatctctcaaattcgatccaatctttctatataaaattactaagccatgataacatttcacctacaactcatcactacctgatgccattcaagaatatgcctaagctttttctcaataactttcaacaatttattactctcaactctttccaaactacacaacatgtgtttattcaaa

SEQ ID NO: 73645 - DNA, 433 bp, Glycine max
tctgacatcatagaccatgtgtcttccaattcgttggatagatactgatttcatgttaaaaatattgttaaaatttagtatgcatttcgatcaatttatcttaggagtaaaaaaagtcagttttaactcttatgttttataaactaattctcttaaaaaatctaaacaggtacacttcactttaatttttttattttacactttttaagaacaaagtaatctgcaaaagaattaaataatccaattacggttggtgagtcaaatcggtatgcttttcattcttctgtctttccgttctgcatatacgaaagaaatatgttttcggcatattattagacgttgctaacaagtttcagcaactcacggtattgcttttgtcactgtcatatgaaagtggaatcggaaagaatgtttgaacaaaaaaatgattact

SEQ ID NO: 73646 - DNA, 430 bp, Glycine max
gtgatggctttatttagataccatttctcagtttgattagaaaataaaattttccaacgctactcctaaaacttaccatgcaaatgggtgatcaaaccacaagcaataatataaaacacaagaaaggataatacaaatataatgttattaaatagataggaagagaagttacatcaagagtagttggttgtcaagttcccgacaaaggggtttagcctctcattatcatggagactttataattgtaagaggaaaatatttaataaaggaggaaaagataagaaaggaaatggaaggaaggaatgactctcattacttgcttctccttcttctaatctttgccttctataaggaattatattctcttggaatttttgtgggtctttttcttcttctttcttcttcttttataggtgcagattaacgggct

SEQ ID NO: 73647 - DNA, 321 bp, Glycine max
  unsure (1)..(321): unsure at all n locations
actactctacttcattctaacttcaaagacccacttaaaacttcggtattcatctacaacacatccaataacacnttattcatattctactacctctttattacatcattttcacttataacaacttctccatcaaatcactacttactaaactcaattccaaacttttctattaaataccctacaactttttactttttatttctaattcaaaacatattttatcccacatactgctcttattctaactcaatccaaactcattaaatatctaactaattaaacttatatttactaaactaatctcatcttttcttcaat

SEQ ID NO: 73648 - DNA, 438 bp, Glycine max
ggtgtgattgtttgttgttgtaactcgttcttcttgttttgttgttctgtgtttgtgtttgttttttctctcacctgaaaatgtcttgctgcggtggtaactgtggttgcggaagctcctgcaagtgcggcaacggctgccgaggctgcaagatgtacccagacttgagctacactgagtcaaccaccaccgagaccttggtcatgggagtggcacctgttaaggctcaatttgagggtgctgaaatgggtgtgcccgctgagaacgatggctgcaaatgtggaccaaactgctcctgcaacccctgcacttgcaagtgaagtgttgggagagcaagcttcaagcagagatagcccttaattaggaataatgataaactattaatgtgtagctaaaaacttatgtattatgtctgtgatggttttcgtgcactctggt

SEQ ID NO: 73649 - DNA, 435 bp, Glycine max
gatagaggcgtatctagtgattccctaagattcctgaggcttttcctttggttgctctgctagggtttccaagcgttaacgagaaggagaagagattggagccttagtttcactatttttgtgtgaggggacatttctctctctacagttattattttgtaaattccaatggttggaatgtaagggattgaattccaaagttggtgtccaaatttcaggatgatccaacggttaatgagtccaggattatagttttaccaggacaaatttgggtgtatgcagaaaaaattaaagggttttggaagaggaagaagggataacaaatttatgaagaagaagaaacatagaaacgcatcgtaaatgtaaaaactaacctaatatgtctctatttatagctgggatactctgagtctattatttactcaatttttcttt

SEQ ID NO: 73650 - DNA, 293 bp, Glycine max
gatgaatgatgatagagatcgaaccatagattgctgttgaatagcttacaatggatcgacaatatgatgtaccggaaaacacccagtcttgagctaagagtgaataaacagcaaagcgttactgttcaaaatgaactgaattgaacgcttgactccagacggagatgccttctgctgatatggacgccggaagcactgtcatgagactgctgaaccacacacaaatatgcatgcaacactattcttacctgtcacacactcttctcagtgactagaagatggatggctaaatt

SEQ ID NO: 73651 - DNA, 356 bp, Glycine max
ggtgacaaaaaaaagaaggtttgttcaatcttttggaggcctgagtgtcatctccaatccatagcttgcaattcccggcaagcacagtgattggtgtccagaaaggcttcagcttgctcctcccttctcaacttcaacaatttcgctgtaacacttcttctctcattctcgcagtttcacatttttacaacatttctccaaattttatgttttagtttatgggatatggagattgtgttcacatgtgatttgggtctgattttgattttgcgtttgtggggttatggttcccaggagaacatgttttgtggtgcactaatgttgttcgatgaaatgccccactgtcgtgatatttt

SEQ ID NO: 73652 - DNA, 219 bp, Glycine max
tgtacacaccctttatctgctcatttaatctctgcttttgttttttttactcgcatctttaccgctacactttccatctccctatcaccctctcctttctctttctttcctttctttctttccacgttctccatcttttcccttcaatctctaaatctgtggcttcctttaaggttcctatttaaagctttactttacctttaccccaaaaaaacttat

SEQ ID NO: 73653 - DNA, 189 bp, Glycine max
ttctactctttgaaagaatatgatttaggacattctggagattatagattaacagctgatattgatcgagaaagattccctgggcctcaaggttatgagccacatgatcacatgcgggagccatatgcttgggagccgcataagaagccctcatcccatttaagcaagacgactcatcgcagatctgac

SEQ ID NO: 73654 - DNA, 296 bp, Glycine max
  unsure (1)..(296): unsure at all n locations
agaaggggataggagcnacgcactagcacaagnncgaccaggcgaacccgggcgcggaggaagacncnccctcaaacaccagggaaaaccagcccagaagcccgcgacgacaaaggncacccagcagagagggccaaaaccggnggaaggaccgcngcggccaagaaaanaggagnggaagcangngagaggacaacgacaaagggcgnngccgngaacnnggngacaaaaangacgggnacgaagcannngggcagngccaaaacngccaacacggncaccaacggcaggggaac

SEQ ID NO: 73655 - DNA, 309 bp, Glycine max
agatttaagaccgttaaacaattagaatgtattgggatggttaacaaatatttctagtatcaaaattctaaagatggaaagaataatgtgaggttcatcggaaaccaaacttttacacgacctgtttttgtacacattcagcgctatactcaattgcttaggactatttcaccaaactgatacactctgtatccttattcataatcatggctcaaacgttatctagcatactaaatagattgcatatcatctttgtcgccccctcattcagactaacccttacaatgatttaataacctttgacattat

SEQ ID NO: 73656 - DNA, 407 bp, Glycine max
  unsure (1)..(407): unsure at all n locations
cccggtcgaccgagcgtccgacggatcgacaagagacctagcgcatttcagacatcacgggtgatgacaacatgttcggttctcttacatcttaatggggtagcaaccttnaacatggaagcctacatgcaatgactatgtcaaactccgtacattattcatcaacgttgcaggacaggtacatcacagaacacgcatctcgggctacaacagttaaccatgatactacagtcatcaaccagtgaaccaaacaccctattttgctacatactcataagctgaactggagaatgatcagattccaccatgcaaagttaccctacaatatgaagaggcctcgacaacaggctgccacggctgtgttgctgatccaggtcaaacatgccaagttgctataagctttctca

SEQ ID NO: 73657 - DNA, 393 bp, Glycine max
ggttgtagagtgtgattgtttgttgatgtaactcgttcttcttcttttgttggtctgtgtttgtgtttgttttttctctcacctgaaaatgtcttgctgcggtggtaactgtggttgcggaagctcctgcaagtgcggcaacggctgcggaggctgcaagatgtacccagacttgagctacactgagtcaaccaccaccgagaccttggtcatgggagtggcacctgttaaggctcaatttgagggtgctgaaatgggtgtgcccgctgagaacgatggctgcaaatgtggaccaaactgctcctgcaacccctgcacttgcaagtgaggtgttgggagagcaagcttcaagcagagatagcccttaattaggaataatgataaactattaat

SEQ ID NO: 73658 - DNA, 440 bp, Glycine max
gtggtttaccatgtatctactagcatcaaccaggcgatggttatctcggtgacaatgggtgcaccaaaaacaacctttgggttttgatggccttatgcgagagtgtcaacacatattgctctgggaagccagagcaaatgcatcacctatggtagatttaggaatgtcagatgtgggctttgacgaaatctaaagtaatgcaacaaatgctgattgcattgctggtgccataggtgacccaagaatttggtctcatgtggtaaaatgttcccgaggcagattataaagggacagagtcataaaggatgtgccatggttcttgagttccttcttagccttggtggcgatagaggcagcatggggtagaagctcattgaaatcatggagagagctgcatgaacttgcccaaggtaggcagtcatgggcatgccaaattgcta

SEQ ID NO: 73659 - DNA, 380 bp, Glycine max
  unsure (1)..(380): unsure at all n locations
cggaanncccggggcgacccacgcgnccgcccacgcgcgcgaacaccacgagaagacgacagagggggcgagacaacanaaagaggcgagacccaaggcgagggcggaggaaacggcccacccaaaccccgaacaagacgacgccgagacccgagacgcgcncagacgaaccacaaaggaggaaagaacgggaccgaaacacacacagccaangccaaacaagccgagagcaccaaggacaccgccaccaagacaacaaaacccgccagaaaggcgaaagccgcgaaagaaccgaacaagccaaaacggcccccaagngcnnacnacaannncagggaagccaagnaaagaagcaacacaacgagncacaagacaaccga

SEQ ID NO: 73660 - DNA, 443 bp, Glycine max
ttaagacgcataaggagattcttacagataaagcatttatgatcacagagaaactgtttaaaagattgcccgctacttcctcaatcactcttattcttcctcaactacatctacaacaacataatcatgaaccaattcttgttgctaccaactacatcatccctgaatcctatgcaataccagctccaaaaccaatcctcaaaaatgccctcaagcgctacaaccctactcaacccgacacccaatctgcagcacctaacaaaagctagaagttcaaaaccacaactgatgcttctgaagcacaagttattgatgccatgcacaatataactttacacattagaaaccctgcaaaattcatcaaggcttcaaagcttgctatacagctgattcacgcaagaaatgtaaaatcacaaattagtgattaatttttttgccatatt

SEQ ID NO: 73661 - DNA, 253 bp, Glycine max
ctattcttctttattactcactcacaagcagtacataaaaaaaattcttagctcttaatcttcttaacactaccattcactactctaacaactccacaatacttctctattacataacctactcaccataactctatttctcacactatctctaacttcactccaccaaccatctcttcttcaaacacacactcacacaactctctacacattccattatcccccatctaccatactctttttaacctacacc

SEQ ID NO: 73662 - DNA, 252 bp, Glycine max
  unsure (1)..(252): unsure at all n locations
gagcgccgaaaaaggcaggcaaaaggggggggcagagancacaacggggcgcaccagcacaagacnagaggaccacaccaagcgagcaacagcaggccaagggaaggagcgaagagacncggagccgcaagacaacgagaaacgaacgcgacagcngccacaggagacgaaccaccgaggggacagaagagcaggagaggagccacaggaanaacaagcggaacaagcgccaaaccggcagcaggagaaacc

SEQ ID NO: 73663 - DNA, 53 bp, Glycine max
gagacctcaggtcaggcggggctacccgctgagtgtaagcatatcaataagcg

SEQ ID NO: 73664 - DNA, 267 bp, Glycine max
ttttaaaaacaattttacacttaatcttttccaattctaaattcttcaataactttcctaactcacactatttctccatcaaaatcctttaccttaaacatttccttcccctcaactttatttaacatctcattaaataaatatcaaccattaattttattaatcaccccatcttttttacaatactttattatattatttttccatccatacaaatatttacactttttctttatttttttatttattacaactattttacaaaat

SEQ ID NO: 73665 - DNA, 196 bp, Glycine max
  unsure (1)..(196): unsure at all n locations
ggagcacgcaaccgaaccaggcaagaagggaaaccacagcgcaggaaaaggcacaagcgagggaaccgaagcagaaagaggagggacagcnccncgagcgcaccaaggcnncgnnacaccggaacgacagcgagaacagagccaaacnccnnncgcagcnaaaggggggacagacaggnngcagaagccagccacc

SEQ ID NO: 73666 - DNA, 373 bp, Glycine max
ggagtctttatgctttctttcaatatcgagaatccattttgtaagtacaatgtttttcctaatgatatgatcgaggcttcacaccagtaatgtggacttatcatttactaaaagaattaggattccagacaaggagaaattaccaccatatacatcttgtgtaacacccaatttttgcgtaatataaattaaaaaagattctatttaaaaataaatagagttttaggaaaataatgagattttcgtaattaaataaataagaaaaaataattttattaattaaaataatgattttaaagtaaataaaataattatatgttcttataaaataaaatgaatatttaatctattcatttgattgggagtaaaatat

SEQ ID NO: 73667 - DNA, 201 bp, Glycine max
  unsure (1)..(201): unsure at all n locations
nnccacctcaagngaaggggcaagaaaacangccccagaggagaaggagcccagcgcaaaagaaagacacaagcccacgggaaaaacnccaacccgngagaaggggcnagagaaccacanccggagaacacaggnaaagcacggggaaaacaaaaaacacacagggcaagncacgccaagggaggagggacgcgggaccca

SEQ ID NO: 73668 - DNA, 200 bp, Glycine max
atatcaatgatgatcatgtgtggctatttttaactagaggattaactgctatcttaatttactttaaaatggactcaaataatcaaattttaattgtcattcatcctactgatcatttgtttaatcatcaccaatgtctatcacttataacaaatcttatttcatttgattttaaacatttcctattttatcattaccat

SEQ ID NO: 73669 - DNA, 232 bp, Glycine max
  unsure (1)..(232): unsure at all n locations
ggcgcanagaagggncgaaagggcngaaagagaacgcgggganaggcggaacgaaaccgggggggaccggaaacaaaagaacaangaaccggncaaagcaaaggcaananaacaagaggaccacggaaacaaaaaaaaagaagggaagagaaggcgaaangagagacangnngngncaccacagagaaaacgcgagacgggggcaaagaaagaaagcgagacancgcagcaa

SEQ ID NO: 73670 - DNA, 324 bp, Glycine max
  unsure (1)..(324): unsure at all n locations
cggaagacccgggncgacccacgcgnccggacgggagaagacaaacgacgggaggcggaaggagggagggaaccaagcagcaggaggggggggcggcgaaggaagagggaagggaccaanagaagacacaggcagggaggaggcacanaggaaaacagacacgaacgagggacanggcgcaagacacaaaggccaggagccaaanacaggcaaggaggaccgacccanagccagggcgaccgaaacaaaagagggggagaaggacacaggaggaaaccagagcagaaaaggagaacgaagacgaccacgcaagcgacaccagag

SEQ ID NO: 73671 - DNA, 369 bp, Glycine max
  unsure (1)..(369): unsure at all n locations
gagaagagaacgcggaagaagaagaagaaggaacggacgcaggaanaaaccggaccgagcancgaaacgggagcaagagcgaagaagaaaagcgaagagngcggggagaagcagcagccacagcagagagaaggagaaggagaagcagagagagagccgcacgncgcngaaacccnggcacgcgcaccaaaacgacgccgcagcngagcggaagcnccaccaggaggagcccncgcacgacaaggccagagacnacgacaaccgcacgccgcnccacgnggcgncgcaccacggcaggaacgacgncgccaccaggcgcaaacgaggcggcgccgacgncaacgcgcaagaacgcgggaaaaacacccc

SEQ ID NO: 73672 - DNA, 344 bp, Glycine max
  unsure (1)..(344): unsure at all n locations
gaganaccgacagnggcagagagagaaagacgaggggagggggagagaagctctcgggncagccctaanggccnacgctggcaaccgcngaaacngnaggcgccagncgcgcaaagaaacagagngngccnaagaaanagcaagagcggagagggaccggaaagaagaacagnangggngaggaagaaccagcgaacgaaggcncgaagagcgacncagangagaagagcnngcaggagaacacccgggaagaaannaccgagaaaaaggacccggaaaccgaaggaggaaaagnccnggagaacaaaggaaacaaagagnngaaagaaaanannggaaaagaa

SEQ ID NO: 73673 - DNA, 190 bp, Glycine max
gccttacggccagggcctgggagagaaaaaccatgaccgggtcagcgacgcggtcgggtcagccctagtggccttcgatggcatcctctataactggacgctccaggtgcacaaccaatcagagggtgctggcgagaaagctaggtcgtgtacaaaccgtgcataatatcacgctgggtgcacaagaacc

SEQ ID NO: 73674 - DNA, 250 bp, Glycine max
taaggttctggttctatgtttcataatgtgttcaagatgtacataatcattgttagtttaaattgtttgttttaccccgttttgtggtttgcattaattcttttgttcattttacatttttttttgcttattttaagttttgtttttaataataatcttaatttgctttttatttatataaattttacttatattattttttattgaaaatctttttacatttaatggtttgaacttttattatttaatt

SEQ ID NO: 73675 - DNA, 412 bp, Glycine max
ggcacaagtgagtttgttgatcgagataactagggacagtgtgatgaaaatgaaggtccttgttttcttcgttgctacaattttggtagcatggcaatgccatgcgtacgatatgttccctctccgaatgaacactggctatggtgcccgtactccggaggtgaaatgcgcaagttggaggcttgctgtggaagcacacaacatctttggctttgagaccattcctgaagagtgcgttgaagcaacaaaggaatacatccatggcgaacaatatagatcagactccaaaacagttaaccaacaagcttacttttatgctagagacctcgaagtccatcccaaggacacatttgtgttcagtatagatggcaccgtactctctaatattccatactacaaaaaacatggatat

SEQ ID NO: 73676 - DNA, 426 bp, Glycine max
caatatgctacggagtgactcaactcgttctagtggtcttctaatattgatacgttgaatatatcaggcttgtatacttgcaagcgtaccctacataataataataggactactcaaaagtctacatatcaaatccaaaatatcaacagcattcctaattatttaagggaattatactcacagttgaggctgattaaaagattctttcaatacacttactgttgcaggcaccagaatctacctccagattatatgtgctacacaggctgatagttatgataagaatgatcaagggtattcacttgctagaaccaagattataccaattcacgttctaatcaactaacttgtacacttaattatcgactactagaactaactcatgcctatgaccaataccataagatgctataactctttgctcaa

SEQ ID NO: 73677 - DNA, 114 bp, Glycine max
ttttattaaaatgtatgatctcatatattacttttctacaatttatatatcatatcaattccatgcttactatatattccctctccgaattaacactgtctattgtgcccctac

SEQ ID NO: 73678 - DNA, 347 bp, Glycine max
ataaaaaataaacatatattgaggagggagggttgtgtggagaagatgctatgccttgttgggtttgtggtgcttgtgagtactattggtggggtggagaatgctggtgaatgtgggaaatctacaacccctgataatgaggcttataagcttgcaccatgtgcctcagcagcacaagatgagaatgctagtgtttctcagagttgctgtgctcatgtgaagaaaattgggcagaaccctaattgcctctgtgcagttcttctctctaacacaggcaaaatggctggcgttaacccttaagttgctgtcaccattcccaagcgttgtaacctggctaatcgccctgt

SEQ ID NO: 73679 - DNA, 369 bp, Glycine max
ctcacacaagcctacagctgggagaacacgacatacagcgaatgctagataaccatcgggcgctgtttacagaactgggtacataactgacagcctgatcttcatgaatttgagacgtattgccacacccacatgatgactgtcatgcgggaagcaacaactcttaccttatctggattttggcctgcttgttcctaccaaactcactggcagctcctaaactatatgctcattttcaatagagctatctcatttgacttgatatcatctgtcgaggcacactcatttgtggtgagcttttctgaagtttactagtgaatatcaaaggaccacagttgacgtacagttccctatccctaatgaaattgg

SEQ ID NO: 73680 - DNA, 325 bp, Glycine max
ctttcactacccttattctgatatatcatcatttgctgttttttaaaacatgggaaacatcaccacacaattaataagttctacagcacaattttaattattcaatttaatgtcatatactaatgaacttattctaacccaatattttcactacccactattacattacaatgcaccaattgtttaccttctacaaactaaaaccctcattttaccctatataccactatctttattctcattccaactcttcaacaaaaccttctctcacattactcaaacttagtctcttcatctcattcatcgctatagcttgctaattttt

SEQ ID NO: 73681 - DNA, 402 bp, Glycine max
ggcacaagtgagtttgttgatcgagataacttggaacagtgtgatgaaaatgaaggtgcttggtttcttcgttgctacaattttggtagcatggcaatgccatgcgtacgatatggtccctcttcgaatgaacactggctattgggcccgtacttcggaagtgaaatgcgcaagttggaagcttgcttgggagcacacaacattttggtttgagacattctgaaagtgcgttgagccacaaggaatacattcatggcgaacaatatagatcagactcaaaacagttaaccaacaagcttacctttatgctagagacctcgaagtccatccaggacacatttgtgttcagtatagatggcaccgtactctctaatattccatactacaaaaaacatggatatg

SEQ ID NO: 73682 - DNA, 210 bp, Glycine max
ttaaatcaatccaaattaaacatttttttgaacatattatatttttcttaaaatgtttacgataattttatatcactttgaaatcaaatatttatattattgatcctcttccttccatcaacaatacttattctcttttcttacaacaaatattacaacttcaaattaaatttaactatttacttaaacgttttttttaccttttcaaat

SEQ ID NO: 73683 - DNA, 203 bp, Glycine max
ggtatgtgattgttgtgactcgttcttcttcgtcgttatcttcttcttttgttgtttgtgtgtttgttttttctctcacctgaaaatgtcttgctgcggtggtaactgtggttgctgaagcgcctgctagtgcggcaacggctgcggaggctgcaagatgtacccagacttgagctacaccgagtcaaccaccaccgagacct

SEQ ID NO: 73684 - DNA, 411 bp, Glycine max
ggcacaagtgagtttgttgatcgagataactaggggcggcgtgatgaaaatgaaggtccttgttttcttcgttgctacaattttggtagcatggcaatgccatgcgtacgatatgttccctctccgaatgaacactggctatggtgcccgtacttcggaggtgaaatgcgcacgttggaggcttgctgtggaagcacacaacatctttggctttgagaccattcctgaagagtgcgcttaagcatcacaggaatacatccatggcgaacaatatagatcacactccaaaacagttaaccaacaagcttacttttatgctagagacctcgaagaccattccaaggacacatttgtgttcagtatagatggcaccgtactctctaatattgcatactacaaaaaacatggata

SEQ ID NO: 73685 - DNA, 71 bp, Glycine max
ccactctccctataaatgctcattaatcacggcttatttttacttactcacaacttgaccactatactttc

SEQ ID NO: 73686 - DNA, 272 bp, Glycine max
aattccctcgtcgacccactcttacgtactgctacaaaaacccccaaaagggactctttaatcttattcagcttccaccatccttgaagaatatcaataatcttaacactaataatcatatatacatataaacttactcatacactctttctactttattcaacccaacatacttaatttaatcctttcatacattcatacattaattatatcatttattcctatgtttaattatacaaacactatcacccttatcaactcctacttaatta

SEQ ID NO: 73687 - DNA, 408 bp, Glycine max
ggttctagtgtatgtgattgttgtgactcgttcttgttcgtcgttatcttcttcttttgttgtttgtgtgtttgttttttctctcacctgaaaatgtcttgctgcggtggtaactgtggttgcggaagcgcctgcaagtgcggcaacggctgcggaggctgcaagatgtacccagacttgagctacaccgagtcaaccaccaccgagaccttggtcatgggagtggcaccagttaaggctcaattcgagagtgctgaaatgggtgttcccgctgagaacgatggctgcaaatgtggagctaactgcacctgcaacccctgcacttgcaagtgaggtgttggagagctaaagcttcaagcagaaatggcccttagaaataatgataaaaactatatgtaggttcaaaac

SEQ ID NO: 73688 - DNA, 373 bp, Glycine max
ggtagatgaaggatggagcccaagatgtgctgaaggatgatggtaactactgcaaattctgacacgtacttgcttaatgtgatcgggaatatgctgtgtttgcatctgtagcgcaggagaaagtttctgatcctggaggctgagcactgtggtctaaacatgcctgcgaattggtacccaccatgccgtggattcacgcatatcctagatggaatctagtatgagctgaagagcagagttcctcaattggagatagtctatgcgtccattgaagaacactaggatgcctttaatagcttgtatgcagacatgccttcgatagcaataacaatctcggatgtggaaacatggaaattcttgaccagaaactact

SEQ ID NO: 73689 - DNA, 396 bp, Glycine max
atctaactttataaaacaagcatcctttcaacgagtgttttcctatttattaaaatgacaatagttgattcagaacacaagcaatactatataaaacataatgaattgtattgtttttatacacagattttataacacctagtacaatttatttattttctatatatctccattgcgtatcatccatcatatcttacacttattttctttttcatacttctctcttagttgaacagaagtaatgtacaaatagaatttgtcttgcataatgttaaaattttgatacttaaaaggtgcaacaatttaacatgtaaaatttctcaccataccactatcccaatgaagaatcttcagggttgttcaaagggtgaaaaaacaagcttgtagctactactg

SEQ ID NO: 73690 - DNA, 167 bp, Glycine max
tatacctatggtctagacattcttatctacctgagagggcgtttactaaggacacgctggcaagctatgacaccaaatctacaatactcaactttacgctcgccttcatccgaacccatacatcttatttaccttcacaatcattcacctaaaccaactttgtcatt

SEQ ID NO: 73691 - DNA, 149 bp, Glycine max
caaaattcttaagacgtttttatttatgtctaggcaaacattatcttgtctattttaaatatccatcattcatatgctccttatgtctttatataaatactccctatcattttcaataatttaaattatctccaaattttcaaccaatt

SEQ ID NO: 73692 - DNA, 439 bp, Glycine max
aattaccgggtcggcccactcgttcttacacgcgttcgaacacctccgacaagactttttaatgtataatagggttcctcctcctttgatgctacccctacatcgggtccttctgaaactttaaattccagcagaatgacactttcacaacatgctctgacattctctccaaatattcgacggcttcagttttaattccaaatactgcaattcttacttctgaatttcaatgatgattaatactgcatacgaacatcctgatggatgaaccaaattcaaaagtttttttgatagattatctctatgctgttggctctacaattattacttccacattaagaacttgacaactctctttagttcatgcatgcaacctttcactatggcatattaactttacaccattctctaatactttaaattactttaaacacttact

SEQ ID NO: 73693 - DNA, 400 bp, Glycine max
cactaggtttggaactcatttgcgagcattcttatcattgggaattacgaaaacatgttggagctaagagaaataccctttgtattgtagttgtttcttttcccgcagaaactcaaaactgttttagaaaaataacgatctcagactcgttaaccgttgtattattgtgaaattttaatatgtggtttgcgattcatttccgcacatctttaccattgggattttcaaaataacatctgttggggggagaaatccccatcgcgtgtagacagtggaatggaggcttcaatccattctccttctctctaacgtttgggaaccctattagagtagtcagaggaatctcaggaaatcgctagagatgctgctattgctgtcacaatacacacgtgagttcgct

SEQ ID NO: 73694 - DNA, 192 bp, Glycine max
acggttgagacaacacaacgggatgatacattctcactcaaattctctgcatcagggtgggggcaccaatattgctgagaagcgtcttcaataggtgcttctcctaatacaaaaccttagagtccaatttgtcgcttcggctgaaccgataatcttgagtcgaactatgccaaaactccaggaggttccttg

SEQ ID NO: 73695 - DNA, 56 bp, Glycine max
atataaactcacatatcatcttaatacaaatatctttttaatatccccccctacaa

SEQ ID NO: 73696 - DNA, 217 bp, Glycine max
cctcccacctctcgggagacacgagctttgctggggatttgaatcgaaagtgtttgttaatgggtgaggtgaatcagagaagtcataagacagagaattgtaatccttatgagttattggcggtataaagctgctaccattgatgcgaggaaatttacttcgatctcatacaattctgtccgattatttcagacttcgattaccttcaacagatatg

SEQ ID NO: 73697 - DNA, 303 bp, Glycine max
  unsure (1)..(303): unsure at all n locations
tcccaatttnanttttnattctcaccatcctnnanaccttatcaaaattgatcaatttcattcttttttcaacntttttcaaccttaaaatactccttacatcnattacactcccttccaaaatcaacnncntnctatnacttttcctananaaaatatnaattatcncnanaaccatttcccccctcancaacaaaantttcactctattatcccaccacccaannnntatttaactccttttccatttccaaaaaaccntnattattttccatatncaaatncttcntacaaaaatcttac

SEQ ID NO: 73698 - DNA, 248 bp, Glycine max
  unsure (1)..(248): unsure at all n locations
caaaacggggatagcactaatttaaccgccgcatatcaaacattcggcgtgttacttttanctaacactttctgcaataattgcacgtactancatccaaacaagctcttcatcacgggcaaaaaaaatttaatcttttttcatcgctctcttctcaaaagactattcatcatccacattgtgcatgaaagagctgacaaagatctttaattttcttcaataaacaaatccaaatctcctccctcttt

SEQ ID NO: 73699 - DNA, 308 bp, Glycine max
  unsure (1)..(308): unsure at all n locations
tgttacaaaaattataaagggggggtcattatcgcgggactagctaatttatatataatccanatgagaacagtaaccttttcttattgattgttctgggttgaatcattgcgttataatttaaaaataatatagtacattgaactttcgtgcttgctttattgcttggaagagccaattctaaacagttaatgaagaccgatttgtgtaaattgtgacgcttctattttaaatgcgtaagttatagttgaaattaattctcggggaaaatatgatttcttttggtattaacattaaattgtggcttt

SEQ ID NO: 73700 - DNA, 314 bp, Glycine max
  unsure (1)..(314): unsure at all n locations
gattcccntanttatttcggcggactatttttgaatgggaaaaaccaaanaancnttancnaactnaacaatgtaaaataaattaanangaaccctcnatttgtgcttttcaattttctaccccttttctttctttgcgttgatttaattaatactatcaactaagcccttttctgtttgcaatctcgaactattagttcttcttccccacatgtttttccaccaattcaagaaattatgcttgagttccgtgctaacaaaatgtttcttgacgaaaaaataattcttccccatacacttaaaccacttttttc

SEQ ID NO: 73701 - DNA, 245 bp, Glycine max
  unsure (1)..(245): unsure at all n locations
tttaacctccgacatctaaaacatcccccccctttttaaacacgcgcggccccccnnanacacttaanctnatttaaacattctttgataacccaaaaaaccaaccacaaatttttaaacaatctccgcccccatttttttatcctggncnttaaaaaaacaccaccaaatttcctcatccaatggaaataaaacttttttcacttttttcaacaattctaaacaaatataaaccttcaattatt

SEQ ID NO: 73702 - DNA, 482 bp, Glycine max
  unsure (1)..(482): unsure at all n locations
ggaattncccgggtgcgggccgacgcgtaccgtagcttgcgagaaagacgacccagaaggggaattgcgaatcaaattagtgtcaattctcttttgcgcggggtnccctacctctccggtcgaggatgcannnatcttcgtcaagaaccctcanccggaaagaaaccatcacccttganggtggaaagcgtctgacanccatcgacgaacgtcaanggccaagtatccagngacccaaggaaggaattcctcccggatccagcaacccgtctcaatcttcgcnccggaaagcagctttcgaggaccggccccgtaccctcgcccgactacccaacatccagaagggagtcannacccttcaccttgtcccttcgtcttccgtgggtggcagtgcgagaatcttcgtcaaagacttctcnnactggcaaaaccccataacccnntagaggtcgaaagctttctgacaccattgacanacgtca

SEQ ID NO: 73703 - DNA, 334 bp, Glycine max
  unsure (1)..(334): unsure at all n locations
tatttacaatntnttcactctcaatantntcatctcncaaatcttttaaaacgcctttatccaacctaccttctgngaaatttattccaatttctgtaaacaacaaacacctctgttacctcatctcagtcaagacaattaaaagataactttcaagacattatttttaaacaactgccaccaataattttacactctctaaagatatcaagaataacctaataacgctgattaaagtcacgtcaacctctctaattatcaaatacaatagaaaccaaccaatccaaaaaaacttatttttttcaatatcatatttatttcacaactatataat

SEQ ID NO: 73704 - DNA, 243 bp, Glycine max
  unsure (1)..(243): unsure at all n locations
atgacagttcttcatcatcccgctaactttataaagataacacgcactcnanatcacantaaatatattcgattattaatactacaacaaaataataatcgcaacataaaatatgcggcaaaaaatattttttacgcattcatttactaaaaacacaaagccacactccttaggacaaaaatgcttatatctctcaacaaatcattccattcctattctttctccagatcttaatcctcttca

SEQ ID NO: 73705 - DNA, 315 bp, Glycine max
  unsure (1)..(315): unsure at all n locations
ccactcntccntacaacttcacaagactacanaanangacacgcacctctttcttatcgccgctttatatcacacgctctcttcaatttctatgagttttnctattactttacctccgttccccctttctcacaaaaacaacaccttttctcttctccttcctatctatttttttcctttaatttttaaaaaataaaatccattcacagcttaattcaattcttcattttaatccatctatctaaccatcacttaattacctaatccaatctaaaagttcaaaaaaaaactccactattaaaattactaaatcaa

SEQ ID NO: 73706 - DNA, 421 bp, Glycine max
  unsure (1)..(421): unsure at all n locations
tgggtgttgtaagttgcaatggatatanacggcgcttttttttatgaggggggttttttacttctctaaacnctttactanntnntcanaaaancannnttncctttncaaaaataacttttaagaagccacacataatatttcttgatgagccatccaatcatctggtacgctgctgtgtctctccatcattgtttgttgcttcttggtgggctagtggaccaatggcaactagtttactgacttatttgttgcagggaaagtacatgtgtctattgaatctttgtttttgttttttgtcatggttgtgcttattttctctgttaaaatggtatgccaacaacttatgtgaggagaaaatagctgaacgtggtcctatgatcgtctcaattaagcttctgacttgaccttgtcattttaa

SEQ ID NO: 73707 - DNA, 453 bp, Glycine max
tccgcccacgcgtccggacagaaggggggtgatgttccttgtttttgtttctggtcagttttgtgatgacatcagctaagtggcggcgaatttttggttgggtgcacaaagagaagaggctggatagtttctctttctctctccatggatcttcaggatttccttatccgtgctcgggtcttgaggctttacagacaagcattgagaattgctggtcgagccccttcttccgctaaaggtgaatattcttaaattatctgggtcattcctttatccaaatcaacagtcttgtgatgctatatacaattatacatttatacatgtatgtaagttttatatatgacattgctcggtgtaatggactgtacagctgaactgaggcagacaattaggcaagagatggaaaataatagaaactgcaatgacaagcaaaggatccgtttcttgattagt

SEQ ID NO: 73708 - DNA, 356 bp, Glycine max
  unsure (1)..(356): unsure at all n locations
tcaaaacacaaacgcggtttccttcctaacattattttccccgattttttaccgggagtcttacaccacacatttctcattacttaactaaaaaaatttccttaccattttcaaaagcatttatacttttcttttatnnccttaacaaatcccttttcatcttttcctttcaattctaaattctttaacaataacctctcatctcataatataatactctacaaaacaaaacaactctaaatcttaaaacaatatggntcacataatantttattgntaatcaaaagttaaatatatacctttaataatattttacgctcatattttctgagatccaatttcacaccccacaccct

SEQ ID NO: 73709 - DNA, 295 bp, Glycine max
acggcgctagttttaattcggggttggagagtccaaaataaacaaaaaaaattgaccactttcaaattactcattccggaattatgtacacaattccagaaacatttgtttatacatgcaaaagctttgatttcgaattatgaatgcttacacaagtttgtcaatttgagttgaaataactcttctaaataaattggatttcggcagaatcctaccaattattaccttctatatatgcaaaagccttgattttcttgagagatatactacactaaattgtttgagcttcttattc

SEQ ID NO: 73710 - DNA, 455 bp, Glycine max
  unsure (1)..(455): unsure at all n locations
tcctaccggttccaaaaaaccaacaaaaggggccactaacctttggcacaaacacacacccatcggcggcatccttatgcgggcgaactctanctacctgagcacanatttgtagccatgttggggaagaggccccagccgcggattggaaaaatctgcgaattattggtctcttgcgactgcaccaccaagctttttgatgccctcggaagaagccctagaagcccgtttgacatgatgaacttgaagatgcaatcaccaaagggtcttaaaagctatgaccttggtggtgtaggtctaggaattgtggtggcccttgataaaaaatcatcatccgaggaacaaggccatgacgttgtgcccaaacacgccgttatttgcacgtcaaattcaaaccgatccgtaccaatcccagttaaaaaccatcaagggtttcaaaagggtgtgaatgaaat

SEQ ID NO: 73711 - DNA, 248 bp, Glycine max
  unsure (1)..(248): unsure at all n locations
tactattctttcccaaattatattcctaactggcgctccttattacttgggggctgccttatttnntaaaaaaaaaagttggtttaaccaattttctaatatttcaagttaatgatatttgcgctcttggattatcctttttttcttaaacaaatctttaacttttagggtcctacttctaactgaattttttttgttccacaattttttttctttttaattttttaaattaaacacccttaaaataa

SEQ ID NO: 73712 - DNA, 132 bp, Glycine max
ttttcacctttttttttacccccctcattttatttcccccccttttttttaaccgcccgcccccccctttattttttttttttttttttttttttttcctcttctctttatcttcctttttctacttttttt

SEQ ID NO: 73713 - DNA, 243 bp, Glycine max
  unsure (1)..(243): unsure at all n locations
ttaacatnnttnctnctcactactacaaaatactcaatgtaaatcatccacccactcatnaatatattatttaactcttataacaaaaaaacaatcaaatcccacccagataagaaccttcaataccctcttaataaacaacactttcaacccaaatttaaacaaatttcttatccctatcatctccttattcacccaaaaaaccgccagatctatgacttttacngtcactattcccttaac

SEQ ID NO: 73714 - DNA, 53 bp, Glycine max
tactgctgcggggggacgacataagggtgcgggtgcgagaaaaccacagaagg

SEQ ID NO: 73715 - DNA, 413 bp, Glycine max
  unsure (1)..(413): unsure at all n locations
acacctgcaaaaacacttcataaaaccgttctactntataattccgcgctcttttaacacccccgtcttcttttcttattctctntttatatttnttttttctctcacctcaaaatctcttncttccatattaacctcccttacataaacttttttttttctgcaacaaataaaaacgctgcaaaatgtacccacactttagctacacttagtcaaccaccacctagacctttgtcatgggactctcacctcttaatgctcaatttcatgcttcttaaatcgctctcccccctgaaaacgatagctacaaatattgaccaaacttctccttcaaccccttcacttccaactaaactttttctataccaaacttcaaacagagataccccttaattaccaataatgataaacta

SEQ ID NO: 73716 - DNA, 191 bp, Glycine max
cataattttcttcttatacaacaatacccttttatacaccctttttaattcctatattgacttatttttcttttcaatcctccataaaaaaacattcttattccatacctcataaactcattttcactacttatccttcttacatccgaaataacaattttcttaaaaatctacttattaaaacaaacaac

SEQ ID NO: 73717 - DNA, 288 bp, Glycine max
ccatttcattataatactacataattctcctccctctacatccaccttttcttatactataattcctatcatccaacatcctcacacattttatacttcacctcttacaaaatcatactccaattccccttaacttttatacttcaaattacctttttatatcatcaattacactcctctaacaatacacctctcctattattactaactcacccatattcaaaatttccacccatatatcactccaacattcatcctacatacctctctttttatttcccaccttac

SEQ ID NO: 73718 - DNA, 444 bp, Glycine max
cccacgcgtccgacatacttgtgatgataaatatgtgacaattataaaatatttttatgagagtaatagtcagtgcaaagaaagactattatttgacaaaactaattgtcaatatttgatcttgagagtaccaattataaaataatttttctattcaaagattaggaactaacgttgtgccgagtatcttgtggtgagtctattatttaaaatattagttgtcttgtttatatatatatatatataaacttgtttgttatttgtaaagatgttaaatattaggaatgattctttgttattgactaagtagatatatgacttatgacagaaataatgtcaatgtacaaaatattgattttgatacaatattagtatatatcacattatctatgggtgtaggtggtttggaaattaacaatgactgatttcattctactttttttt

SEQ ID NO: 73719 - DNA, 120 bp, Glycine max
taagtaataaaataatctatgataaaaagatcacaattttctcattaaagaaaatctttcttccttcacggatgattaaataaaaacgaaacacatcataaaaagctttaatccacttct

SEQ ID NO: 73720 - DNA, 143 bp, Glycine max
ttcctaccggttccaaaagacaaccaaaaggttccggttccaaaagaacaccaaaaggttccggtggggaaaaaacaacggaggggtccggttccaaaaaaacaacaaaagggtccggttgcaaaaaaacaacaaaagggact

SEQ ID NO: 73721 - DNA, 370 bp, Glycine max
  unsure (1)..(370): unsure at all n locations
catacttntnatnccaattatttaacacttataaaatatttttatcccggtaattttcaaaccacagaaacactattatttcacaaaactaattntcaatatttgatctttaaagtaccaattataaaataatttttctattcaaacattagctttttactttctgcccaatatcaaatcataaatctattatttaaaatattacttgtcttctttatatatatatatatataaacttgtttcttatttctaaaaatcttaaatattaccaatcattcttttttatttactaactagatatattacttatcacacaaataatctcaatttacaaaatattcatttttaatccatattaatatatattaca

SEQ ID NO: 73722 - DNA, 385 bp, Glycine max
  unsure (1)..(385): unsure at all n locations
atacaacatacttatgatgataaatatcttacaattattaaatatttttatcaggattatatttaaagcggggaaagactattattttacaaaactaattgtcaatatttgatcttgacagtaccaattataaaataatttttctattcaaagattacgaactaacgttgtgccgagtatcttgtgatgactctattatttaaaatattaattgncttgcttatatatatatatatataaacatatttgttatttgttaacatgttaaatattaataatgattctttgctattgactaaatagatatataacttattacacaaataatgtcaatgtacaaaatattgattttcatacaatattaatatatattacattatctatg

SEQ ID NO: 73723 - DNA, 211 bp, Glycine max
cattaaatcaaaatccttctgtcggcataaaaaacaaatcagaagcaccacccaccttattctttttttaacaaattaaaaattattattctccacataacattattttttcgtcattttatttaactactatttgcacccacattcttcatttccactacaaatttccttctaaataacaatacttctcatttaattttaaaatattatt

SEQ ID NO: 73724 - DNA, 173 bp, Glycine max
ggatcactattcgaggctcttgttctatgtggcgcgaaattacgaggagaactacacccacaccacttccatccatgctacctaacttgatagtagataccgtcccatacataacactagctcctctatcacccattcatttcctaagcctacaatatgaccattcatatata

SEQ ID NO: 73725 - DNA, 280 bp, Glycine max
tcattccactccaacttaccggctgaaaccccatacattagcctctccacatcttcactgcttcttccatacaaatcctaaaccagactgaattcacaaaaaactttaccatgtcggacgatgatagatattataattaattttatctcacttctccctaagttgtcactaattacaacatctccgcttatattattaacaattcctttcatttatttattttttaatttaaactaaacacaaaaattgtttaccttttctataaaaggtattcttatat

SEQ ID NO: 73726 - DNA, 394 bp, Glycine max
ggacgaggaacgcagagtgaatctgagcagggagacgtgtccggggttcatatcagacggttacgggagggtgacggggacgaatgaagcatacgagaagatgatggagggtgatgagggacagggaccagtgttgctggtgaataaggtgaacacagtggttccgcacgcgtcgttcacgtgcttggtgagggtggtgcaatacgcgtgtgggagggagagaagctctctcacggtgccctgcgacgtgtggagaatggactctggtgggtttgcatggagattagacgttgaaactgcgcttagcttgagactgggttactaattcacaaaggtatcacgaactccgaacgcaaaacggcgtcggtttatggtcatagaactatatataact

SEQ ID NO: 73727 - DNA, 343 bp, Glycine max
  unsure (1)..(343): unsure at all n locations
ggggttctattttgtaattgtttgttgttgaaactggtcgttctttttttgttgtcctgtgttcgtntttgttttttctctcacctaaaaatgtcttgctccggtggtaactgtggttgcggaagctcctgcaagtgcggcaactgctgctgaggctgcaagatgtacccagacttgagctacactgagtcaaccaccaccgagaccttggtcatgggagtggcacctgttaaggctcaatttgagggtgctgaaatgggtgtgcccgcttaaaacgattgctgcaaatgtggaccaaactgctcctgcaacccctgcacttgcaagtgaagtgtttggagag

SEQ ID NO: 73728 - DNA, 294 bp, Glycine max
  unsure (1)..(294): unsure at all n locations
ccggggcgccgacgcgtacgacagccncanaacaccacaaaaaggactttctaatttctcactctcaacttatggctcgcgtgattattaaatgtggcaaccatcaccttcacctacaactaaacctttataatatttataatattaatgtacatttctcaaacatacttgcatttccgacatcataaaaccctcaaactacttactctttcacaaacttaacaaatcattatcagccaacaaaaaattaataaaactacaacctatattcttaataaaaaccactcccatatt

SEQ ID NO: 73729 - DNA, 271 bp, Glycine max
  unsure (1)..(271): unsure at all n locations
gggttatctcttgccattgattgacactataatatttgacgacaaggcctcgactcatgtccatgtcacataccactagtacctaagcaacctaaatgcttgccatgagtacgtatggggagtcattgcactagcgtgcctctacgaccatctctcctatgcgagccaatataccagcaagcagtatggagggtatatgatngtactcatgctaaagaaattattttagtattggaattattttttattattgaaattaatatttttttta

SEQ ID NO: 73730 - DNA, 277 bp, Glycine max
  unsure (1)..(277): unsure at all n locations
aaaccatacccattnctacttgatcagccacattattactatgatcactcatacctacaaccatcccatcattcaactctataaaccattcantttttttgcttcaaaaccgttctttgaatctacccaataatatagtttccttcattgatcaagcatccaaaccccctattgttatggaaatttcaaatgtccatcctcaatttaagcctcctttttttgtgttcactaatactccataaatattgaactctaaatacttcattattgtaatcat

SEQ ID NO: 73731 - DNA, 218 bp, Glycine max
  unsure (1)..(218): unsure at all n locations
aaaagggacaccaccaacaccaacaaagaaaggggaaaagaaatactcaaacacaaaaagcaccctcctctcttcttcttcccctttttctctcttcttcactctcacccttatctttttcttcaaatccaaaaacaaaccatccccatttcatttcaaaagaaaccctnttttcttcaaagcttctcggaaccagtgtgcttttttatttcttttaa

SEQ ID NO: 73732 - DNA, 398 bp, Glycine max
  unsure (1)..(398): unsure at all n locations
cactaatctcatanattcgggccgttctttttctaaaaatcgccaaaccttccaatanattctctatttaaatccacatatttaacttttaattcatttctcatcaaattacgtcatataaatcacaatatttctttcatctaaccaatttttttctgatatacttaacactctcatttatatcattctttttataaaaaacactcacattttttttaatttttatctattccacttacttttctttatcctaaaaattaattatcctcttatattttcaactcttctatatattttacatttttcactatactaaaatttcattttactttttacaaattttaaaattttttacatattcttatttctctattcattttcttcttttaaaacctttt

SEQ ID NO: 73733 - DNA, 166 bp, Glycine max
  unsure (1)..(166): unsure at all n locations
cccgggccgacccacacgaaacaaaccganaanacaacacaacanagcgatattctttacttatactcctatatcatcggcgcgcctttttattaatatgatcccacaccaaaccttcactctancttcaactttccactcctcttccattataccttcctattta

SEQ ID NO: 73734 - DNA, 335 bp, Glycine max
  unsure (1)..(335): unsure at all n locations
aggggaatcaaacacaacacttcactctcaatcttcgggctttttttcaaattacttcctcctatacncctccatccttttcctctccattaacttctttatccaaacaataattttcaaaaaccttccttcatcaccattttttttttctataatcttaaacctacaccaactcaatcaacctctccacctcacattccataccttatcacaaaaatatgtccctatattcttccttctattctacttcccatttttcctcttcatttcctcttctctctctgttcaataattcttcaccaataacttcattcttttttaccaaccttccttac

SEQ ID NO: 73735 - DNA, 359 bp, Glycine max
agggctgcgagggagtgctcctgatactcaaatacaggggtggtgagaactagcttatactggattcctactggataagctacttgtccttacaagtcccatgagttgtgaacgtcaaaggactacctcacgattaccgagcattcattctatgttctgaccaatagttacttaagctcaaccccaatgtatatgtatccgtgcttgctgctcgagatccaagaactgtagactctgttgccattattatggatttggaagataaggattctgaccctatggtgcgtgcgcgtgctattcaccaaaaagccatgcattttcgagctgcctctatgggttccttatatatacagactttt

SEQ ID NO: 73736 - DNA, 438 bp, Glycine max
  unsure (1)..(438): unsure at all n locations
ctgcnataaaaccacagaaggttggctcattaccactaatcttnttnattcgagtaagtcttactctaaaaatcgagaaatctttcaatatattctctattataatccacatattttatgtttaattcttttttcaacataaaaaggtagagaaatcacatattattttttctatctatcctatatattactctaacttcttatcatatgttattaatatcttactttataaatttaaacacttacaatttttttttaattttttctattccacattctttcttttattccaatttatttataatctcttatctattttatttttcttttttttttttttcattatttactatctttttatttttcttttacttttaaatatatcatttattcttattttatattttattatttttatttttttatatttttatattt

SEQ ID NO: 73737 - DNA, 303 bp, Glycine max
gataccaaaaacaaaacacaagccaagtgaaagttagaaaaaataaaaatcaaagagcataatgtcagggatcattcacaagattggggagacccttcatgtgggagggcacaagaaggatgaggagcataagggtgagcaccatgctggagaatacaaaggggagcaccatggtgaacacagtagtgagtacaaaggagagcatcatggtgaacacaaagctggaaagtaccatggtgagcacaagccagagcacaaagaggggttcctagacaaagtcaaggacaagatccatggttaggg

SEQ ID NO: 73738 - DNA, 160 bp, Glycine max
acatactataatgcgctctatctctttctttcgagcgggttactaacccttgccgtgcttataactacatacttcctaagtctcaccattccttttatcatcaataccttcttcttcttcaacttactatcttcaacaaacaccctttttctaccaaaca

SEQ ID NO: 73739 - DNA, 361 bp, Glycine max
tgaggggaagaacttgatggttgacattcgaactgcaagccaacaagtcactcggggataccaacatctctatattcaacggattttatttattgccaaaaactggcagcatattgaaatggtttcatgctcatgagtatcaggaatcatcatctttctcacaatccttgtgtgttgaataaccatcctcagtggttctattgtcattcaagtataaagtttgttttgttccccttggaaacatttgaatggttttggacatggataacatgtttattataacatctaaattttcatcatataatttcatgttgaaaaaatacccatggtatcttttatttttttcccagttcacttataa

SEQ ID NO: 73740 - DNA, 209 bp, Glycine max
ctagactacggtaggctcttacatgcttatgcattattgctctgactatactactaagcttattaatcctcatcatcatatatagcatgacttcattattacagttgcttatgctcatggagctatataccctattatacattatcatcctcaactgtatgaagatcttgtcttagcaagagtgtatgaccattaacaacctatcatat

SEQ ID NO: 73741 - DNA, 58 bp, Glycine max
tgggttaagaaattcaaccaagcaagggtggtgagtgaccgccaagcagaggttaacg

SEQ ID NO: 73742 - DNA, 379 bp, Glycine max
gggttcttatacctatcatgtctccatctttttataggacatcctttctcttattaaataaaagttattaataaaaataaaaaataattaatatgaaaattaaaatttaaaacaatcaaaagcatcaatatacttactaacaagaattgattgaagaaaaatgatcctgtgaattgttttcttcttatttcatctggatcttctataaatgactgtctttcatttcttcaattgcgcgattctcaccttctgcccccactccgtctactattcttccacacccttatctgaatattatacacttctcacctttatcaaaacctcttgtgtttatctttcaactgcatttattaaacttatatatctaactacttttttt

SEQ ID NO: 73743 - DNA, 397 bp, Glycine max
gtaccggacctgaattcccggctcgaccgacgcgtccggccacgcgatcgcattagtgtatgcgagctatatgaatacaagtagagctaactagggaagagataatacagacggaggctgcactaagactgactgcacgcacctcgcatgcatcctcactcattgcttcttattcatttcattgatcgtgcttcaaacaaactcactcactcacatgcaaacactcgctatccatttccttctgatggaggaaagaaagaacgtcactcaacatctatcattattcatccaccaagctggctcacatacaaccagctcactgacatacaatataccacagatacgtattccatgaatcatgcacatgccacatactcaattcattcacaagccatct

SEQ ID NO: 73744 - DNA, 424 bp, Glycine max
ctacataagttttttttatccatctactactctatatttaagtctattctaaaaaaaatgtgcctcattctcctaatcttccattatatcttcttatcaatttacattcaattttaaactcactcttttacctctctacaactcatttttatccacaatcttttatataattcatcacttcatttaaacctctctcccttttttaaacctatttcaattcatcttaactcttaactactacctatattaaacttattaacattaattttatacatcttcactatacaaatccaatcacaaatcactctatctattaattctaaacaattattataataatcaacctttatcatttaattacactattaatataccttcacacatttacctttatttttcaattccacctcctatttttattttt

SEQ ID NO: 73745 - DNA, 419 bp, Glycine max
aattcccgtgtcgaccgcgcgcgtcgcgtccacgcgtccgcccacgcgtccgaaggtgtcacaaacacttgtgaagtctgcgaacgtaggtctgcttgattctttccggttggggtctcttggttgcaagattgttggaacatctaagaacttccagaagaggaagaaacagtcaatgttaatgtcatcagattctgaggactcatacagcagcaacagcgtccatggccttaagaacaacttcaaagttcagagcttcacaccattcacaccaccctcaacatcagctaattacagaactgccaagagatgaaagggtataccacactcgtcctcaatggttggactaatcatagaatattacatacgttggaattttaggctattggctacaatgcccttaggtataacaataccat

SEQ ID NO: 73746 - DNA, 387 bp, Glycine max
aggcttctgacaccacaagctctgtgctgggcattgcctgagggcactggagactgaaaaggatacatatattagattcagatagtgacaaaccaagcagatatatgttgataccaccacattattaattgtcaaaccaaaaataacttgtttgcttggtttttgcaccttaagtgttgttgtacatgcattttcttcagataagaaattatcaagagctctcaaggaaccgaacttctgtcctgacccagactcaataaaattctgcagaaaaaataactttataaaagtcattgtaagaactttaagccacaagccttgatcatcttgcagtcttacacttttgtgacttctttacattttttaggtacactggaagtgcaagac

SEQ ID NO: 73747 - DNA, 361 bp, Glycine max
cacacacatcattgattctcattcatccatcctatactctctctaaatacactcactctcactcacccacacttacatacattctaacattcacagacaatcttattcataacatttataacaaactgctgatataaacaacaactctttcaatcattacctccatactacacaaacttcttactgctcatcatagaaacatcactcactcatattacttctttgaaataatatacaacaacatattattactcacacattgattcacctccacatacataattacattcattaatattattactactacatacataccttactactctgctcttatcatcatttataccaccactggttt

SEQ ID NO: 73748 - DNA, 249 bp, Glycine max
agacggatggagagagagagagtgaaatgttttgcttcctctaatcttgctaatcattcgttctatcaaattttgcctaaaactcctattccctgttttagttaactcgattaacgtcaatctcaatcttctacagcttatcctatatctctcttttttcttctctttcctctactacaatttcaatcataactctctatcatctgataagcatatgatgatccttctgctggtttgatttactatcat

SEQ ID NO: 73749 - DNA, 388 bp, Glycine max
cccactcgtccatcaatgcatgtactttgctctcattggacatctctaataatatcgggagtgtacatatttcggggtgaatccatcacttgtctggatgttctatatattcattgaaacaattatatctagacatgaatcacatcatatgacacactaccctacctctcaatattctcatctttaacataattatatctttatgcgaacaagctaaatggaaagatttcaatagatattaaattaccacctcaactggacgtactatatatgcaatcaaattccttatatggactgctcactgattatcatactgctaatatgtctaagttacacatcatacacttatctgacaactctatatcgccctttgcatttagccaaaatt

SEQ ID NO: 73750 - DNA, 271 bp, Glycine max
attcccttgtcgaccgactcgtccggcttgtaaagatatataaactactacctcttctcttaatcctctaattcaaacttacatagatggttttcaaactggggctgtgtacaatcttccacataaatctcatttttataataataaataatctcctattcctatcttaaaatctccaaccctatctccacatttacaattcaatatcctactaattcaatattctatcaaaccctttactgatcttctatattctccttatcctactatt

SEQ ID NO: 73751 - DNA, 199 bp, Glycine max
tttggttgcattaaaaaacataaccttcctactcacggccggctatctacatgcgtgctgccatgtatctcatcctacatcccactcagaatcacccataagtacctcaaccaactatatatcaacgtcaatcactcattactcacacatttcagacatacttctcatccaactaccttgccttttgtttatctaaccc

SEQ ID NO: 73752 - DNA, 327 bp, Glycine max
taccgatgggggtttgatgcagggtgtaataccacaggggagagcggcaattagcaatctgaaactgaacctgacaacttacagaccaattgtgaagctgatgacagatctgagtctcgagactacaacgtgcgataggactggtgcacattgagatcaggagccctgatattgataaacgtgtatacagactacttatggacagatcgactgagataaagacttgggacctagggaatcaacgcagatattccactagccagactaaattgctaacgaggaccacacatgggatcctgaataagatggaacacaagctccacggat

SEQ ID NO: 73753 - DNA, 144 bp, Glycine max
tgctattgctttgccttcggtccccctttcttacaaaaacaacgccttttctctttctccttcgtatctattctttgcgtttgggttttgcctgaatgaatgcattcacagcgtaattcgttgctgcattttaatccagttatc

SEQ ID NO: 73754 - DNA, 325 bp, Glycine max
tttaattgttgacaactcttaaaactgcctatatactacagttatgcctaacattattagctttatgttatatgacacttgatgtctacactagtacgctaccctaatctcttaatgctattgaatctttgatgagtacatacattggcatagatattactttgttcaggatgcatgacaacgtgacataattggtcctaaatctggaacgcgatttggtccgtctattgggcattaaaatattgagacctatatcgtttgagaaaacccttttctttttatcgtcattaactgatctcataagttcataccgagatgtcacttt

SEQ ID NO: 73755 - DNA, 88 bp, Glycine max
gacaacaacaaagggcttctgaattatcgtgttttgatcagaatctgaggagaaaatcacataatttcgaatttgagttttcgtgtag

SEQ ID NO: 73756 - DNA, 245 bp, Glycine max
ggggtgcgataactagcgcggtgatagcaattgcaagaattcttactaggctgaatcacagtctacatcgcatgttaaccttgtcttgaaaaaggtctcgaaaccatcgatcgacaacttcatccagattacgatccctacgacaccgccattcgtgccccacttaaccaaaccggcgtcttcgtcaccgtcaaagccgttcgagaaattgacgtcccatcttttcacgtttacgactggtattc

SEQ ID NO: 73757 - DNA, 433 bp, Glycine max
tgggcggttatcagttggctggatgtttgcgggcaaggcaatgcatgtaataacttcatattggcgaacaacatatatcatacctttgatgtcttcgttatcaacaatttgtattgctataaacttgagcattttgtaccccactacttgtgggtatcaaaatgaaagatagcatacttggtccaattgttgaaattggagcctttggtggatcattcttttcaaggattcaagtgcatggccttgctttctttgaaagaacatcaggtgggggaattgaaacagatccccttcatctgttttgattatttgaccattgtagtgcactaaccaattgatagatgaggatgacatgttgtgtaatagagaaagaaatatgacaaagggtttatgtttgcaaagttggaaggaagttacatagaaaaaatatgtt

SEQ ID NO: 73758 - DNA, 435 bp, Glycine max
gagaaacatggcttccttaagctccttagtgctgctccttgcagctctaattctatcccctcaagttcttgcaaactatgagaatcccccagtgtacaagcctcccactgagaaaccaccagtttataagcccccagttgagaagcttcctgtttacaaacctccagttgaaaaccccccaatttataagcctccagtagagaagccaccagtgtacaaacccccagttgagaaacccccagtgtacaagcccccagttgaaaaaccaccagtgtacaagcccccagttgagaaaccaccagtgtacaagcccccagttgaaaaacccccagtttacaagcccccagttgaaaaacccccagtgtacaagcccccagttgaaaaaccaccagtgtacaagcccccatttgagaagcccccagtttacaagccccc

SEQ ID NO: 73759 - DNA, 260 bp, Glycine max
gagcgatattggagcttattatcaatccattggggttcgcatactttggcatgacatgaccatatcaaatgaaaattcaacatcagaagattcatacccgtctagacttttttggcaaaactgcacccttattctttatctgaacaacagtactcttccacaatttttatcacaactcaatgcgcagaataaaggactcatcgagtttacaaacatgaatctagatataacttgtctcaaatacaaatatcaatgctatt

SEQ ID NO: 73760 - DNA, 266 bp, Glycine max
gcttatggaacaacaccctaattctcgggcattgggcttattcttgaactgatcatagctcactattgacttcatgattactgattaacaattacagactactgctctgacttacccatgtatatggatctatattgatcaattagagcacccaaactatcatcctttaacgatcaacttcacaactgtacttcatctgattaactgagccattgctcttcagcacttatactatgttccagatgacttaatctcattcatgatca

SEQ ID NO: 73761 - DNA, 300 bp, Glycine max
cgggtgactgaggacccgttcaagtgggtttgaactcctggtgaatcatcagtttatctcggtctgaattatgatccaaactccctgttgagtctctggtcggattatgaaacattggttttctgagcattgggcgaaccacagacctttagaggcttatgatgacaatctaagcgaaagataagctcaagctagtttgcgattaaagtgataagatcgtgggacacttggctggataggtaggatctgcgttggtgtgtgcaagaacatgtatagagactcgatgcaggtgaatgacta

SEQ ID NO: 73762 - DNA, 276 bp, Glycine max
attcggggacgacctacgcgtccgtgcgagaacacgacaaaagggcgactaaagcagtcgtctaactaataagctaactaggtgggtgtaacattgtgtgaccgtgaacaaattatgatgtccaagaaggacatttttacacctaaataggcggatactgttatataatgcaaatatcaagcttagacagattccactgctagtgcacttgctgcaggcacatctgaatgggctgtatcttggaaacttacttaaccatatctaatcatcctttcg

SEQ ID NO: 73763 - DNA, 72 bp, Glycine max
gagtctactcaaccacatattttgtcattgactgttgttaacacttaacaggatgcatattattgcttcttc

SEQ ID NO: 73764 - DNA, 233 bp, Glycine max
gaacttacataatctactaccaatcaacatcaaagcaagttcacaaaattcagtgcgtcctacattgaccctttagcccctactactacactaactcgcctttcttgttcattataaatcacattcccaaagcgaccaactacaacacaacccttcaatggcattcatcaacactttcttcacccaaacctccttcaactcccactctctctacaaaaccttttatacccatt

SEQ ID NO: 73765 - DNA, 182 bp, Glycine max
  unsure (1)..(182): unsure at all n locations
cacacctgtcatctatacctaccctattttcaaaacacttatcaacaaattcaaatccgtntatttttaaaaatcctttcacccaacaaaacacaaacataaaatgatcaacctctccttcctaaaaacttaacttactcacattaattactttttacaaacttaaaaactctccagtacca

SEQ ID NO: 73766 - DNA, 195 bp, Glycine max
aacactcccttaaccctccctcccacctttttgattctccgcttctccaaaaatcttatgggttcatttctcgacaactctcacctcacatatcgcttcactttctacctcaaaaacttacacaaaagcgaaccttcaaagactcaccctcatgctcactttcataatcaccttgcattaaatagcttaaattcc

SEQ ID NO: 73767 - DNA, 202 bp, Glycine max
aacagatgtaaaaacacaatataaagggattcttaactcataacacaattgcgctgactttgtctttttcaaaattacggaaacaacatttactcaaaattactctttagcctttcttccctgcctccacctttaatcctattctctctccattttttaattctttttaacttagatagatccaactcctttgatatcacaa

SEQ ID NO: 73768 - DNA, 286 bp, Glycine max
acgtgtgagaacaaatcagaaaaggcttctttttttcttttataaaccccgccttctttgacattctctttcatcttcaacccatcatccatcccattctaaaactgattcctgcctatgcttttgtctataccttcatttacattgctacctactattcctttctatccaaaaattcctgaacctagaacccccaaaaccaccctcccctcaaaaaatgatacctgttactacgcacacccactcaactcccccatatcaaaataaatctcatgtacacccaatc

SEQ ID NO: 73769 - DNA, 421 bp, Glycine max
tatattataaattagaattataagtttgagaattaagtttttactcttcctagtgtctcaattaggagaaattacgatatgttctaaaataactggtgttcaaatttccaactaatctctacatgactcataacaatttaatcaatttgtttttcgctaaattaaaaaacttaattgcatgtcacgtaaattaaattatgtatgatgttagatgttagaagcaaattaaaacaataattaagatgttcataaaatatatttttctcttatttttgggaggtaattgatcgcaaaactttataataaatttgttggaagagtcacaaaccgtggtcttagtggcaccatgaaacagtagctgtggggcatccttggaataaactagaaacttaaaaacttccataatttcagtaggcgtttg

SEQ ID NO: 73770 - DNA, 234 bp, Glycine max
attccttgtagattccaagctttacatatactcattacaaacttaccttcccgggcattcgagctcttagaggtatcttcatatcacctacattcaattaaatcaccctctatctacaacatcaagactccttctaacttcaaaatatccttctaaattttcttgcaacataacaacctttaaccatataccccattatccattatttccgcatctttcctattttccaacaat

SEQ ID NO: 73771 - DNA, 168 bp, Glycine max
gatcgccagagatcatgtaaactagattactctggtcatgcgtatagactatctctgtgcatattctgcgagactagaataatgctctctctcctagttaaacgtgccacatgttatacaccactactttcgtgacaccatatattgctgaagatgtcaggatgctac

SEQ ID NO: 73772 - DNA, 396 bp, Glycine max
ctgatcgctagaactagattgaataaaatgaaattttataccctttactagcttagatactcaaatttctttgaaagggattaaggcataacggttattcggcttatgccatgtgtgagacatttaccacttattagaaagttgcaaattacatcaaagtcaatcttatgccaattagataagtggaacccttaaatgtacattcattttttatggatattttttaaagttctcttaaatatattttttaagatgtaataatcatatgcactatacgaataaattttttaacttgtaattttaattgaatttaaatatatttgtacaatgcacatgattcttgttacaccttattactattattagcaagcatcttactcatccattcgttatatg

SEQ ID NO: 73773 - DNA, 209 bp, Glycine max
ttccttggtcggcccactcgtgacgtcacacgttcgtacacgtcctaaaagaccacccaagggtctattatacattacaactatcctgttgacgattaaactttgactcttcctagcgtctcaatttggagaaattactatatgctctaaaatcactgcaggtccaatttcccactaatctcttcgttactcataacactttaatccat

SEQ ID NO: 73774 - DNA, 367 bp, Glycine max
tacggtgcattggcttaccttttgatacacttcttattgtcaatcaatatgaggtatgggaagtagccttgactgcattggaggcatatcaatcttatgtctgattcatataatatcacacatataatatggaatattatattaatctagtttatctatttatgaactttataatatggatctcatatgaacctaatatttgcatcaaattagatcaaacgctcttcttagaaacctgactgaatgctattatacgttccagcattataaaaacattcatcttttcaagttgatctaacttagattgattcggaacgcaattgatcctatcaaggaaatattcatggttaaacatagtcaacataat

SEQ ID NO: 73775 - DNA, 286 bp, Glycine max
tcatgctatatctacgagcatcagctagggacagggttatttacatattcagttcattatctcttgaacctttgcaatctacagatgatagcattcatttagctaatagatttaattgcttacctcgaagacttaatacaatatgtgcatgtatttattattgtatttatttttaatgttgatctatctgttcttaatatgtaatatggcttatcacatttgtaacttccaagcactataagcctactatctattaaaatagacctattctagatagatatatatc

SEQ ID NO: 73776 - DNA, 96 bp, Glycine max
gacatttcaatctagtgaaaccgccatcgtgcctgtgacaggttgagtcatactttgaccaaattctcggatacaatactgattgttgatattaaa

SEQ ID NO: 73777 - DNA, 224 bp, Glycine max
aggcccggaatgaccgactcgtcccacacatacacataaatttcaatctaaacgatattcacatcctttctttgtatattctctcagggttctgggcaagtttgggaagctctgaaggatatacaaagaaatttgtttatgtactaaacgctattacaataattaaatgcatctcatcctttaaaaatcatatattttaccattaaaaattattacattcttat

SEQ ID NO: 73778 - DNA, 88 bp, Glycine max
aactggagcgggcggtctacaggatgcaagcttacgtgctcgtgcatgcgacgtcgtaactggtctatggtgtcacctacattgactt

SEQ ID NO: 73779 - DNA, 130 bp, Glycine max
cactgattttaagagtgtagggtttcattgaacagttacgcatgtatagttattaattgttctacaaaagatgtataataattccattgactctactcctgtaattctattttgatctcatatttaaaat

SEQ ID NO: 73780 - DNA, 253 bp, Glycine max
atcacactttaaaaaaatatgtttctattactttattaattacctttaaacgagggtttttgctctgtgtaacttaaaacacatctttttacctttatgctattcaatcaacaaacatatatctctctgcatcatcacatacattcccttccacttctaactctaaaactctttcaacgataaatacctacccactgatttaaactattcaattcatctttacactttttccaaaattacaacattactctaa

SEQ ID NO: 73781 - DNA, 152 bp, Glycine max
tacactttttaaaaaactacatatggcgaaacatatcattctttctttactgcgtaattctgccaaatctcaattctctctcttctaaaaaccatctttcttttgtattactaaatctccaacactcaaaattcatacttgatttgcaaatc

SEQ ID NO: 73782 - DNA, 408 bp, Glycine max
  unsure (1)..(408): unsure at all n locations
gtattagatttgtttcattagattttgcgttcaaggatataaatatgcacatgtaatcatgaccaagaaataaataaataatcaatgaagttttttttctcaaaattcttatgagttaaatttcataagaaaagttaattctgaaataaatgttaatattatatntaatatataattaatatttattttataaatattaaaaattatatattattatatttgttcctatatataataaaaagaaacaaatagtagtgttttttactaatttaaaaattatatgagaccgcttacaagtatattgatttatgattttattcaatgcccctagtttaatgtgaagtctattagggagatatctatattgtttatgaaagtgaatgcatttattatcaatataactcacat

SEQ ID NO: 73783 - DNA, 306 bp, Glycine max
tctccgagagggcagcttgcgagctcaaggctccaaggctgtaacacgtacttggtgcaatctattcataccgtaatgccgcgactaacttccgctctagaccagggtattacttgcgacgcggaagttgataaggtctgaaaagatcccaatctccgctgaaggtttataaatcaccatgtagatacatgataaaacattggattctcgcacttactccatgacaatggataaacagattctagtcactgctctgacagaacagattgcttctgtaactggagcgttgtctgaacgacaactctt

SEQ ID NO: 73784 - DNA, 415 bp, Glycine max
  unsure (1)..(415): unsure at all n locations
acgctctaaatactcattccatacgtaccatacttatcactacacaaattnaaccgggtgctatcgcacaaatcaaccacgagaaacttattatatatttatttcctcaaagccacccacagccataatcaattgtatcacataactatcaacatccacgtattcacttacagttctataccccacactttccaagcatatctaatttgaataacaaagaccactatggtacatcattaactccaatgcgcttccagatgattacaccgaaacacataagattcaacaatcaacatattagattgtcatgcttactgacatcaaataatcacaaattaatctctaaattaatcgaaatatatctttattatatagaaaatttatcaaccacactaaccttacatacaaagttttt

SEQ ID NO: 73785 - DNA, 244 bp, Glycine max
  unsure (1)..(244): unsure at all n locations
cccacacgtccttctaaatactcatccaaacttctctacttatcaataccacatnaaccccgcccttttaaaaaccaaccacccaaactattttaaatttcttttctaaagcctcccacatctcatctcaattctatcacaaactattaacaccaattattcacttacaatgctattccccacactctcctatcatatcttatttaaacaacacataccattatatttcattattaacttcaat

SEQ ID NO: 73786 - DNA, 129 bp, Glycine max
caatgggaccattcacgaatacaactcaacgagagcaacaggttaaatttctacaatacccggataacaacctacttccaatagtgttataaatgacaagactacaccagactacggaagacgacataa

SEQ ID NO: 73787 - DNA, 414 bp, Glycine max
ctacatgccatctagagacgtcaatcgcccaatgctgcaacagcgactctgtcaaattcgtgcaatccctactctctccactcacttctcgctctcagctcacggtatcacgtactaccacgcatattgggaagttcttgaaacatcccaatcagaacctgactgttcatatacctcctttgttatataatattctacatcggattcttacacttacacgattgatacttataaacatattcccatccctgctctgatacaacacattgctactgtaactgtaatgttatctgaacgacaactcttaatccgacaacgaaatgttctacatgattatcagatactatctgcctatcatgtttaaaatagtcacacctttcatctggatgctatgcaacctgatctaccatcacc

SEQ ID NO: 73788 - DNA, 159 bp, Glycine max
atcaattaatacatcacctcatctctaaattcctctaacatcaccttcaccccgcctttttttaacattcattaattcccatataaaccaatgcatcttccttctcaatacaccatagatccactaactctttaatgagattcaccaacatactttctt

SEQ ID NO: 73789 - DNA, 217 bp, Glycine max
atcaatcaataccttacttcttccctcaattattcttactccattttcacccgggctttctgggtaattcattaatgccgaaaaacacacattgtacttccatccttatacatcatcagtaccacttactcttgacttggaggcaccaacataatctcttcaagattattaccaaagatcaaggtaaaaccaccactccctcttatatcgcattcac

SEQ ID NO: 73790 - DNA, 300 bp, Glycine max
aacattctttctttatattacattattacaatcgaaccaattccattccacacggcaattcttaaattctaagaccctcaaataccatacaatctttaccatcttacccatatcaccaatttaatccacatactccttcctttcacctttaatccttcctcttcatatcatccaaatcttctagatactcactcacacacaataccgcttcttaattcattttcaaatctatagaactctcccttatttcaacatccaccttatacttgacaatcacctacctcaattttgccttattta

SEQ ID NO: 73791 - DNA, 419 bp, Glycine max
gaagatggttcttgacaagccattgcgtaatttaaatccagacgttccttttggtcctgggctctcttcgacagttggagacgtatcatttcgatctggtttaaagccttggcaaaagcttaagccttctatagaaatcttatgcaataatcaggtaaatgaaagtacattgtcttgtctgtgtggaagaataacggtttatcctttttgctaggcgattaggcactcaaaagagttgtagtactgagttgtactttaggtttcttatttaactcaagttgaactgtaattactgttttggttcattttccatttttttacctcactttacacccttgagaagaaaacacaactttttattgaaatgatgaaaagagattaatttgtgaaaaataaataaactaatccatagacaaaca

SEQ ID NO: 73792 - DNA, 400 bp, Glycine max
tatactttatattatacgaacttgtaaggggttagtttatatgtgatctattgtcagggattggtcggagctgctaaggaatgcttccgatgcggtgatcatgaacttgctggaggtagaggaagaaaggaagcacgcgaggaagcaacaacgttgaatgcttttatgttcatacttcatagcgttggataaccacaatataaatgtcgatattatttgttgcgtatataatatgggatcttaatgagagagaccatatgttagatgccttcaacatcactcatttcttgtggctgaattcgcttaataattggtttaggcttcagattatatatctttttaaaaagcaaaaatttattgtaagtaacagaaagcacttctggtgctttgattaattcat

SEQ ID NO: 73793 - DNA, 320 bp, Glycine max
gacgacagatgggggcactcactgagttttcaaccatgggggcgatacttacacagctacatgtgctgaaggtagccaaccgtaacagcgacgtccgtgaagtccagcgcaagtactacgatcgcgacgtatgtcttctttacctcggcgaactctgtcctcacgaactcttacatttaacgaaaatggatatgggcccttgccctaaggtccactgcttgcaactgcagaaagaatacgaggatgcgaaagcaaacgggaccgatcattatgacaggcagttcgtggatgcaatagatcagcttattggtgaacgtgat

SEQ ID NO: 73794 - DNA, 172 bp, Glycine max
aatacccggtcgcggacgcgtccgctacttgtactaaccttacttctcaaacctttaaccttagcctccctataccaaaccagggctacttacgaaggttgtctagcacttccaaccctaactcttcgaactcgacaaccactccgttctccccaaagcttatccacatccc

SEQ ID NO: 73795 - DNA, 213 bp, Glycine max
tggcggaaggcgccgaatcttagaggggagtggatctgaatcgttttaccacttacataggacctctctttgtcactagaaaagatgtcaagttgttttacactcattcattgtgtctcatatagggatttctagtcagtattatttaagtgaaagtagattgattgatctacttcatgtgtcagaatattgtcttacctatgaacacatggt

SEQ ID NO: 73796 - DNA, 86 bp, Glycine max
ggaaggcgccccatatttgagggaagtggatctagaatagttttaccacttacaaggacctctctgtggcacttgaaaagatgttt

SEQ ID NO: 73797 - DNA, 370 bp, Glycine max
acccactcgtccgaccacgcctccgaattctagcggcactctttttttctctttttggttcaactctcttttttttgaattcacggactcttctgcttgacgctccaacaacgttactttccccgccctattcaggatcatattgaaatcggtagaagatataatgattaataaaaattctgctgtgaaagcagtgtatggtgatgaattttggacacctgcgaggagttcacctcaggatatttggtccataaggagtgatttgcaagtcccatcttccccttatttccctacctatgcacaatgacaagggccaccccccatggttgcggagcgtttccagagtgttataagtcagcttttccaatac

SEQ ID NO: 73798 - DNA, 255 bp, Glycine max
tattattatgtatttctttatgctgtcttcctaaggcctaacgctttctaatggaacttaccatgtcaactggtagcattatgttcaaaactattaatctgaacttgaatgtctcactcatctatttatttattcatcgtcataatacattggctacatggtacatgatccatatccaacagcattcatgctgagtaccgacatcttacagcttacacatgtagtgaccaatctaactagatataatggctttca

SEQ ID NO: 73799 - DNA, 215 bp, Glycine max
ttttaactcttccacgccatcttactttcgactctcaaacaatctttctctctaattacattccaaatatatattaatatatatatcatttacatcaacatcataaagctataatattaaaccataatatgaatattaaccataacaacttttcaacccattgtaatattcatccaaattttaaatctatttccacaaactcataaatctattct

SEQ ID NO: 73800 - DNA, 105 bp, Glycine max
acgaaaatgcgtaaccgtcgctacatgtcacgcgggggaccacgcatagtgtacggaacgtatggagccaaatccgttaaggcctaacataacgatccctgcgtg

SEQ ID NO: 73801 - DNA, 100 bp, Glycine max
tggttctctacatgggaacattgtggataaatgatacattgaaagtgctagatttaccctaggtaagatttttatccatcatcatctaatatattcatta

SEQ ID NO: 73802 - DNA, 269 bp, Glycine max
tccaaagattctttcaattatacactacatactatttttcaataattcaataattggatattaacatttaatgatcttatgattcatcattcaatgtataaactgttaactaaagccttcatatcattaaatactctccttataaacccttcaccatgatatcattatcatcacctttgtttattctaataatgatttatgttataatctctttcattcaagttgattaattcaccccatattttctctctctcaaccatattcctctt

SEQ ID NO: 73803 - DNA, 232 bp, Glycine max
cttgcaagaggccacctaagggagagagtcacaccactaattgcatcaatgatatgggtaacttttgatccattcttcatacatcaacccttttctagttcagtcattaacaatctaaagaagacggctcctacatgcccaaacgccactaattctattcacttctaattttttaatcatgctaactggttcatcaatatattttcgttacaactaaataatattcttcttt

SEQ ID NO: 73804 - DNA, 389 bp, Glycine max
ctcacaacctttacaaatacctatattactcagaccacggttatttcaacttgaggcgccgttccatgtacgtttcatcactcctcatactaaaacgctctaatgctcaaatcatctcactcactatatcgatagaccgacttgttacacatgaagagtcattttttaagaaaagataaaatgatcatatccaacttcaacgctcttaaccctctcaacaaccctttgcttcaatatccctacaccaacgccgtcaccactatactcaccaatgttgacagaatttttcacaagtggttgatccattattttaagatagttacattttatggtatcaataagaaggctcctattaatttcaatgtcaacacttttaccaattttttttt

SEQ ID NO: 73805 - DNA, 333 bp, Glycine max
tttctctctctacaccttctataatcaaaatttccttgttgctcatcaattggtgttatgttagattattttaaaagatagggtcaaatcaacataagttcccctatttttatctgttctcagttggtatgtaatttcattttattttagcctgacacatatctttccctcttataagtattattgctagttcatcatatactatcattaaccacgttcacactctaattttcatcacacattatcttttttgttaataatactatataaccatcttcaattattcttaatttttttatttttttatctaaaatttctctccaaaccatattt

SEQ ID NO: 73806 - DNA, 470 bp, Glycine max
attcccggttcggcccacgcgtacgcccacgcgttcgcttctccgatttttatgaccgatccaaaaccgcattctccttctactactgtcccatttacttcaccgtcctttccatgccttctcgtgttatcacaatcgactactctcttcttctcaaaaccactccctctacatatttcctctatctatttcataaactacttctactgcacttgttttatataaaaccacccaacactcttactcgactcaccttcttcgtcttagagtttttgcccttcctaacccttacgccgattaacccaccaacgacttatctttagcgtctcattctcatgaaaatttaagccattctgagactgacagtttctaatatgatcaagaatcttcaccacaaatggtcaatgtttggtcaacgattacatcctcaactttaagttgatcccgtggttgcatcaaagctttacttt

SEQ ID NO: 73807 - DNA, 156 bp, Glycine max
acgcgttcgaacacttccgagaagactaccgaagggtatacttcattcccttattcggttcttttataggtttcacttcttgcatttttgccagttgtctgtcggatagcaagatctctttgattaaattagtgtccttatctttacttacctttt

SEQ ID NO: 73808 - DNA, 272 bp, Glycine max
cccttttggtaatagccaatgccaacttgtagtcttctctgggaacctacaatggtaactcaaagcttgctgattgttcctcaaagtgcctccatgtttaatactacaagtactgatcaatctaagtgctgctatgaatctttattctattggtacaaccttaattttcttgttaattaataattgtgcttttaactctttccaaaataataatacgtttgaaatttttccttttcttttatccttattgttcctttattatcaattttaat

SEQ ID NO: 73809 - DNA, 233 bp, Glycine max
gagcgagtgtagggagagttactccaggctacggattttaccgagctttaccaggcgtactagctatgtcactggtacccacttctcctaatcgacactgtgccctgctgtcctgagccaccctcttcccctgtcaccgccgtgttcacgaccgacacagctgcatgcacaaacttccaaggtctaactcttcacgttcatccatataggagttgccatagaatgagctactg

SEQ ID NO: 73810 - DNA, 186 bp, Glycine max
ctatttcagctatagctcttaagggggctttagggaagatacaaggcacttgaagtggctgtacactctttgggattcaactacttgagaattctaatgcataatgaaatctacaaacagtcactttgtcaggaaaggtgtgtgatgataggacttgttccatcattaaatgctgaatttgatcaa

SEQ ID NO: 73811 - DNA, 134 bp, Glycine max
attgcatgtgttctttatctgtcttaattgtatcccctagggtaatgtatatagcactgatttcttctacttctacaaaactttcatgtgctacttgacttgtgaagttttggattaaaaactatattgctatt

SEQ ID NO: 73812 - DNA, 235 bp, Glycine max
taacggttggaaaaaacaacgaaaggaattgattgtttctttaattggcttaaatggattccctaaggtaatgtaaaaaggactggtttcttctaattttacaaaaattttaagtgctaattgacttgtgaaagtttggatgaaaaactatatgctattgggggattaggttcaaatataagttatcattctttggatactttttacaccttttacaaaatggttgacatttcat

SEQ ID NO: 73813 - DNA, 140 bp, Glycine max
aaaagacctccgaaaggtacttctttctctttaccacactaattcttcggtgtgaaaatcaggatacaatcctccttatcatggaatccaacctacaacctctcatattacatccataagcctctcatgtattccataac

SEQ ID NO: 73814 - DNA, 121 bp, Glycine max
ggcattgtgaaatcaacagagaaacatttcactaatagagagacataagcataatattgagaaataatggagggttgtacttattgtgtgaagtcgctatgccttgttgggtttgtggtgc

SEQ ID NO: 73815 - DNA, 409 bp, Glycine max
gaaagtgagaaaaaataaaaatcaaagagcatagtgtcagggatcattcacaagattggggagacccttcatgtgggagggcacaagaaggaggaggagcataagggtgagcaccatgctggagaatacaaaggggagcaccatggtgaacacagtagtgagtacataggagagcatcatggtgaacacatagctggagagtaccatggtgagcacaagccagagcacaaagaggggttcctagacaaagtcaaggacaagatccatggtgagggcagcgccgtcgtaggcgagaagaagaagaaggagaagaacaagaaggagcatggccatgagcatggccatgacagcagcaacagcattgacagtgattaaactgatgcatcacctatatatttaaaagggttat

SEQ ID NO: 73816 - DNA, 134 bp, Glycine max
ctatatgttgaggtctactcaccatacaactgtgcgcaatttgccagccacggtctcgtactcactctgaactctctctcatccatcaattcctaactgccttacgttgataccacatcatatcatactcatat

SEQ ID NO: 73817 - DNA, 84 bp, Glycine max
gtaagtgagaaaacttacaaatcaaagatcatggggtcacgggtcatttacatgatagtagatgactccttcatgtcttagtgg

SEQ ID NO: 73818 - DNA, 294 bp, Glycine max
ggagcaagagtgaagagcgaagagaatggctcccaggggtttggtctttttggctgtgttatgcttctcagcactgtcactgagtcgttgtcttgcggaggataatggacttgttatgaacttctacaaggaatcatgccctcaggctgaagacatcatcaaagaacaagtcaagcttctctacaagcgccacaagaacactgctttctcctggctcagaaacatctttcatgactgtgcttgtcagagttgtgatgcttcacttgtgctggacttcacaagaaggagcttgtc

SEQ ID NO: 73819 - DNA, 399 bp, Glycine max
cgatatcatatcaaatataatagtgcgatagggaaacggttgttcctagcttgtattaaaaacaatccgcaatgatatgattatagtagcgaagtgaggatatatcatagacaacacatcctgcaaataggtgctcgactgaagctacttatatcacaaacgtattcgcgtggataataatgtacaagataaagtcacatgctcaaatattaatacaatttaaataggtgaaaaaatgtataagaaaattatatgtatatatatattgtttttacctttatatagaagtcatgaacgaaaagtaaagaatttaacaacaataaataatattggttttacaggaatagaacgaaagtcgttctttgagcctaatcaaaaaaaattattcttcattcttat

SEQ ID NO: 73820 - DNA, 295 bp, Glycine max
ctccgacaagacgacacacggggataacacatcataaataatccttattgacatactgattgggaacagtcacattcacataatctttgtcctgcattcatataactttgttccattccatctatctatgatcatctccaccaccacttgttgattcattcattaagaaaccacacacttttgaattgacaacgggatacctctacctatcttgctgatctgaatccaatgtattaatctccaattcctgttcctcttccatagactatgataaaatcatcatcatcaatatcca

SEQ ID NO: 73821 - DNA, 199 bp, Glycine max
ctcacgcatgcgaacacacgtgggaggatgtgatagtacatcacacagagacccgtttcggggggtaagatcctatcggccggtcttcaagagccacacttgtgacagagttggcgagttggcatggctcatgaacaagggaggcaggtgaaccaggatggatgttgtgaaggagcccacgtatttgaagaaccgtgat

SEQ ID NO: 73822 - DNA, 308 bp, Glycine max
  unsure (1)..(308): unsure at all n locations
gggagatgggaactgcaataagcaaacgccaattgatacgtgcatatcagacatctactgtaaaacacacactcgctccaaaaaaatactatatcaccaagctcacctatctgctnatctcaaggccttatacaccgagcatgcgagataacctaacacatcatgctatatacttacccatcaggattccaagcagatacttacacaggtagcagcactacaccatcaagagcatagaagcagaacgtcatcacaagaatgttccatgatgaaccaatgaaatcattggataccatgtatgaatcata

SEQ ID NO: 73823 - DNA, 181 bp, Glycine max
aggccacgcgtcacgcttccatacgacgacaaaacgacacaaggtgatatacgacgacagatgggtacgggggcaaaaagacgaccggagggaactgactcacgacatggacgacaatcttggcttaacaatctgatacatgcatgaagacgctgaatgttgaccatggagaaaatgcact

SEQ ID NO: 73824 - DNA, 318 bp, Glycine max
cccactcgacccacacgttcgaacacgacgacaacacctcaccatttcacttttcagatagaaatgaatatcaagggtcaacgttaaacttagcccgttcacgatactcatcactttaccacaccatctgactcttacaaaaccttaaatttctcatcacgtctaaaaccatctctatttgtaaaacccaagttcacatacacataaatccaatgtcataattatactatctaacatctactatcaactaacctctcgctgttgcaaatcctaatgactacgataatgcttcaattgaccatgttcatcttctcgtac

SEQ ID NO: 73825 - DNA, 354 bp, Glycine max
acgcgaacacaccagaccgagcatactaacttctaaaatcatcgctcttactctctacaagggtctcaggtcactattttacgacaccaccacaccaaattctattactatctccacatatcacccaccttctaatcttactgattctttcaatttcatctgatttgatccatgactctaagactatccatttaactatcactttccctagatcgatgctactcagccaaccaatctacacatcattcagacgcctactacttcctatcacattcttccttttatacactgcttatcatgtaactaatacatatgttgactacagggcaacacttgccatcatatataaaaaca

SEQ ID NO: 73826 - DNA, 104 bp, Glycine max
catatgtttaggtgtatgttgattagagcaccgacagtggtgaaggttagggaatgtcctgggacatcattggactccatctactctggtttgaaatattggga

SEQ ID NO: 73827 - DNA, 340 bp, Glycine max
tgctagaagacgacggcagaagatgacctctccaatttgcaaaaaccaattaccacctggatatcacttaactcctattaaactcacactcaccccatataaaccctccttacacaactcaaatcttcctatctgaacaccttttagcactatcattcgaataacctttacacatcaagattcaaacttactcactaagttacccgttcaaatttcaactgccttcaatcctttccctatctgcatactctaatcaatacgtcaccacaaaaagggacaatgttcataaaatcatacaattgcataccttgtttgaatcaccttaaaacctttaccctat

SEQ ID NO: 73828 - DNA, 127 bp, Glycine max
cgacagatttcaatttagagctagactatatgaaactgataaatgtcaaagctaggctaacatctacatacacattaattagctccatcatcatacttcatatcctatccacataaccaatagccat

SEQ ID NO: 73829 - DNA, 402 bp, Glycine max
cgacacatgactacggatgggagatgccctcagaagggactgcttcaagaaattattttagacccaggcgacgacattgaccgcgatgatgatggatcacacagatcaaccaattaacgggaaataagtccacgctatcgatactaacaacatggaagcctaacttaaccgttactagacaattcgatgactggtcctccaactcgctatacttgattacgctagagctgctttagcactgcaccggcatactgtcacttcattagctgagtaattttaacacgaatttcgatcgcatctattgaaagaggacagctacgtttatatcttatcataatttcaattggttcacaaagcatgcttcctcgcttagtgatggcaaccattcctctggtttttaca

SEQ ID NO: 73830 - DNA, 338 bp, Glycine max
tgacagaggacccaatgaacccctatcatatctctcatcatgtatatacctcaatatttggccatcacaccactctattattatcactatcatcccatccaaaattatctatcaccactaaatactccaactaacctaacctactatcccaactcttcactcatgtaaacacactgcgccaattaaccatagagtacaccagatactcataaacatatatttgcaggctcagaacatattttagaccgccctatgaatattaacgaacgagaccatcactatcgacccaaatatccacctgctcgatctcattatgcacatgtcattaaaacaatatt

SEQ ID NO: 73831 - DNA, 52 bp, Glycine max
acgcgtgcgaacaccacagaaaagacctcatactttgattacctatcacacc

SEQ ID NO: 73832 - DNA, 224 bp, Glycine max
aatggggtaagagtttaaatataaaaagttagaggaagcaaacgatacatattcaatatatttatttgtaaatgaggaagtgcattttatttttgctgaataatgagggagtgcatttgcacccatgttttttttatcggaattgcacccatggttataatgtctttatattttatcaaaattattaaaatttcgaaataagtagaatttgttggtttgcattt

SEQ ID NO: 73833 - DNA, 263 bp, Glycine max
atgagaccacacgacgggacgatatgatataagacctacattctacaaggtgcttagaatcatccatgacatacttccattatcattcgttcacataagacatacacaatactttgtcctaataatgacgattatcactttccatagtatctaactcacaattattgcaaccttagtgatgcccatagtatatttacattaatcttcttaaattgattcatgttcatcatattacgctgttaaggtcgtacatacatctgatg

SEQ ID NO: 73834 - DNA, 223 bp, Glycine max
caattcccaattcgaccgacgcgtcacgccacccgtcacgcactgcgtacacgacagcagacaacaggacggggatcgtacactcataaatcaggtacatgggccatgatactacgacctggatctagccaaacgacacacacagctactcataactagattagcgctcaagttctactgttgaataggctgttggtaggcctttcgaatatcacacaatcag

SEQ ID NO: 73835 - DNA, 217 bp, Glycine max
tgatgcatcacctcgttgtgttgtggttaaaaaggtgaaccgggtgtcaaaaattttttccgaagaagcccaaaaaatacccttttttcgcccattcatcttcttgcaagccattttaaccatattcttgaccgacatttgcatttaccggggaagtgaaattttatgcaagatgatgataatcgcctggagattacccgaactaaatttggaagtt

SEQ ID NO: 73836 - DNA, 203 bp, Glycine max
cagtacatagaccgctgaacatctgagggacactatatccctaatatgtatcaggtccattactgtctccgaacaactgttgtcgtactctaatgctattgccgatgatcttagccatacatacatgccgtgctatgcgagtatataatattgatgaggaagaataacacttacttgatgtttaatcacaactaccatccata

SEQ ID NO: 73837 - DNA, 150 bp, Glycine max
aggcgtaagaccacgcgagcgtacgctaatacgacagatgaacatcatagggagtcctgatcctgaacatcaatatagaactctacattgtcattactctatcactacaataacctgagctcgacacctcaagccagacgctcagaacag

SEQ ID NO: 73838 - DNA, 234 bp, Glycine max
ggaacacaagttcgccaacgtttgatgctcgtcaagcgtgcacttacatagaataccggaacccgatccaaacgccaacttattcctacacagcttcccggaaatatggtactcgtggctgctcaagatgatagctctcaaccacgccgcattcagagcgggattctttaactacataggttacaaaatgtgcaaaccgccgtgtttacccgataagaccttttgttccgatct

SEQ ID NO: 73839 - DNA, 297 bp, Glycine max
gattgaaaatcttttaatttcagatattggtcaataaatgatcttgacctaatatattgaaaatcaattcaaaaatagaatctactgtctaaagactcattattcaaccaaacgagacagtcgtgttactctatagtgactgagcaccagaaaggttaagaatgtagcataaccaaaacaatgaaacacgtgatgtccaagatcatgctgttaacggaggtatcaatggcgatgatgcttagactataaataaccttgctatccgatctatcaaggcaggattactactttgataaa

SEQ ID NO: 73840 - DNA, 418 bp, Glycine max
cccacgcgtccggggcggaagaaaaaccttgtatacagactgatggaaagtctattagtgcttccacatttcattaatattagttagattagttagattgaatagtttttaatttagctaattcgctttcttaatcttaaaagtatatatatatataattatataatataaatataatttcttatatatataatttaaaatattttacaaaatttttttattctaaaatcgaatagaaaaaagaaaatctttcttttcactaacctctagtaaaaaaaatgaataggcaagctatcttccgattattttagtttttttagagaacgaatcgggagacattacgaaattttttcaaatagaaataagaaagagtataagtatgcaaatgaatctggcttgattcttttttttatactta

SEQ ID NO: 73841 - DNA, 300 bp, Glycine max
gattcctaggatgatgcgtctatattacgcacgacggctttctgcttttcaaattatgtgtcgccccaatcctttatgcttctcttctcgccatatccattgagcgactttgccttgccgccactatgattgaatgtagacgacaaccgacatgacagtgcgtgcttgatgttcaagacactgttgcagggacttgaactttgctagaagctgggctataggcaagtgtagtgggattctaactgcgtcacacctgatgagcttgtgcacaaggaagtatcagtgcaacaccattttggc

SEQ ID NO: 73842 - DNA, 380 bp, Glycine max
actcttcggacgatgccacattattacacactacgcctatgaacatcacaaattctgggtccacccaatcctacatgcctatctcttagacatattcattgactgactgcgcctggcccacactatcatagaatgtacactacaaccaacatgacagtcccgcctttacattaaatacactgctgaagatactacatcattactatattctgacctataacatatattacatctatgctaactgtgactcactcagtgagcttgtccactaagacgtctaagtacaacaccactacagcaatgagctctcctagatatcgaagcatttgtatgtacactacaacgcattccttagatgaaacaaacacttatgccaacat

SEQ ID NO: 73843 - DNA, 134 bp, Glycine max
aacaccgaacctgccactacacaatggggcccatgatactttctttttaccgggagttctttttcggcattaacaactaccgtatcacttgctgcttactgaaccgaacaaacgggcctcggaccactttcaat

SEQ ID NO: 73844 - DNA, 109 bp, Glycine max
acgtgtgagaacacctccaataagaccacagaacgtgacactacacatttgcgcccgtgatacttcttctttaccttcacacctttcactcttctatcaacttccaatc

SEQ ID NO: 73845 - DNA, 125 bp, Glycine max
acgcatgcgtacggacgcctgaagacaaccgactggaaggggcaagattgttccaccatctggaagctgggttatcgctctgcgaatattaactttcctgtcaaggatcatgctgcactaggaaa

SEQ ID NO: 73846 - DNA, 370 bp, Glycine max
gcgaaattaaaattgtatcaaaagaaattactactaagcattaactttataactttcgttaatgggttatttctattattacaatgtatataataatttgtataaaataagcaactaaagagaatattatttaaagtacaattcacgttcattaataaagtacaattgatatgtctggtgtcaaatatcaaaagtgcgttggtacaggaaataaaaatttgtgtacgatttacggttgatatgaaagtttaatttaatatagcattacactaccttttttaatctaccacaatattgctaacaaacaccaaccggttttttcttttgatcatatattgtttatcatagtatgctagattcaaatattaac

SEQ ID NO: 73847 - DNA, 256 bp, Glycine max
gggaggattgttctaccatagggaaaatggtcgtaacctctcccaaattaacctttcctgacatggatcatcttcaactagaaaaggaccttgttcaattggattttgatccctctgacaaggcacctgggtcaaagtcttactacttaaaaattaaacccttttatttaaaaaagcatcttttaaattcgcactttgtttaatcaataaaataagctttaactccattaacactacctgaacttttccaaccctc

SEQ ID NO: 73848 - DNA, 374 bp, Glycine max
tgacatcatatcaaatataatagtgcgaggtggaaacggttgttactagcttctattaaaaacaatccgcaatgttatgattatagtagtgaagtgaggataaatcataaacaacacatgctgcaaataggagtacgactgaagcttcttatatcacaaaagtattcgtttggataataatataaaagataaagtcacatgctcaaatattaagacaatttaaataggtgaaaaaatgaataagaaaattatatgtatatatatattgagagtacctttatatagaggtaatgaacgagaggtaaagaatatagtaacacgaactaatattgcatttacaggacaagaacaaaagtgttttatgagcctaataa

SEQ ID NO: 73849 - DNA, 353 bp, Glycine max
tccggctgcaagaagacaccaggaggggataagaaataagttataatatattttacattgtaccttatttcttataaaaagaatcaaagatagataagattaagcaacttagtatctttatacacaccatgcacacaccatggatatatatatgtattgtagtaactactatggggaattatcggagatagagctatgcgattggtgccaaagcgagggaagaaattactcgagatcacatagctccaattcgaagaaattagcggtggccggaaacgacgccggaaccacgacccgttcggaatattccggcgagaaaatcaagcaccatgatcgtgatcaagagatgagtg

SEQ ID NO: 73850 - DNA, 118 bp, Glycine max
ctcaaaaaccgacagaacgggaagccgacacatttaaaataaagaaaccctctctctattttacttccattgcatccacattcacattcttcaactcgcccgtgacacatccattatt

SEQ ID NO: 73851 - DNA, 357 bp, Glycine max
ggtagagagaagaaagacttgtttattgatccggaaggccgtccaaaagaggcacacaaacgcagaaatagagaaacgcgattttcaaattattattattattttttccgactttgcattttgcaacctaagctcgcatttatttttcttttttttttttcctcttcaaagcactcatcgttttgttcttgttgtttcattagctgcctccgctttctagggctgcaaaccaccgaaacattttccgaaaaattagacaaagctagattgatcgaactaaattcaaataaaaaaataaaaaaaaataaggaaaagttcggaaacgcggagaagaaaaactgaattgacaattcaaaa

SEQ ID NO: 73852 - DNA, 386 bp, Glycine max
ggtaggagacaaaatgaaaaaggaagatattttgtttgattagtttaaaataagaaaaaagtacatttataaaataatatcaacatccttaaataaatatggatatatggtagtataatgaaaggttttttttttgtcctttcaatttaaagtgtctgactcctctttccaactttattttgtttaggtaagaaaagaaaaagaaaatgagtaaaaactatataaaaaaaaagtgagatgaatcatagattgtttggtacaagaaaaattgaaagaaagaaaaatattttctctcttgtttgattgtagatatgaataataaattcctatttatgggtatcgcttgcacatcttttttttttttttttctaactttgacgataaat

SEQ ID NO: 73853 - DNA, 371 bp, Glycine max
ctacacaatgagcaacactaagtctaaatactgggcggccacatccacatgtaaagtcaccaacgcaaactgctgtaaaattttcaacatttagactcatgttagatacgataatactggtcaaagcattctacaaagataaaaatctgtagtgcaaccacccaatgtcaaggagattgatcctgatttcactgcaagcaatgaacctctacattgaaagctctcaattacccaattcaatggttgattaacatgactgggtttcgaaaaaaaacccttttccagagttaacagatagcgtattaccatctgatatacaatataccatctccagatctgtactcaattgatatgaacatgggttcatggta

SEQ ID NO: 73854 - DNA, 266 bp, Glycine max
taggtacttcttttagaagacgacatataatttataaacagcccgtttttatttgtatgaaactcccaacacaattttgtggtctttttgccattcttatctaaagcttgtgtctttctgcttcgattgcatcttctgctgcgtaaaattgattcttttctgattcttccttatatttcatctctgaaactagttctaatactttatctacatatctctatattcttattcaacgtttactttttatcccacttctcacttttcta

SEQ ID NO: 73855 - DNA, 398 bp, Glycine max
gagtgttctaaagtgtcgagtttttatatacgtggtagatcgttcttgtctctgtatacctaaatggtataatttctaattgtttttaacaaaagttatagctgaacaatttctatatttttaaccaaatactttttactctacttttctaacgagtatccttgagtactcgttatcaagcgacccttaactttacagaagagattactgactatataactaatcgacgaggcactaactaattagttgtattttagtgaagacggcataaactctagcaagtcaaagttccgaacagaggcctctaagcttgatttataatgggggcattgacaaatgactaaccgaccacaccagtatttaattatgacgttttatgacactacgcagcatgcatg

SEQ ID NO: 73856 - DNA, 139 bp, Glycine max
  unsure (1)..(139): unsure at all n locations
attaatatcaacacgggnaactctaattcttacccccccacatctctcaaattacttatncacctacatctaattattatccttttttatattttcttctccctcctaancacatttaaaactctttnttcacctaaat

SEQ ID NO: 73857 - DNA, 181 bp, Glycine max
agattggaagaagacaaggaagtgaacagaaaggtcttcagaccagacaatatctgaacaaaatacagaaatgtcacgagcaagaaaggaaagaaaggaaattgtgacttacgacacatgaggcggaccccttcttgattaccaaccagaatctctcgcgttggcgactttttcgccccgc

SEQ ID NO: 73858 - DNA, 397 bp, Glycine max
gactattctaaaatatacgtctttttatatacgtggtaggtcgttcttttctctttatacctaaatattataatttctaattttttttaacaaaagtaatagctgaacaatttctatatttttaaccaaatactttttactctacttttctaacgagtatccttgagtactcgttatcaagcgacccttaactataaagaagagattacagactaaattactaatcaacaaggcactaactaattagttgtattttagttaaggtggcataaactttagcaagacaaagttccgaacagaagcctctaagcttgatttataattgcggcatttacaaatgactaacccaccacaccagtatttaattatgactgtttatgacactaccagtcatgca

SEQ ID NO: 73859 - DNA, 339 bp, Glycine max
ggttctagtgtgtgattgtttgttgttgtggctggttcttcttcttttgttgttctgtgtttgtgtttgttttttctctcacctgaaaatgtcttgctgcggtggtaactgtggttgcggaagctcctgcaagtgcggcaacggctgcggaggctgcaagatgtacccagacttgagctacactgagtcaaccaccaccgagaccttggtcatgggagtggcacctgttaaggctcaatttgagggtgctgaaatgggtgtgcccgctgagaacgatggctgcaaatgtggaccaaactgctcctgcaacccctgcacttgcaagtgaggtgttgggag

SEQ ID NO: 73860 - DNA, 90 bp, Glycine max
attgcctataaagtaccagcgaggaaaaatgagtactaaaccttgctaactcttgatgaccttgatgtagtgattaaagactactatgaa

SEQ ID NO: 73861 - DNA, 285 bp, Glycine max
  unsure (1)..(285): unsure at all n locations
agaagaccacagaacggaacacatctaatttttatcacatgtatctctaattgtcatttcgctttattttantaaatttctaacccatccattgcctaanaaatctcctgcaaaaagtagacataactcgaacatcaataatcattaaccattattagaacctaacctcccttttctcccaaaaaaaaaaaagaatcctgaaaactaaccattccaaccctattcaaaattccgcgaattcttaccaccatccaaaaagattgacttcaacaacccttcttcatt

SEQ ID NO: 73862 - DNA, 416 bp, Glycine max
agaagacgacagaagggggttctagtgtatgtgattgttgtgactcgttcttcttcggcggtatcttcttcttttgttgtttgtgtgtttgttttttctctcacctgaaaatgtcttgctgcggtggtaactgtggttgcggaagcgcctgcaagtgcggcaacggctgcggaggctgcaagatgtacccagacttgagctacaccgagtcaaccaccaccgagaccttggtcatgggagtggcaccagttaaggctcaattcgagagtgctgaaatgggtgttcccgctgagaacgatggctgcaaatgtggagctaactgcacctgcaacccctgcacttgcaagtgaggtgttggagagctaaagcttcaagcagaaatggcccttagaaataatgataaaaactatatgtag

SEQ ID NO: 73863 - DNA, 255 bp, Glycine max
aagacctccttaccagataacatttacaataacaccgcccgcattttttaaaaaatacctcatcctttcaacatccctacaacttcaattttacttacacatcacttcaacaactcatccatcgttattaaatacataaaggaacacatattcattcattttaacatctacgaaacatcaatactccttacctttcataaactacatccccccacccacatctatcattatctaaccttcttcttacccaccaat

SEQ ID NO: 73864 - DNA, 383 bp, Glycine max
aagatgttcagttagtggggtgggcccttaacaggttgcttgcttggctgatacttcttgtacaacctttttcaaaacaagtatttccttttgttgtgttttttattattaaaaaaggatttgttacaaataaagtgttggctatcattgacttatgtttattaactatgtaggacaaaaagggggctgagggaccggcgaaactggtggatatgctggaactagatgacaatcttctatactagataacattaatgattccagtttttcctcaagcctatgcaggtgttatggaattcaactgtgtttggggtgtataatgatgacgtccccttgtacataaaacattaagatctttctgaaattgcacatagtggtcaatg

SEQ ID NO: 73865 - DNA, 80 bp, Glycine max
cttattttacacacacacttcactaatcaccacccgcctttattttactacaactcccacccctctctccttttatatat

SEQ ID NO: 73866 - DNA, 381 bp, Glycine max
gaccagatcacattgctcaaacgccgagccaaccctatccttttcctcatcaagtttctatttaggctaagatgaaaaagagctcattgacaagaaccaccattaatccttgagcagctccgcaaaaaggattgcatcatgtccataagtcagctgaaatggtgtacaactagtagctttggttggagtatttcggcaaacccacaatgcttcttgcaatgttttgtgccatcttttcagatttttctctaaactcttcttgaagatctaccaagatcttgttagtggcttccgcttgttcatttgcttggtgcccattggcagctgctcattttgtgcccaggtgacaatctagtggtttggttttgtcctttgcggaag

SEQ ID NO: 73867 - DNA, 169 bp, Glycine max
cacaaaaggggatttgcaactttatcttatgattgctagcggttggttacttatgattgctagacccttgactgtctctacaggatttggagctgacgaacgatggatgtcgaaatgtttgttttaagatgggggtatataatcaaaaaaacactcattttatttggcc

SEQ ID NO: 73868 - DNA, 355 bp, Glycine max
  unsure (1)..(355): unsure at all n locations
gaaccatcgtgacctaggagcttttaacctacccatgtattcacttgctacctcatggtacctnntgattatttatatatatatgagtatatatnnaagttatctttgctcgagccaaaaaaaaaaaggggacctaagtctttgtggatgtgctatactagcacctggtccaaggacctcccttgtaacaaataacaacaacgaaaacaagcaagcctttttctactagatggcatcggctagatggactacattagcaagtgttaaactgttaataaattataattaaggaaattatgctattatcttgtttgacaattgtgggaatgatttcgggatgcactctaactatgat

SEQ ID NO: 73869 - DNA, 263 bp, Glycine max
  unsure (1)..(263): unsure at all n locations
gtcgggtctatttttttttttattcttttctttaaagaacacttctcttcccccccagatttctttctttactcaccctcaatttcccttctattttncttcctgctaccttattatctatatgaancaactgcctggcgtttggaaatacctttactcaataaacaattggagcctcccaaatctaatggcatcaatgttatcccttaagctgttataaatcccttcaatccaacaaatcaccttctttattacccaaatca

SEQ ID NO: 73870 - DNA, 289 bp, Glycine max
cggaaggaaggcccggactccgacgccacgcggtcgcagtacggctagcagaaaggactacccattgcccactggattcctgatcttcgtggatttagagggtaagctacccttggaatgacctattctcctaattgcggcttctacaattatcctgcacacatgcatgaatcacccaaaggcaaagatctaccttttttttattctacaaaaggtactaccccaacttcctcactagataaattattcctaatctggactagaatatcgactcatatatgcaacattc

SEQ ID NO: 73871 - DNA, 383 bp, Glycine max
gaaggtgcaagagtttgttgtgagctataagctagtttatcgtgaggagaatatgaagttgtttgttttctttgttgctgcagtagttttggtagcatggtcatgccatggcgcaggctaccaaaggttccctctccgaatgaaaactggctatggtgagcgttcttcggaggtaaaatgcgcaagttttaggcttgctgtggaagcacacaacatccgagcctttaaaaccattcctgaagagtgcgttgaaccaacaaaggactacattaatggcgaacaatttagatcagactctaaaacagttaaccaacaagctttcttttatgctagtgaacgcgaagtccatcacaacgacatatttatattcggcatagataaca

SEQ ID NO: 73872 - DNA, 77 bp, Glycine max
ccgaaaccccaaaatttcagtatctagtcatcaatcatcaacacatatctcagcgtgtttttatgtgaatccacctt

SEQ ID NO: 73873 - DNA, 176 bp, Glycine max
ctcacacatacaccacataagagaacactatttaaaaagaaagaacatgttcaagaagcagtgtgagccatggagaaaagaaaaaaaaaaagaactgaactccttcaattagatcattccttcttttcttcaaatggtagcatgaatacattgttaatttctgagatggcgagtta

SEQ ID NO: 73874 - DNA, 233 bp, Glycine max
tggaaggaccgacccgagcgacgcgtaccgctgacaaaaaaccaccaaaagggactcgatttatgaaattaaaacaaagctttaaacgcacgtgactttcgagtttcaaaattccttaaacacccacccactttaggtcactcaatctgttctaccatcaaaaccttctttacaccaaacctacatgtagctctttctatataaccatacaacactgcctgatcttattataa

SEQ ID NO: 73875 - DNA, 177 bp, Glycine max
ggtgtcagatgagaacatcatgatgttacatggggggaataatttgctcacagagttagcaatacacattttactcttatttcttatatctcttcctaagaagaatctaattctaaacttcattacacatatatctacagatttcttactttctatctcaatcttttcttctttctt

SEQ ID NO: 73876 - DNA, 436 bp, Glycine max
  unsure (1)..(436): unsure at all n locations
cccacgcgtccgtccaactcatttcttcactctgattcttgccccaagctgtaactgtaactgatccgcggaccgtaaaccacaagagagaaatgggatctgctggagcccttaggaacattgttcgctctctctcagtcgcatcatcaagagctttattgcctcgaatctccaccaatgcttcgatggctccaatttgttttgctctgccatctccctgcaaacctcctcaacggcttcttcccctttggagtcacttccacagcttgacagacactcgcttccccaagagacgcccctctgaaagacctcgtcgaaagagggccagcttgagaccctctgggccttatgcttgggttcaatatacacctggccaaccgatacttncaaacaagcctaatgaaaggagtgtcaaaaggagaaatgagaagaaacg

SEQ ID NO: 73877 - DNA, 177 bp, Glycine max
cccacgcatccgatattgtccaatcaatgcatcgtctatatgtaaccatttttcctttcagtaaatgtgctaaaatcataatccagtttgttaaccttgtcttctttaaatattttgttctattaaccctttttccatattaaacctgcattttctttcaaacctttttttaacttt

SEQ ID NO: 73878 - DNA, 449 bp, Glycine max
cccacgcgtccgatattgtccaatcaatgcagcggctatatgtgaccatgtttccctgcagtgaatgtgctaagatcataatccaggttggtaaccttgttctgcttcaagtatatgttttgatgaaccattttgcagatgagatctgcattttcttaacaaagcatcatataacttttatgagagtagtacactagcacctgccttccttactctgtgaattaaatatagttgataaattgcttcatctgtcttagttccttctcctgtgaggtctgttatgtatgctgaattggtatcatttacaactgttacattgtcattatgctcaatactacagtaggcggccttatgaggggggaaacttaggttgtaatgtgaataactgctttttagtgttaagttgataaaaattgccataatttatgatttttgtattagctgataat

SEQ ID NO: 73879 - DNA, 441 bp, Glycine max
gggttatggggtttgctttccatgtattaagttttctgatatgacgattatgatctgtttgagacctatagcaaataaggttactaatataaccgatggagtgaatttggggggaagttttcctgtgatttcactttttttcttagggttgaccaatatggcattaaaattgaagtttcaatgaataacttggttacaaagaaaattgcttctatgtggctcaaatttcagtacccttcacgattggttgctttgagctttcttttattcttgattgggattccaatccatcctttgttgtttccttgcccaattttgttatattgttaaaactcaaatatattgtattgcttgccacaagatcagtgcacattgttgatctattgaagaatattttataatataggcattctttatggactataatggcatatgacttaa

SEQ ID NO: 73880 - DNA, 322 bp, Glycine max
aattcccgggtcgaccgactcgtactgcccaacatcattctttccccaatagcaatattgtctacagtctccaatactatattaacgatgttgtgtgtaaattgaagatccactagaaactataccaatgacaaacctccaaataccaaaccctgtgacaaggatgatatttatcaacgacgatccataatcccttcctatgatgacacatataaacccctttataatatacagatctattccaagtctaataaatcctttatattatcaacaaattattcaatactgtgattataaaaaaattcctatactaactccacta

SEQ ID NO: 73881 - DNA, 354 bp, Glycine max
gaattcccgggtcggccgacgcgtacggtggccattaaggcaatagtgttctggaagtaacatttttctatagcaaacttatttttgggtggcatctaatgtgggtgtacaaaccgttaattgattttcttgaagcataaaagaaattagttttgccgtatcgggatgaagcaatgctgtttcctgcagaagtaaccattaaatcagagtttgtgctttgtagtgtgatatttgtttatgtaagacgccttggattacatatttctaagagaatgtcattgtcatcagattttgtgccagttatattatttatacaacaattttctattaaaaaaaacataataatcacttatt

SEQ ID NO: 73882 - DNA, 84 bp, Glycine max
attccctagtcgacccactcttcctaaaaaaaaatacaatatttaaaaaataaaaataaaaaaaaaaacacaatcactctataa

SEQ ID NO: 73883 - DNA, 124 bp, Glycine max
atctacttttttaacaacaaatataaatttatattaggcccttctaacaaactacgccggtgatttacccaattactattaacttttccactacttctccctttcacatttactaactcctttc

SEQ ID NO: 73884 - DNA, 53 bp, Glycine max
attcccgaatcgacccactcgtaccgactcaccaaactctatattcaaaatat

SEQ ID NO: 73885 - DNA, 99 bp, Glycine max
aatggataattttttttacctcttgttagatattgtatgctagttggagatcatccgctgggttctgtgatcaatgcaactgcgcaaaaattttataca

SEQ ID NO: 73886 - DNA, 348 bp, Glycine max
aaattgtaccaagatatggaaagccgaatataaaatgcagctaatgtggttcaagtacccggagaatttcaaacaaagggtaaagcattttatcagtactattcatatacttctcgacgtaaccattacacaattcttcaaatattacttcatgtaaaggactctattactcaaaatgtatatagaaatgatattcccatattgttatattttcctctctaaaatataccccaaattgcacataacttcaaaacttggatcaataaattcattgtcaatggtgtaatcaattattatcaatgtataaaatatccttaaattaaaattgatacatttacttaaacaatt

SEQ ID NO: 73887 - DNA, 365 bp, Glycine max
agcggttttatattagtctgttatgcagttggaatgcgggcacggtaccttaccagtatcctcacgttatttcattcattttttatgtgatggatgatcagtgaaactataagtaaaatactagaacactaatcatacttattttctggactaattaagatgatgatgatgataaaagaaaacgagtgtgtattggtaaaacaaatgctcatttaatttttctattttcagaaccataaatttacttaatgcagcgatatcttttaagtattattatatcacatattgaagtaaagcatcaaccatttaacatgttttttaagtgtagattaaagttagcattattaacatgtctggggtgcaat

SEQ ID NO: 73888 - DNA, 303 bp, Glycine max
ttggtacgggtgcgaggggacgactgaaggggacattactctgctctacttccattccgtcgattcgacgtgtaaccgttgagcgcgttgcgatcatggcgaaagtcacttccagagacgtgcaagagatcgtggaaaaactctcctccgataaagccaaagctcgcgaagtcgttttcttttctcaaactcactgtctctattccttatcgagctcgttaatctgcgattttgaatggatattaaaaacctttgttgtacgtgctaatgatatgcatataacgatggataaattgacgtgat

SEQ ID NO: 73889 - DNA, 102 bp, Glycine max
taatgttacattctctaatctcaatcacaaaattgagaactgtttacattcttatatactacaaccaaatcattacatacaatcatcattcatactattatt

SEQ ID NO: 73890 - DNA, 96 bp, Glycine max
ctacataattttacttttcaaaatcaagaaaacaacattgggcatcgtttatatttaaacagactataaccaaattatctaatacaatactcatta

SEQ ID NO: 73891 - DNA, 88 bp, Glycine max
  unsure (1)..(88): unsure at all n locations
agccnagcggagngcgagcaacaaaanagagccaaccaaaaaaaaaaaaaaaaaaaaaaaaaaaaaagcggccgcacaagaggaccca

SEQ ID NO: 73892 - DNA, 209 bp, Glycine max
tgttatggttattactgctattcatgcatccggcttgagcctgcctagtcccgtttgatgaacaccagttctgtttttgtgaatcagcttttagtgtcaaacgatgacaataatcaaattattctccatgccttcaactatgtgccctatttaagctcccaaactaatttgacagtgtcaaattacttccttgttgaatcttataaata

SEQ ID NO: 73893 - DNA, 274 bp, Glycine max
atgattttacacattcacttcagtcagtgtttactgtttaactttgtacctctgctctcacttccttccttccttccttcaatcgttctaactcttatcatccatggctagcaccaaagttcatagggttatgactcaacccattaacttgtattttagtgttcttcatagcaaagcacgcattcatatttggctattttagcaaaatgattttatgattgatttcataatcattgtttttgattaatacattaatttttatcttgtatattct

SEQ ID NO: 73894 - DNA, 377 bp, Glycine max
attcccgggtcgaccgcacgcgtccgcccactcgtccgcccactcgtccttttacgctttagcggctacaacaacacgacagaggcaggctctctctttacagccatcgatccaaaacttccttccaaaattcttctgctatataatctcatcaatgacattcttactaaccctcaaccttttctctacctcagcaagctcataaaactcaccaccctcaaaactatttatgaataatacattaacaatctgcctaacactttcactatgccttctacacctacaacccctattactcccacaactacaacgacacctatatccatacctaaagctcaccaccttcttatcatccctcttccatcctgttaacaact

SEQ ID NO: 73895 - DNA, 184 bp, Glycine max
actatggattctaacaatctatcaaatgtattaaataaataccgatgctttacttaccaaacattataaaatacttattatactacacatgaccattataacattattttcataattaacataattaatgaataaatatatactaacatttaacctattattagaaatgaaataattactataa

SEQ ID NO: 73896 - DNA, 215 bp, Glycine max
ggttctagtgtatgtgattgttgtgactcgttcgtcttcttgtttatcttcttcttttgttgtttgtgtttttgttttttctctcacctgaaaatgtcttgcttctgtggtaactgttgttgcttaagctcctgctagtgcttcaactgcttctgaggctgcaagatgtaccctgacttgatctacacctagtcaaccaccatctagaccttttt

SEQ ID NO: 73897 - DNA, 286 bp, Glycine max
tttaacatcacttcatcaattccgaacttagttctcctgacatggagacctgaactattattatccgatattatattgcataaagcatcttcttcctctcaactacatcaagacacagcattataacttggcactctaactggcatcttcagagttattacttgcacgttttgcaaatgcatagtacctaacagaccatagtactgaaatacttgacaactgtccaaagaacattcagcttaatattacaatattgaattatcaagcctaaatttatgtactataa

SEQ ID NO: 73898 - DNA, 189 bp, Glycine max
tttcagttattacaactcacaattccataaaggcaccagtctatatttaaacggatacattccaacacctcaactatacacgacccaaacttacatacacttacatccaactacaaatctctactatcaccaaacctaacatcaattcactgaccgtcattatacaccctatcatacttctaaaaccct

SEQ ID NO: 73899 - DNA, 266 bp, Glycine max
cctatattcaaactcataatatcccatattcactatatcccacttacaaacctaccttcataaccatactatatttcccatacataattccaaatacaactctaaaaattatcttatcatacaacatttatcatatcttcaaaatcacattaatttccacactaaaattaatacacactaacttcatatttaaaaacatattaaactatcaactcatccaaatcttatacttcttcaaaaaacacttcacaaatcttaattattat

SEQ ID NO: 73900 - DNA, 297 bp, Glycine max
tgctgcattaaactacagatttacaggttttcatcctatggactcaaacatcatattttgtaagttttataaggtgatctccaatgagatgaataccactccttcaagaatattccttttataactaatgacattcaatttaataatgttttgacaaactttctttaaatttacttcacaacttacaattttatatttttttctactaaaatttcaatactttaattaaatcttatttttattttatatcctcttataatttatacatttttaaatttctctttatttacttttact

SEQ ID NO: 73901 - DNA, 131 bp, Glycine max
tttcggtttcaaaaagcgtacccaaaactacaagtatctggcctacaaaccagcgactcttctctcctttctcaatcttcggactaatatctctttgttatattcctaaaccatggctcacgccaatccta

SEQ ID NO: 73902 - DNA, 283 bp, Glycine max
ccactcttccttactactgctttaatacattttaaaagaaagctttctaattgtcctatttgccaatgtttatagggagctcctgctccttttcttccataatctttaaataaaaacaaataaattatacttatatttacttcttttatattcatcctattcaccctaattttctttttaattctacaacacattatatctttaaatatatctacaacatcttctaattaaattcaacttatataaatattctattattttcaaaaactatcaacatattatc

SEQ ID NO: 73903 - DNA, 119 bp, Glycine max
tattgactttctctaataataataacaaaattgggctctggttttcattcaaatggactacaaccaaatcattacatactattatcattcatactataatttattacttaataacaata

SEQ ID NO: 73904 - DNA, 148 bp, Glycine max
ctcatacataatctcactcctctactactcataatcaatacaccaaatcccttactacccctcaacctccaaactatcattaaatattataatatatcctacatttaaccataaatatattatcatacctaaattcactatacctcac

SEQ ID NO: 73905 - DNA, 192 bp, Glycine max
aaacagaacaggaactgactcttggaaaagggctctcgggctctataatctttcttttttcatttaacaataattacacattaaataacaaaatccacaattataattattcttatccaacttaattttattaatcattcttacatacaattttttatctttaaaataccaactattaactttaaatttatc

SEQ ID NO: 73906 - DNA, 246 bp, Glycine max
actttctctttctaccaaattgtacttgataaagtttgttattcatacccacacttcacctttcattcaaataacatgtgatcaatcatcattttaattattaatctacttttaattgataccctatttataatagtcttcttataatctaaagttttctctaaaattttccacttattttcatatctaatatttttcttttcttttttactcttgtaatcatttttttaaactttattattattt

SEQ ID NO: 73907 - DNA, 329 bp, Glycine max
ctgcagagacacagaagggactttttcaatttctgtcatgcgatcatccttgcctccttgcaactgtatttcgggcgaaatgattcaatcatatttcctaatcttcatccacccataataaaaagaaagatagatcaaagaaacaagataatctacagaaaaaagccattcacaaaaagttgtacataatattgtatgcatgataattgaatgaaggtgttgaagactctttatcatcatccatcgtgtacagcatggattcatcatcttcaggatctcaattattttaacacccacaactcccaccttgttttctatttctaccccac

SEQ ID NO: 73908 - DNA, 191 bp, Glycine max
atgtgtttctgatttcatgtaaatgtttgatgttggtgtaccagctatggtgagaaaggtgtttcatgaagcaaggcattgttcacctagtatagtatttattgatgagattgatgcaatttgtctagcaaggctgtttagtttttctggttcaaatgattaacgtgtatgtactttaattcaattgtttt

SEQ ID NO: 73909 - DNA, 318 bp, Glycine max
aatgtgggtttttccgtttttactctactccctatttctcggtgacttgctatctttatatagctcttctactaatcaaacacatatttacatactcacctatctttcaattctatttattcaatttttataatctctaattatatacccactctttttatcactctatattaaaaccttctaactaaatattacttctcacatatacccttctacattctcttattcattattccatatttatttatataattctattaatctcttaacttattgctaaaaatatttaatcctacataccttaacttttataaaata

SEQ ID NO: 73910 - DNA, 402 bp, Glycine max
gtacgcccacgcgtcctactgctgcttttacggctttatgggatcataatgaagaaatgtgatctttgaaaaagtacgtatggttagagtgacaatgttcatgtgctttttgcatggatctcaaattcttttttctattgcctgcatcctttttttaagacattattgtcaatatgtaattattacctatcatgggaaacttatatctcactgttctatgttgtattggttatcactctttactttgaatccatcgacctgttttcgacttcctgtatgaccttttccttacttttgttaaggttttttcttgttttactttctaagtaatttatgctaatttttgaaaattatatcttaataatctctattacataattctaattactaacttactaaatt

SEQ ID NO: 73911 - DNA, 251 bp, Glycine max
tttaagaggtttgaaggggccagtgacaatggttgtgaatttacaaagttgagtgagccacggagaatgataagatcctttatgatggagaggtgggggtttgagaagactaatatcatgaaagaggattggcttattgtttatagtgatcaaagttttgtcatgctcataactagacctaaaggtggaattaggtctctttgcatttacttggatgaagttaatgcttgtatagatcttttattttattt

SEQ ID NO: 73912 - DNA, 428 bp, Glycine max
tcgaccgcgcgtccggccacgcgtccgcgacagaaggggacttgggttatacaagataaaaaccatacaccaaactcagccacaatggaaaagttttttataaaaaaaaaataagaggtacaaaagttggaaggaattgggataattaagttccatggttatgtcatggtgtcatttcacaccaaaataaaactaacttacaataagttaattatataaattctatcacaatcttatattaatttaccttaaaattaggatcaagatgttgaacccttgtcctttaaagcattacctccactttaagagaaatttgaactcatgataagaggatgggttattttacttgatatgttatttgaaatggaaactataaacaaaaaataattggagattattaatgaacaaagtcaccaccccttaaaaac

SEQ ID NO: 73913 - DNA, 211 bp, Glycine max
cccaataggaaaacaacactgagaaatctgggaagttttaaaggcagttcctcctccttcaccttcttcttccatggactttaactttgatatcaactgttcctctccttacatcactgcaccttctaaccctcaacgctttatcaacttctactatattactcccactatccctactctcatacacttctcttctttcactcctaacacc

SEQ ID NO: 73914 - DNA, 299 bp, Glycine max
ctacggcacgcatacgcccactcttcctcccacgctttcatagcttttctataagacgacagaaggggataacttgaccggttaaatagagactttatgagccctaaaaaaacaataacaaaacataacgtgtaggataaaaaagatagaatgatcgcttaaacttctctctctttctttgatgcttctttccctatattcatcccttgctctgagtcgccttaacacaaaaatggattataaataaataaccaccctacccaacaacaacttttgttctttacaagacataacattct

SEQ ID NO: 73915 - DNA, 177 bp, Glycine max
attcacaggaccactctacatgaatatgaggttctgataaagggtattatctcctatgccactcttatccctcatctcatactttatcaaaaactcataaagatggatcacatcatattgtgatgttcacatccgcaaagctatgttaaactaaattataattactcgaacacaatc

SEQ ID NO: 73916 - DNA, 55 bp, Glycine max
  unsure (1)..(55): unsure at all n locations
gacctcaggtcaggcggggctacccgctgagtttaagcatatcaataagcgnggg

SEQ ID NO: 73917 - DNA, 382 bp, Glycine max
  unsure (1)..(382): unsure at all n locations
ttggtttttcacaaagctctggcanaactgagagccgtgagctagctatctaagatttaacacacgaaaattgaagcaaaactacacaagatatttatttcttgttgaattcaccaatattctttatgcaatttcaccctctaccgagtaggtcacgcgtgcagcatggaagctgaaaccaattctccagaagatgcatctgctatggtatgtctttctaccaaagtttttaatgactggattcatgcagacttcgcttgctattacatgtatttagctgaagtaaatactttgattagttatctctgtccaaagtcttatgtatgtttctgctagatgctccttgtatatttggttatgctgtaatatttcttccggtcta

SEQ ID NO: 73918 - DNA, 65 bp, Glycine max
gaaagttttttttttaatttgttaaaaaaaatatgtgttacggattaatttaaaattaattattt

SEQ ID NO: 73919 - DNA, 330 bp, Glycine max
  unsure (1)..(330): unsure at all n locations
atcacaattgaactataaccattaaagtttcttacaatatataacattacaattcatattttagtaaaatgtcattgcttcaatttcaaaactctatctctgtatctcacatattatgggagttactccattcaatgggttgatcgcttaatccatatatacataattttgataatttatctaaaaagcctattatcttttgctatgtcaatagttctattaacttccttaantaaaaatcaaatattgaatgactactaatttatcttaataactactaatccaatccaattctctactaaatgcattcttgatcaataaatgactata

SEQ ID NO: 73920 - DNA, 362 bp, Glycine max
gcacaagtgagtttgttgatcgagataactaggaacagggtgatgaaaatgaaagtccttgttttcttcgttgctacaattttggtagcatggcaatgccatgcgtacgatatgttccctctccgaatgaacactggctatggtgcccgtactccggaggtgaaatgcgcaagttggaggcttgctgtggaagcacacaacatctttggctttgagaccattcctgaagagtgcgttgaagcaacaaaggaatacatccatggcgaacaatatagatcagactccaaaacagttaaccaacaagcttacttttatgccagagacctcgaagtccatcccaaggacacatttgtgttcagtat

SEQ ID NO: 73921 - DNA, 380 bp, Glycine max
ttctttcctttgttcttccggtttcgctttcctttcttgttcttgccactatcattagaatttcctccatatgtctaagcttctagggcttgatcaaaggatctcatgagtttctttcattgagcctgaattcttgtacctcaagtatcccttgcaactcttccaccttcatccctttgagatttgtgccttattttattgcaaccttctcttgatcttgtcaatgatcatcacatcatatactttcttctttaatttgggtttgcaatttcagtttctttaatttgtcagcacccccataagactcatcaagaatttccctttcctcctttatagtattagcatacattactttatcaaagttatctacatctacactt

SEQ ID NO: 73922 - DNA, 385 bp, Glycine max
ggatttctattgttgcagttgcattgcagccggagccaagtgatccctcattgatcttccctttcctcaaagtaagttaagttgcctttcgtcttctcctttttccatgcatactttttttctgtctttaattccgtacttctggtagtcactgtttttttccttaagaatcttgtttacagatactattttataggcttagcgtagaagttccgttaataattacaatgattttttattgcacgggaagaatttatttacttttttttcgcatccagttattttctttcaggtaatcatacaaacagtaaggtaaacaattgttgaagtgtttttctgtgaattgtaataacaagagtattgttaatatttttttaataagtat

SEQ ID NO: 73923 - DNA, 375 bp, Glycine max
catgctctgcatcagtctgctgacttgaaacagctgcgggaacttgaagagcttatagcgactgcaaaacaaggcaacaatacactgtgtgaaagtgaaacccataggtcgttgccacaaaccaaatcagtttctctgagtaatgggagctctagtgaaacttgtaagatccaagatacattgggcactcgggctgaattatgtggtgatgctactggtgataaatcagagacatgcctaaagtctgctgataattccaacttaaagcatgaatcacatgatgaatatagagagtctaataaatctgatggccaagtgaatggaagccctgatgttcttgatacacttagttacaattctgaatcatgtaatgac

SEQ ID NO: 73924 - DNA, 347 bp, Glycine max
ggttctagtgtgtgggggcgtgttgttgtaactcgttcttcttcttttgttgttctgtgtttgtgtttgttttttctctcacctgaaaatgtcttgctgcggtggtaactgtggttgcggaagctcctgcaagtgcggcaacggctgcggaggctgcaagatgtacccagacttgagctacactgagtcaaccaccaccgagaccttggtcatgggagtggcacctgttaaggctcaatttgagggtgctgaaatgggtgtgcccgctgagaacgatggctgcaaatgtggaccaaactgctcctgcaacccctgcacttgcaagtgaggtgttgggagagcaagct

SEQ ID NO: 73925 - DNA, 328 bp, Glycine max
  unsure (1)..(328): unsure at all n locations
attttaaaannaaaaacccgcccccccatttttaaaacacccatacacattcatacacaatctttaaaaaatttctaccccaatccttcactcttctcactccatacatatattacaaattctaatctcctttactcaatactcaaacttcacttctcttcaacaatctattactaatattctcactcattaactaacctaccaaatccaccttaaaattcccactaaattttatctcacactaactatcaatttattctttttttcaccccccagcatctctaacctttaaacataccttcaattccctaaactattctcttcaata

SEQ ID NO: 73926 - DNA, 395 bp, Glycine max
gctatatatgatttgatttaattcatcactggcgaaacgattaagaagaagctaaatggaagcgtccctctaagctgtgctggcatggccaagaatactggaaggatggtgaatagaccaatgcgttctccgtcaacggtgattgagcgtgacactgaaacttgaagtttaatgattggattattattcctgagaccaactagtaacaactatggttggcactaacgaaccggcagcatatatatggaaattgttttctgaaaacactggcggcgcgttacactatacaagactaattattaattttaggataaatggtagtaagtgcaactatcatccaattactaacatggtgtagaaaagttgatacattaaagtacatgatcaatcagaag

SEQ ID NO: 73927 - DNA, 86 bp, Glycine max
ccggtgaagtgttcggattgcggcgacgtgagcggggcgctgcccgcgacgttgtgagaagtccactgaaccttatcatttagagg

SEQ ID NO: 73928 - DNA, 52 bp, Glycine max
gagacctcaggtcaggcggggctacccgctcggtttaagcatatcaatgagc

SEQ ID NO: 73929 - DNA, 240 bp, Glycine max
aaaatataaaaatccattatcttttgtttatttataatcataataattatctattacaattgaatcaaaccttttttttctagagccataccactttttagatcttattctctcaaaaattcaaaatctaactctcaatttctcaaaatctcaccgctaaccgtataaccccctcctctttactatcgattaaataacgccatcactctccttaacaactacaacaaactctcttaccct

SEQ ID NO: 73930 - DNA, 244 bp, Glycine max
  unsure (1)..(244): unsure at all n locations
tactgctggganagtacgatataagggggtggcatacatctaatctaaaactaaaactacctttcctttataccttacacttttctttacttttcctattattggaataatattttttatatatattttttatctataatttatctcttttcattactatttattgttttttaaattatatttataatatctttataaatttctttattttttatatttttttctttacttttaattttttttt

SEQ ID NO: 73931 - DNA, 390 bp, Glycine max
ggttctagtgtatgtgattgttgtgactcgtgcttcttcgtcgttatcttcttcttttgttgtttgtgtgtttgttttttctctcacctgaaaatgtcttgctgcggtggtaactgtggttgcggaagcgcctgcaagtgcggcaacggctgcggaggctgcaagatgtacccagacttgagctacaccgagtcaaccaccaccgagaccttggtcatgggagtggcaccagttaaggctcaattcgagagtgctgaaatgggtgttcccgctgagaacgatggctgcaaatgtggagctaactgcacctgcaacccctgcacttgcaagtgaggtgttggagagctaaagcttcaagcagaaatggcccttagaaataatgataaaaac

SEQ ID NO: 73932 - DNA, 116 bp, Glycine max
ttcatttccttccttaaatataccgcaccgacttttctcaaagtaaataacataaaataaaaaaaccccctacctaaaaccctaatctctcaaaaccctacatattccgtcaactt

SEQ ID NO: 73933 - DNA, 312 bp, Glycine max
gttgcacaatatgtgaagtcccgagacgtgccaaaaatcaaaaggaagcaagcttacgcgatccgtgaaaattccgtgatgtgacggaaatcgaaaggaggtatttttcgcaatccgtgagttttcgtaacttcttcaaaagctaaaaaagagtaaatacataatccgtaaggactcgtaaccttgcggaaggaaaataagtatcgttacgaaattcataaattttcgtaacgttacagaaaaagaattaccaaaaaaggtagagggggtgcatttagaaacagggggtacaaatagcaatcaggcccactt

SEQ ID NO: 73934 - DNA, 389 bp, Glycine max
gaaaaacaagtgtttcgaatagattatcctagggctttgggaatagtgctgcaatggcttcaagtcaggaggaggtgacccttttgggagctactggaagcccatttgtgtgcagggttcatattgccctcaagttgaagggagttcaatacaaatatgtcgaagaaaatttgaggaacaagagtgaactgcttctcaaatccaacccagttcacaagaaggttccagtgtttattcacaatgagaagcccatagcagagtctcttgtgattgttgaatacattgatgagacatggaagaacaaccccatcttgccttctgatccttaccaaagagccttggctcgtttctggtccaaattcattgatgataaggtttttggtgctgca

SEQ ID NO: 73935 - DNA, 420 bp, Glycine max
gagaggaagaagtagcaaagcatggcgagcaaggctatggactcaaggcccgtaactaaggcccataagatgtcatccaccaacgacaagttccactgaataacactctctacgttccaactcgggttcaaatacgaaaagtccaacgccggccaccggaacaccggccacggcaccgttagatgcaactccggccaccggaaacttgacgtgtaccaccacctccaggacatcctcgtttgtttgttcctctattctttttcaacctttcttttaatttttcttttttcttttctcttagctgtttttcctttgattttgcctttggaatttcactttcaattgtgatggtgaagcatttattagtcttctttagaaatgagggtcatggaaatgggcatatcaatatctgtgaatgtg

SEQ ID NO: 73936 - DNA, 219 bp, Glycine max
atcattattcactggttttagtcaaacttttaactctcgctttctttcttcaaattcaactctcaattccaattcctatttaattatttccattttcccactaaccatctcaaatccaccttcacataatttaactttatactaatgctatatttaactctttttctatttatatccatattcattgatatttactttatcatttaataccaaaaccat

SEQ ID NO: 73937 - DNA, 226 bp, Glycine max
gtcttgctattttattaagtaattatttcatgcggatgtgtggggccttgataatagtgcataatatacaagaatgcgataaatggtgcatcaagaagtgcaatcagaaaattccataagaagattatgttgggaagtttattttttgtacaacttgctaaaatttgattaaattctttatttggtaaaatgtttttttactcaaggttataaatttatcatacaa

SEQ ID NO: 73938 - DNA, 233 bp, Glycine max
tcgaatatacgctcctactgcctgactatttctctgcagattcttgccattcgatggagaccacggtgctctagaaatgactcagtataacatcgagcctattgcccatgtccactctgttaagttctacgaaaactggtcatcctatctacaagcttgtacgtatagactagcttgctattgaaatatactcgaatgttgccgctttaatcaacaacaggtcatttattttt

SEQ ID NO: 73939 - DNA, 205 bp, Glycine max
catggtgtgaagtcatcatatgtccatggtcatagctaatctttatgtgacacttaatcgagtgtttcaatttacacaaaaaatcttaataaactcagttgcatgttacgtggaaattggctgaaacattgaacatgtgatgatccaagaccatgcaataattttttccttacatgacttgggagaaaatattttttaaattttg

SEQ ID NO: 73940 - DNA, 288 bp, Glycine max
ggttctagtgtgtgattgtttgttgttgtaactcgttcttcttcttttgttgttctgtgtttgtgtttgttttttctctcacctgaaaatgtcttgctgcggtggtaactgtggttgcggaagctcctgcaagtgcggcaactgctgcggaggctgcaagatgtacccagacttgagctacactgagtcaaccaccaccgagaccttggtcatgggagtggcacctgttaaagctcaatttgagggtgctgaaatgggtgtgcccgcttagaacgatggctgcaaatg

SEQ ID NO: 73941 - DNA, 341 bp, Glycine max
gacaacaagttcaagtattcactacatgttattgtccaccacctcaatacgaataccttcgccgaatcggaatttcgaagcaattaaagtgtgctactattccttcactatcagtttccgcctcttctgttcttcgtaacgcgtcgttttgctgcacctcttctgtccactgcaatttaccttcttcacccaaaatcttcgtcaaagggcttcctctctcaacctctgaaggacgtctgatgaaggtgttttcagagtttggtgacgttactctaggtaataataaattctttttgggttggtgttttcagagtttggtgaagttactctaggtaatacta

SEQ ID NO: 73942 - DNA, 327 bp, Glycine max
gaaggtgcaagagtttgttgtgagctataagctagtttatcgtgaggggaatattaagttgtttgttttctttgttgctgcagtatttttgttagcatgtccattccatgtctcattctattaaaggtttcttttttcttatgtaattctttctctattttgctttcttttgtttgtttttttctcttgttttatttctttatgtttaatcactcaacatttttttcctttttaaacttttctcattatttttcttttgtaattttttttcttattttttattttttttttattttattttttttcttttatttttttttttttttt

SEQ ID NO: 73943 - DNA, 62 bp, Glycine max
gagacctcaggtcaggcggggctacccgctgagtttaagcggagtcagtaaaaaaaaaggga

SEQ ID NO: 73944 - DNA, 505 bp, Glycine max
  unsure (1)..(505): unsure at all n locations
ggtccgtgaattcctcgggtcgactccacgtcgtctcgtaccggcttgcgtgaccgactagaagggggggattttcaatttgacctgannattgcattaacccatttcccctgcgttgttcgtgttttcttnnctggtcattgggttgatnnatgtgcatttgcnccattgcncnnacccattgaaatnngtgaatcnnattcaatnncccaggccatttagcccattagcacctttagtgagtnngccactttagtttgcttaattnncctcccnttttccannatacttaatnnctcatgccaagcataatnncaaatcaaatcaaaaagtgaaaagggttctgattcttcgtgccctgttgttgcccattataacacactttttcctgcacaaggaaagcatttcgcgtttacccttttcctcatnaatacgtaaaaggcttctattnagaaattgatttttttttttaaaatcttctaaattcaacaatcttattaaatca

SEQ ID NO: 73945 - DNA, 422 bp, Glycine max
gaaggtgcaagagtttgttgtgagctataagctaggttatcgtgaggagaatatgaagttgtttgttttctttgttgctgcagtagttttggtagcatggccatgccatggcgcaggctaccaaaggttccctctccgaatgaaaactggctatggtgagcgttcttcggaggtaaaatgcgcaagttttaggcttgctgtggaagcacacaacatccgagcctttaaaaccattcctgaagagtgcgttgaaccaacaaaggactacattaatggcgaacaatttagatcagactctaaaacagttaaccaacaagctttcttttatgctagtgaacgcgaagttcatcacaacgacatatttatattcggcatagattacaccgtactctttaatatcccatactatgaaaaacatggat

SEQ ID NO: 73946 - DNA, 203 bp, Glycine max
tatgggtatcgttagactatgacaacagacggggacaattggaagactacgcctgaatgctacgggtacgataagacaacagttggagagacctaatgtctgtcgcgtctacccgctgagtttaagcatatcaatagcgcccgttataaaagatccaagcttacatactcatgactgctacatctataactattatatattac

SEQ ID NO: 73947 - DNA, 339 bp, Glycine max
ctttaatctacctatttttatactatatctcagtataaatttttatttttttacttcttttattgttattaatatcttctattttattttattatattcttttatttcttatttatttattcttttttatttttaatactttttattattattctttttttatttcttttttttttttttatattttttttttttatttttttttttttttatttaattattttttttttttttttatttttttttttttttttattattctattatttattattattttttttttttatttattatttttttttaatttttatttcattatttattatattttttttt

SEQ ID NO: 73948 - DNA, 145 bp, Glycine max
gtttgttgtgagctataagctattttggcgatattagaatattaggttgcttgttttctttttttctgcagtatttttggtatcatgaccatgccatttctcatgctaccataagttccctcttttaattaaaactgtctatttt

SEQ ID NO: 73949 - DNA, 346 bp, Glycine max
ggtgtgagagagcgagcgagcgagcagtttcaaagagaggatttgggattgggaaggcgagggattgcgctgcgtctcttcctcttctctttcgattcatccctcattcataatcttccaatccaacaacctcagcctcacactcacacatacacacatctgaacgcgtatcgtccctcccatggcttcaaagcgcatcctcaaggagctcaaggacttgcagaaagacccaccaacttcttgcagcgctggtccagtagctgaggacatgttccattggcaagcaacgattatgggtcctgctgatagtccttatgctggaggtgtattcctagtcactattcac

SEQ ID NO: 73950 - DNA, 224 bp, Glycine max
tactccttagttcatcacaaccctacttcatctatgtttaacatatctatcatattcctcggattttttttccttccttcaatctactgctccaattaaatgttcctacttcactcacgctttcattttacaccactaaatttcactcttgcatacccacatcctttctcttaccattccttgtcatttttttcatctatataatctttttctctattcttttt

SEQ ID NO: 73951 - DNA, 381 bp, Glycine max
aaagatagagcatgactattatcaagatataccgatgtgtgtgtctgagttctattttttaataataataatttgttgtctgtgtgcttgctcagtcagggtttgtgcctcttagcacaacataatatcgcattcacaactttaccaatagatttattggacctttgatgtaatagcttccatcctatacataaataattaatatcagggtttgatgctttgtctataatttgtagttttagtttgaaattcttcagtcaaggttaggctgttattggattgcaagtggtgtttttcatgcttgtgatctgacaatagaaatgtatttggtgcataatattactgatctaggatcattacgagttccatgtccctaactag

SEQ ID NO: 73952 - DNA, 240 bp, Glycine max
gaacacactgcagcgagaaccaaagagagatataagcttcttccagtttccgaaatcgaagcattagggttagggttttttccgatctgagaaattcgcggtccaatggctgtggaacctgagagcaccgtcaccaccggctccgccgacgaatctctgctcgatgagatcaccgataagctacacggccacgattcttcggcctcttcatcttccgactgcgactcctactccgaaaaa

SEQ ID NO: 73953 - DNA, 297 bp, Glycine max
ccggaatgaccgaatcgatccatacgttcgtataacactacttaatgggccatgtaccaatttctttttcaaaaaatccctgggttaagggtatatggggtggcttttcacaatgatgtatcatttgcttcattttggggactaaactccctggctcgtgttttggaccctctaacttttataaattttccttttatttaaagttatttttaaacctttttttgtttaatatttttaccccaatgattatttttaaaccctgtttgttaatactacatttttttgatttttgatttt

SEQ ID NO: 73954 - DNA, 358 bp, Glycine max
ggcaccgcttgagcagacttaacaacagcacaaagcgggttactgtctgttcaagctaccatctctctctctctttcttagtgcctccttgccagaagttaaaatggcccaagaaactttcctattcacatctgaatcagtgaacgaggggcaccctgacaagctctgtgaccagatctccgatgctgtgctcgatgcatgcttggagcaggaccctgacagcaaggttgcctgtgaaacctgcaccaagaccaacatggtgatggttttcggagagatcacaaccaaggccaacgtggactatgagaagattgtgcgtgacacatgcaggaacattggttttgtctctgatgatgtt

SEQ ID NO: 73955 - DNA, 406 bp, Glycine max
gggcagacagattcaggcaccttttcaaccgttgactccttcttctgcgtcaccgtcaccatcataatcaccatccctttccttattcttcttctgtttcatccctctccccattttctcgctctcgtttcttgtcctctactcctttctccatggcttctgattcccctttccctgtcaccgctcaaaacatcaaccccaaggtttgtgttgccttcaattctctttttcagacccacccggattgttgttttttggttttttacttctggccgtgctaaagttgcaagctttgaaggcttttttttttttaatctgggcatgtgtgatgttgaattgatgtgtatggttttgctttggtttcttctcttttagtttgtgcatgatgtgtaacgtgtttatttgt

SEQ ID NO: 73956 - DNA, 389 bp, Glycine max
  unsure (1)..(389): unsure at all n locations
gcacaagtgagtttgttgatcgagataactagaaacagtgtgatgaaaatgaaagtccttggtttcttcggtgctacaattttggtagcatggcaatgccatgcgtacgatatgttccctcttcgaatgaacactggctatggtgcccgtactccggaggtgaaatgcgcaagttggaggcttgctgtggaagcacacaacatctttggctttgagaccatttctgaagagtgcgttgaagcaacataggaatacatccatggcgaacaatatagatcagactccanaacagttaaccaacaagcttacttttatgccagagacctcgaagtccatcccaaggacacattttgtgttcagtatagatgggcaccgtactcctctaatat

SEQ ID NO: 73957 - DNA, 422 bp, Glycine max
  unsure (1)..(422): unsure at all n locations
aggcaggcaaaattgaagctattaagccttattgaaatcattgaaaaccattcaagtcaactatattgatatatttatatccaaaacaattatataggttcaatgaggtttgtcatcatggatgcagcattaactattctttatcaatatggacggttttggtatgttcaatgaggtttgtcatgttttacagacaaaataactcaaacaatcaagtagctaacgtgttattttcttcccttgttgcccttgtgtttttcccctaatctttttctctccccttgtgagttacgggataatttgccttctatttctttcttcctcctgcattcaatttttaatttgatgtgtttttaatgcttttttgcatatccctttgtcaatacanattannatatcatgtaactttatcatgactcaat

SEQ ID NO: 73958 - DNA, 252 bp, Glycine max
gtcttgaattcccgattcgaccgactcgtacacacaagaatacatactcctcatataacactatctaacaagacacaccatactatcaattatggattttttatataaacgcgctgatatcatccattgttctctattatcttcaactactaaacttctacactctttttattattattccaaaataactcaaaaaacttctttatgcacattttaatctgaatactatcttcaccttaacactctttccta

SEQ ID NO: 73959 - DNA, 405 bp, Glycine max
ggttctagtgtgtgattgtttgttgttgtaactcgttcttcttcttttgttgttctgtgtttgtgtttgttttttctctcacctgaaaatgtcttgctgcggtggtaactgtggttgcggaagctcctgcaagtgcggcaacggctgcggaggctgcaagatgtacccagacttgagctacactgagtcaaccaccaccgagaccttggtcatgggagtggcacctgttaaggctcaatttgagggtgctgaaatgggtgtgcccgctgagaacgatggctgcaaatgtggaccaaactgctcctgcaacccctgcacttgcaagtgaggtgttgggagagcaagcttcaagcagagatagcccttaattaggaataatgataaactattaatgtgtagctaaaa

SEQ ID NO: 73960 - DNA, 429 bp, Glycine max
  unsure (1)..(429): unsure at all n locations
attcttctcaaatttgaagttggattttgagtttcagggtttcaaatatttcagacaatggctgtccgaattttaaacagtttcattatttaaaatatcatattaatccatattaaatatacttattttttcgtgaaatttgttaacttaaatttgattaatgtgttcccatcataacttttattaaaaaaattatttattaatttttaattattatatggagaacaattattttatttttctaaatttaataggcatgcataaatttttcattgtaacctatcagaaataatgacttttaaaaattttaattacattcttttgtattttttcttactcccttaaaaaatattaaataaaagattaaaaaaatttaatgcttgaaaatataaaataaatntaatgcttatacatnnatatataaaaatg

SEQ ID NO: 73961 - DNA, 406 bp, Glycine max
tttaccccaaactggtattttgctcagttcctcattagcaaaatcgaagaaaagaggcataactttcagcaaaatgggcctttggaagatgaagtaggggcctgtagatagcacatgagtcatatcatcttttgaatcaaatttgaatacaagtcaaccgctttcatgggtagaatatgagaactttacgccccatttctgaaagcattccagtagggctttttttcctaggaaacggcctgctacatagcctataaggttgtgtccccacacctcttccaggggctgaaaatcatcttcatcaagcaatactatatcttcagaagatggaggggaaaatttcaggccaaatcccttggaaggctttttgttgtccttgaacagattaattcaaggcatggaagcc

SEQ ID NO: 73962 - DNA, 402 bp, Glycine max
cctctacatgctaacatgtggcaaagcttgcagctgtatgacaatgaatatctttgggaaggcaccaatcccacaatatatacatttctcttaaacctataaatagaatatcaagtgttgaaaatctgttgaaatccctggaggatcgcacactaagttaaaagagcaaacctttgccttgcaaagttatttttgttgtattcaagcttattgtgtatcctctctatgagagctttgaatattgtattcaattcaaactattgcttagaaagctaggaatggcttttgtgataaaaatacttgggttttgtttaatctcaggggagattaaggatgtgttaggagtggcctagaaaatactgtgtatccagaagtgaaagagtaaaatacttgtttgtaata

SEQ ID NO: 73963 - DNA, 359 bp, Glycine max
gaatgtcaacctcttccataaacgggtggtgcctctcttccatctccccagccaaaacctctctcaggaaggccacattacgcccttccgtcttcgcaacccttaacactccttcttctccttcctcttcatcttccttcccctctctcattcaagacaggcctgtttttgctgcccctgcccccatcatcaccccaactgtgagagaggatatggcaaaggaatacgagaaagctattgaagaacttcagaaattgttgagggagaagagtgaactcaaagcgacagctgctgaaaaagtggagcagataacagcttctctagggacatcatcatctgatggcatcccatcatcagaa

SEQ ID NO: 73964 - DNA, 389 bp, Glycine max
gaaggtgcaggagtttgttgtgagctataagctagtttatcgtgaggagaatatgaagttgtttgttttctttgttgctgcagtagttttggtagcatggccatgccatggcgcaggctaccaaaggttccctctccgaatgaaaactggctatggtgagcgttcttcggaggtaaaatgcgcaagttttaggcttgctgtggaagcacacaacatccgagcctttaaaaccattcctgaagagtgcgttgaaccaacaaaggactacattaatggcgaacaatttagatcagactctaaaacagttaaccaacaagctttcttttatgctagtgaacgcgaagtccatcacaacgacatatttatattcggcatagataacaccgtac

SEQ ID NO: 73965 - DNA, 207 bp, Glycine max
gaacgatgtaaaattccaatacattcacgtgtgaaaataatatataatatatttagtaaaaaaatttgtatttaattattattgtgtaatatttcttttgatcaacaataattacatcccacaaacaagattaatctttcacataatcaatttgaaaaaaattaatttttgacataagaaattaaagaactttcataatatttcagc

SEQ ID NO: 73966 - DNA, 401 bp, Glycine max
  unsure (1)..(401): unsure at all n locations
tccagttaaacacgctgactcattttcagtcaaactcttaacccagtggctgacttttcctttcttttttcttttgagttttttcttgctttatcttggtgcttaatttggttgacatttaatcagagttttactcacaactaagaaaatggttaggcaccacaccattttagaaagcctgaaaggcttatctgtgtctatcattatgctttcaagtttcagcatgatttatattattgctttttatactagaattataatcacggagctgatttagtttcaaaatttcactaatgatcaactgacagaccctctagaggatgaaggatccaactatccacaaggccttgttctggtccctcgaggtggngatgatgatagtgttgttgtagggtcacaca

SEQ ID NO: 73967 - DNA, 211 bp, Glycine max
ttaatgctgggtttaaatatacatcccttttttcatgcatattccatgctttatatattatcatgtcttgtacttcattaataaattcacttctttcatcataatatgtcttcactatcaaatcatgcctttttatgaacattataactttcatactatatacttcatttattctttatagaacttatacatatcccataaaaatttttta

SEQ ID NO: 73968 - DNA, 394 bp, Glycine max
ggaacgacagaaacttgagacttaccatccccctggttatacagaattgtttggatcaactaaatgcttcatcgcgcttcgaaaataatgtcaagaaaattgtcttgagaagggaaattttacactgatttagctaatttttgaagccatttcagcagacagcaagtgaaatttggctgacaacaactaaaatttgcctgaccggtgaaaattgtaactgcttctataactggatcggatcaggatttaaaatactggaaattactatttacatcattttagcaaatgagattcattagaaaacttcttatatataggcttgagtcttcttgaatccatttcattcagcatgcttatatgaatttcgctagtgtataattgtattctactagtg

SEQ ID NO: 73969 - DNA, 322 bp, Glycine max
ggagtgaggaagagcgaagagtgaagagaatggctcccaagggtttaacctttctggctgtgttaatatgcgtttcagcactgtcactgagtccttctgttgcgggggaagggcaaaataatggccttgttatgaacttctacaaggaatcatgccctcaggctgaagacatcatcacagaacaagtcaagcttctctacaagcgccacaagaacactgctttctcctggctcaagaacatcttccatgactgtgctgttcagagttgtgatgcttcactgttgctggactccacaagaaagagcttgtctgagaaggaaac

SEQ ID NO: 73970 - DNA, 169 bp, Glycine max
acagaaggtgactcacttaacaatcaatcaacacttccaggtgcgggtatacacatcttggttgagccataactctctctaaacttatacttgcttcccttcttgcctcgcttatccttcttcatcttgctgatgctgaacaatcaccacatgtacaaactcaaggctc

SEQ ID NO: 73971 - DNA, 410 bp, Glycine max
gacttctcttcacacctttgttcactcttcttctctggcggctagggttttagcgcagcttcttctagatttaaggaagatgggtaaggaaaaggttcacatcagtattgtggtcattggccatgtcgactctgggaaatccactaccactggtcacctgatttacaagcttggaggcattgacaagcgtgttattgagaggtttgagaaggaagctgctgagatgaacaagaggtctttcaagtatgcctgggtgctggacaaacttaaggctgagcgtgaaagaggaatcaccattgatattgctttgtggaagtttgaaacaacaaagtattattgcacagttattgatgcccctggacataaggatttcattaagaatatgattactgggacatcccaagctgact

SEQ ID NO: 73972 - DNA, 225 bp, Glycine max
  unsure (1)..(225): unsure at all n locations
gaatactacatattggactaacgatttataatagcgatttataagttatagaatcttgcggtttcaatcacgagggtggtcattatnttattttctaataatgaaatgattattctgatttcatatctctattcttctgttaagacaaccatctttaacaaactctatcttttataattcttcaccacttttcccaccatctcattttatcttttatactttttt

SEQ ID NO: 73973 - DNA, 394 bp, Glycine max
tgtggatactctagtaagtctcatgccaacagacaagggctcttccattccattgacgatttttgtttggcatgttaaagatggctatcatgttgggtgccactatcccctgtaggcttgagcttgaaaggaggatcgcgttacggttggaaatggtcttactagattatctgtttatactcatcttttcatatgtgttgtcaccttattttatgttgtcaccagtttcattttttctgtatttttatccttttattgtttttaattttattatttttatttttaatttctttcactcttctgtgtaatttttatattttattattatataatttatactcttttttttatattttcttattcttattatacttttttcttttatattattttt

SEQ ID NO: 73974 - DNA, 484 bp, Glycine max
aaaaaaaaaacggacgggaaaaaaaaaaaacaaaataacatttattacaaaaactttttttttataaaaaataataaattaaataaaggggcaataaaaaaaaaaaacgggtggggaaaaaaaataaataaaaaataataaatataaaataaaataaaaaaaataataaaaataaacaataaaaataaaataaaaaaaaaaatttaaaatatttaaaataattaaataaaattaaaaattaataaaaattaaaaataaatataaaaacaaaaatattaaactattaaaaaaaaaataaaaaaaatatataattaaataatacatcatataaaaatctttaaaaaaaaaaataaacaatttgtaaaaaaattaaataaaaaaataaaaaaaacaatacaatataaaataaaattaaaaaataaataattaataaataattaaaaaactacaaatttataataaatataaaaaaaaaaatatatat

SEQ ID NO: 73975 - DNA, 316 bp, Glycine max
aaaaatatcatctacggataagagccccgaactatatacgaccttttgtgctaaaaaaggctttctcggatggagcactcttactcatgaacatggatgatgaaaagctgccttcccctatgaattttgatgttgtcaaacaatactatgcatgttactgggggcagtttgaacgttcactgtttggctgccccaaagactcattacgatctttatgttttaagctttaattgtaaacaataattccaatgttaataaatatcgattgatgttttgtatctctccttctcatgtgtgtcttttgcattttttttat

SEQ ID NO: 73976 - DNA, 378 bp, Glycine max
gcttccctaaaaattttggcctgttaaatcccttgagttgaaaattctttttttttttggttctctatgaacatttctaaatatttagtattttacttttttcttaattattataaatttctgttattttttaataatatggttactttttaggatttactcttttaatattttataactaatttatcaatatcttaattaataagtgaatgcttcatttagttttctaagttttttagtagtttcattttttgaaacactacttttttaaatgcaagtttctattttctaactttatgtttctttcattttgatcttcaatatatttatctaatttcatgattatctttttaaataaatcatgatttattatttttt

SEQ ID NO: 73977 - DNA, 131 bp, Glycine max
aataaaatcgggttggtaaaataacatcgtggccttgccttcatattaaattagtaaaattatcctctctcacataaatcaatataataccttagcaacaactgtcaattctatcaccttacttctattat

SEQ ID NO: 73978 - DNA, 262 bp, Glycine max
tgcatctgcgcttatacgacaaaaaggtgcgtggtgtaataaaacaacgtaagggttcttctgtaaaaaaactaaattacgcatgtgtgcaacgtcataaagtttctataccgatacttatatatattttaatgggcttcgttgatcatacgtttttaaaccgaaactttcgttaaataaaactttcaattcttacaaattacctctattggtccacatttttttataattgtttttatttttatttcattttattttcaaa

SEQ ID NO: 73979 - DNA, 292 bp, Glycine max
attaagcacatgttatcaaaaccgggttggacaataaaataggaaagtgggctttatcattaacataatattctttaacatacaatccttttaaatcttttaagtttcatattgtcgctcattttatttgaaatcattcatttatctaaattcttctacattatttctatacaaacccttttattttttatttttattcatctaaacacaaacatataactgtaattgtaaatttaaatatttcccccaattaatttccaactaatattaaatataaaattaaaatgctttt

SEQ ID NO: 73980 - DNA, 205 bp, Glycine max
aaaaaaaccggccggcccacacataccatctattaaataatacaatataatggttttttttcaatcacaatatctacaaacaacgcggcgtgttaaaaaaaagcggcggcacctcaaaaaaaatttcatattatttaatataaaaacctacaactcttaccctaccatattatctaccttttttcttcttacttaattttatcta

SEQ ID NO: 73981 - DNA, 354 bp, Glycine max
tagattcaattacatatttctgtagggtagtaagcttctgggcggtggttcttctaacaacatgtgacttgttttcaccaaatgcaatcctgcatgtaattttgagaaatgaaaaggagagacaagttaagataagaacttcccctgatgaagttagtgattctgaggtattttccccctttaaatgtataaataaatgtgctatacatgacatattctgtaactgataatgaaatttctgtcatatccaattgtttgatttatgtatgttattgcacttccagctagattgatgtttttcctaaattgtttttagtaattcttaataaacatattcaactctattaatcattg

SEQ ID NO: 73982 - DNA, 193 bp, Glycine max
aaattaccacttttctctaccaagtcccacaaaagcttatatcctctctgctcccgcgctccgcgttccgcagacatctgttcggtagatcgactgactccatgagaaacggagtataacaacttccatacagctccctccgacccgccacccaaaacacctcctgcggtaccctcctgacatgccctccata

SEQ ID NO: 73983 - DNA, 400 bp, Glycine max
  unsure (1)..(400): unsure at all n locations
atagatgtttttttgtttggagttatcaaaaaggaaatgaatcattggtacttcaaacttcttatattacttttgttctcattaatttttattaacaacaaaatgaggagtttggatatcatgttgagtttgtagttttcttaagactttattaagtgctaatttatgatctaacaatatgttgactaatacaataacttgttaggttactgaaggatttgataaaataattatatgtgattttttatataaattatttttaaatttttatttatttaaaacagttgacataccggtgagagatttaaaaatatgatttataaaaaaattattggtgattatcttgntaaatttcttgatgaagacaaagtcaatgagttattaagatagttgntatgtc

SEQ ID NO: 73984 - DNA, 413 bp, Glycine max
  unsure (1)..(413): unsure at all n locations
gactagatgtgaatgtgattcatattcatagagagagaaagggaaagggagaagagcttgaggaagtgatgggagatgggagggtcggtaaagaatatatctgagactcgactcaatctcgatctctctcagtgttgtgttgttttgtttatccttttgccgattccgcccattcctatgatttccttcggttcctctctttccactctcctctccgctctttcctcttgttatggtaagcacctttcttcttcagatctgctctttataccatacacttattatagatctaagtttttatggaccttaactatcttccttgatctcttattaattttaaccgctctctctttgntgctggacatgttacttcaagataacaaattgcttttttatatttcatcttttctctc

SEQ ID NO: 73985 - DNA, 119 bp, Glycine max
atactactcaaaacttcttttttgtggaacctggacctctttttccgaaggggcaaacccttggtggttacaataactcctgttttttctatacattgtatcttctttctattattaat

SEQ ID NO: 73986 - DNA, 400 bp, Glycine max
gagtgcacaagtgagtttgttgatcgagataactagaaacagtgtgatgaaaatgaaggtccttgttttcttcgttgctacaattttggtagcatggcaatgccatgcgtacgatatgttccctctccgaatgaacactggctatggtgcccgtactccggaggtgaaatgcgcaagttggaggcttgctgtggaagcacacaacatctttggctttgagaccattcctgaagagtgcgttgaagcaacaaaggaatacatccatggcgaacaatatagatcagactccaaaacagttaaccaacaagcttacttttatgccagagacctcgaagtccattccaaggacacatttgtgttcagtatagatggcaccgtactctctaatattccatactac

SEQ ID NO: 73987 - DNA, 350 bp, Glycine max
cttccaagggaccacttaccattggtggttaacccttaaggtccattaggaaagtgattttgggcctaattaaaccccaaaggttagttaaggggttaagagaaggaatattttcttcccctctttatattaacggattagttaggctaaaaatactaatagaatatcgtatcatatattatatcagtctcaatcgatggctttgttatatgttagatattgatacgcttcaagcgctctatagatgtgtgagattaatcttatttgaagatagccttagattagttgagatgggatttggatggatgccgtatacggtggacttttatgctttttgtttgagtgatttg

SEQ ID NO: 73988 - DNA, 406 bp, Glycine max
  unsure (1)..(406): unsure at all n locations
aagagttactgtaatgtaaggaagggaaattgtgtgcaatctcaagaaactgcaaaggaatgtcaatgcaatttgctctaaaaataaacaaacaaataaacgcttctctaacctctttaataaagcacaaacaagaagtactacaacaagatctcatcagtacacaagtattcgtagcaagggaaaactttatccttcaagcaagttcacacaatataacttggataagttgaagcctaatgtgatttagggataaccaaggtctcccgaagcaccaaataaaaaaggagaaaagaaaaagaaatcatgtatatgaaatatccacaagcatatcaacattgttaacactaataccatggttntaaatngcggtcgcgactgagttgcagtgagctagaaaccttta

SEQ ID NO: 73989 - DNA, 436 bp, Glycine max
aagacgacagaaggggaaggtgcaagagtttgttgtgagctataagctagtttatcgtgaggagaatatgaagttgtttgttttctttgttgctgcagtagttttggtagcatggccatgccatggcgcaggctaccaaaggttccctctccgaatgaaaactggctatggtgagcgttcttcggaggtaaaatgcgcaagttttaggcttgctgtggaagcacacaacatccgagcctttaaaaccattcctgaagagtgcgttgaaccaacaaaggactacattaatggcgaacaatttagatcagactctaaaacagttaaccaacaagctttcttttatgctagtgaacgcgaagtccatcacaacgacatatttatattcggcatagattacaccgtactctctaatatcccatactatgaaaaacatgga

SEQ ID NO: 73990 - DNA, 244 bp, Glycine max
cgttaatacgacagaacgggatagtgctagagtttctcctgagctataaactagtctggcgagaggagaatatgaagttgtctgttttctttggtgctcctaaaggttacctaaaatggccatggcctcttgcaagctttcaaaggatatctatccttatgaaaactgttaagtcgttatcctttttactaagtcaaatccgcaagtttaagctttcagtggaaacacacatcatacaaccctt

SEQ ID NO: 73991 - DNA, 414 bp, Glycine max
atgggttgaatttaactgtcatgattgtgtggaatttaactgtcaataaaaggagtgtaaaaatttacttatgaatttatttagtaaaaaagttcataaagttgagatttatggttactcttatggctgcaaaaatttagaaaaaatgtgtgtgtttgttataggagatgttcatgaaatactggtcgagttggaaggaatgggtggtggcggaaaggttcagctggaggtatgtttcttttattagaaaagaagaaacccaagaatacagatttataaaatggggaaaagttattgaccatttgaattttagttgacagcatgatgcctatgcattatatttcgtgtataatatagtggaaaaattatttctctgttgtgctttgttacaacttcatttgccaatatatctgg

SEQ ID NO: 73992 - DNA, 109 bp, Glycine max
gaaggtgcaagagtttgttgtgagctataagctagtttatcgtgaggagaatatgaagttgtttgttttctttggtgctgcaagagttttggtagcatgggcatgccat

SEQ ID NO: 73993 - DNA, 406 bp, Glycine max
catgtataccttacatcacattgtcttctttaagtaacgactttttttttatgtgcttattttctcccttaatgatgacctaattatatctaacttatgtttttaattttcttttaaaatctaatataagtagtgtcatgtatagtggaacgaagtacctatattgttaaacaaaatgtttatgcaaataatatttggatattgataaagtgtaaatgaattaaattatttacaaattagttgaacttgcatgcatggttcgttcattcttaattaagtccattttaattagctcaacaaatgatatcgatcttaaagttggactcaattatttaacaagttatgctttagttttatagggtttcacattaataactggttcgtacctatatatatatttgatagc

SEQ ID NO: 73994 - DNA, 248 bp, Glycine max
tgtaagcataccctagtctttgatgaaagcctttggcaacaagcctgtctatatattcgataactcgtccatctgggtataaattaacccttaaaacccatttgctaccaatgggaaacttttgtgagaggtataactatccagagtcctagttcttattgttcatagaagcttcatattctgctctcattgctgcaatgtcacatatgatatgcaatagcttgactttgttgatttggtcaatttga

SEQ ID NO: 73995 - DNA, 177 bp, Glycine max
taatatcactgtcccttttccttttccttttatcataaacacaatcgaatacaggggaatcactggattaccatatccgaatcaattactgaaccaattaactttaaacctcggctaaccaaaccatcatcattctcttacccgaataatcgacccatcattaattaaatctaaatt

SEQ ID NO: 73996 - DNA, 69 bp, Glycine max
gagacctcaggtcaggcggggctacccgctgagtttaagcatatcaataagcggagaaaaaaaaacaaa

SEQ ID NO: 73997 - DNA, 415 bp, Glycine max
gaataggacttggttccatgatgtgattttattgtacgtacatttgttattttcaatgaaactcttattcagttagatattttctcatatggttttgtgcacatatttatttatttcgagaaaaaatcattcggtttagatatagaataaacatatggtttattcattaagttgagagctagtgttgagagacttgatatattgtggtacatggaagatactactcatcatcagaggacctatcgccacgactcatatattatgtttcttgttatggctgatgttgagttaaatggaccaagtgggagaatgttggaagcgcacgttcacttccacgtcctttttttattttattttattattttggaaaatttagttatttctgaatctggtccatttttcatccacattcaac

SEQ ID NO: 73998 - DNA, 56 bp, Glycine max
  unsure (1)..(56): unsure at all n locations
gagacctcangtcaggcggggctacccgctgagtttaagcatatcaataagcgnng

SEQ ID NO: 73999 - DNA, 350 bp, Glycine max
ggttctagtgtgtgattgtttgttgttgtaactcggtcttcttcttttgctgttctgtgtttgtgtttgttttttctctcacctgaaaatgtcttgctgcggtggtaactgtggttgcggaagctcctgcaagtgcggcaacggctgcggaggctgcaagatgtacccagacttgagctacactgagtcaaccaccaccgagaccttggtcatgggagtggcacctgttaaggctcaatttgagggtgctgaaatgggtgtgcccgctgagaacgatggctgcaaatgtggaccaaactgctcccgcaacccctgcacttgcaagtgaggtgtttggagagcaagcttca

SEQ ID NO: 74000 - DNA, 322 bp, Glycine max
aaggggtgcacaggtgagtttgttgatcgagataactagaaacagtgtgatgaaaatgaaggtccttgttttcttcgttgctacaattttggtagcatggcaatgccatgcgtacgatatgttccctctccgaatgaacactggctatggtgcccgtactccggaggtgaaatgcgcaagttggaggcttgcttgggaagcacacaacatctttggctttgagaccattcctgaagagtgcgttgaagcaacaaaggaatacatccatggcgaacaatatagatcagactccaaaacagttaaccaacaagcttacttttat

SEQ ID NO: 74001 - DNA, 389 bp, Glycine max
aattcgagcggccgcgtggtttttatatctttttcttttttttttcgaaacgggtctctctggtagaactaattctctccattcagagaagagcgggaaggaatcttcttttctatgaaacctgagcaaagtctcggctaaaatctcaagactagtgaagaagtaaagaagtcccagccacagagggaaagactgaaccgattcttcggagaacattaccccggaaggactagagcaggtacgacagccttaaggaccactcccgtgctaatcaccttggaacttgaggacttcgcgtcacatgctatcaaagggtcttccgatccgctctacttaaccatttaagctaccccccaaatagaattgggattgggatccaacaattaaat

SEQ ID NO: 74002 - DNA, 423 bp, Glycine max
  unsure (1)..(423): unsure at all n locations
ttttccacaaaagtatattcaatattccccaattgttgaatcggaccaatttgatggccctattccaccacttttacgaggtttcatatttcttgatttattcaataacaaaagatgaacatctaagtataaaaaaatgaacaagaataattttattgcatttctgaaatatagattaaattgtttacaaaatattaatttctaattaatagtcaatgatgataggatgcttgaaaataatatatatattcaaggaaagatctccaatctaaatcttactattttcttatctcaaaatgtcttttaaaactacaaatcatttatgattatgttaataacgtaagattatcattttttgataagttatttgtttaaaaagtatataatgtgttgaaagagttttactattattaancttcatta

SEQ ID NO: 74003 - DNA, 305 bp, Glycine max
  unsure (1)..(305): unsure at all n locations
tggctttgtgacactggatgaaagatttaaaatgcttaggcaaattgactgggaaagcattgtcctaaggacccaacncgttgtcaaagaagaccctgctgcnttcctngttctaaacnttangaaatatcaactatattaagagttttattacaataataattaatgttcttacacatctgtttggagccttctgttttttgtttttttttttttcttgcaaattgactattacaaatctaattttactattatgttagggtggaattttttacacaataatgagttccattttgtttaggcaa

SEQ ID NO: 74004 - DNA, 289 bp, Glycine max
gtcccgccatggtaatccaggacaaagattcccaccagatctgcctaagtttgtgatagctgaaaaagttaaaattaacttgaacacctcaaatttttaagaggctccctcatttaacttctagacaagcacctataaacttaacaaggcttgacactattgtcttagagaagtctcagtaggttttacaattggaaatcgcccataagctagaaaatagaaattagtccaagctgggccatattctagcatgtcctggacagtgtagtcaaaggaaccaaaacatatg

SEQ ID NO: 74005 - DNA, 378 bp, Glycine max
  unsure (1)..(378): unsure at all n locations
gaaatctatagcaggaatcccccaaacccttctcatgccccccctttacttccttcgtacaaaattcccattgcaatctgctagtttctagacacaacctgctagtcaatgcacggtgtaggagccacaatctgttagtctatgtgttcctcaatctgcatataatacttcttgcttcttgcttttatatgaagctaagaataagattttaagggaatgagtattacatgactccccggcataaaatgtagcatgcatttctaatgctttgtgagaatactggattggctttggcatcttcagtgtttacctacgttgcagaaattttgcttggggttctttaagtaggtttctgcagntcatttgtctttgcatttt

SEQ ID NO: 74006 - DNA, 355 bp, Glycine max
aacataccctctaacacaatatttctttaaatatattcttttaatcaattaaaatctattgaaaattatgacatctaataaaaaaaaatcattaaacatgacatgtgatttataaaattgttattttcaattaatttcaacaaatattgtatttttcaataataaatatttatagaaaaatgattaacttttataatcactattttaaaaattaaatttttatgatattacataaaataaatttaatttaatttacttattactactttctagttactaattaatgaattagattattcctaaccctgtttacctacacaggaaggagcaggccctgcctaactcctgatgcatg

SEQ ID NO: 74007 - DNA, 388 bp, Glycine max
  unsure (1)..(388): unsure at all n locations
ctcctaccttgaagctcttatccatggcttcctatggtggtgagtttcttcttgactcatcttcttcttgaagtgatgtctcctctcaactcttcttcttctccattccactgcaattaaaattcaagaagcaaaggactccattgatgaagaagatccaaggcctacatgctccaatggagctacatcatgtggtatcaagagcatcttcatataggtgatgttcttttgcttcctcaatctttttgttcggtcaattcactttaattccttgttattcatcttattatccatgtatatcctccattgtcttggggtttggtgttgttagagtagattaaaaaaaaaccgggtacatcttagatgtacactngntcttgcatttcta

SEQ ID NO: 74008 - DNA, 58 bp, Glycine max
  unsure (1)..(58): unsure at all n locations
aattcgaccggccgctttnattttccgggattttggtttttttccttctttcaaactc

SEQ ID NO: 74009 - DNA, 144 bp, Glycine max
gagtgcacaagtgagtttgttgatcgagataactggaaacagggtgatgaaaatgaaggtccttggtttcttcgttgctacaattttggtagcatggcaatgccatgcgtacgatatgttccctctccgaatgaacactggcta

SEQ ID NO: 74010 - DNA, 397 bp, Glycine max
  unsure (1)..(397): unsure at all n locations
gacacctttgttcactcttcttctcttgcggctagggttttagcgcagcttcttctagatttaaggaagatgggtaaggaaaaggttcacatcagtattgtggtcattggccatgtcgactctgggaaatccactaccactggtcacttgatttacaagcttggaggcattgacaagcgtgttattgagaggtttgagaaggaagctgctgagatgaacaagaggtctttcaagtatgcctgggtgctggacaaacttaagactgagcgtgaaagaggaatcaccattgatattgctttgtggaagtttgaaacaacaaagtattattgcacagttattgatgcgcctggacatagggatttcattaagaatatgattactgggacatnccaagctg

SEQ ID NO: 74011 - DNA, 310 bp, Glycine max
gagaagaccacagaaagggactggtttttgtttctcgtttaagccatcatatggaggaagggctcttctggttaaacaacgtcaataaatctagatcttagtcttaattagaagtaccatttgaaacatgaagtctttttagcttgaatatactaggttcttcatttggattacttggattctgtgaggtcgctaattagatgcactcagtgcaggttcagaactttattcgatcagcgatcacggatactaggaggctcgaattgcattggaacttttcctttttgattaataaaatttccagttttaa

SEQ ID NO: 74012 - DNA, 394 bp, Glycine max
attaatattcatgtgttcgattgaacattggtgcgtgtttgggaaacatatatgtgtgtgtgtgtgtgtatttgtgaaattcaaatttaccatgtttttcataagcaaaataatggagttttcataaaagaaaaaaaacgaattaattttccagttattagagtggtgatattgtatcgacgagacgggtcggtacattcttgtgtttgtgtgtgtgtgtgtgtttgtgtgggtcttacaaacactgtcgtagttgagatttttcgcttttcaaacactatggtctttacaaaaaactgtcgttgtccaaaccttcattttctcgctcccttctcattgtctcacttcctcccaattaaaccctcttcctggaaaacccttattcacacccaaa

SEQ ID NO: 74013 - DNA, 169 bp, Glycine max
gcgacaggtactgaggagaccttacgtcatgcggggctacccgctgagtttaagcaaaaaaaaaaaaaagcggacgatctaaaaggcggccgctttagaagatccaagtttacctacgcatgcatgcgatggcataactttaatataatgtaacctaaattcaattaaa

SEQ ID NO: 74014 - DNA, 168 bp, Glycine max
  unsure (1)..(168): unsure at all n locations
gcggcggcttcnaaaaaacaacagaagggcatatacatcgctttattaacacatcaaatccctgctaaacctgcattcctattctggattccttaaacaacataattctcattatttataccccacctcttatttcttcatacctcctcatacctaaaatcaattcaa

SEQ ID NO: 74015 - DNA, 295 bp, Glycine max
ggtgaccagatatttcggaagtagcgggggcatagtaacatgctctgggaaatgattctacccaaaatgcatcatccagctcagttaatggtgatctttggagaaagctatggaaaattcctactgctcccaaatgtttgaatttagcatggagggcttgccaaaacattctttctaacagagtcaatctcaaaaggcgaggtgtggatgtggatattttttgtccgagatgtggccaagaatctgaaactgagttacatgctttattattatgttaagaatcgaacatggcatg

SEQ ID NO: 74016 - DNA, 317 bp, Glycine max
cacttttgtaacactttatcttctctcttctatattttgcttggcaactgcctccccctatcaacctaaggttttaggttgaactggttgttagactttagagttttcaacatgaaatatgttattgttctcacttctgctagatttctagttcttgatgaccaacctgctaggttttgtgtgtgttttttttatcagagaggtctttgcaaatgcacctttttttatttcagcataggttgctggtgcattggaagcaaggtaaatattaaatcttgctttattgcatgattttctctattttcaagtaatttttg

SEQ ID NO: 74017 - DNA, 427 bp, Glycine max
  unsure (1)..(427): unsure at all n locations
cgagaagacgacagagggggtgtgattgtttgttgttgtaactcgntcttcttcttttgttgttctgggtttgtgtttgttttttctctcacctgaaaatgtcttgctgcggtggtaactgtggttgcggaagctcctgcaagtgcggcaacggctgcggaggctgcaagatgtacccagacttgagctacactgagtcaaccaccaccgagaccttggtcatgggagtggcacctgttaaagctcaatttgagggtgctgaaatgggtgtgcccgctgagaacgatggctgcaaatgtggaccaaactgcttctgcaacccctgcacttgcaagtgaagtgttgggagagcaagcttcaagcatagatagcccttaattaggaataatgataaactattaatgtgtcgctaaaaacttatgtatta

SEQ ID NO: 74018 - DNA, 366 bp, Glycine max
ggaaaaagaaaaaaagagaagggggaaatctcttcttcaatggcggcagagtcatctcgcagtagcgctaaacgcccctttatggaagaagacgacaatgaattctccaaaaagccaccgtaatttcttttcccttcttcccgctcacaaaccctaatttcattcattcttattgagaaaattccagtaatcggtagaaatgatttttagacttagtttattgcatattggcttctgttattttgattcggggactattatcttgtggatcacctccaacgcctatcaagttctaatttctggcccttaaaattggcattcttcgaaagctagttactttaaattcattatgcttgtgtatgaata

SEQ ID NO: 74019 - DNA, 423 bp, Glycine max
  unsure (1)..(423): unsure at all n locations
gtcagggatcattcacaagattggggagacccttcatgtgggagggcacaagaaggaggaggagcataagggtgagcaccatgctggagaatacaaaggggagcaccatggtgaacacagtagtgagtacaaaggagagcatcatggtgaacacaaagctggagagtaccatggtgagcacaagccagagcacaaagaggggttcctagacaaagtcaaggacaagatccatggtgagggcggcgccgccgagggcgagaagaagaagaaggagaagaagaagaaggagcatggccatgagcatggccatgacagcagcagcagcagtgacagtgattaaactgctgcatcacctatatatttaaaagggttatgggaccatagtagcgagggctgtgccntaanttctctctctctctctct

SEQ ID NO: 74020 - DNA, 216 bp, Glycine max
  unsure (1)..(216): unsure at all n locations
ggggtgatgaangatggacccagttgtgctgttgataatggtactactgcaaattctacacctacttgcttatcaagatcgtgattatcttctctctcaactggtgcttatgtgaaagttctgatcttattggagagtagctgtctattattcctactaattgcaccacccatgccctggttttacccatattctaaaactaatctactatgagct

SEQ ID NO: 74021 - DNA, 382 bp, Glycine max
aacattcatcaggtaagagtttacttttctaaattagttaaggtgactgtagatttagctcatatcacattttaagtcaatttgggatggttcaattctgcacgatttaagccacgcgtaaccatgcacggggtttcttatgacttttggcgtcaattttgtcttcaagcgtgcaaaatttcagacttctagcatggaaacaatttaatgcagtaatttgtgatgaagcaagacaagaaaatagtgtttttatgtgataattttatgatgataataatcatcataaaattatcaactcaaattgattaacataagtgataatactttaaatttcttattcagattattcaaatttaaaatcgggatacatattaaattagta

SEQ ID NO: 74022 - DNA, 258 bp, Glycine max
aggagtgtgagcgtcaacaatggcttcttcaccttcaaaaggggcggtgtcttatcgagaaggaatacctgtggttcaaatcgccatagatggccaaacttacctcactcaatcccatctagatgttttttcacgcctaactgttttgcaagagagactatcgcaaggcaagggcggagaaacgaactttatcgctcatcgaagcgagcttcacgcgctgttatccaatattctatagtgcttcaacagtctttctac

SEQ ID NO: 74023 - DNA, 286 bp, Glycine max
ttaacaaaacagaacgaatcagcacaggaaagagagagagaaaaacatatggtgaaggctttgtggaagaaggcgaattgaacacactgcctaaatacttcactctcaaatagaggcaaaatgggcggtatcttcggacattaacgacgataagaccatgcatgggtttctcaaggtctctggaactcatgtcgcgagcccattcgctaagtttggggttgcaaaagcttaagagaaatataacaaccgtgcttgagcatgtcagatgtggtgacaacaacatata

SEQ ID NO: 74024 - DNA, 393 bp, Glycine max
ggttctagtgtgtgattgtttgttgttgtaactcgttcttcttcttttgttgttctgtgtttgtgtttgttttttctctcacctgaaaatgtcttgctgcggcggtaactgtggttgcggaagctcctgcaagtgcggcaacggctgcggaggctgcaagatgtacccagacttgagctacactgagtcaaccaccaccgagaccttggtcatgggagtggcacctgttaaggctcaatttgagggtgctgaaatgggtgtgcccgctgagaacgatggctgcaaatgtggaccaaactgctcctgcaacccctgcacttgcaagtgacgtgttgggagagcaagcttcaagcagagatagcccttaattaggaataatgataaactattaat

SEQ ID NO: 74025 - DNA, 137 bp, Glycine max
caactttctgttgtgtgtgtgtgtgtgtgtgttcgagtctgtgtatgtgtgtgtgcgtgtgtgggtgtgtggctgtctgtgtttgtggttgtgtgtgtgtgtgtgtgcgtgtgtgtgtgggtatgtaagtgtgtgtg

SEQ ID NO: 74026 - DNA, 389 bp, Glycine max
gataccaaaaacaaaacacaagccaagtgaaagtgagaaaaaataaaaatcaaagagcataatgtcagggatcattcacaagattggggagacccttcatgtgggagggcacaagaaggaggaggagcataagggtgagcaccatgctggagaatacaaaggggagcaccatggtgaacacagtagtgagtacaaaggagagcatcatggtgaacacaaagctggagagtaccatggtgagcacaagccagagcacaaagaggggttcctagacaaagtcaaagacgagatccatggtgagggcggcgccgccgagggcgagaagaagatgagggagagaagaagaggagcatggccatgagcatggccatgacagcagcagcagcagt

SEQ ID NO: 74027 - DNA, 313 bp, Glycine max
  unsure (1)..(313): unsure at all n locations
ccctgaatacgtaattcattgacaaatgtgtccctgaaaaatgaaaatataaaatttagtccccgaatgtgtaaaaagtgcgacaaatatatccgactgttagctttcgtccttcaccattaataaaatagctaagattcaaagaagtgaaatatggaatatacttatttttttatttatagtagattatgactaattattataatttgaaaaaatttgtaatgattggtacactagtacaatgtttattttggataatttttgttgtgacagacaaattatggttgataattaatattatcgntattattat

SEQ ID NO: 74028 - DNA, 301 bp, Glycine max
acgaaggtcggctggagaagacaagaaggtcggctgcggaagacaagaggggaacgcaccaaaaagaaatctcaatttttgagcagcaacactttctctgttctcgaaaattctcagttgagagaaaatctgatatgtcgggcaagcgtatgtcgacatcacctttggtgacatcgaagtaccacctactacgctgtatatcggcaaacggagcgttggctcaagaccgacttcctcagtaaacctgagagataactgcatatgaatgacttatgagcctggacacttgctcaactggatt

SEQ ID NO: 74029 - DNA, 238 bp, Glycine max
caattattctctaaaacaaaacacaaaccaatctgagggggagaaaaaatacaaagcggagagcattatgtcatggatcattcacaaaaattgctagacccttcatgtcatatggcacacaaaggacgaatagcataacggttagcaccatgcttgagaatacaaatgggagctccattgtgaacacaattatttatgcaaaggatatcatcatggctaacacaaagcttgagaatac

SEQ ID NO: 74030 - DNA, 327 bp, Glycine max
ggttctagtgtgtgattgtttgttgttgtaactcgttcttcttcttttgttgttctgtgtttgtgtttgttttttctctcacctgaaaatgtcttgctgcggtggtaactgtggttgcggaagctcctgcaagtgcggcaacggctgcggaggctgcaagatgtacccagacttgagctacactgagtcaaccaccaccgagaccttggtcatgggagtggcacctgttaaagctcaatttgagggtgctgaaatgggtgtgcccgctgagaacgatggctgcaaatgtggaccaaactgctcctgcaacccctgcacttgcaagtg

SEQ ID NO: 74031 - DNA, 146 bp, Glycine max
accactgaacgggatacatagtccagatttcaaaaggataatgtcggtgacaaccatgggtaacgcattttttttttccaaaccatattattaccgcaatttccattatcagacatcaaacatgcttcacgatcaacactccaaaa

SEQ ID NO: 74032 - DNA, 397 bp, Glycine max
caaacattggtgataagtcctgtcaagttatctttggacactccattgctcacatggacaacttaatataacgattactctggttaaataatgattgctttttaacatttcattattcacatgaaaattaatctgataataattcctgtcaaataatgattgtctttggacatttcattattcacatgaataatcacactatttatcatcaccacatgtttatcatcacaaacatgtaattatgctgccaaattgtgtctttctttgggccgagcacaattcatatgaataatttcatgcaacatctatgtaaattcaatcaaatcaacttatgcaacagaggttacttgggcaacatgttgtttcaatcaatttaacaaaaaatacaagataattt

SEQ ID NO: 74033 - DNA, 92 bp, Glycine max
gaatggtccggtgaagtgttcggattgcggcgacgtgagcggttcgctgcccgcgacgttgtgagaagtccactgaaccttatcatttagag

SEQ ID NO: 74034 - DNA, 403 bp, Glycine max
gcctcatcataagattctctctttcatctccccattgaaaaccctcgccaaagttattgacttttctggttcaacagcaatgggtttgcttcaatttcttcttctgatctctctaggggtgaggagttagccagttttttattctttttctgagattcccacatggatcgggggtttagatttctgtgtcaggcaggaactacgagattagtttcatttgtaggaataacagtggctatagttttcatggttcagtattctgaacttcctagtagtaaattcttatcttctgttactaccaagtttactagtttcacaatggatacatcatcttcagttaattctaaagtggagggtaataatttgcacctaaatggttcaaattcaaactctactcatgcat

SEQ ID NO: 74035 - DNA, 181 bp, Glycine max
ccttcctaccggtgggaaaaaaacacaaaaagggatttggttttatgggtgaaggtctcttgggaaagggttggcttgccaaatattaaacacaatgggcccccatggatttggtaataatctttgggccctttcagatttggtttgggaaccctccaggctttttgggaccagggattta

SEQ ID NO: 74036 - DNA, 310 bp, Glycine max
  unsure (1)..(310): unsure at all n locations
aagtgagtgtgttgatcnanataactagaaacagtgtgatgaaaatgaaggtccttgttttcttcgttgctacaattttggtagcatggcaatgccatgcgtacgatatgttccctctccgaatgaacactggctatggtgcccgtactccggaggtgaaatgcgcaagttggaggcttgctgtggaagcacacaacatctttggctttgagaccattcctgaagagtgcgttgaagcaacaaaggaatacatccatggcgaacaatatagatcagacttcaaaacaatttaccaacaagcttactttta

SEQ ID NO: 74037 - DNA, 349 bp, Glycine max
  unsure (1)..(349): unsure at all n locations
aggggtgtgagagagcgagcgagcgagcagtttcaaagagaggatttgggattgggaaagcgagggattgcgctgcgtctcttcctcttctctttcgattcatccctcattcataatcttncaatccaacaacctcagcctcacactcacacatacacacatctgaacgcgtatcgtccctcccatggcttcaaagcgcatcctcaaggagctcaaggacttgcagaaagacccaccaacttcttgcagcgctggtccagtagctgaggacatgttccattggcaagcaacgattatgggtcctgctgatagtccttatgctggaggtgtattcctagtcactattcac

SEQ ID NO: 74038 - DNA, 55 bp, Glycine max
cgtagtgtggggattgtgggatagtctcttacgagcctgacaggggcatttacat

SEQ ID NO: 74039 - DNA, 245 bp, Glycine max
aataacccatatacatatgcataatcattccaatcatcatcatccatcttaacactattattaataataatactctatccttctttactttatttcttgtttccatcctttttatgctcattctcctcttctttcataacttatctcaacctctcttattcccccttattctccacccccttcaccaatcttcctcatatcttcaatatttacttatcttaaacactcatctctttcaccctatt

SEQ ID NO: 74040 - DNA, 421 bp, Glycine max
cactaaaccttcaccaactgaggaattgagtgctaccctggcctctaaattaacctgataatgatgttttcatgagcatttagactttagtagctagcatgttgtagtctaaccgttgtctgagaatataaaaaaaaaaaaattgctgcttttatagatagggacattttataatcttatatttaatcctggtgaattacctgcttagaccaacagcattgtacaaattctccaagcacagatataacataagcttttgcctgcctaagttgtgattgccttcttctgaccgagacacgcttcttcttgtccgcaacaactgtaatttaaaaaacttgcaggccattacaacactaaccgttcacagtatgaacagatagatggtttaatctatgtcaaattgtcaatcattaatattaga

SEQ ID NO: 74041 - DNA, 344 bp, Glycine max
gccagaagacaacagacgggtgcctggtggctaaaaaattagccacatgttatgatagcttaccaactggaattactagactgctaaatgctctctgagtatattcaactggcagcatgaatagcatcagcagactattcatattatgaacttctgtcttcttcatatcgaacgtacggatagaactcttgctctcactggtgattatgcatggagtagctcgcgccaacatgaatgtcttgactatgcattgagtgtcgatgggttgcagagctagcatggtatgccatgaattctgtaaacacactgctaagattaggagaactctctttatcactatattg

SEQ ID NO: 74042 - DNA, 264 bp, Glycine max
gggttctagtgtgtgattgtttcgtgctgtaactcgttcttcttcttttggtggtccggggttggggttggtttttctcttaacttgaaatggcttggttccggggtaacttggggttccggaacttcttgcagtgccggaaccgcttgcgaagcttcaagatgtacccagactttagcttcacttagtcaaccaccaccgagacctttgtcatgggagtggcacctgtttaaggttaatttgagggtgcttaaatgggtgtgc

SEQ ID NO: 74043 - DNA, 360 bp, Glycine max
gggttctagtgtgtgattgtttgttgttgtaactggttcttcttcttttgttgttctgtgtttgtgtttgttttttctctcacctgaaaatgtcttgctgcggtggtaactgtggttgcggaagctcctgcaagtgcggcaacggctgcggaggctgcaagatgtacccagacttgagctacactgagtcaaccaccaccgagaccttggtcatgggagtggcacctgttaaggctcaatttgagggtgctgaaatgggtgtgcccgctgagaacgatggctgcaaatgtggaccaaactgctcctgcaacccctgcacttgcatgtgaagtgttgggagagcaagcttcaagcagagat

SEQ ID NO: 74044 - DNA, 359 bp, Glycine max
  unsure (1)..(359): unsure at all n locations
ccggaattcctcgggtcgacccacgccgtcccgtagatcgacccagaaggggagggaaatttggtggctttannggtcagggaggggccattagtnnctgtgtnnttgagccttctggtggtgtattttctctttacctgcnagttttcttcnnatttcttctattttccagcnnatctctcgtttttcgtttcggttggagaacctttaattttntnnccttgtangnnaggagaatttcnnctccttnncagttccanttcttatntnnttcagtantnnttatgtnnncattcnnttatcaannnaatctatncnnatgaatnntaaaaaaaattttattggataatngggatttt

SEQ ID NO: 74045 - DNA, 262 bp, Glycine max
gctgagggggctataggcagataggtcttgatcggtgttcgagcatcgggtgtaatcatttaactgcatatattgcatgtccactattccagcatctctgaaaatagttggagccatctaatgaatcctggttgatgagaacgcctactgcatgtgcatcttagatactgtattgatctcatggtgatcaccgtctatcatgcattcaattaaactattgatccatgagatagatctatcatgtcatgtacagcacccacat

SEQ ID NO: 74046 - DNA, 373 bp, Glycine max
acgcgtgcgaacacgacaagacgagcgtttgctgtcactgagcatgctactattactaagacacatttctgggtcatatacgttattacattggacagtagtaatatactaggcggaatttgtttgctactctgcaccgatgcgagaattagcaattgccacatgcaacttagtggcatgcatcatgattggccatgcttgagagttactccgttgtagctgctgtgaggcattcacaggactcttcaactgactctggatcgacttgttatgctataccaagtggatctggcaatccagggtgagcttgtggctctagcgatattggaagaactgcgcatgattgaagtgtgggccgaatgtctacgctatg

SEQ ID NO: 74047 - DNA, 231 bp, Glycine max
gactttgtattagtgttgcatgacacaatcaggggcctgtgtgcttagaagagagacattgagtcataatgagggagatgaagaagcagaatttggagcgcgatacatgagtaagagaaagtggagatcgaataacaagaatcgacaagatggtgcatcatgtaactgagctgacgctagggctgagcctatgtatgattggtaatgtagcctcggtagcaagtaatgctg

SEQ ID NO: 74048 - DNA, 192 bp, Glycine max
ctgagtatactgagagctgactttcctaagtcattcgagacgggctataactaaaggatatgagccaatacataagactcttctgaaaatacacggtatatttcatctggggaagaggcttctaagagatgttagaaccgattaatccaagatgacataagatgtgttaatatccattactgatcaaaacac

SEQ ID NO: 74049 - DNA, 123 bp, Glycine max
ggctgcgttgctgatggatatattgtgaactggctacattcaaggagcgttcatattactaatgacactggattacacttcactcagcaaagctgctttcttatagttagccaagaatgataa

SEQ ID NO: 74050 - DNA, 369 bp, Glycine max
acagctagttaaaacaagattcctaattgattgctgcacatgcaacatttaatactactgggctcttttgctttactgttgagtcatcaagggactcttgttgtcagagtcttttgtttttgttatcctgactcacagagatatcaaaacaagtacatgaaagaatgccatgtaattctttgtcctctattgatttcagattggttttggtatgggtcattttcagtcaaatgctggtttcctcctcttattctttgcttttccccctctcgagagtgtggggaattttcgtgatacaaggaaagacatcaagatgccttgtcccttgaaatacaatgagaatctaaataaagaaaagtagcatatgcc

SEQ ID NO: 74051 - DNA, 314 bp, Glycine max
acggtgcaacttgtcattccacatgactaccctggcttatattccatgatatggggattgaattaatatcataacttcacaaatgctcgtgtgttaatcttttctgacctcctcaacgaagactgagttactgattattggaccagaatcacttctgtaagaattaagctattactcaacagacttcaatcttgataatgcaaatgatgacatcactgtaaagatacgttcatgcatgacctatttagttagaaaaatgctaaaatgtatcttatttgatcgcattctaacgattgactatagaattgaccctc

SEQ ID NO: 74052 - DNA, 300 bp, Glycine max
tcgaccacgcgtccgcgaacacccggcacgggacacacagatgtgataccaaataataactgatgagctttacagcgaagaggaagacagctatgcgagcattgaagagaagatgcacaacaactatagcctgacgcgaggcacagggcatacgctgtgacactctctcaaccaatgatgaatccctattaccatgctttcacttactaggctgaaccttacactgattgtagcactaatcttacccctctgaaaccacgcttatgaagctacctcaataacactagcataaagcagtat

SEQ ID NO: 74053 - DNA, 345 bp, Glycine max
ggaaccgattgtatcattaactcttattctcttccgctacggctaacaatctctatctatctacaaagtgtgttgtgtactgtacacaaaaaaaccaggattctctgttggagtctgactgacgcacctggccaacagagtaccatgcagcctctgcatcgcctggaatcacagggaagcgtatactcataaagcgttataaataatcattgaacacagattcacatgtcacgagctcgagactatgatggacatacatgcttagaagggaactatgggaatgatggacataggtaaaccacatcagaattgcaagactcggaatacagatggcgatcgaggatt

SEQ ID NO: 74054 - DNA, 368 bp, Glycine max
gaaagctagagcaatgcattgctgccatatgggattgaacacaccgaaaaaaaaaaaaaggaacaaaaaaaaagcgggcgctctataggagacccacttacatacacgcgcatgcgacacgatagatcttttatatagtgacctcaaaatacaacacagtgggcggcgttacaaagccttgactggggaaaaactgtggtgacaccaatcaaaagcctctggaaacatatccctttttccacatgtggcgttatcgaaaagaggcccacagatagcgcttttcaaaacatgcgcacactcaaaagggaatgtgacacgcgctgtgaaggggcatataacgcgccgcgtgtgttgggacacgcacagtg

SEQ ID NO: 74055 - DNA, 424 bp, Glycine max
tccgaggggacgacagaagggacgctccttgactacgggattgtcacatcaaactgtcaatagtggagtattcactatcattttggtctacatgaacgaattatatcttgcacagtggattaaagttctgacgccgttattgatctcaactactcttgagtgattacaatctctatgagcttagttacactttttctcagtgatgatagtgaatgaatgatgatatataggatgtcttaaatgactgatcactgagcctatccagatgaacctactcataaggactactatcaacaacatcactgctagccagttatcactgagaaactgatgcaagagttttcaactagggtagcagaaatttacggttacctgcacttgaggctacatatgaaacttgttgacttatccaattaactgacac

SEQ ID NO: 74056 - DNA, 394 bp, Glycine max
acgcgacgcgtccgcctacccgtctgtgagaagtaggacgaagacgacagcactgatcaacagcacctggcagatgcacctacgtctttagacatagctgacgcgtggactaagatataaagtctgcgctgtgcaatcggcatacatttgatccttgattgtttctatgcagcgatcaaacaacacagaacactgaacctgttcttatggatttggcgactaagaagacgaagaacaacatgcaagacgtgtaagttgacgatcatgaatagcacactgagaagataagagatgaacgttggccatgctttggtgcagacagtggtagaaactgcatccactggaggtagccgtgaccaaaacgtgatcactcctaaggtgaggatgaacgatg

SEQ ID NO: 74057 - DNA, 226 bp, Glycine max
tgctgcgagtagacaacacaacggcaagatacgtacacaatacaactacattgactatcgactaggctattacaacagctagggagcctaacacttatatcacagatcatattctttcagtgatgacatagaatacagccgttcttgagcatccaaacttacgtacgcgtacatgccacatctttactgatgtataaaacctcctataatcaattcactaaccgaa

SEQ ID NO: 74058 - DNA, 366 bp, Glycine max
ccacgcgtcagaacagctgagagaggacatctgatggggactctatgactattcatgatgccatacgtgtatcggttacatactggatccatgctaaaggagtgttatggcaaaacttcgatcgatacgacgcgtaataaaacaacttgcgactagatagacttgaatagaatatctgtggattctgacatactgcatttgttctactttatagagcatgaacatgactcttgactcgacatgcgcatggactcgagcactagaacttattagtctgtggaccggaaaccagcctatgatgtaggaggatgatgtaaactatgacactgatgcagatagagatgatcatttgtcaggggcaattat

SEQ ID NO: 74059 - DNA, 395 bp, Glycine max
ggttctagtgtgtgattgtttgttgttgtaactcgttcttcttcttttgttgatctgtgtttgtgtttgttttttctctcacctgaaaatgtcttgctgcggtggtaactgtggttgcggaagctcctgcaagtgccgcaaccgctgcggaggctgcaagatgtacccaaacttgagctacactgagtcaaccaccaccgagaccttggtcatgggaattgcacctgttaaggctcaatttgagggtgctgaaatgggtgtgcccgctgagaacgatggctgcaaatgtggaccaaactgctcctgcaacccctgcacttgcaagtgaggtgttgggagagcaagcttcaagcagagatagcccttaattaggaataatgataaactattaatgt

SEQ ID NO: 74060 - DNA, 397 bp, Glycine max
gtcccataattatatatatatacacacacacatactggtggccttttacttgaaaatcatatgatacacaggttgatatagtggaccaatttgttaagaacattttcactctgttgaccaatttggataccgatgaaccaacctgtcaatcttctcattccttacactaccctacgcctctaatattgctcacacattacaagaattttattacactaaacaaacgtgtagtaaggaagagattgttttttttttaatgaatgaacatcatgttttcttgaaaagaagaaaatacactattgtgattattgagaatgattgtgaatatttttgcagaaattaaaaagtttcatgatgtgtttatcacggattttaattatgtttaatactcattttt

SEQ ID NO: 74061 - DNA, 479 bp, Glycine max
  unsure (1)..(479): unsure at all n locations
accggtccggnnaattcccgggtcgaccccacgcccgtccnnggcgagaagaaacgacagaagggggggcgcacncnnactctctanctttgttcatttctacggtatcaagtgtgctcgtctttttgacggtgcnngtgctgtancagcattgacccctcagctttgagcccagtaaaaccatgcatcagcacctacctanncggtannncatggcttgtgcatgcaatcnntttcgtttcggtcccacccacgatgtctcacttgtccccatacgnagaacctccctttacccggagtcttcannagccccaatccccgctttcgcctccttcnngtcccggcgtcgcccattcggcgaacttcgtacctcgaccctctccagaaatatacttccgcatggtctacttcgacgggtcgctctcctcannaaaacatccgatgcttttcttccacgccctaatactaaatannagttt

SEQ ID NO: 74062 - DNA, 375 bp, Glycine max
ccggaattcccgggtcgacgaattccggaacgagatagatcttgtagtcgggccccggcgcgatgtcgccttcgaaggcgatcgacgaatcggtgatcgtcagcttgccgttcgcccagtgcagcgcatcgctgcccggcaggttgcgttcgaagcggccggtatggcgcgtgttttcagcggcgacttgcagcgcgaccgcgcttgcgccttccgatgccgtcaggatcggcagcacgtagatgccggcggcgaatgcaacgagcgccgtcgcgagatgcgacgcgatcagtatccagattctggttttcatatcggaccctttgaacgagaacggaaggtggcgccttgccacccatctgtagtcgcgcgagc

SEQ ID NO: 74063 - DNA, 237 bp, Glycine max
aattcgagccgccgcttttttttttttttttttttttttttttttgggaaaaaacaattagggggggttatttccgcggggccccccacaccaaaccgaaattaaaccccccaaacttctttaaactaaaacgctaccaagccaatttatttaaatttttttaaaagaaaccctttataccccctaccaaaaacttaaaatccgttgcaccttaaacaacccccaaaactctaaaaa

SEQ ID NO: 74064 - DNA, 440 bp, Glycine max
gaccacattcacacatgacagcacaaacacgaggtctcacataacaccaaatctcatcacgaccatcatcatcataatcaccatagcataaccctccttttctctctctaaatctctctcaattctctctccttagatctgcgaattatcttagattccgatagataaaataaaattcaatcaataatcaatttggatcctcgcggcggggaatggaagcgttgttgttgttgttggtggtggtgggtgaatctagcagactctgaacgcgaaaaatgcctgcgttaccgcacgggaatcaccaattcggtagtagtaatggattctggtcgaagaatcgcgacgatgttggatacaatcagctccacaagttttggtgtgagctgttgccgcaagctcggcaggagctcttgaggatagacaagcaaccctttttgagt

SEQ ID NO: 74065 - DNA, 216 bp, Glycine max
ggaggcgaagtgaacggtttgaatgggacaaggaaatgacagcctggaatttcctcaaacagttaacgtgcaccgttggcgctcattctcccaccctctcccgtcgcctcatacactactcattacttgttccctctctctccgctcatcacaaaattgttaggtaccaatggcttccccatttccgtgtcaatctttatgccgcagttccaaatg

SEQ ID NO: 74066 - DNA, 417 bp, Glycine max
ggttctgtgtatgtgattgttgtgactcgttcttcttcgtcgttatcttcttcttttgttgtttgtgtgtttgttttttctctcacctgaaaatgtcttgctgcggtggtaactgtggttgcggaagcgcctgcaagtgcggcaacggctgcggaggctgcaagatgtacccagacttgagctacaccgagtcaaccaccaccgagaccttggtcatgggagtggcaccagttaaggctcaattcgagagtgctgaaatgggtgttcccgctgagaacgatggctgcaaatgtggagctaactgcacctgcaacccctgcacttgcaagtgaggtgttggagagctaaagcttcaagcagaaatggcccttagaaataatgataaaaactatatgtagtttcaaaacttcaaaatta

SEQ ID NO: 74067 - DNA, 357 bp, Glycine max
gggccacccactcacatttgttatttccctctttacccccaaatgtcttccagcttctcaccccttgccatcttcctcctcctccttctggtccggtacacgtgcgaggcacgtgagccgttcgcgtgcgacccaaaaaatggcggcacgaagaagatggcgttttgcaaggtttcgctggcgatagcggagagggtgaaggatctgattggaaggttgacgctggaagagaaggtaaggcttctattgaacaatgccgcggcagttccgaggcttgggatgaaagggtacgagtggtggtctgaggcactccatggtgtttcaaatctgggtcccgccgttaagtttaacgcacag

SEQ ID NO: 74068 - DNA, 242 bp, Glycine max
  unsure (1)..(242): unsure at all n locations
aaaaaaaaaacgacgccgccgcacgcctgctacaaaatacaaaaaacaacaaaattttacttcttcaaaaaaacaacaaaatcctctcaacgcttctctcaaccttcctcaanntacacaaaaaacncctatcaagtcccttctttttcataaatttaaaacattttacctaccaattaatatattataccatcattattatccctttaccatttcatccacacaaatattataccccttac

SEQ ID NO: 74069 - DNA, 417 bp, Glycine max
ctctttaatattaaaaagtataaaaaaatgctagtttggcagaatatttcttccgaaatatttgtcaatccacttaaaacatgacagttatcaatctatttaattataccttctaaaaaaacttcgtttcaaacgcattttttactcttatctttattattttattttaaaattgttcatggaattatttacttatgctatttatataattcaaactaaatttataaaaaaaataatctctaccatttctttttctttttcactcaccttttccatcatattaacgttggactttgtaaggtggacatctaaaatggtgtttgatccatctttacatcaaagttattgcattatatttatgttaggtatcagaaaataaaatatgcacacaaaaggcttcaggacaattaacaatgc

SEQ ID NO: 74070 - DNA, 320 bp, Glycine max
aaggatcgaccacgcgtccgcccacgcatccgcccacgcgtacgtccacgtttgcattccgatacaagaagacgactgaccgtgacggctgaaagaagacgacgcaaccatacaactgaaagaaaacgactgtagggtaccgctgaaaaaagacgactgaatgtgtcaaacggatctacccactgagtgcaagcatttcaataacctaactatgtaaaatactataagaacatttttactggccccttttgatgatacaagattacgtacgcttgactgataaatttaatcttttcactaaaagcacctatttcttgttc

SEQ ID NO: 74071 - DNA, 430 bp, Glycine max
gtgtttgatctaccacatttgtttctggcttgcaaggaagtgagaaccttaaatttgttggaggggacatgtttgaggcaattcctccagctgatgccattttgttgaaggtaaaacaatttcacaattcatagtacaattttacatttataccattaacacctatttcataattgactgatgtcaaaatttagagaattaaagcaaagaattgatcaattggaaaaaaagtgaacgattttatcagcattgatcacatgaaataacttattataatttttatatgtataggtcactaagctagcactgtctagtagtctaacaacatatctgcaagactgcaactgtcataccaaatcagaccaactaattctaacacaaaatgcaattaattaagttatcatctattgacaagtattcacattcccac

SEQ ID NO: 74072 - DNA, 107 bp, Glycine max
aaggttaaggctcacatcttattgtggtcattgggcgggtgtgctatcggtaatccactaccacgggacacctgttttgcaatctctccagctttggccatcgtgtt

SEQ ID NO: 74073 - DNA, 431 bp, Glycine max
  unsure (1)..(431): unsure at all n locations
caacatagttgttaaagacttaaagtctaaaaagtaaacaaaccttggacttttctaaggcagtgtctcttttggcagcttcacccattaaagccatatgatttaataaatctttttgcaaaggcataacctcataagatctgcaattaattaatttgaaaaatgtcacaatgtgtacttccaaaccaattatgagaaacagaactccagaactttgaaaattacctaaactccttattcttactcaatttatcccacacagacttcgcagatgagtcaggattcttcttcacataactaaggaagtgagtggtgatcaaagtagtccttattatggtatcctcatagctcttacgaggcttctcaagtataatccatcttccatcctttgatagcactgatatctcangcctaacataggaaaaatcaaa

SEQ ID NO: 74074 - DNA, 181 bp, Glycine max
tcctgatgacaaattgcggaatacgggggcgccaagggacacacccttgtcttccacaaaaaaaaaaaaaaaaaaaaatcgggcgatgtggacgatctaaaggatccaaccttaccttcccatgcatgcgacgttatatcttttctattaagttaactaaaatcaacttacttgcccaacg

SEQ ID NO: 74075 - DNA, 463 bp, Glycine max
ccacgcgtccgaacatgagagaagacgacctacggggacttgattattttgtgagtctatgtctaaataatggctgaacgcttgcgatctgcaattatctgaagctgcgaagcccaactctctcatattatatccatacgcgtgctgaaatcggtagctggaacctatgtcatgcccggctagatttggtggatctttaaccctttgcacaaatgaaaagcactatggaagttacattctttcagttgaatgataagggaccataacttcagatggtgttgcctataaggaaagatgaaactgacgcctaggaaaggatggaaatctattgtaccacttcggttgaaaggaaaatcagcaacccatgtcttgttatttcgcaaagttaactctgctggctgaggacctggcaaaacaccaacttatctgaatgtgtttgacatgacacccatgattggatatg

SEQ ID NO: 74076 - DNA, 258 bp, Glycine max
gtcgcccacgcccccctactgctttgagaaaacacgagaaagggggaagggaaatttttctgagcctgctataaacacggggtgggggaacaaaccagcttgcccaagatctccattctgggagccggtattttttagaagacacaaaaaccttccagacacttcaagatccttcaaatttttactccgaaaatccactggagccccacttaggaaatatcctcaggtggccgtaacatatgttgtgagcatttttcc

SEQ ID NO: 74077 - DNA, 294 bp, Glycine max
ggttctagtgtatgtgattgttgtgactcgttcttcttcgtcgttatcttcttcttttgttgtttgtgtgtttgttttttctctcacctgaaaatgtcttgctgcggtggtaactgtggttgcggaagcgcctgcaagtgcggcaacggctgcggaggctgcaagatgtacccagacttgagctacaccgagtcaaccaccaccgagaccttggtcatgggagtggcaccagttaaggctcaattcgagagtgctgaaatgggtgttcccgctgagaacgatggcttgcaatgt

SEQ ID NO: 74078 - DNA, 239 bp, Glycine max
tgggacacataatagcttccaactgaaaccgaactcataatattcatcactagaagtgttggatccatgtctatatctaactaatcatgggccttattattattgttgacaaagaaaagaacggcaaatttaataaaattctgtgagttgaacacatgggccaagaatccttctgtcgagttaggcacttggcaagcttgacctcatgttgcatccaaaattttcaccacaaccattct

SEQ ID NO: 74079 - DNA, 52 bp, Glycine max
ttactgatactcacataatagcatcactgtagagggaggaaactacatcaat

SEQ ID NO: 74080 - DNA, 239 bp, Glycine max
cttttattttgataaacaaatcaaagccatgggcacctccaacttctctattgttctctccatctccctaaccttctttttggtgctacttaccaaagcacactccaccgatacccgttattttaccctcaacaattttaacccattccaaccaaacattattcttcaaaaaaaatactagtatttcatcctctggggggtttcaactcaccaaaatttgcatcaaccgcttgcccacc

SEQ ID NO: 74081 - DNA, 223 bp, Glycine max
catcgattcctagggctaatattttccgactttcatctagtcgattttacactgggtcccgataaaaaagatctctcatctacctagtcccagacaattttctgatgcgcatggtcatttctattctaaatgcatcatgagcgatctcttcattcatgccttcacatgtgttgccttcacgtctttctgcacctcaagcgccgatgtatgtaacagtacacct

SEQ ID NO: 74082 - DNA, 193 bp, Glycine max
ggctgatcctatatgatatgattgatatgatagagcgactaagaaaaagagagctatatctaacctttccattaacgcgacgtgtcgccatatttaagaaccgttcgttctgcgcacctgctgctgctacaggagtcggaattactctgctttaccgaataccacagcaaagagtggacacctctatctggga

SEQ ID NO: 74083 - DNA, 231 bp, Glycine max
tgggagaacatatcacccccatgtttacctagagctcctgtaactttgaggtgcattttattaccaacctctgcaactttgcttctcaacatgaaatactatcttcttccctctattacttaactcaatatagcactgaaggtaacacattctgctttactcttgctaaaaaactggaagtttttgcttcctactacgccatcgccaaaagccatcactgattttctttac

SEQ ID NO: 74084 - DNA, 259 bp, Glycine max
cacacgaccacacaactgcgcgaagactacagatggtatctatctgacatatagggcacgctatcatgcatagaatgaagttgatcactagacatatgatgatgctgatcgcgttcagagatcaaaattgactcagagtattgattatgctgacaaatatctttatgattactaagccatcagaggtgatcgattctgatgtaggatcctccagtacataccatgctcagactgcaaatgctaaactaagtgctgtctc

SEQ ID NO: 74085 - DNA, 207 bp, Glycine max
gatccccaatcagagtcaaaagtcagggggcacagtgaaatgctgttgcttaagcttgcgaatctgaatcacataatcaatcacccattcattatacatcatgtcttcggtgaccacaatgacgctcaagagttctgacagctaggctttcgaggtacatgaggaggttgcgcacgaatcgcagactcttaagcacatgatcgaaga

SEQ ID NO: 74086 - DNA, 378 bp, Glycine max
tactcaagaaatatatgaattagactcccaataacagagacattgtgaaacttttcaaaattccaaaacagagcataacataaatggaatatattgatctttagctggttcttatttttggcttgtgtaatatattgatctttcacttatatatgtcaccacattgctttattttttttatataattcctcaaagatttaaaatgttatcatatatgtctcacatctcaaagatataatttttgattcattcctctattttaggcttgacagatatataagtgaacttgaactttgactaatatgatgtaccgcattaattattacaattccttaaaaatttaaaaggttatcatatatggctcttaaacacacatac

SEQ ID NO: 74087 - DNA, 101 bp, Glycine max
ggttctgtgtatgccattgttagaactcgttcttcttcgtcagtatcttcttcttttgctgtttgtgcgtttgatttttctctcacctgaaaatgtcttgc

SEQ ID NO: 74088 - DNA, 423 bp, Glycine max
  unsure (1)..(423): unsure at all n locations
gtatcacatcaatgaccaaagcgatgaccaaagcgatgacgagggcgttggtggaccaaccatcacctccgttgcaatatcaccaacctaggtgtcaagtgaacatgaaccttgaccacctgtcacactacattaattgtcaccatttcattcatcaacaagataatctacaaccaccaaccgtgcacacgaggttgtcatgaccttcgatgaaaaagcacaatgtattcgagtagtcaaagaatacaacatcaaaaatcattntgattgaagaataatatattccgactagagaaggctaaactctatgtgtgaatgaatntgatagacacaaccacacatttattgtaacatagactcaatccccacttcaaatacccaaaccacttggaatgtttagggttatgttacaatcctaaaagt

SEQ ID NO: 74089 - DNA, 302 bp, Glycine max
  unsure (1)..(302): unsure at all n locations
acgggcatgagatcaaatctctcatcatatatttaagagacatgattatttgtcaatcatattacaccatattgatatttgtcatgatttgtgaataagagtcacttgaacacacttaacatttgaatttgaaactgattcaaaagttgggcagcgtgatttccaaacttggtcattggcaaattgttacatgcttcaacaattggaaacataatcttatttatcaggtctaaagggaatgttcttacacgatactcagataatggncaatggaaacaccatttgatttccattttccaaca

SEQ ID NO: 74090 - DNA, 191 bp, Glycine max
taaggaatcaaagtcctgatgaaaaacaatttagtacctgtagatcgtgcaaatttacgttcccgcacacgctacgttataacaattccttaattccacccaatttcagttcacccaacctgcctttacatacgcgaatctggattaccgaacggtgaacccaactgaactgcctacaattacaaccactg

SEQ ID NO: 74091 - DNA, 202 bp, Glycine max
ttaaaaaaacaccaaaagggattgttttaaaatttaacactcaaccccgatttgcgaagttctaatatttcatttcacacaaaatgtctttgattccaaatttcttttgtggcacaaagaacaatttttttgatccttttcttcctcgatatgtgggaaccttttaaagattttacttttcccacttttctttcttcttaaa

SEQ ID NO: 74092 - DNA, 407 bp, Glycine max
ggatgttcctcagagcggaaaatgttgtcgtttgctccgaaggtgtctcctgccacattcttcgatcagtcctagattaaaaattctgtctttcttcttctgtgaccgaaacagcaatgaggtagcacaagcaggtttcctcgcttaaccggcgacccaccgttctttatctgctgtgcgccgctgcattcttctccctcctcctcttctacatccaatcctctttcttctcaggcaccgtctcttcggattcgccaacaaaagataccgtctcttcagaccgcgactccgagacaatccgcggtttttctaacgttcagtccattgtgaatcaatgtgtggataacagggggcttggactcactgcacatattattgatcattgcaggttaattcttaaataccct

SEQ ID NO: 74093 - DNA, 292 bp, Glycine max
tgccacctttgttacaaacaattcctctggcacgcagcaaggacctgttggaggaagtgatgctcaaattaattgttctgacgggggtggattaactgaacttgagaaactattaaagcagaagactttcaccagatctgagattgatcatttgacagcacttatgcgttcaagaactgtcaatgcacctgtcagggaagaggagaaggggacagaaatggtcccctcagaaccaatgctgctgagtggacaaaaggaatatcccaaatcaactgcactagaaaatgggact

SEQ ID NO: 74094 - DNA, 361 bp, Glycine max
atccacaggagtgtaagagagtttaaggggacttaacttacgcaccatgtgtttgctcaatcaattgagttagacctccttaactatagagcagtagttcatctatgcatctccacaaaatatgatcatgggcaaaagaagtaacttcactgtaaaatattgatttcaaaatcatcctactagtgttaattgaaaacctggtgtactaaaatttattatttggatattttatttaaaatcattcaaagtttagaaaaatttagtgagaattatcgattagctaaaaatgaagaattcgatattccaacaaaaaggataattcggacattttattctccctgaactctcacacatcttcctc

SEQ ID NO: 74095 - DNA, 427 bp, Glycine max
gggtgtgtgtgtgaaatttccttctccctgttgtttaacgtttcttcgtcttttttgtttttgttgataaaaaatggagggtgtgggttgttcggataagggtttcttcaatttgtttttgcgacctcttatttgtcttcaatttttgtaaagagttggtgtagaaggttgttctgtgttctcgtgtgtggctaaattttggagatgagtcatgcaaaagagaatgaggaagcagggcagaatgtacccttggctttggaagaaactcaacagtttgttgaagcacagattcaaccagaagatttggctgctcctgtgtccacagggggtacttcaaatcatgttgaaaacgggaaagtagaggtagaggcacgcgtggaggataaaattgtgaaaccagaagcggattcagagtgcattccactac

SEQ ID NO: 74096 - DNA, 306 bp, Glycine max
ggttctagtgtgtgattgtttgttgttgtaactcgttcttcttcttttgttgttctgtgtttgtgtttgttttttctctcacctgaaaatgtcttgctgcggtggtaactgtggttgcggaagctcctgcaagtgcggcaacggctgctgaggctgcaagatgtacccagacttgagctacactgagtcaaccaccaccgagaccttggtcatgggagtggcacctgttaaggctcaatttgagggtgctgaaatgggtgtgcccgctgagaacaattgctgcagatgtggaccaaactgatcctg

SEQ ID NO: 74097 - DNA, 254 bp, Glycine max
ttcctaccaaaactactcttaatgtgcctaattccccgaatatctttcttaatccctcaacaatgaaattagttgaactgcatgattaatggagatgcatcaacaggctacacaacttcgcactatccctatcactgaagcatttagatgctctttctagttctaagggataaaagacatttcccaacgcctaaaccctaaacatagcatatatatgggtgatcagaccaaatacatgggaataagcacaaaaa

SEQ ID NO: 74098 - DNA, 285 bp, Glycine max
  unsure (1)..(285): unsure at all n locations
gggatgtgaataggagagggataataagaagaaagaggaggaagaaaaggggaaaactcanataaaaaaagaggaagatagatcaagatctcccttgcgtttgtctcagatgaagaaattcaagagcagaacgatactaactcaacggtatcagacgtttcagggtttcagcacttccattttttttttccggatttgacttggaagacaatcaaagaggttcctaattgcttgcattgttcctctgggtggtggatactttgagtattcttaaaatattgacat

SEQ ID NO: 74099 - DNA, 447 bp, Glycine max
taaataaacccatatcctagaacttgatgcatgattaatagtacttgaattcattgatcttgatattgtgagccatgcatgattattaatctaatagggaaacacgaaacataaatgaccgtttctgggtccacatgatcaacacaatgaaatgggatacttgaaagcttgtctactttgagagagaaaaaaagacggcaggtacgtctgtgtggactgatgcataaagtccgaaaagtgaggagcgtgtcggtgcattcttgcctttgcaaaaaatgaaatgaaatggtctcataatatacgataatggaatacaaacatgacgcttgataagatggatcatattatagtttcacttcaagatgaacattacaacaacatgtctcattattgaacaatatcagattgtcttgcatgcatgtaacattgattcaaaacaacttcaat

SEQ ID NO: 74100 - DNA, 395 bp, Glycine max
acgcgccaggccacccttccgttccgatacgacagacggcggaaggcggaggtcataatacgagactatgtgaagggatgtatgtctattctggcctgcaaagctcttccacgcaaacacatgacataacacaacgcaccgctatggatcgcgctgtcccttcaaatcacacactcatgattcattgcgcgctaaaaagagcacagacagctgagggacatccgtgttggccccaaagttaactaaaaaatagatgtgcagacaatagctttggactatgcaaaggagatgatcttgatacagttgctgacaaaagaccactcatgctatacactcctaccgggaaccccaaaattgatggcagacacacacgaatgactgctactatggctatt

SEQ ID NO: 74101 - DNA, 302 bp, Glycine max
gatttgtgagtgtgtgagagagagagcgagcagtttcagacacagagagaggggtttgggattggagggattgacgctgcgtctcttcctcttctctttcgatccatccctcattcctaatcctccaatccaaccacctcagcctcacactcacatatacacatatctgaacgcgtatcgtccctcctatggcttcaaagcgcatcctcaaggagctcaaggacttgcagaaagacccaccaacttcttgcagcgctggtccagtagctgaggacatgttccattggcaagcaacaataatg

SEQ ID NO: 74102 - DNA, 267 bp, Glycine max
accgctcgtacgagctgttgaaaggggttttctgagggggaaatcttatttgtgactggcggggtaatcctcaggaaccatctatcatacatggtttttataaatatgatgaattgacaccggcttttgctagcacctacttatttttgatgaattaactttttctttatttatcgaacgcccggatagaacaaacaagttttttttgttctttcttcaacaaaatctgatctgatagtatacccctcagtcggataataacttata

SEQ ID NO: 74103 - DNA, 282 bp, Glycine max
  unsure (1)..(282): unsure at all n locations
tatgtgttggttcatcactcactcgtgaacacaacatgtgcatataactagctaccttttatttttggtgttcatggctggcaagctagttatagtctnntgggtgctttcattntctactcacttttttctagtttctttgttttgcctctcacatggggggtaataatatgttggaatattcaaatattgcatcatgggtcatgcatgacatgaatcacggcactaatgcaccattttgagggggttcttttttcttttctttattttttgcagagaaat

SEQ ID NO: 74104 - DNA, 379 bp, Glycine max
gggtcttgggggggaatggttggtggtggaacttcgtcttcttcttttggtggtctgtggttgggtttgttttttctctcacctgaaaatgtcttgctgggggggtaactggggttgcggaagcttctgccagtgcggcaacggcttggggggcttgcagaatgtcccagacttgagctacactgagtcaaccaccaccgagaccttggtcatgggagtggcacctgttaaggctcaatttgagggtgctgaaatgggtgtgcccgctgagaacgatggctgcaaatgtggaccaaactgctcctgcaacccctgcacttgcaagtgaggtgttgggagagcaagcttcaagcagagatagcccttaattaggaataat

SEQ ID NO: 74105 - DNA, 51 bp, Glycine max
  unsure (1)..(51): unsure at all n locations
ccggnnctgaaaaaccgggtcgagacacacgcgtgcgcccacgcgttcgta

SEQ ID NO: 74106 - DNA, 121 bp, Glycine max
  unsure (1)..(121): unsure at all n locations
ccggnccgaattcccgggtcgacccacgccgtcctaccggttcgggaggacaacagaggggaacacattactcattctattcatctntagcattgtggattgaagataattgcgaatgtgc

SEQ ID NO: 74107 - DNA, 339 bp, Glycine max
tactgtgatttcattaagtggatgtgaatcttttaccttttgaattttttaaagtaaatgtgttttaagaaaaattaattaatttcgcatggttttctttccttttattattatgtgtttaaaaacctttaaattaattatgtatgattttatttccttttattatttatttatatttgtgaggggtaggggtggttctggcttccagaacccttcatcttcatcatctatctcgtcgtctgtgtctccatcatgttcatcgcaggaacaatccaaatcacacatttcaggagcaatatcccaaataaagtgtccttccactttattcgtatgtatcac

SEQ ID NO: 74108 - DNA, 341 bp, Glycine max
ctgtccataatcggattttgatgcatttgatatgatatgggtgtggtgtttgaccagtcctaaatgggtagtccccattataataccacatttgttcccattagagtttgggctttatgacaacttgaaaatggatgcacctaccaacaacacttcttttaatacccatgctgctgccaatgtctgtttactgtgtcccaatacagcagcgcaacaagggtagttctgtcattttacactttttgtggagggaggttttgtagtagggtcacatgcccccaaagtgattcacccaaatccaaaaatgagccttaaattctggcctaatttggttaattggt

SEQ ID NO: 74109 - DNA, 190 bp, Glycine max
gggttctagtgtgtgattgtttgttggtgtaactcgttcttcttcttttggtggtctgtgtttgtgtttgttttttctctcacctgaaaatgtcttgctgcggtggtaactgtggttgcggaagctcctgcaagtgcggcaacggctgcggaggctgcaagatgtacccagacttgagctacactgagtc

SEQ ID NO: 74110 - DNA, 402 bp, Glycine max
ggaactctttccataaataggtcatcataggttggatgagacctgttttatattcggttagaccgaatacctagcgtagggatatcaagtagtcagttaggtcgagtgactgatactacaagggtaccatgtattaggttaggttgagtacctgatacaaggatattaggtactaggtttggctaagcaactcaaattatagaagtgtatcaggtattcggctagatcgagtacctgatacgaggcatatcaagtactagacttggttgagtacttaaaactataaaggggtatcaagtattctgttgggctaagtacatgatactagggacatcaggtactaggcttgggcaagtacctgaaactatagaaaggtatcaagtattcagttgggtcgagtac

SEQ ID NO: 74111 - DNA, 311 bp, Glycine max
ctattgatgactgctacgaagctccattatttttgctgtctaataagaaatagctggaggaccaatgcttagggtctgttggggaacaccatttacaacttctcattaaacacaaactgacgagtgggagaaataaagcttggcattcccattggtggaaggaccttagaagactgtataatcaggctttttttcacaggatgcaatacaatatggtatggaaggttggttgtggggacataatcaaattatgggaggattcttgactgagtgagggctgtatgcatttataaaaaaaaattttggcattc

SEQ ID NO: 74112 - DNA, 321 bp, Glycine max
  unsure (1)..(321): unsure at all n locations
ttcccggggtcgaccccacgccgtccgtcccggctgcgaagaacgaaacagaagggggttctanngtgtgtgattggtttgttggttgtaacctcgttgctgtcttcttttggttgttctgtggtttgtgtttgttttttctctcancctgaaaaatgtcttgctgcggtggtaacctgttggttgcggaaagctccttgcaagtgcggcaaccggctgcggaggctgcaagatgtacccagacttgagctacactgagtcaaccaccaccgagaccttggtcatgggagtggcacctgttaaagctcaatttgagggtgc

SEQ ID NO: 74113 - DNA, 418 bp, Glycine max
gttgcaaggtttggagggagaaatgttgaaaatccttatgtaaagatgaaagatttgaagcaaacagggactattgatgactgtatagaagcttttatattcttgtctttctaataggaaattgctagaggaccaatacttggcttattttgtagaacacttgttacaacttaacattaaacagaaactgcagagtggcagagataaagcttggcattcccattggtggaaggaccttagaagactttataatcagtctgatttccacagtatccagtagaatatggtatggaaggttggttgtggggacaaaatcaaattttggcaagattcttgactgagtgaaggctgtaagcatttcaaaaaaaagattcttggcaatatggaaggaagggtagtttattaataatattcaaag

SEQ ID NO: 74114 - DNA, 337 bp, Glycine max
acattttgtttgctcacacaatattgggtctatctacactagcccacttttagctcaactcctagctgtccaactcacctgatcataccttctccatcttgtcagatatacatttatttatccaatttatattaactaaactgttttaacccttcaaccaacaatctctattgaaattattattttatagctcccttgataaatgaagttattatcttcagggttattcttcttcatttcttgaacatcggtaccattgtaatccattcaattattttagcgaatatcttttataaagatggccatcattttctcaaccacatgcttcttatttttt

SEQ ID NO: 74115 - DNA, 299 bp, Glycine max
atattccttcaaattgatgagttgtctttacatccatgtgtcacaaactcattctaccaagtgttagccacaaaactatgatgccaaacttaaccaaccctcaaccttttcctcgtgcaactttttccagctagaaactagaatagaaacccaacagaatatttaagagtgatgaatcaattcattacactctctctatatatttttaacacactttctttatatattttaatataagtgaaggtaatgcatgttatctttgtaattattgatgccagaataattaaataacatttttt

SEQ ID NO: 74116 - DNA, 162 bp, Glycine max
gatcaccgagtcgtgttgcgattgaaaatggggagcgatgttgtagaatctatgcagtagaggcccagataatctcctctctcttccgactaatactcatgggatgctacttgatcaatatactgtactgacatttcttattatggaggaagtgttttttat

SEQ ID NO: 74117 - DNA, 312 bp, Glycine max
tacgagaatccacgaaaaaaaacatcatctattatctctcacaactagacagagagagataacgactgaggggacatttcaccatgctacttattaatttctctatagaagctccatctctacataatcatatcatttaattttccctaatgataatgcactactactaactcattcataattacctctccacatcaagaactccttctactcttttatcctacacactccttccttcttatactgcgcatattacaccgagatcctccccttcgcatcttcactttccaccatttcacaggaaaacaatca

SEQ ID NO: 74118 - DNA, 246 bp, Glycine max
gacccaatcttccgttcggctgacacaacactaccgaatgctaccacctgctagaacacctcagataggctgataacattcaccttatctaagcatatataatatatggtaagaagattataatatgcatcctacttagaatttctatcatttgtgtacatgtattcgaatatttcaactgtaatctaagtacatcttacattaattaaatgttccccaatattaaccatacttaatgattaaacc

SEQ ID NO: 74119 - DNA, 124 bp, Glycine max
gaacccactgtaaatgttaatggcactgaagatacattagggaaattgctatctgaccattgctatctcctttcattaccttagatgtaatatttcttaggttagcactgtgccactaacaatt

SEQ ID NO: 74120 - DNA, 408 bp, Glycine max
  unsure (1)..(408): unsure at all n locations
ggaagagtgaagagaatggctcccaagggtttaacctttctggctgtgttaatatgcgtttcagcactgtcactgagtccttctgttgcgggggaagggcaaaataatggccttgttatgaacttctacaaggaatcatgccctcaggctgaagacatcatcacagaacaagtcaagcttctctacaagcgccacaagaacactgctttctcctggctcaggaacatcttccatgactgtgctgttcagagttgtgatgcttcactgttgctggactccacaagaaggagcttgtctgagaaggaaacagatagaagctttgggttgagaaatttcaggtacattgagaccatcaaagaagctttggaaagagaatgccctggagttgnttcatgtgctgatatcctc

SEQ ID NO: 74121 - DNA, 382 bp, Glycine max
gggagaagacgacagatcgggcttctggttcttgaacctcgaattgataatcctatgaggaatttactatctagctgttcagattgaacgagtgccatacttaattcaatcacgcccatgaaacatcgcttcatcttgctattacttttctgcttagttcaatctctataccttccttgcatagctcctcgctatttccaaataggtgaccccctctttgacaaaaacaacaaggtatcatactccaatacttaacttgcatatgaccactaattcttgaagtattgcacacccaaaacgatattaaacaatgcataaactttgacatagggtcttagaacgaatcgtatcgataattcagaatatacatttcatatgaaga

SEQ ID NO: 74122 - DNA, 156 bp, Glycine max
gggcactcatcccatcattcttagagattactttacagagtgaggctactctaatccgggcaatcattggccaagctaaatttgccgctacatctgctaaactttaacaaacttttgccactaaccacaacctttattgagcttatttcatttcct

SEQ ID NO: 74123 - DNA, 279 bp, Glycine max
  unsure (1)..(279): unsure at all n locations
actagaacagatagtgaagatcaacaaattttaagtactcattatagcccaggatcatcttcccatgcaacaaatgggggagctgtatcacctggtaaaagtaagatgagggatattgcaaatgagtttgagccttgctcgaagcttgaggacctaaatttggatgttagaaagaactcaaaggagacagaggaaaaatttctctctgacaattttttccagaggcttgaacattcaagtgtncccgttcatgaaataatattttccactggtgacaag

SEQ ID NO: 74124 - DNA, 284 bp, Glycine max
attgtgaaactaatggatagacgtactcagtatacatatattgagagtggagggttgtgtgaagaagttgctatgccttgttgggtttgtggtgttagtgagtactattggtggcgtggagagtgctcgtaaatgggggaaatctacaaccactgataatgaggcttataagctcgcaccatgtgcctcatctatgcatgatgagaatgatagtgtttctcagaggtgctgtgctcaagtgaagaatattgtgcagaaccgtagatgcctatgtgcagatcttg

SEQ ID NO: 74125 - DNA, 302 bp, Glycine max
tggaatccaattggagtgataagaaccaagagtatacaactagcatatttaagggtccatttgctaagaagaaattacatacgtccaaattacacttcttattattattttgttaatgtaagtttatttttttaattttaacacaaacttatgtaaacaaaaattaaaaaaataaacttggaatgaaaaaaattaaaaaaaaatgctaacttacaaattataaaaatatattaaaccgaaaaaaaaacaatggataaaagtagggaaggggattgaaaatacctaaatggttatctaaaaat

SEQ ID NO: 74126 - DNA, 243 bp, Glycine max
caatgtccagtgggttagagatccagcgagcgaccagtttcaaagagaggatttcccattgtcaatgcgactgattgcgctgcgtctctacctcttctctctcgattcatccctcattcataatcttccaatccaacaacctcagcctcacactcacacatacacacatctgaacgcgtatcgtccctcccatggcttcaaagcgcatgctcatagagctcaatgactttcataaagacccac

SEQ ID NO: 74127 - DNA, 399 bp, Glycine max
  unsure (1)..(399): unsure at all n locations
cagctgcgagaacaccaccgaaaggagcatgcaacggaaacatggggggncactgcaagttgcgacagcaaaacaagggagcttgactttaatgaggatggcttcttggaaattaatgatctcattgatactgaacctacattgtcaaatgttgaaaattctgcctagtaccaccattttgaaaatgggttaagtgaacttgatttgttccaaaatgcacagatgtttcttcgtgacttggggccaattattcatgaaacacattcacatgcatatacaaatgcccttgtaatcagcaatattgaatgtcacaattaccaaaaacttccaaaaacataagatgccaatcaaactgctggcgaattctgtattcatagtgaaagcaatcaactatcattc

SEQ ID NO: 74128 - DNA, 168 bp, Glycine max
gctctctaggggtaccgagcgcacttgctctatagctcttatctacacattcttctttgacacaacatcaatgtctccagactaacttgcaaaactcataattgcttctattgaaaataacgttctagacttggtgacaaaccctttattcgacaaccgtcctaagca

SEQ ID NO: 74129 - DNA, 375 bp, Glycine max
gtggctgagagcggaccccagactggagctacctggacttgagaccatctaactctgtgctccttttccaatgctggtggatgatatgtcttagagatattcctaaaccatagttaaagccaatactatgaccctagacgtttgaactttaaggtactccaggcttcatcaggagctgtctagcgccagtacctacatatctatcgagcatgttagaagaattccacagtaggtttgctatcacttcaagaccttgcttcacgttctagaataacgcatctgatattgcactcctacattatgtctgtctgcatgcatttgatctgcgttgacgcatacagatgaatcatatatacgatgtaacttagatgctat

SEQ ID NO: 74130 - DNA, 313 bp, Glycine max
gggcagagagcgaacccaaaactagagctacgttccctgtaaaccttccactcttggctccttttccaaatcaaggaataatatttcctaaaaatatttccaaacccttgcttaagcccaatctaagaattttggtggtggaaatctaaggaaccctggcttcttccggtggcttctaacaccaagacccacattctattcaggttggaagaagaaaaccaccggagggttccaatcactttcttacctggctgtactttttaattcaatgccttggataatttaagcgctaccttaagaccggccaaatacc

SEQ ID NO: 74131 - DNA, 221 bp, Glycine max
acaatggtgcattattctcaaacatctgagaacacttctaggtcctacattaaaacatgggagctccactttaatgattataacttcttggacattaattatctcattcatcctgaacctacattgtcaaatgtttaaaactctgtgtattaccaccattcttaacattgcccaagcgaactccatttccaccacaatacacatatccttattcttcacta

SEQ ID NO: 74132 - DNA, 87 bp, Glycine max
ctcataacggcgttctaatgtgtgattgtttgttggtgtaactcgttcgtcttcttttgttgttctgtgtttgtgtttgttttttct

SEQ ID NO: 74133 - DNA, 417 bp, Glycine max
gaccaccaaaaggtggtccacatttaatacactcactctcatgtcaaagatctctatctaatatgagacgtaatcatatatattatcattaataccattaattcttacatttattacaccaataactctttcaccttaaccttctcatttctaacatacctatcatcttaaatattcaaacttcatcacttaccatatgttacaactcataatctaaaatgctcttaaagaaacctactactattaattattcaagaaaacaatgttattaaactaaccttaactatatataatcataaattaatccaatttagaccctacttaacactactatcgtgttatcacattataatccaatctccagactatcactactattcaagcattacaaccacacttaatcaattttactaacac

SEQ ID NO: 74134 - DNA, 343 bp, Glycine max
ctacacgatgggttctgagttcaactcatcgtgtggaaaaaaaaggaagaaaatttaaatactatttttgtaatttgtatgtgataaagtgcccatcttgatgtatgtacttcttcacttctttgtatgtgtccctagtttgagtgcaaactaaaacattttgaagtgtttaaggtgtcgcatgatgtgactattattgtgttggattaaggaaacatggtttcatggatgtattgttgtctttgtgatctgtgatattagatcatgtgtgtatgtacaaagcatttatccacctaggatgatggtttttgaccatacccatttgaaaatggcatgggttaaa

SEQ ID NO: 74135 - DNA, 382 bp, Glycine max
acgcgtgagaatacgaccgaacgctctagaggaaccaaacttacgtacacatgccatgaaaagcataacaatctgggcaaataccctataactacactagttgaccaatcattatacaacaatccatactctgacaaaccctagaccttacacaacatacatgtctaacatcacattcatctttcctctgctgacgtaataactaacaagccctaacagattccacttcactacagaccctcacacccaatttccaaaaggacttcctctggtccgttatcatgagacatacaaatatcttaatatcacctagatttacccggtaaattatccaactcttatcgcccatagcgtacgcactatatcatttgcttttgtcaca

SEQ ID NO: 74136 - DNA, 221 bp, Glycine max
tgactatagacaacaagaagacgtttcatacactgggcctcggattgcatttctaatcgggtctatacctttctttcccctaacctcacaaagcacaaatactaactcatcctctctgctatcaaccatatcttcccacccttcttattatatcatgcccttacccttatatcaacagtaaagaatatcgtatacctatattaaaatccctattctgatcc

SEQ ID NO: 74137 - DNA, 335 bp, Glycine max
accaattcgatcggccgattcttctttttttgtctctatttattttttgggccattattacttgtgacttccattaacttggacacataccttatcattctacagacatttaaattattccttccaactcctttccttcaattttttccacaaactaacccaccctacctttcttacccaaaccccaatgatttaaaacactattcaaacactcttattgataatcccaaaccttctttcacttttacaccaactctttaaaccttccactacccactaagatcttctttccttaaacttcattttcaccacctttccaaacatcttatccacca

SEQ ID NO: 74138 - DNA, 135 bp, Glycine max
ctaccttacgactcaataattatattaagctccctttcaaacctttgaactctcatctcttattttacaccttttaacattaatttttcacaacctattcatttaattttcaaatttccatttattatctttacc

SEQ ID NO: 74139 - DNA, 141 bp, Glycine max
ttggtcatgaagctggagggaatggtgaaaagccgtaggtggaggtgtaactaatctggaacccagggaacattgccttccttgggttaaccgggaattgtgggacctgccttaattgcagtgaaaagaaaaccaccttgt

SEQ ID NO: 74140 - DNA, 431 bp, Glycine max
ggcacaagtgagtttgttgatcgagataactagaaacagtgtgatgaaaatgaaggtccttgttttcttcgttgctacaattttggtagcatggcaatgccatgcgtacgatatgttccctctccgaatgaacactggctatggtgcccgtactccggaggtgaaatgcgcaagtcggaggcttgctgtggaagcacacaacatctttggctttgagaccattcctgaagagtgcgttgaagcaacaaaggaatacatccatggcgaacaatatagatcagactccaaaacagttaaccaacaaacttacttttatgccagagacctcgaagtccatcccaaggacacatttgtgttcagtatagatggcaccgtactctctaatattccatactacaaaaaacatggatatggggtgggagaaattaact

SEQ ID NO: 74141 - DNA, 144 bp, Glycine max
gctcgcctagccatgctcttcaattgctaagaacttgctcagcacattgtgtcgcgcttagcgactttattccagaccatgtctttcttatccagattgctcgttctcgttaagcctaatgcgaggcttagcgagttagtacct

SEQ ID NO: 74142 - DNA, 322 bp, Glycine max
ctgctgagttaatcgcgtcatggtggtcctactcgttgtttgaaactggagagcctttactcgtcaaaagtcctcatttcatgacctagctccaagcgttgctccacgacgctaaggtgttctctttctcaaagcttctttgttaattcatctctgttaattgaatgtatgaaacaatgcttatcaagagagtatctgttaattgaaattctggcaagactattgctagcttcattgtagtgctgagttttgggttatgctgctaaattaatggagtatctgctaattaaaatctctgatatttgaaaagttgaaacaatgc

SEQ ID NO: 74143 - DNA, 289 bp, Glycine max
gaacgagaatatgcaagtgtgagtgggacgatggggtgagaaacaggagtacgcaacatccaatccaacgatccaaacaaaactgcaaaacaatatacaattgaatagcagtggcgtttcgacgcgcacgaagcttcttctacttcttccactgcgccacattcattcattcaattttattgtttttaccctaattactatcgccaaccccctttttttttttcttcttcttccttttttcaatttcgattgcatggaccatttcccattctaacacctacaatttttc

SEQ ID NO: 74144 - DNA, 399 bp, Glycine max
gcacctaccggtccttaacttgccagtctagccacccgttcatacacctgacagaagacgacagaattccatcctattttatactattgcttctattcgttctcatgcgtctctatatacctccggtggcgtttccccctttcatttttctctcaccttaaactgtattactactgtcccaactgatccttaacaaaactcctataactgcagcaccatttctttactacctcataaactccgactttaccaatacaccaattacatctacatcgatattatggacatcataattgcaccatttaatactcaattctctaatgctgacactcccacaatcgcctataacgatttaccccaatgtgttactaactgcacctgcaaccccttcacttacaa

SEQ ID NO: 74145 - DNA, 318 bp, Glycine max
ttgttctagtgtgtgattgtttgttgttgtagcgtcgtgcgtcttctttagtggtggtgtggttgtgtttgttttttctctcacctgaaaatgtcttgctgcggttgtaactgtggttgctgaagctcctgcaagtgctgcaactgctgctgaggctgcaatatgtacccagacttgagctacactgagtcaaccaccaccgagaccttggtcatgggagtcgcacctgttaatgctcaatttgaagatgctgaaattactgtgcccgctgataacgattgctgcacatgtggaccaaactgctcctgcaacccctgc

SEQ ID NO: 74146 - DNA, 262 bp, Glycine max
atgtgaaatcaacatcttgaattgggcttgctctgtataacgggtgcgggtgcgagaaagcacttgtgttgtttttcgtacgaaatggacactaaacagagttcggtgacagttacgctcaattactgcgcgtttacgttcaccactgaatttctcgcgactatactagcttatgctgtcatcaaagcctcacttttagcccctgatctctatctgctgctattgatcaacactcctactgccaaaggatacagcaaaattc

SEQ ID NO: 74147 - DNA, 441 bp, Glycine max
  unsure (1)..(441): unsure at all n locations
tagggaaggtgcaagagtttgttgtgagctgtaanctagtttatcgtgaggagaatatgaagttgtttgttttctttgttgctgcagtagttttggtagcatggccatgccatggcgcaggctaccaaaggttccctctccgaatgaaaactggctatggtgagcgttcttcggaggtaaaatgcgcaagttttaggcttgctgtggaagcacacaacattcgagcctttaaaaccattcctgaagagtgcgttgaaccaacaaaggactacattaatggcgaacaatttagatcagactctaaaacagttaaccaacaagctttcttttatgctagtgaacgcgaagtccatcacaacgacatatttatattcggcatagataacaccgtactctctaatatcccatactatgaaaaacatggatatggggtggaggaat

SEQ ID NO: 74148 - DNA, 435 bp, Glycine max
ttagaccagctatgtataaccattgacgcgctactcgggtaacaggtagattgaaatactcaaattcttgacatgcgattattcaaacgagtcctaagctttctaagctcaacattttaccatacatgtaaccaaagtcaaaaacatgatcatttgataggaaaaattgagcgcaacaaactacagggttactctactataacactactactcatgtactgcaattcgtgagcgcatatgatctggctacaaaatgtcacggcctcaaaacccgtcaatcatatacatcttgaggcatactctaacgccaccatcatagtagatgaatacctggtgactgctaatacaattgaaaatatcattggtcaataatcattaactacgtcaacttacctaatgcatatacttgaactattacaatactgtaatccccta

SEQ ID NO: 74149 - DNA, 422 bp, Glycine max
tatccaggatccagtgaccaaaaactggtggtgaaatatggcaaatataaatattggatattttccagcagccttgttctccaacatgacctcagctgatcaagtggggtggggtgggcgaacaagaactcctcctaatactcctagtcccccaatgggatctggacactttcctgatcatacttttcatcatgcgtgttattttacatttgtctcgtttcaaaatgaagcaacaagaaattatggaattggaccacatggagcacaaacattctctgatagatctgattgttttggtgttcgatacttgggatatattgcagaggaggttggatattctctccaatttggaggacccggtggtagttgtggaaattaattaatttttataagcaagctttgtcagatatttgaaaaaataa

SEQ ID NO: 74150 - DNA, 302 bp, Glycine max
tactgatcatcttacttcgctcattctcttccaatctcattccattctgcccatttaattcctcttcaagttgcatactttatttctcatcgcatattcttataaaatgtggaacattgtgcgaccttgtccaactcactctgtgcattaatcttcaccttatttgcatggttatcgattctgtcgttgtcttaccccgtttcggtcactatttctaactaaattacacacataacacaccatcctattttaacaaatataatttctttgtcatgaatcaatacacacctatctttttttat

SEQ ID NO: 74151 - DNA, 290 bp, Glycine max
atattgacaaaccgtacggctgatactcctttataatcacttacattttcatctaggtcaactttcctatgaaaatcgccatccgtgagagcacaaatcccactttatatcatcaagcttgcctatcgtcattgatacatcacattcgctcactgcattgctgaaccttaacaccttaacgttaggatttcttctactatcctcacatgatgaactcataaactactacctatgattctatatcaactgaaatcatcatcattttcacttttatcaattatattcatcac

SEQ ID NO: 74152 - DNA, 348 bp, Glycine max
agcgagaaactactaagtaaattgcttgtccgaagcagtgggacccgcggatcatgatacagttcgaatcgacaatctcattcgagcacagtatgatgtacagagacgtataccatgtcatggtagttcataatcacgcactggatttcattacgagaatgctccttcacattgccagacgcctgctctgagatgtggtcatgccgctgttcctgaatataaatctgctgaatggcagattctccaaccatcaactgcatctacctgcctcaagaagctatgttactgctcctagcatagcacctgtccaagcaactaccattaccagacctcagcatgtggacaatg

SEQ ID NO: 74153 - DNA, 419 bp, Glycine max
gaaggtgtaagagtttgttgtgagcgataagctagtttatcgtgaggagaatatgaagttgtttgttttctttgttgctgcagtagttttggtagcatggccatgccatggcgcaggctaccaaaggttccctctccgaatgaaaactggctatggtgagcgttcttcggaggtaaaatgcgcaagttttaggcttgctgtggaagcacacaacatccgagcctttaaaaccattcctgaagagtgcgttgaaccaacaaaggactacattaatggcgaacaatttagatcagactctaaaacagttaaccaacaagctttcttttatgctagtgaacgcgaagtccatcacaacgacatatttatattcggcatagataacaccgtactctctaatatcccatactatgaaaaacatg

SEQ ID NO: 74154 - DNA, 367 bp, Glycine max
aatccagcttaagcggagaagagtatgatcgctattcacaccaatatgaactgatacgaaatcttaatgaagtttacgataatgatcccggaaacttcaacaagattgttgagcttatgcaaaaaatgcaagaatgtggacaaccaccaaatgatatcgtccaggagcttgctcctgattttgatttagccagtcttggccagttgtaagtccccttggaatcttgaatatgcaagcttagggcatgtgctgttgtttattaccctatgtatgtaacattaatctttatttatttatcttgaaataagaccctcattagaaaatatgcattggttatttttagctccctaaatactcaaagtaatga

SEQ ID NO: 74155 - DNA, 378 bp, Glycine max
aagaatacgaccgaatggtactctactaccctcagttcttaacggtactagaggcattagtgaagcttttcaccgtggcagaccagtcattattgcatgcatctttctaagtattgcaattttcgcatctatcctatatgcactctgaagtgaacacagaaacgcaccgatccatgatctaactgactctccataaattacaatgacattagacacatattcgccagataacattgtcatgaatctcatatcaatgtttggtaacactataaacatgccaatgcctgctactacaaacttaaatggatacactattcacattctctgtatattttagagatatgcatgataatgccagtttgatgacatataatacat

SEQ ID NO: 74156 - DNA, 330 bp, Glycine max
aaattcatcaaatccttcttcatttggtttactgccaataattcatggactaggtctcaaatttgaaatgggtcttatatatcaaaacaacacttactatagaatatattaccctccattatatccttcccactaacttttttcatatctttacatatttgtctataaatatcttcttgtaacaatttctactttttacatgattcaacatccatatttcttcattactctttctaattctcatcaaatgattcaacacttgaatctttacctacacatttctttttatatatcaaatttaattaattcaatgatatagtaaaatcattt

SEQ ID NO: 74157 - DNA, 177 bp, Glycine max
actcttctcaacacaacattaaacgacatcccatgcaactcttactaataaactctgttctctgaaaaccctcatttctcttcttctttcatcatctctttctcttctatcaacttccatctatgcctctcaaaatcatacatttcatttaaacccacatcatccactccattattc

SEQ ID NO: 74158 - DNA, 200 bp, Glycine max
tgcattaaaactcatgtccataagcaatctagggtctatgtggaatttacattgaagtcaccctaatgatcattctgctatccaccaatatgtatattgtaaggaactgtatacaaggatcatacacttagcgcaattacaatatcaaagaacaaatctatcatctgtacactcatctcaacaacactattggaataatg

SEQ ID NO: 74159 - DNA, 263 bp, Glycine max
tgttggttctagtgtgtgattgtttgttgttgtaggtcggtgctcctcctttggtggtcttgggttgggtttggtttttcttttaacttgaaaatgctttcctccggtggtaccttggtttccgaaacctcttccaattccgccaccgcttccgaagccttcaaaatgtccccaaccttgacctccccttaatcaaccacaaccaaaaccttgtccatggaattgccacctgttaaggctaattttgaggttcctaaaatggt

SEQ ID NO: 74160 - DNA, 364 bp, Glycine max
  unsure (1)..(364): unsure at all n locations
gttttaagaaagttaggccattttgatctatgcgcattccttaccatgacttctcttttgtttgtttacctttatttctcttacgttcttgtatataactctttgatgcttttagtgtgtttttaaatgtatgcatgagatagatatttattcatttgatgcacatgaacaccaacacttcttgcatacacggtgagttgaaaaagggccctatacccgggtccgtgggaacataagaaatggaggtgaatctgtgatcatgttaagtctccgacatgcttgatgacagtgaaacctcatctagagtttttctcttcgatgatatattgtcgctggtagtccctaccgncacaatgttgatatc

SEQ ID NO: 74161 - DNA, 327 bp, Glycine max
gggggtgatgactgggatataggtgcatgccacgaaatcatatatatgcatgcacataagatgaaggttcctatatattttggcattccctcctcatttaacgtccatccacattttctgaatccttttctctctctctattccttggtgattttcaaggaactcatttgtattggtgatgagagaagaaaacaagctaattaagaagcaacgatgagcagcgatttgtaccgattcgcagtatcatcccacttcaataggtttccaaaatcggtctccctccgaaagaaagttccatggtggtaccagatcctggacccgcggtcc

SEQ ID NO: 74162 - DNA, 221 bp, Glycine max
acctattatttaattactgatctaataatattaacattcggacaagattaatataaacttatcattggactttatacagtattattcatcatttaattaacatttcatcttaattcattctctctcatcatttaattaattaatcctatccatttttattttctactttatataacattaattcttctttctcattatctttacatacatatatttattct

SEQ ID NO: 74163 - DNA, 339 bp, Glycine max
acacaacttattttaatcacattactccatttccatctattcacattacttaccattacttctctactctttctatacctttattactcttacattcttgtatataactctatcatacttttactatctttctaaatgtatacattacatatatctctattcatttgattcacattaacaccaactcttctttcattcacccataatttaaaaatacctctatacctcttacctatataacataacattatatatttaaatcttttatcatattaaattttctacattcattattacacttaaaccttatttatacttcttctcttccattatatattt

SEQ ID NO: 74164 - DNA, 324 bp, Glycine max
aggtgtgcgaacacctgagagaagaccacttaagacgcctatcaatatgcacatctcatacgagtccctacaatatgtatttccaattcctcagtcttaccatttgtacattcatttccattacttgaaacgctctaaattgacagacgacatactagtcaagctgattggtctactattaaacgacatcctaaatgatctgataaacttcaacgttatcaacaagaactcaattaatatatagtccctaatgtactaatctcgaatctaatacacgattgcctacggagaatcacactgagtaaagatgcacatcagatttac

SEQ ID NO: 74165 - DNA, 309 bp, Glycine max
tactggtgcaagtagacgagggaaggggtattggtgtctaggtttcagtagcatatagaacaaatttaaaatttggaacttcaaatgaggatcttttatgatgcaattaggcttcagtaaagcaaatattaaatggaaagttgatcttaattcttaaatatggagcttgagtctctgatatgccctaaattcagtttaatgttggatggaattgacttaaaatttgcttttgatcttaacttgaacatgaaatgtttgttctttatttcctctctacccggtcttgttttttcataaatttattaccta

SEQ ID NO: 74166 - DNA, 310 bp, Glycine max
cccactcgtccaaccccttacaaaagaccacacaatttacttacttctaattacacatactccaaacggcttactggaaactacaggtgagcactaaataaactactatctaatcaataattactaactataactaatataatactaattcttaatactcctagaatacatcttcaactctctattcatatacatatccattcaacccaacatatttcattgactggatctcgatcacccaccaccacactaaaactactatcttttaaaacatctattcctattttaaacatacataactgtatccata

SEQ ID NO: 74167 - DNA, 344 bp, Glycine max
tgttaatattttgaatgtagcttttatgtacaaagtttgggggaaaaatcaaagtgcgggtgggtgaatgatatattataatatatacattatgacattccaaggatttctcaatcaatcctataaaattcctcaccttaaaacatttacgattatatttattatcctgagaaacacattgttaatgtagaactgcatacatttaatgatatagtcaattattacaatgccttgcctagtgatcctgaaactgatataaaaactgtctaataatcttttactactaaatctctatatatttatttttatctttatccttatttaatcaaacaaacttttttaat

SEQ ID NO: 74168 - DNA, 54 bp, Glycine max
tgttgctatagaactactaaagggtactcttttcacaacacaacacacttacac

SEQ ID NO: 74169 - DNA, 414 bp, Glycine max
cagggactcatgccatgcatatgctgatggactatgactctgatcatgtcacatccatggctgcatgctcttgcaattcccaaatgaaatatcccccaaagccactctagatttattcaacatatctacacacattatacaaaattccaacttgtcaatcgtactcaatcttctatccatttgtcaaaccataccattcaacctacctcgatgcttattgagatcactctttgaaccaccctcattgatattgatcagtcttagtcactctctgatgatagctacctagatttcacatgaataggctacgaagcataagccaatgcaaagttcctttcgaaaattggactcaaaaggagtctttaacatgtactacttacgctcatgaccaccaccaacgttgagaactcaact

SEQ ID NO: 74170 - DNA, 166 bp, Glycine max
ccaaattgcttaactctacaacttcaccgattcataggtaatttaggcactgcttctctactctctttctatctctcaatatttctatcttacactatctttctctcattcttattcttcttaacttctttaaactatttacacattaacatattatcacaccaaa

SEQ ID NO: 74171 - DNA, 83 bp, Glycine max
tgctgctgctacgagacgacaacagacggctacggatccgggaacactacagaactgggcggctcgcacaagacgacacaacg

SEQ ID NO: 74172 - DNA, 276 bp, Glycine max
ttaatgctaccgctgctacacgaccacagatgggtactggtgccataagacaacggatggggattcaagcacttgttaacaaagatccatctatacttcatgttttacgtgcaaaaggttcttcaactgcatcaaaggctaacaatcttttaaaacaatgggatatggttttagcaatcaacattgaaccagtcacatgctctcgtgacattgaaaatgcttgccaatctttacacaaattcgactcccatgatggcaaacttcacttgactattt

SEQ ID NO: 74173 - DNA, 148 bp, Glycine max
tgtgtctaacattatgacaaggcatcatatggggcttcaggtgcacatagcatggtagaatgtccaatcactaatttaaactgatccatccacactttcggttacaatttccaaaacatccttccctaaaatacttgacacataaatc

SEQ ID NO: 74174 - DNA, 342 bp, Glycine max
tccggttattagaatactacataaattttcggctggtgaaaaactacctaaggtgggagacaatcacattcccacgatgcttcgaaatccactctctctttctacaattacctattgctcttgactgatcacccactttgatccttttctacctatatccccgtccattcctccaccattagttacgacgagctccttcacatacagtcccatgagctgcaatatccctttgcattgacgaagcagatcttctgctcttttcatctggttaatatcactcaccactatatgtctctcaatgtcaacacaactaattctctgaaatattgtgatttacctaac

SEQ ID NO: 74175 - DNA, 197 bp, Glycine max
attcccactcctagccactcctccaaactgctgctacaagactacatacatctccggattcaatactactactcaaatttacgtctacagaaatactacaatacatgccaggcaatatccctacctccttgttccctatcaactctcactcactacaattacctcatcatctttacttatcacctacattcatcttt

SEQ ID NO: 74176 - DNA, 392 bp, Glycine max
ctctgtccttaattcccgggtcgagccactcttccatacttctgataaaacaccacagaagggttacaataccaatacaaaataccacataactgggcaagcgaaccttgcacatgctggaggatgattctaaacatggcaacacattcatcctctactaacatatataactcttcccttagtctcatatcaatgcacttaacatactaacattcaaaatacatcaacttaccttatttcgtactataacaaaaattctacttaaatacacttctacataccttcaatccattcaaactacatactattcaacatatatattacataaatcaaatcttactaactaatagcaataatgacttcatataatatatcacattaatgaattttta

SEQ ID NO: 74177 - DNA, 149 bp, Glycine max
tggcgagctagcattttcagacacataaagaggggcttgggatttactatattgactcgtgcggctcttactcttctctttttatccatccctcattcctaatccttcaattcaaccacctcatccttacactcacatactcacatatc

SEQ ID NO: 74178 - DNA, 194 bp, Glycine max
atgaataccttaagacatactatactactacaggtgatatgagcatttcactgggcgaaaccataaatgtactatattataaaataatattatcttattcataaaccttgcatttaacactttactgcaactatataattaaactattatatcaattactattaatcaactaaatatccgttttaaccttatat

SEQ ID NO: 74179 - DNA, 164 bp, Glycine max
tttggacagggcattgatcttctttttgaattgtggcctagggattaaagtactgagattggtagagattgcatgtatgggaagcttaaaatgcctttagaagctttttaacttcatattgacccttactggattagccattgtagtctatggaatctataatt

SEQ ID NO: 74180 - DNA, 373 bp, Glycine max
taattcccggctcgagccgctcctaactacactcatacataccacaacgagacatacgactttcacacatcacacttccgacttaagagcacgtcaattatctactgcctgtgggagcttctttgcattaacagccactaactcaccaatcttaatccttgtttttatcattagatccatacataattacttattgacgaacactttttctacacctcataattccaccttcaaattcttttccatcaatttcaccatagtgattgtctaatctcaataatgggattgtcactatagatatgactatgagtccctgaaatgtatatgcctgttgctacctctgtcattcatcaccataagattgcctacttac

SEQ ID NO: 74181 - DNA, 451 bp, Glycine max
ctcagatgcgagtgtcaaatttttcataactcgtcaggcaaaccttgttcttcctgttgaatgatttaaacatggcagcagtgtggttctttttgaacatatatagctcttccctttgtctcatatgaaggcactgaagattctgaaatccaaagtacattagtttaccttcatgggtacttcaacaaaatgtctactcactgtcatgctacgtacctttccttcattagaattacatacaaatgaacagagagagtaaagaatgtaaactaaattatggtatagcaataataacatcatacaatagtcacattaaggaaatatggcacgggaaacagtaaatgattcgtatttcaattaaggataatgcaaatggttcccgtaactgttgtactaactgtgctacattccaatagttttttttgcaaatgtcacacacatgaacatgata

SEQ ID NO: 74182 - DNA, 372 bp, Glycine max
gtccctatctttctcgctcacatgtcactttttatcggtgatgctgttaactctttatctatatatgcctctctgatgccgattggtgcctccaattttccggcaagcttcaaacttaccttcttctgccccttttcttatcactttacctgtattaatcgttttctactccccctatgcttatttataaattctatatctattcgtcttatctcacgttttatccaaaaccatgttccacaatatgtaaataaaccacctacttcattctcataaaccttaattctattttccttccaattttttaacacttattgcaattttcaaatttctacagcttataattttttattcatttcttttttttaattt

SEQ ID NO: 74183 - DNA, 211 bp, Glycine max
cgtatggcccacctactatacactcagaaaagacaaattggggtatatatgtttgtgaaggagctttatatgatgcaaatccatgacaaaagctacagaaaaccctttatagaaacacctactagctctacatgactatcaatcattgcttcctcaacgcaatcatgaaccactttacaacgatcttactgcttctatgggccttgataac

SEQ ID NO: 74184 - DNA, 303 bp, Glycine max
cgggaggaaaaacagaaaggagggtttctgtcttcaaattttgagggagtgttgtgtaggatataatagctagggaaaacggacaacagtgtggatggttcaggaggcaatggagggtgtaatttcttctaaagggatggtttttggagagaatacatgtagtagtggagtttgaccaatgatgatgatgcctttagtgacttctcatcatgttgatcatcatccattaaatcatgctattcttaataatcccaatcctaatgaacacacagacactatattccttgccatgccttgtactaa

SEQ ID NO: 74185 - DNA, 360 bp, Glycine max
tctgaatgcgggtttattaaatctacattagttggtatactcccaggggtctggctgacgacagaataggattaagagctttgaaattctggcacaaggtcttattgtctaatagaatattatgactgatgggggtattactatgcaattaactcctgaaagcttatgatacttggatttgtatccacaactgaaaatgtccttattcaaaaatccttacattctcttactgactgctgtaatctgcattcttggtctcctaatcatatactacactgttttgatatcacttgctcttttatacaatattgatgattttttagtattttatatacagcattttatttctataaacaattt

SEQ ID NO: 74186 - DNA, 255 bp, Glycine max
gatgcattgctaacatagactctgcaaaggcaaattgaggcctatagcacactgaagcagccatatatcatgcaacaactgaatcatagcgactgaaaatcatgtgatgaaactcagatagcttgaggtctatatatatcaagctgaacgcaaagggattaagaaccattatacatgtacctcacgtcaaaagtcttactagagaaaacggctcaccacatgtaacggacacagatcattgaccgaacctaaaat

SEQ ID NO: 74187 - DNA, 236 bp, Glycine max
tactgtccaatggtttctaagtggcgaatcgagtacacatcatatggaatccggtccctctgacactgaatgtttagcatacatctttaaaattaagggacacaactgttcattataaacatctgtataatctatcacactaatactgcaatctaataccaattagtattattaatgaatattgccaacagtcacattttatcattcggatatttaatgtccatcaattgcctata

SEQ ID NO: 74188 - DNA, 213 bp, Glycine max
catatcaccaatcttcaacaaatgtcttggggaacacgggcacatgcgagtacgcatactctctcatttactcagatgaccaaaatttcgctctatctggcatacccaaatcattcttatattcttccttctaacaagaaccctctgtcaattcttcacgacggacatccttgacaatatggacgtactacttttctcaccaaactagtttat

SEQ ID NO: 74189 - DNA, 143 bp, Glycine max
  unsure (1)..(143): unsure at all n locations
aattgtggcacccctttattccattccanncaaggggcactcagccaccacagggttgcttgttcacactacccctttctgctcttcttttacctttcaagttttaaaagtataaatatggcaaatacatttcctatttaacc

SEQ ID NO: 74190 - DNA, 76 bp, Glycine max
ggctgctaatactctacataatgatattgcttaacgaggacatctgattactatggctgtactatgactatataag

SEQ ID NO: 74191 - DNA, 101 bp, Glycine max
gcacctaccggtccggaattcccggggctatccacgcgtccagactgcttgcacaagactacaaagtggtacctcttctatagtgccacctaaattcaatt

SEQ ID NO: 74192 - DNA, 293 bp, Glycine max
atatgatacactatatccctctttctttctctctgccaaaacgagtatttgggggaggattacattcatattgctaccgttgcaaccaccatccttatctttaaactctaaaaatgcatcatctaaagctacaatactccttcaattataaaccctattcatatgcataaccccaacaccttactctcacctataaccgctttcgcaactcttaatcttcttattatgtagacagataaaaataaggttgaatgataaaacaagtatccaagttcgatatctaaacgtactaa

SEQ ID NO: 74193 - DNA, 454 bp, Glycine max
aaatgacttatatttgatcaatgttgtggtggacatgctgactgatgttgaggtaatgttttgtaaagcatgttgaaagcattattgctatatctgttaccctcaacttatatcttatgcaggcatgttccaaggtccatcttcctatccttgactacgatgatccttcccaacttgaacctgtaagttgacactgtgacaatgttttccaaatctaatatgtgtcggtagaatctcattgaaaaacttcgctacctctattttcaaaattaagctattgatcgatgtttgagttatgcagcacacttgggacctcacagcagatcaaggttttcttgtggacaccccaataacaccaacaaagcggatgacatctgatgaatgtgatgatgaaccccaaagctctcaaatttcacccgcccaactttcatctaacaaattaacatgacatgat

SEQ ID NO: 74194 - DNA, 117 bp, Glycine max
gccggctgcgggtatacgttgttttgttgcataaaggaggcctttggttaatattgatttaataagtttatttaaggttacagtaaatggatgaactgctaatggattaactgtcat

SEQ ID NO: 74195 - DNA, 56 bp, Glycine max
taccgctgcgaggataccacagaaaggtaccgttgctagatgacggcagatgggtt

SEQ ID NO: 74196 - DNA, 431 bp, Glycine max
ggatggcaagcatatgtagcatacatgaatataggatgctactaccttatcgggctcccctcggaattatcatgggctgggtcttcaaaagtggtgtaactgtaagtataatccgctacttaattatcacatctaaacactgattttgggtttgaataattcttaagtggtgtgctgacatgggaatgatatgcatggcagggaatcttgggcgggcatgatcttcggtggcacagcaatccaaacgctgatactgattatagtaacgatacgatgtgattgggaaaaagaggtatagttttactgttacataaataatccggagcttattccaaatccttatcagcatcacttggcatattgacaaacttgaaattaagatctccacataataagttattcatatcaatagcgtaaatatgcatgttcta

SEQ ID NO: 74197 - DNA, 344 bp, Glycine max
atgcgagaaaacaccacaaaatggctccatttagctaatccaaacctaaaggggccttccgttaaaaccggggactctacttttctttacccatctaagcaataatatttcctatatatataccgaaaccattgctcacgccaaacctataattttacctattcaaaatctaaactacctttgatacatcattatctttctaacaccagcacccatattatatcaattttttaataataataccacccacagtttcctattactttctcactataatgcactcttcaattgaaatcctatgatattctatacttacataaacactggtgaaattcttcttatca

SEQ ID NO: 74198 - DNA, 431 bp, Glycine max
ggcacaagtgagtttgttgatcgagataactagaaacagtgtgatgaaaatgaaggtccttgttttcttcgttgctacaattttggtagcatggcaatgccatgcgtacgatatgttccctcttcgaatgaacactggctatggtgcccgtactccggaggtgaaatgcgcaagttggaggcttgctgtggaagcacacaacatctttggctttgagaccattcctgaagagtgcgttgaagcaacaaaggaatacatccatggcgaacaatatagatcagactccaaaacagttaaccaacaagcttacttttatgccagagacctcgaagtccatcccaaggacacatttgtgttcagtatagatggcaccgcactctctaatattccatactacaaaaaacatggatatggggtggagaaatttaact

SEQ ID NO: 74199 - DNA, 256 bp, Glycine max
actcgtccaaacacctcagattataccacataatgctctatcattttaaaagggcctttcatatatacaaggctgtctcttattccttatactacaattgaaaatacccaccttctaatctttcaaaacaaactcaaactctctttcacaaacattaactacttctattcattaactccttattataaatctacctaatatcaaattattactttaatttaaaaaattttttttataaaaaaaaataaaaactttt

SEQ ID NO: 74200 - DNA, 277 bp, Glycine max
taaaacacgtgggaccacgaccacaccccgcgcacataggtactattatactctctaaaccaacaaccaaatcttctataattttctaatctttatgacacactgttcacatcctacagagcaaggtccatactttgtgaacgactacactgaaccaactacgctaatctttaccgacctagactttcacacactatataacatgtacagagccgccataacttaattcatagcaacactcctttttctttacatcaccgagttgaccattattggc

SEQ ID NO: 74201 - DNA, 309 bp, Glycine max
ggcgactgcgcctttacatcttattgcgccacccatgcggactctgctccctatgctgcgagacagtgtgatcaaaataaagagacatggaccccacactcttccactctttgttggacggcaagtgccatgcgctctacactttacctattcatatgtacactctctataaggccccttcactccttgtatcatgatcgggttggaggcatgctattctaacacactatggccaatggttcaacaccattttttgagattgcgtaaaaggcacaagagcttttatacatggattacaacttagatcac

SEQ ID NO: 74202 - DNA, 323 bp, Glycine max
ggtgactgctgcttgacaccatgatgcaccagcgctagagacactggactctgtggtgcgagagtgtgtgtccgagagcgacagacagccaccccaaccactggctgttttagtttgacgggggtgacatttactatatcttttaccccattactcgttccttctaaaaacttacgttgtagctctaacatgataattgcgtgtgcaacgttctatgctaattcactatggcatatggcgcttgcacgctttgtgatattgaatacagggcaactgaccttaaatacaaagaactcgcctaccctcacgtgtagaggctctta

SEQ ID NO: 74203 - DNA, 217 bp, Glycine max
acgcgtgaaaacaacagagaggggtcattgaatggctctttcttttttccagggcctttcatgtataccgggcagcctgataatgataatgataaagaggatcatgctcacctgctctgtgcataaccatgtcttgatcttataacaaaaaactttaactactcaagctatctactacttatgatagtcctagggaagattaatgaacatacccaat

SEQ ID NO: 74204 - DNA, 51 bp, Glycine max
  unsure (1)..(51): unsure at all n locations
gcctgcacgtacccggtccggaanttcgccgggtcgagcccacgcccgtcc

SEQ ID NO: 74205 - DNA, 430 bp, Glycine max
gaagcaaaaacgaaatcacaacgtcggaagctcccctctctaagtggcggcgacggcgggcgtgcacggcggtggttcaccttctacactcctctcatctcgtaagtctttgggatctatcgaacgcatagagaaactcttctcctcactcttcatcgtgcttcgcttcgctttatcgcatattaggaaactctccaggacatgtgaaacttgtcaaaatcaggatgagcaatgacatatttgatagacagttgttagcagagaagttgttgaaactcaacaattcacaacaaagcattgaatcactttcccattggtgtatttctcaccggaagagagcaaaagaaatagttgaaacttgggataaattgttcaatgcttcccaaaaagagcagcgtgtctcttttctatacttggctaatgacatatt

SEQ ID NO: 74206 - DNA, 337 bp, Glycine max
cctcgtacaggtccactccccatatctctctatctgcggtgtccccgcccactccggaactcggtaccctattccgttctctcttatccatcatgaatgggggagagtactggaccgagtctatagatccgctctcaacttgcgtgtaataagaagggcaccgtcatcctgactaggatacccgccagcatggtgatggcatctatagaatctctcatgcctaagaggccttctagggctttattcgcattcatcggggcatacatgaaagtgcttaacatggaacatcccgtcgccacaccatcgtatgctggggacacagctgatgtagcaaaat

SEQ ID NO: 74207 - DNA, 288 bp, Glycine max
gcttccgctgagtgtcgcaatcaaacatggaatgtttggaataaagggcttgactgtgtgatttaattccaagattttgagactgtctatctgagggagtacaaatatctgcaactgatgcagaaactgctggatgcaacaagtactctatttacttaagctatctctagtagacaatcacagagactcttgattagggagacggttatgggaaagcccaactggagggtgcttaaacgtgttttgcagcatacaactgtggctgcaactgtctatcaagctacacct

SEQ ID NO: 74208 - DNA, 451 bp, Glycine max
gggcgcaccgccccaaccaaactatagcgctattttctttaaacacgggactcttttctctttttttaaaaaaaagaatattatatcttttagatatattcaaaccatatctcacacccaacctataatatttattgtttaaaaactatataacaccttctcttcctctgactctttataaccccaacccacatattatatagtttttatgaaaaaaacaccacatagttttcaaactctttcttacacgtctgtactctctactctaatactctttatattttatactcacatataaacactcgcaaaacttttcatcacaatttacacacactcttgttttatatagaacacatacactctcatctatataactcatattgcccacaaaacaactttctttacactctaaataatattttttttttcaactttagttatattcttttat

SEQ ID NO: 74209 - DNA, 395 bp, Glycine max
ggaaccggcgcaagcaagaacgcgggttggaacttggaaccatgacagagtccagagcaatgtgtaccctcgaacccgacgtcatcggcatccgcggcttcgagctacgcctcattcgctgtaccatcactttctcacagccctcggattcccgccacgaacttgaatcgttggatggccacatcaacgacctcttgaattccatcgagcgcggcaactacgtcgaagcactcacctccgaaccttccttctccctcgtattccgactcgacggccatgaatcgctgccactcgacgcggaccgagtctactccgagttggtccaccgcgctgagtcctttctcagagacgccgccgccgccgaacagcgtcgcagggcaatactcgtcatgtgt

SEQ ID NO: 74210 - DNA, 333 bp, Glycine max
acgcgtgcgaacacgtccgagaggactgctgaacgaaaccttaccggtttggagccttcgcactttcacagcgatcttattcattttacggttactaatactgactcttcctttgacgaatcgaaacattatattattgattgggtctgaacaatcttgttggaagaacctttggctttaaataggcaagcattatcattggattttactatcacatctacactggctactaaacttaagcttactcatatacttataactcgtctacttgttcaaaggaatgtattcgtatttgcgtatagcaaatagatgttggagtatatccttacaacc

SEQ ID NO: 74211 - DNA, 411 bp, Glycine max
atacctcctcttcccactgacccagagaaactgtttcgttacttggacctagtactcacccctctccctctttcaaaaaccagccaaggtaatttgagaagatgggttcccctcattctcataacggtttaaatgtttcagcctcagccttcggcaaaaggggataaacttctgcatcaccttctttggtcagtcctgtctcctctaacattgagatttcaaagtagttccagaaggttgtctgaatttctgtcaaagaccttgctgaaaaggcattgagatttgtttgagcgaccttttctctacttctattagcttaccatctaaagtttcctcggcaaaaaacatcactgtaatactgttgcaggacgcagaacacgcgttaagcattaaaatacatgaaagacaaag

SEQ ID NO: 74212 - DNA, 68 bp, Glycine max
tggtgggagttctgttcgaaatgaagagaaaactcgcagattacttgctggaggtgaagggttggatc

SEQ ID NO: 74213 - DNA, 438 bp, Glycine max
  unsure (1)..(438): unsure at all n locations
gcacttcaattgcaatcaaattagttcattctctttgcgcagttccctacctctcctttcaagatgcanatcttcgtcaagaccctcaccggaaagaccatcacccttgaggtggaaagctctgacaccatcgacaacgtcaaggccaagatccaggacaaggaaggaattcccccggatcagcaacgtctcatcttcgccggaaagcagctcgaggacggccgtaccctcgccgactacaacatccagaaggagtcaacccttcaccttgtccttcgtctccgtggtggcatgcagatcttcgtcaagactctcactggcaaaaccataaccctagaggtcgaaagctctgacaccattgacaacgtcaaggccaagatccaggacaaggagggaatccctccagaccagcaacgtctcatcttcgccggaaagcaa

SEQ ID NO: 74214 - DNA, 78 bp, Glycine max
tgggcaccttaatctcacccattcaaaaacttgaagttcattgcttgtggtgggctttctttctcaaaaccaaacatt

SEQ ID NO: 74215 - DNA, 204 bp, Glycine max
ctactgaactaaaccttaccgatatggagccttcggactttcacggcaatcttattcatttcacagttactaatacttactccacctttaacgtatcgaaacattaaattattgattatctctcaacaatcttttttgatgaacccttggctttaaatagtcattctttatcatcttattttactatcacaaccccacttcctt

SEQ ID NO: 74216 - DNA, 339 bp, Glycine max
  unsure (1)..(339): unsure at all n locations
aaaccaccaaatcctacngctactacatgacattctgtatttttttggccaaatgggttccatcttttcacccttaaccactatcttcctcctactcctactcgtactttgatgtggctaggcacctgaccctttttcttgtgaccctaataacaccgccacaaaaaacttaccattttgcatggcttccttggcaacatttacaatggtcaatgacctcattggaatgttgacactgcaataaaaatttaacttgctatttaacaatttcctctcaattccactccttgttatcaaaagatattatttattctcgtaaacactacataatgtcttaaa

SEQ ID NO: 74217 - DNA, 412 bp, Glycine max
aggcctaccagaccaagccgactcaggtccaattagcatactaaataattgcctggattggtcggttattgtgtatttatatgcttctctgctcattatttcctccatttttttaattgttagattttaaaaaaataattatttttatttatctattattcagaaagttcaaaatcatattaattattattttttatttattatacctttatttatcacatggatctatcgtagagtgaaaaaaaatggataaaataagaaattttacaaatattttattaaaatcaagaaaatttattacattttttttagtttctacataaaaatattaatttacgaagatgttaacgttaatggctagctctgtaacatttacatccgcttcggccgccacttgaaaaacattaatttg

SEQ ID NO: 74218 - DNA, 85 bp, Glycine max
acgacagattggggatcttaatctccgagttgagaagagaatctgggttggcgaatgacacagggacgacaccacctacaaatga

SEQ ID NO: 74219 - DNA, 418 bp, Glycine max
ggaatcctgtttgggaggagcatatactaaattctcaactaggggaccacaaactcacttgtctctctaacaaatgaacggctagacatgacttttgacagaataatatattatatgaataaaagatggtaacttctggtgatgttctttacagtgtttagtgtggtcacagaaaatgccatcaagtttgagcatttcaatgcatggtttagtactttattcaagacaatttttatctaggaaactagtggttcccaattgatgtcagatttactggctctagactagattatctgattttgtgctttgttttgttgcagctcatctcagctcctggaatccttgccactttcaaatgtgagaattttatatctttaatcaaaatgagattgacttaattgcttatctatgctactat

SEQ ID NO: 74220 - DNA, 402 bp, Glycine max
atgtgtatcgattttatcctggaaaatcattagtgacccaaattaaatactctttaaaaatactaattaaaatgggtaaaggattaaaatatttatttagaattttgagatactattcaatatgttaaagaaaaatctaaattagattaaataatttttttcagatatcggattgcatccaaaactgttatagagcaagcttcttttcttatctaaatagtactctctttttcttgccaaacttaaaaagattattttaacataaagaaatctcgtaggatgttaatttgtctcattctaccgacactttacattggcaaaacgctgcaatgttacacctcaccacaactgcattgcatttgcagcaccactttgaaatttgtgcaaggagacaaacacgta

SEQ ID NO: 74221 - DNA, 421 bp, Glycine max
agagatacatgcttgttttgtacgtgtacgtgtatgtttctgagttcatatgtaatataggcatggtttatatcttttatcttttattttataacctttttcttccaatgttgcatacgattgggtgatttacttaaccttgtgttatatgacttatctcatatttcatttctatattgtgtagatgagccgggcaaacaggttaagagtgccatcacgattaaaaacaccagtaaatctaatgtagctttcaaggtatggtgaaacatgtacaccattgattttggtcctgatttttatatttctcttttccttatttgcaatttttgtcatttaagtacttccattgagtcttgaactgaactctatattcttgctgctactatgtcacaattttgcaggagaataattaattgatttc

SEQ ID NO: 74222 - DNA, 364 bp, Glycine max
gccagacgaccacagaagggcatatgcgaacaatccattgcatagattgtgaaccgtgacggctgggcgtaacatgatcagttctcaagcggatgacttgtcaccacattgcctgagttgttatcataccttcgccagagagtttgctgggacccggaactgtgacacccaagacgcttctggatcaattctgctatttggttagatcatactatctgctgaaagtgatttgcatgatggtgattgcatggatcgtgattgcagccagggcagtattaaacttaagacagttggggcatgctattatttatagtatttatgcagcataatgcacttaaatacttgttcatggatgcttatatat

SEQ ID NO: 74223 - DNA, 366 bp, Glycine max
ttccttacatcatgtaggagcttttgaaacaaggaagatagaataggttcaggtatccttctatgcatttgctagtgatcctccatccatgtactccaaagctctgctcatctgtccatttagaagcagacattaccaataagtcctataacaaagtgtctagtattgccaaattaaatcttcaaaaacaaaacagataaatagtgtattaccctgcataaaaaaaataccacatttagacagccggataacatgtctcttgtactattattcatgctcagccatgatgatgatgatgatgatgatgatgatgatgatgatgatgatgatgatgatgatgatgatgatgatgatgatgatgatgca

SEQ ID NO: 74224 - DNA, 114 bp, Glycine max
ccggtccggaattcccgggtcgaccgacgcgtacgctcatgcgtgagaacacctacgagtaagactgctgattgtttcattacatcatgtaacaccggggggagcaatgaaact

SEQ ID NO: 74225 - DNA, 216 bp, Glycine max
tgggaacctaaagatgctaaaatataattaatacctagttaacatccaattcttctgttgcgtatatattttacaactacaaagctccgatctaattcattgacaacataaccgatagaataattaacctcatctcacagtctttcgtagcggctaactcttcatacttcaatatctccgtcaaagccgataaccctaacgacaagatcgggatcc

SEQ ID NO: 74226 - DNA, 234 bp, Glycine max
gaactttaagaggtgacaatataattaataccattgtcgcatccaacagttgtgttgcgttcaataagtacaactagagattacggatctcagatgatggcattaaaaaaaattgcatttagagtaaaaataacagattgtactgtacttgactagtatttgatactgtgctaaatgtgatctatgacgctaaaattatacattaagcaccttcatatagaatatatagacctt

SEQ ID NO: 74227 - DNA, 312 bp, Glycine max
cacggagggtggtggctgtgggatagagagagagagatagaggtggagattgctaatactgggccaagcttcacctgatgctactaataaagttatatcctgttatcttgatgatttaattcctccacctgagtgacccatcttcttctacacttccaagcgatagttatgcaattcccatttttattctcattctgaatttttaggtttgtcctctgattctttgcaaatcactgtttcagtaattagatcatcttctgtaattttctccgcaaacctttctctggatgtctattattgctctatatttaa

SEQ ID NO: 74228 - DNA, 299 bp, Glycine max
cgtcttgtctatttaatctacattacatggtagatgcaacatttcgtcgaagggttttcatctatactagtctatagaatttcttctatgttaaacgacccttaatattatctttgcgtaatcaatactattaatttctcattctttaagacactaattatcaaactatatcgagaatactacttgtgtataacaatttctgtgacccagaatgagctattagctacacctatacctcacaaggatatcactgtcattgatgattttcacttaattatcgtctccaactactgttactt

SEQ ID NO: 74229 - DNA, 384 bp, Glycine max
  unsure (1)..(384): unsure at all n locations
acctgtgcatgctgctgctggaggtatttttcgtagtcatcttggtggcgtgttggcatgcttctcttattatgttggtattcaataagctttttttgttgagatttttggggctattattgctcttgaaatgactaaggagaagggttggaaccgcacctggcttgagtgtgattttactttggtgattcatgctttcaaaaaaccttctattgttccttggcaggttagatatagatggaaaaattgtttgtctttttgtaaacatatagttntttttttctctctcatatctttagagaagctaattcttatgcatacaaacttgtttcttttggtgtttcatctaggactacaactttttgggttgactccatacttttc

SEQ ID NO: 74230 - DNA, 361 bp, Glycine max
ttagaacacctcagattgggaacataatgtgcatgtataacgtttaaggaatagatagatatttattaggtcacagtgctcaattcattaaatctaatatacttccattcgatattgctgtctaaggattttaattttcaactcattttaatcttatacatataaaccaactctatagcttacacacatcaatttacaaaaggactaacaatatttaatcatactatatatcatttatatatatacactcataaacatttatatctcatatttgattatagcacttatactaatatgacaatgtatataacattaatcacatttgcttttatacttatcatttaaacaactataattaaca

SEQ ID NO: 74231 - DNA, 423 bp, Glycine max
ttaaggaggaagagtgaagagaatggctccgaagggtttaacctttctggctgtgttaatatgcgtttcagcactgtcactgagtccttctgttgcgggggaagggcaaaataatggccttgttatgaacttctacaaggaatcatgccctcaggctgaagacatcatcacagaacaagtcaagcttctctacaagcgccacaagaacactgctttctcctggctcaggaacatcttccatgactgtgctgttcagagttgtgatgcttcactgttgctggactccacaagaaggagcttgtctgagaaggaaacagatagaagctttgggttgagaaatttcaggtacattgagaccatcaaagaagctttggaaagagaatgccctggagttgtttcatgtgctgatatcctcggtctctc

SEQ ID NO: 74232 - DNA, 249 bp, Glycine max
tactggtccacgaagacgacagatggctggggatgccaaatgacgaccgaggggtacagttgctagaagactacatagggctactgttgcgaaaagacaacctacggttacgattattagatgactacagatagttactggtttgaaaagacgtcataatggttctgcagctagaatacaacagaatgatacatgcatgtgagaagagacatacttatcaactagacatacatagatcacatgaaggta

SEQ ID NO: 74233 - DNA, 379 bp, Glycine max
tccgataagacaacacaacggaacgatactgatacgcctgatggaaacagaaagagtatgggcaccatacaaggcgaggtgcaactctaatggcaagtgcctgaatcattgatataacccatactgctcgcaatgaacatggaattcattcttgtatactatttcaacatactcaaacacaaagcgactcttaataccaatggttgcactcttagacaatgttccaattaagtgaaaatgacagataaattctttaagagcggacacataaatcagacttgactcgctgcatttaatccatttcaagtgaagcatgcacattgggagttgtaatgattataacacacactctttattgtcatgcatacatacaatgttt

SEQ ID NO: 74234 - DNA, 183 bp, Glycine max
gactcacgagggtttggtgaccgggatgactataaacacagtcacttacttcacttcactcactcccttcgtgcctacaactttcttatgtataactctgccaaaaatgcgagatattctctatatacatgaacatcaattcttaaaccagaactgagcaaatttcatgcacatgttgtacgc

SEQ ID NO: 74235 - DNA, 113 bp, Glycine max
ttcacaatgtgtctcacttttctttcttatcgggtatatcttcaaacacagttgctatctacacttcacttacttccttctttcctactttctttcttctttcaaactctttc

SEQ ID NO: 74236 - DNA, 115 bp, Glycine max
ctacacgtatttcttgtggggctcaggggcagttttaaaaaaccttgggaattaactctgattactgttgtagtttttgctttattgacagcatcttttggtgtatccttgtata

SEQ ID NO: 74237 - DNA, 268 bp, Glycine max
gacacctaaggtcaaactgcgatacccggtgagggtaagcatatcaataagcggagaagttacaacacatacattaactaaaaatgactctatatacaggatatatgcgttcttacactatcatacaacgtcattaaatgtctatacttgcatatatatgaaattcattgtaactatcgataaactaaacgcactgtgcacccttagccattaatgatcttattaatcttgcctgacattcacatattgatagcttaactcatacctt

SEQ ID NO: 74238 - DNA, 263 bp, Glycine max
acactatgaacaacagctaaacggttctaaccaaatatcactaatatctctttataataatcaacaataatattaaattcaaatcacttttatatagaataatgacttaaccaacacaattcgaaatgctacatctaaaaacatatcttttcgcgttaccacgagtaactactctatggaccgaagccttgtctgcactcttgatagagatcaatcatttctttccaaattcattcatattcccatttttttcattctattta

SEQ ID NO: 74239 - DNA, 338 bp, Glycine max
ggtgctagcgtgtgattggtaggggatgtaactcgatctggttcttatgctgatctgcgttcgctctagatgattctatcttacgaaaacgtcttgctacgatattaactgtctatactgtaactccaattaaattcaacgtccgctgctttagaagctagatactcggcaaaaccgtgctacacatcaaacttatacgaccgtcaccacattcatcttactgccacttgctaaagatcaattagaggctgcccaaatgtgttttccaacagataaccaatcctaatgatgaataccacactgcttgtattgccgcattaattgcgcgtgatgtgttg

SEQ ID NO: 74240 - DNA, 381 bp, Glycine max
ccagacgtccgcacacttcagatcagatatatgatgtgttcagatcactaaacggtataggggctcctaaggatctggctcttgttttattagatcctctttacttttgctcttcaaacttcactctacttcatttgcactgtcctattaccattataatattgatacatcggttttcgctcatcatctctaacggtatatatgatattatgcttcattgacagctattgatgttcatcttatatcaataccatagtcatttaataatttatattatatcttgcataataaatattgtaagttatctttaattattatattctatcttatttatttctcattataaatatcttatttcattgaaatttaagcatgtattat

SEQ ID NO: 74241 - DNA, 392 bp, Glycine max
ggttctagtgtgtgattgtttggtgttgtaactcgttcttcttcttttgttgttctgagtttgcgtttgttttttctctcacctgaaaatgtcttgctgccgtggtaactgtggttgcggaagctcctgcatgttcggcatcggctgcagaggctgcaagatgtacccagacttgagctacactgagtcaaccaccaccgagaccttggtcatgggagtggcacctgttaaggctcaatttgagggtgctgaaatgggtgtgcccgctgagaacgattgctgcaaatgtggaccaaactgctcctgcaacctctgcacttgcaagtgaagtgttgggagagcatgcttcaagcagagatagcccttattaggaatcatgataaactattaat

SEQ ID NO: 74242 - DNA, 400 bp, Glycine max
tactcggacttgaattcccggctcgaccgacgcgtacgtccacgcatactcccacacgttctacggctgctaatgaccacatacgggttaaaatgtatggcaatttacaagaaatcaaggtcaaactagtgtgtcaactttagcgtaacctctatctccccactctactcccctattcccactttacgtacttcttcacctcttctttctttacaaaatacaatatcttacccttcacacactcaccccttttgttcatatctcctcaatctttcatctggcaacttctcaattctcaccaccatcatcctttcactagaatctacctgtgctcttagctgttctatgttcatacgatatagaaactttaattttatctgtgtacaaatttcaccctgat

SEQ ID NO: 74243 - DNA, 176 bp, Glycine max
ttccggcgtggtccctcgcctacgcactctctcgagcactcaaactcacttacacgtgcactctacttaataactatcggatagaatcacctagattgaattcactcacctatacttttcaacattttgactagaacatccctacctttactccaaatctttgctcatcagcacat

SEQ ID NO: 74244 - DNA, 209 bp, Glycine max
gaatcacgcactatcagtacaacaactcactcacgaagctggacaatttcatgaagcctgccatggcttcctcgtgtgctttctcttccattgcagcttttgccatctacacaccaatttcccataagaatggatcactcttgtgaagcacaaaagcttcttttcttagtgggaggaaactgaatgtgaacaattttaccttaccaatt

SEQ ID NO: 74245 - DNA, 347 bp, Glycine max
  unsure (1)..(347): unsure at all n locations
ttacatatatgcgttataggaaggttgactccaaaactttgtgcttaatttgtgcacaccttaattctatgctcaaggcttctatatgcagagttagccagatactgaccatggggttgtagttgtgttgtgatgccctttatgctggaaagggagaaattaggaaactcgaaggaaagatgatttccctcgaggtgaatgatgaaaaggaaaagaaaaatggggaaaagtaatgggagtaacatagaggctgtggagcatcgagaggacagcatggtagttcatagattgaatgaagatttntctcatcaaaagccatgatngatttataacctataatatttaac

SEQ ID NO: 74246 - DNA, 242 bp, Glycine max
tcggtcctgaattcccggtcgatgacgcgtacgtacactcgttctatgacaacacaactgattgttacgcttatatcgttacttcagggattacggccaaaaatctgatcacgggagggcccaaacttatttctagtcttaagcactctatattcttaacatatccaaatacttgacaacttgactattacatattctttacattccatttttctataaaactgaaaaattcgcaaattcta

SEQ ID NO: 74247 - DNA, 454 bp, Glycine max
actcgaatttcaattcccggcgcgacccactcttcacgccttccttcagatgcgataacactacacatcaattcctctacctcatgtaatatctgtttagtcaattaagactgaatatgaccctattttcttttatacatctgctatcgatcctccatacatgtacttccaaaactatgctcatatgtccatttataaacatacatttccaataagtcctataacacactgtatagaattgtccaattaaatcttcaaaaacaaaacatataaatactcgtttaccctgcatataaaaaataccacatttttacactcccataacatgtttcttctactacttatttattctcatacatcatgattatgatgattctgattattattatcaatattattatcattcattattcttattattattaccttttttcattaacattttaatttccac

SEQ ID NO: 74248 - DNA, 375 bp, Glycine max
tggacttacagggccatgggaaatgctccgatgcctaaaactgaaatgaatgcttacagagctgcaactgcaggcacccctcaacttgttcaagttcctacgagccaacatcagctgcagtatgtcacatactcacagacttaccattcttctcagtccatggctcccaattctgctgcccctgccaattatgcttttgattattcagatcctgctcatgctcaaatatactactcttaacctatggcacccacaatgccttcacagtaccagactatgatgatgcatgaaggctcaacttatcattccttatacagctttaatcaacatcatattataacctcacaaccattttaagccatttcttaataaaaa

SEQ ID NO: 74249 - DNA, 456 bp, Glycine max
aattcgagcggccgctttttttattgtatattaaatatatttattggatcgctataattacggatattgttataatatgagaaggataaaataaaagctgatataataaattagcactagaaaaatactaaatatatactaactttttctttcatatcattttttatctctatttttatttttcatcgtattatttgttacatttataatttttatcttctttatctagtttttctttttgttcatacgtcccaaaaatagaattgtgtatatcattactcttaatactttataaaactgtgaaggatttttttttcagacatacttttaataaaaataattcatttatttaaaatacatatgtacgaatctataattctacataatagctaaactcgtcttacatataataacttaaaattatgcaaattcataacttaatcttatatacctact

SEQ ID NO: 74250 - DNA, 246 bp, Glycine max
actcgctagaacacttcagatttgatattaaatagatatacttcactatcatggttactgataaatctttaatattcaaattatcttataatttcttttttaatttaaaaactctattcatatacatatatttttactaactttttcacttctattatttattatatttattttcatatatcattttattatatgtttcatatttaataattttcattcttaaataccttttatttatattttata

SEQ ID NO: 74251 - DNA, 311 bp, Glycine max
cgtctgcgcctgatctctgagggctctcacacactggttcggtgctcctaatctcaaattctatgattaccgttcccaatttctccaccgatcacaacatgaattcaactggacctactaccaaaggctgaacgttcaagctcactgcctccagatccattccacgatcgcagctagctaatctgcaattccacctactaagacatggtcgattccttaatgctgaccaatacccctagcgtcttcgtgctgatactcctgtgcacctgtctgcacaactcgattatctcactccttatgttactgaattc

SEQ ID NO: 74252 - DNA, 263 bp, Glycine max
agaatgggcaagagagagaagaagaagttgttgggttgagtggggtttggattggatttctaatctaatctatacctttctttttcctatgcttttaaggcacaaattcttctaccttctctcttctttcttcttcttctcctgacccttattattattccttgcccttaccctttatgcaatggaaggaataaagaataactatattattatctttattgtaatctatctctttattataatattaattataattattgttg

SEQ ID NO: 74253 - DNA, 355 bp, Glycine max
aattcctggtcgaccactcgtacgatacgcctccgactgctgctagaagacttaaggggcaagagagagaataagaagttgttgggttgagggtagttttgattggatttctaatctaatctatacctttctttttcctatgcttttaaggcacaaatccttctatcttctctcttccttcttcatcttcttctgacccttattattattccttgcccttaccctttacgcaagggaaggaataaagaataactttattattatctttattgtaaatctattcttatattataattataattattattattgacgtttattattccctcaatattgattcttcgtgtcttttcaa

SEQ ID NO: 74254 - DNA, 77 bp, Glycine max
gaaagaggtaacaatgggtggatgtaagggacctatcaccacatttattgtggagcccttgggaccgtacaaggaag

SEQ ID NO: 74255 - DNA, 337 bp, Glycine max
caggaaccgatacgtgctttggaggatgatggcttgtgcttcacagacgctgattgctgcggattcatgctcgtttccgagccatagagccatgagaaagtcgcagagactcttcagtcaaaatacttccaatctagttttaacggtcagagcttcgtctgaagattccgactgcaatgtcgacgaatgtgccccagataaagaggtcgggaaaataagtatggaatggctagctggggagaaaactaaagtggttgggacatacccaccgcggagaaaaggatggacttgctatgtagaaaaggacactgctgggacaacaacatatattcattga

SEQ ID NO: 74256 - DNA, 292 bp, Glycine max
gggatttcgagttcaaaagagaagtggaaagttgaaattgattcaagagataagaagtcaaaaaagcctaagtaatctatcatttgtagcagaagtctttgagatacgcccactgcttcatgtagttgaactgaaaaaatcttttggagactcatcagcttacagacaggtacaagataggacaaggctagttcaatgtctgtctattttaagtgcttaaaactacgtcttttactctaaaaaaaatacattttcatcacttggaacatcattcccatcctttgcaagtact

SEQ ID NO: 74257 - DNA, 376 bp, Glycine max
aacgcttataactcttggagttacattccgtactctacaggttcactcaatgatcttagccaatctaattaaattagatcatatatcagtttactttattgactcgcttcactttaaacccaaacataattagttacaactagatcaatgttaactaatttgcttactaaatcaacatctatttatctttaaacatttaaattcatatattttagacttagaatctaaacatttcctctattggatcttttgatcatttattttgacttttattcactgcctttagtgatattcacttgaaattaaaccaatcttaattggattaattcgatttaaaattaattattaatgatataaaaatcaaagcaaacctatt

SEQ ID NO: 74258 - DNA, 449 bp, Glycine max
cattatcaaatccaatggaagtgataaagggctagcatacatgtgttcaaaagaagaaaatggtagcagattattgggcattgctgatacaccaccacaaaaattcgacccaacaaacatttaccaagaattcgagatcagtaacgatatgtattatggcaaacccaacggttttaatttcaagtctgtggcttccaatggagtaactccatatgccatgacacacaagaattggagagcttattgcaagactctcaagactttccaacccaccaaagaagcgcttggtctcgacgtcacgcttcgagctcgtctccctccgctcacattctccctgccatgtaatttctccagccctattgttgtaaggaaatggtactgccctttcattttcgttcgagaaggcgatgtggattctcaaatcaagaactctccatattacgaaatga

SEQ ID NO: 74259 - DNA, 490 bp, Glycine max
  unsure (1)..(490): unsure at all n locations
ccggaccggaattcccgggtcggcccacgcgtacaaacaaggatgggaaaaatgtaatcttcaatggctcctattctttttgctgcctttgttgctcgcctttttctaactctggcgcgcactaccaatgctaattatatctacgcttctcctcctccacctaagaaggtatattacccgcctccagtataccattctcctccaccacccaagaaatcatactatccacctccagtgtatcactctccaccaccacccaagaaggtttactatccaccaccagtttactctccaccaccaccaaagaaagtgtattacccacctcctgtctacaagtctcctccgccacccaagaaagtttattacccacctnccgtctacaaatatccttcgccacctaagaaggtgtattacccacctcccgtctacaagtctcccccgcctcccaagaaagtgtactacccacctgccgtctacaagtatcccccac

SEQ ID NO: 74260 - DNA, 289 bp, Glycine max
gtttatctttacttgtgaacggaaggacatatcagtaattctataccacccacttctcaatgatcatcttcttcagattcaattccgatgccctttttggaatcttcaagattccggcaagtaatgggactaatgattacctcattcaacgcaatttcacttctctttttttcacctcgtacgccacgcttccttcttacctttcgacaccaatacttaactgttatttatacttcatgctcgacgcatcacgaatctaacgaattcgaaaaattcgccaaagtgacaa

SEQ ID NO: 74261 - DNA, 308 bp, Glycine max
atgagacaaccgaaaggaggggaatcacattgaatattcacattataaccgctagtattctttttatgaagggactaaacaatttcatcattcatgacaagagcgacttactatttaatctcgcttcactcacttatttacaattttaagcgttccaaagtcctaattccttatgtcaaaatctcctatgtgctcttcaaacgctcattctctcttaattcatcttaaattcctgcgtatctccaattctatgtctctcttttctaaatgggcattcaaagttttacattttgttcacaattatatta

SEQ ID NO: 74262 - DNA, 452 bp, Glycine max
cggaattcccgggtcgggcgacgcgtacggcgtctcaaaggagggtgttaagaaccgtgaggataaaattaagaaggatcctgaaagtgggggagtatctaaagaaggtgccgataaagtaaagaaggacgatggtttaggagaggaagggaggaataagggagacaaagtaaaggggaagccggtggataattcagtttcaaaggatgggtctaagagtagtgggaagggagaaagtacagtatcttcagcctcgaaaagaaatgatggctcttccggtgaggattgtgattcatcaaataaatgcactgatgaggcaaagaagttggttgcttgcttgcgagttccacgaaatgattctcctcaacttttgttgctaatccagaacaaaggaaaaggtcctcttactgcgaaaatttctgccccagattttgttcatctggagaagagtg

SEQ ID NO: 74263 - DNA, 370 bp, Glycine max
atatttggtggagtgggccactcaggaatgacctttattctcttagggtccgtgggaaccccttgatcactatttacaaaattaaggaaagtaatgcaataaagtatacctttttctatattttaatgttgattactcctaccaaaaagtatgacaaacctaaagtgtcctatatgagcaactaggttagtattaaaacccaaaataagaacaaacctacctaatgagtccctatgtatgtgaatcatgaagatgatggatgcatgggtgattttacaaaagagggttgaacctctcaacacattcatcataccacttatcatagggatttggtgccttacaatacctattttgggcacctataaacaac

SEQ ID NO: 74264 - DNA, 357 bp, Glycine max
accggtccggaattccctctcgaccaccctacgtccaaccgttgccacaacactacatacggcttaccggattactacttagtcattatattgtggataataccactcaggtgggacctataatcatcatatgaactattaaacccataaaatcactattatcatttatcaaaggccaatctccagtagaatataccgttccctataaacactgatttatatttcatactaccaagtatcatctatctattgcaaactatttatacaacttcgatattattatgaccgaaaattataacgatccttcttaatgactccctgatattgtaacttattcttataatagatgcttgaatc

SEQ ID NO: 74265 - DNA, 363 bp, Glycine max
agtcctgccgtcagacctcctgacagggggccattagacgacagactggatatttggcggagcgggccactgacgaggtgaccctgattcccctatggttcgtgggaaccgcctgatcactatttacaaaaatgacggaagtaacgcacctatgcatacctgtatctatgttctaagggcgactacgcctaccataaagcctgactaacctaacggggcctatatcatcatctaagccagtctttgaaccaaaagttagatctgacacacctaatgagtccctctgtatgagaattatgaagatgatcgctgcctgggtcattttacactataaggttgaacctcttaacacattcatgatac

SEQ ID NO: 74266 - DNA, 170 bp, Glycine max
ggagaggactttatggtcaagcccctttctgactcgcgggcgaaacctcaagcggggcaaacgggtctcctggtctagcaatccatctaatagccctacctgatatttgccactgagctctatctctcaatgaaaggtcataagcgggttatggctttcacaacaagctg

SEQ ID NO: 74267 - DNA, 448 bp, Glycine max
agaagaagagggagagagggagagagggagagagggagagggagaggagtcgaatttctgagggttcatagaacactgaggagagaaagagagaaatactctgaaagaagtttgtaattgaagataaaatttgagtcttttatctttaattctttacccttctgacttcatccgatccgtttccatggatcccttcgatttgtttcgtaaaggttttggttgaggctacaaaagcacgagcttttttctacgagaattttctttttcctttcaaatacatgtgagcattctattttgtgttagctataatgaatgtatccaagaagggaacgcaaaccagcgaggtaaaactaaacattggaagcaaggtgactgctttgaataccaatgctgctgagtttattccctttgccctcagagcatctccagttggaagtagtagtgcacc

SEQ ID NO: 74268 - DNA, 391 bp, Glycine max
ggccgcaaagtgactgacataaccttttaaaggttcaaagaacctccctcgccgccgccgcggaactctagcctcagctctctcgccgccgttcgccggagtatcaccccaacgccgtcgtcgctgagaaatcatccaccaaaaggcctaacgctatgaagacgccgcaatctgcctctaaattgaaaaggtaatacaaattgctttgtttgttctaattggagttagtgcgtgttttgctagcttattttgaagaaataatagctttttgagtgaatgttttaaggacaagcaattattcctagaaataatctgttacgatactgcacttattagggtgattattaatagggtcaccttgggaaagctctcttgtttgatattaatgatg

SEQ ID NO: 74269 - DNA, 329 bp, Glycine max
caaatgggaaggcttagattgattattactggcggtctatctacaaggccaagcttacttacccgttcatacgtagcattatcggtgatacattgtcatctaaagctagtatactgagcacgtcgatatgcatcatccggactagtaaaaccctggactgacgaacacaaatcgccatgctgaacacatacctttttgcaaatggcgcaatcccaaacagggctagagcaaccgacattgcaaacatttacgcattctatatggctaatgaaacgcggcttgatactgatcattaagctcagctgatgtcacaactacccgcagtcaga

SEQ ID NO: 74270 - DNA, 178 bp, Glycine max
aggactttcaatccgtttgatcagcagcaaaagatcattcaatctccattcctctgcgagagagagacgaagaagaaggaatcaattccaatatgtctcgtagcatttcatacataactggcactcaacttctctccttcaaacgcccgccaaatgttggcatcatcgacgttaggga

SEQ ID NO: 74271 - DNA, 215 bp, Glycine max
actacaaccgatgcgtatgacgcacacagggtggtatatatagctgggagggtcaccagattgatgagaaaagatagtgtggaacgggaggatgtgattactaataacttcaatatatacacgctacaggctaatgccagtgttttctttttgaaatcaacttatgagttcacttccatgctttctgctaaatcaccaatgtgtccatcttttaa

SEQ ID NO: 74272 - DNA, 447 bp, Glycine max
aatggttcctttttgtttgagcttttttgaagtgggttttagtcaaaatccttttttgttttgctccttttcgaattcatgatgcagcagagatggaatcgaagaaaaacccatttacatttactaggtttactctttgttttcttcatagttttgacaatcctccatagcgagcatagcattcaacaaatccatgaaaacccagatcctgaagctcaccgacaagatgcttcgctttcatttgtgaaacctaatgttttaatcagtcgaaatggagctcctgaaattttggatagattcagtaagtgtaatggaacgagagagtatagtggccggaaaatctcgtggtctggccggaaaacggaatcaagtcgtcggaaagttaagtcggagaagtgtgatgtgttttcaggaaaatgggtttttgataacacttcgtatccactt

SEQ ID NO: 74273 - DNA, 372 bp, Glycine max
  unsure (1)..(372): unsure at all n locations
agctgatcagggctcangtggtggttttagaactctgattcaattgcttcctgtgctgttaagtgttgcttttgaacttctgtgcatcctcagaacctatatatgctctttcccgttcctacccttatgaattccagtttaccactcaaaagggtgtcaatttttttgtgaaatcaacaaattttgaggaaaagtatccacctggtagcccggatcgtatagcaattgatcgtcacatagagagggattattttaacattcttgctcagaattgtcgtgttgagatgcaacgtcagcaatggggatttataagagaaactccatattgtgatatgttacagaagtttcagacagctgcttcgtgaatgaact

SEQ ID NO: 74274 - DNA, 346 bp, Glycine max
ccacacgtaacatgacgcataaacagacgcttaattatacacatacactcccatacaccttgtctaatataataatatcgcccccacacacaaaacctaattaatctctttaccattcattcattcattcatttatccataataatcctcttcctatcactaccaaccaaactaaaccatattttcttaactatggttctctttttattcttaacaaactaaaacatcccactattttgtgttacatatatttactttttttttttcaacaatcatcaattactaactaatttctatccaaataattcttacacgtaacatttttttaatttaaaccacctaaaac

SEQ ID NO: 74275 - DNA, 400 bp, Glycine max
tcgcgtaacaagttacaatagtcattacacaagcgttatgcaacagatacactaagactcaatcctatatgaaatgtgataccatgttagtgagaaatctcgttgggcgcctaggaatatatgacatgacaaaccacatacttgtaaatcagataactcttactaggtaaaatcataagaaaatcggtcagagtcatgttgttttgcgagaatactccaaccatgtgggatcgatatatacttaaaggaacactcaaaccaggtgtatttattccaaggcctagactctgaagagtttgtcagggtttctcccttctgattcaggtccaacatagaaaacattttagcacgtagactctatctatgaactatacaaaacatacgactcctcaattattct

SEQ ID NO: 74276 - DNA, 415 bp, Glycine max
gagaggaagcggtgaactgcctcacccaatgcgcttggaacaacaagcttaacgccatcttggatcgccttgctaccctcactccagcacccatatcgactccgcttcccatggctgcttcccacctctctgccaacagcaagccccatgccccctccttcgatctccatcgcagtggcaaccactcagaccattatgccaactccacctcccatagctgcttcccatctcccttcatcgatcacaatcctatttttttctctctttgtctctctcgctctcgctcctgtgacgaccagaggagcgttcgagatcacggcctctctctccatctctgtcgtgatccttcttggaccctccgttctcgtcgtcgcccctcgacctcttgctctgtctgtcatcggcatcaacgttc

SEQ ID NO: 74277 - DNA, 385 bp, Glycine max
atcagtgtatccatattctcgaaatcattcgcttttctataacccctgttgacgtgctcaagtcgtatagtgcagtgattcgtcgcttaatgaaaaaataaaatatatttccaccgatcgccagaatcggtcatacagtgatttttgttaaaatgaatatccgaccgttcggtcaggccggaaccacgttgctcataaaatactgaggttgaatatttatcttgtaaccaaaaaaatatctatttagtaaacgaaagcggaaaatcaatcggacgttttctatctgagagtatctgattcttaattgaactgactaaaaaactaacgcgaaactaaagctgatatcaacttggctagtcaagctcgaacacaaaaatacggtttt

SEQ ID NO: 74278 - DNA, 209 bp, Glycine max
tttggattttcccaaaccaacccaacactagggctcgcgttcctttaacccagtcactattctcttcttttctactcaacgaaaaactatttctaaaaacaattcacaaaccattgctcttccctctccaatgatattaattgctacctatcctataaaccatacatctcctgttattattacaccaaaccacattattatactcttaa

SEQ ID NO: 74279 - DNA, 203 bp, Glycine max
ggctatttcaattgagcagatccctaattccgagggacgacgcttcgctttctttgttcagctctcgcggtttctctttttctatcagcaattgtccagtggtgagaagcaaattacaattctgagagcatttggctgaaacaggagtctgtgaatttgttaaaagattggtggtcgagtgaatctcggcgattaaaaaagag

SEQ ID NO: 74280 - DNA, 335 bp, Glycine max
ccacgcgtgcgaatacgacattacgaccctttggttcctctccaaaaagacggcggttgggggctgctttcacaagacgacacattcacccaactgctatattacgacttaaaggtacatccactacatgacgccagacctggactccattacctagacattgctcttatctacatacgccatatctccttatatactcttgatacatatctgcctgcatatccactatgttgaatacaccgtaagattccacctggcctttaacgatctgttcaagcatcatataaaccacaccttaactttacttcctacctgcatctaggaaacggacaaca

SEQ ID NO: 74281 - DNA, 282 bp, Glycine max
gagtgaagaggcaagatttaatagaggaattaatcaccatatgtatgaaaaagttttttcaaaaacttagtatcatatggatttttctcacaacctgtttaccaaataatttttactctctggtaatccattactagattattgtaatcgattaccaatatcaaaatggtttttgaaaagctttcaactcaaattacaacatttcaattgtattcaaaaagctgcaatccatttctatgttttgtttataaattaccagtgtgtttgaccgatgaaattcaa

SEQ ID NO: 74282 - DNA, 258 bp, Glycine max
gtaggtggtgcttggtggttgggatatattgttggttagtatttattgtatgtaggcactgatatagtgctgtagccttattgatgaaaaatttggtggtggagatagtcatactaaatagtagattaatgatttgtggttagttatgcaacatacatccaccctggtgacaaaatcaccgctatagatgttgatgagcacaactgctgatttatttctgtaagacttgcgtagatgctgcttatagtgtttatgtta

SEQ ID NO: 74283 - DNA, 321 bp, Glycine max
acccacgcgtccggcacgcgtgagaagacgcctgaacggggtgaagacgatcgaacgcttatcttgaactaggggccgtgcggatctttcaccaatcagaccttgttcaatgaacgcaataaaaataatggctgatatttcttacccacactttacgccaaacctatgactatataaggaggagtccttcgaacacttgtttacatctggagcattctctcgcccattccatcattctatcgaatttgtatgaatgaataccatgaaggtttgcaaatactaccttccgtgatctcactgttgaccgtaatgctttggaca

SEQ ID NO: 74284 - DNA, 169 bp, Glycine max
aagaatattaattcttatgatcccaaggggagatgggaggctcatgactttaacaccatccctcttatataattaaatattaaattataggttgattattttttaacgcaaactataggagtccataataaagcgagtgttccctagaaatatacgatgtttatggact

SEQ ID NO: 74285 - DNA, 446 bp, Glycine max
gacgacagaagggataattaaatacataaatgtagctaaactgtaatttttcaacgtaatatttgtaattaaatatttttattttcacaattgaaaaacaattcataagctaaaaattatatttgtataaaacacaatacgtaaattgaacacaaaatatgccaaattcaaaggttcatatacagatctttacataccaaagaagtacagtgtttttttttacataagtagaaatacagtgctatgtgcccctgttaaatcccaagagccaaaactaattaaatacctgagattataggacttgtaacattactctaattaataaacattacgattaacaatgtggaatgattaccactatggcaatggcccaccgcccaagatattaggagaaatatgcatctggtatgaaggatttaagtgtcggcaaaatggttttttatact

SEQ ID NO: 74286 - DNA, 387 bp, Glycine max
ccatagaaacctataatcgtacttcttgggagatgtctggtatatagttgtttaagagtatagagtagttagaaaagttatgagaagtagttaggatgcttagtgtgaaaccttaagagaatgtaaagtcgttagtagggcgttgctttgctgaacataaaggggttcaagagtgaatgttcttgtgaaaggtagatcacctaaagaattagtgatgatagttgtatgattagtgaggtagatattagttctctctaccttaattcgagcaaagtctgagggtgcttcgaggaatactttaatacctatcgtgacctctgcgtgtacttggtcatgtcttaacatgatggatgcccctgtgtgttcggtggatgcatggacaggatc

SEQ ID NO: 74287 - DNA, 413 bp, Glycine max
  unsure (1)..(413): unsure at all n locations
tcaccttattagtccaggcggaaacaaatttttccttgtgtggtattatccaggtttccttgacatagtcaacaaatattggccaaggtgcacaagctacttcgaacttcttcaggcattcatcaaactgttgttctgaaggacaatcagtcagagatccccaacaatccatgacataattccaagcatttttttgcgcattagtgatttatatttagccttcacattcttgtttatgtgaaagatgcacaacanatttgtgcattcagggaatacatctttcactgcattcatcaatgcttggtctctgtcagtgacaataactccagggagggcatcacgctttaaaaaaaggcctcgaaagcgttgtaaagcccataccaaattattaacgcgttcaccctccacatatg

SEQ ID NO: 74288 - DNA, 389 bp, Glycine max
gagtatactggaaaaaataacactatcaatatcaatattatgtaagttatactccaattttattccacattttcatgattgttttgttattaggaatatagaggtcatttaactaagcatttattgaataaatacttatcctacaagtatttataggttgtttctataatagaagagaaaacgagactaaatagttttcatataagttgcaagctattttttacgagttataatcatgagtttattattaaaaattaattgaaagcaatttatgaacctatcataacttatttttatgagttcgctcaaataattatataaatacttactttatgaaataaaattaaataaactgtaaataaattctttaaaaagcaccaatgatacca

SEQ ID NO: 74289 - DNA, 160 bp, Glycine max
ttaagggactctcttaacatgcaatcaacacgtacaattagaaaatttttaacggccattaaaccattcctctctctaatactattgcttcctaccttattgcctctcttttccttctccaaaattcaaatccctatcaatcgtctcacatacaaacgca

SEQ ID NO: 74290 - DNA, 421 bp, Glycine max
attgttatttagattttatttattggtgcttagggtttattgtttgttatactgtcattttgtcaaattttgttatctgaagtaagaaatattatcttattcttatcatctaaaacttctaagttctcaatggcttatgttgttcgtgtaaaaactttagtattctcaaccaataaaaaataaccataaacataatttttaagataattattataaatatcaacaaatttatgttatacgatgatttgtgattaggtcatttaaactattttacattgagaatatataacctattctcaatttcttaatccaaatgcaatcctttgttctgactaaaatttaactctatgttttggtccgagaattgtgagttattcatgaatgttctaggcttctagagaaactgttgaatgtaaaatac

SEQ ID NO: 74291 - DNA, 424 bp, Glycine max
gattatcaaaaccaaaaatctcacatactttgggcgccaatatcctgccatcacaaagtctctctctctctctcctctttaggctatagctaccccactgtgatattttgctggtgaaaccacatatctaccagaagcagcctctccttttataggagaaaaaggctagagaactatccttttctttttttccttctctctcttctttttctctttctcttgaaaccctaatacttgatccttttcacaatctgtagtggtaatccaaaacccaggacaaagaaagaggcaagagacatagcaaagacttctctcaccctctcaagtcccaaacagagtaacttgtattcacaacctctctctgcaccaagtatattaaatgcatgatcatccgtggtctgtttattcccttgtttacgtaaca

SEQ ID NO: 74292 - DNA, 104 bp, Glycine max
agtctacatttatggggagtgagtactgacaatggactttgaagggttaccaaaaggttgcattcctaaaatactctctcgcactacgccacagacctttgtaa

SEQ ID NO: 74293 - DNA, 272 bp, Glycine max
aaccccacagaccttcctattttttcactgactacattttcgaatcaaaaatattctgtttccataagctactactctccttcaatatatacccttaattacataaagaactaagatcttattcaatactatctctatcaaaaccccactcttgatctattatagtctcacccatataacaaatttgactgtacaatatctcctcttcccgcataaaatactttttgccataaaatatcttaatcaatcaatcacacatacaaccttaaatt

SEQ ID NO: 74294 - DNA, 412 bp, Glycine max
ggttctagtgtgtgattgtttgttgttgtaactcgttcttcttcttttgttgttctgtgtttgtgtttgttttttctctcacctgaaaatgtcttgctgcggtggtaactgtggttgcggaagctcctgcaagtgcggcaacggctgcggaggctgcaagatgtacccagacttgagctacactgagtcaaccaccaccgagaccttggtcatgggagtggcacctgttaaggctcaatttgagggtgctgaaatgggtgtgcccgctgagaacgatggctgcaaatgtggaccaaactgctcctgcaacccctgcacttgcaagtgaagtgttgggagagcaagcttcaagcagagatagcccttaattaggaataatgataaactattaatgtgtagctaaaaacttatg

SEQ ID NO: 74295 - DNA, 298 bp, Glycine max
  unsure (1)..(298): unsure at all n locations
accacatctgaatcaatgccttcagatttgaattgatcatcagaaaagaggtcttcaggctctggaagaaggatttcatcaaatgctttctgcaccagctcaattgcatccttattttcctcatccatatcctgatctgtatcacaatcatcacgacaagagttgttcacttcattagttgcaaagaaatcttgctctcttttttctttgtccttccatcaaatngctgcttattttcacctgtgttactcaatacagcatgcttatacatcaactgccacattttgacaaattttta

SEQ ID NO: 74296 - DNA, 421 bp, Glycine max
ggttctagtgtgtgattgtttgttgttgtaactggttcttcttcttttgttgttctgtgtttgtgtttgttttttctctcacctgaaaatgtcttgctgcggtggtaactgtggttgctgaagctcctgcaagtgcggcaactgctgctgaggctgcaagatgtacccatacttgagctacactgagtcaaccaccaccgagaccttggtcatgggagtggcacctgttaaggctcaatttgagggtgctgaaatgggtgtgcccgctgagaacgatggctgcaaatgtggaccaaactgctcctgcaacccctgcacttgcaagtgaagtgttgggagagcaagcttcaagcagagatagcccttaattaggaataatgataaactattaatgtgtagctaaaaacttatgtattatgtc

SEQ ID NO: 74297 - DNA, 217 bp, Glycine max
  unsure (1)..(217): unsure at all n locations
aactggagcgaccacacaaggggggtcctttttgatatgtnnnnttaatattttattctaaggcttagtgtgccatgcgcaagaatgatgataagaacaatattgttccaaccaacgcgtaacactaaactaaagagggttgtacaaaacaataaacttgtcaacaaatagtcacacgatggttatccaaaatttgccattgatgaagtaagtgaat

SEQ ID NO: 74298 - DNA, 411 bp, Glycine max
ggctcaagtgtttttgttgatcgagataactagggacagtgtgatgaaaatgaaggtccttgttttcttctttgctacaatttaggtagcatggcaatgccatgcgtacgatatgttccctctccgaatgaacactggctatggtgcccgtactccggaggtgaaatgcacaagttggaggcttgctgtggaagcacacaacatctttggctttgagaccattcctgaagagtgcgttgaagcaacaaaggaatacattcatggcgaacaatatagatcagactccaaaacagttaaccaacaagcttacttttatgccatagacctcgaaatccatcccaaagacacatttgtgttcagtatagatggcaccgtactctttaatattccatactacaaaaaacatggata

SEQ ID NO: 74299 - DNA, 409 bp, Glycine max
ggcacaagtgagtttgttgatcgagataactagggacagtgtgatgaaaatgaaggtccttgttttcttcgttgctacaattttggtagcatggcaatgccatgcgtacgatatgttccctctccgaatgaacactggctatggtgcccgtactccggaggtgaaatgcgcaagttggaggcttgctgtggaagcacacaacatctttggctttgagaccattcctgaagagtgcgttgaagcaacaaaagaatacatccatggcgaacaatatagatcagactccaaaacagttaaccaacaagcttacttttatgccagagacctcgaagtccatcccaaggacacatttgtgttcagtatagatggcaccgtactctctaatattccatactacaaaaaacatgga

SEQ ID NO: 74300 - DNA, 72 bp, Glycine max
gagacctcaggtcaagcggggctacccgctgagtttaagcataataataagcggggaaaaaaaaataaaaat

SEQ ID NO: 74301 - DNA, 223 bp, Glycine max
aacacttgtaagaacagcagaaatatgactttctatgggatcaactctatctgggacttagcgctaattattatgagacctgtgtattttccactatataaatcataacctaaaaaaaaaacacctccacttttacacaatccaaactcacattcactcactatcgaattgataattataaattattataacccaaaaccaatgcactgtccttgtttattca

SEQ ID NO: 74302 - DNA, 336 bp, Glycine max
gaggggcctaagagggaaagtgcgtgtttggaggcgttggatttagagagctttttattaggtaactgaagatgaagagtgccacgtggtggagtgttgaaggagacgggccggatctgcggcctggtccctctaatcgaacggctataatggaaaaggacttttcctgaacacgtggaaggaaaccgtccattccatgtttccaacaaagtctaatagtaattcatgtgaatatgaggtgctgcttctggttccgcatcctaccagaagctgcaaatgcctcttatctaagggatattgaataaactcgtccttaattacttttctttctgaaaa

SEQ ID NO: 74303 - DNA, 308 bp, Glycine max
aaacggccaaaaggagtgccatctgggtctgacaaaaggcacatcacattgaaaattatctgacctatagtacaccatagactctggctcagcctgcattgtacaatgagggactgtcctttgtttatctagtgggcgttgcttatgacttctttgcatcactgaaacaaaacaaagcagcgaagatggggtcgcattaacacaaacccaggacccatgatacacagacataagacacattggcacaaaacctcttgcacactcaaggttctaaaaacactccacgaccatgatttgggccgcaatat

SEQ ID NO: 74304 - DNA, 379 bp, Glycine max
ccaaccggccgtttttttttttttttttttttggggggggggggtaaataaaaacctttggctaataataaaataaacctcttttttccattttaataattgaattcaaatgattttctttattaaaattaacattcattatttttaattaattttaaaaatgaaaaatcattaaagttttataaaaattacgtttttaaattataaacatatcttctcttttgtctaaattaaaatattaaagttactaatactttatgtaacgatgtgtgaagatattatgtcaatatctgaagcatggatcatgcacttgatatgtcaatatcgacattctctattaaaccagtcttacttttttcatacgtacagttcttaaaac

SEQ ID NO: 74305 - DNA, 439 bp, Glycine max
gactcgttctagtgtgtgattgtttgttgttgtaactcgttcttcttctttggttgttctgtgtttgtgtttgttttttctctcacctgaaaatgtcttgctgcggtggtaactgtggttgcggaagctcctgcaagtgcggcaacggctgcggaggctgcaagatgtacccagacttgagctacactgagtcaaccaccaccgagaccttggtcatgggagtggcacctgttaaggctcaatttgagggtgctgaaatgggtgtgcccgctgagaacgatggctgcaaatgtggaccaaactgctcctgcaacccctgcacttgcaagtgaggtgttgggagagcaagcttcaagcagagatagcccttaattaggaataatgataaactattaatgtgtagctaaaaacttatgtattatgtctgtgatggttttcg

SEQ ID NO: 74306 - DNA, 518 bp, Glycine max
  unsure (1)..(518): unsure at all n locations
tagaacggaccttgtaggaatacatcttnggatcntgtcgatgtgtggttatggcccaaagtcctacctcatcggtcancttgnngtggaattaggagaaagctgtagcgtattattcgcgggcccaatccaattggagaaaccgggcaccctcaactaacattannagaacttttcatacctggcggagtncttcaactggaggtacctgcagaacaaggtgcgagcanccttatnnaatggaaaaatnntcaattcaatgaagaatttggttcattcctacancgtacccacgtcatgggcatttcctgcttttctaaatgttatatagaaatttgtatgttacctaaattgaaaagtggtgaatattataccatannatgtgactattcnncaccaaaaagttttcttattttagttcaaaaccaatcaatatgtaaaaatccagaacaaagtaaattgcccgagaaattcgcgccaggaacccatacacttttaanttnntaaaagaaaaagtt

SEQ ID NO: 74307 - DNA, 379 bp, Glycine max
ttactccaagaagaaagaaaaaaaaaaatcgaccgccgcttctttatcgtgatacgtgggtctgtgtccctctaatttcaagatccaccacattctcagttcttccctggtcgaaggaagcaaaatttaagctggtacagtttctttctataaagcagcatgtccctgagtacttccaaagtagtttttcaggttctgtccagggctgtgcctcaaactgagtataatgattctcttgtgaactcttcagaattagcattacattcccgttttagagtaaaatgtatgaataaaagatcctcaacgcataaggatttcattgaatgttctaacatgcttcaaaatacgttaagaactcaacaatttcagtggatgggtg

SEQ ID NO: 74308 - DNA, 84 bp, Glycine max
taaaggttttttacttatctctctctctctctctccccgggcctttttctaaatacttatcgccccccccactttctctcttat

SEQ ID NO: 74309 - DNA, 418 bp, Glycine max
ctctagttaaatttgggttctaaattaagacatgaagaaacaaaacttttacaaaccatctggttttgtttactaaatgcttctgtgattgctcgttaagggcttgagtagttagcagctcaaaagtccataaaatgttgacaacaaaatttgatttacgctttcttaatttctaatgagttttagagcagctggatgcatgagtgactccaaaaaggttctttctttcaaataaccggggagttatttgtcagtggagtagaagttatattttttccagagataagcccctcttcttttgtatttggttcttattaataatttgaagttaaatttatatttgaagtagaaaattcgagtaaattgaactacacagcatgctaattttgtatgtcaacactattattgcatgcgtagt

SEQ ID NO: 74310 - DNA, 388 bp, Glycine max
gattcctgatgatgctcccgcctttctttttggtttattattattatggtttcactacaatatctcttttatgtttatatacactattagttttatgtatgagtagttggtttgctcatcttgaagcatatggaatagtttgacttgactttgatgatattgcagtgaaacactcttatctttttgtgaaaattggtgtatgacttggttttgaattgaatgcatgattgtgatgagcttatgttttctttcatgagtttagcaagtgtgtatgttagacaaagaaagaacaagaatgtgaacttgcaattagaaatgttagtcagtagacaaattgattgagaaagaaaaacttgaaccataacccggtaagagtgtgatcttaaac

SEQ ID NO: 74311 - DNA, 422 bp, Glycine max
  unsure (1)..(422): unsure at all n locations
tctatgcattttattgtgtaacatattcaggtctacccatctatgcatatagatgaatatgaccttgtgtagtatgtttgaaataatatgcataggttttatttgcttatgttctttgttcaatattaggaacaaaaattctcagaaagccaataactttgttttccttcattagcatgcttaaaattttcgaatgtcagctttggagactccaactagctcttggtgaacaaactgaaattaccactactagaaaaattgcatactacatcagttaattaggccaatctacaccggtttacgaccgtcgttgtaagcggtgtcgtaaaaagggtaggttattttacatncgttctaggaaaacccgtgtagaatgtcatagctattctatatcaaattcttgaaagaccttcgtagaatgg

SEQ ID NO: 74312 - DNA, 342 bp, Glycine max
agagtgagtgagtgagtccttaagcttctgcaacgagggagactcttttgttctgcagtgcatgcacaaggaattaaatataaaagggttttagaaaaagctgtgctattaaatgttactctatattttccgttcacggtgctgtttgaaatattaggaggcatgatattataataatattaggaggcatgttattataacatcatgatccacggtgctgtttgaaaaccttgaagtagctgctcttcattacgtatagtctttattgcattattacaagatatgaaaactgtacaaaattcttccaataatttacttcataattttaccattaaaagtgga

SEQ ID NO: 74313 - DNA, 393 bp, Glycine max
gacagggggagaacaagcacgagcatggtcttgaacgtgggcctggcagaccaaaacaaggagacactaaaacacatgctagcgtgacctatatagttaaagaggatacgggaccatagcaactgaggctgagccttaataagagtgtctgtctctggctactgaactatctcagtgtttcctatgtggctatgtggtgatctattaatgcatgggagaaacatctatgccaaatgggacacctatagagatagatagagagagagctagagagggtggttagattgaaaagacacaacgctagatgacttgtgaaagatgagagcctatcctgcttggaagagagcctttcagttccgacccattagaacttgtatcatgtagaggaagatg

SEQ ID NO: 74314 - DNA, 225 bp, Glycine max
  unsure (1)..(225): unsure at all n locations
ggagtctggagactgaaagacgcatcagaatttaagaaactatcgagccattaaagaaattagaggcttatgtttatcctcccacttagtatatagcatcacaagtaaagatatatatcactttttccccccttataatatcctaatacgaccatttttaaggcgaaaaccaattattttactaattatgtacgaatnttaagaattatccctccccctacatac

SEQ ID NO: 74315 - DNA, 384 bp, Glycine max
ggaaattgaatccaaccagcaacccaaagattaaaaatctatattagatcttttttttttttttgtacataaaattcatttcacaaccaattgcaatcacattcatgttttgcatctttgcgaatctaatgaataagtctcacataattaggatcttcgagtcgaacacttgattcataaaatctacttacttcttctgtcttggctcgagatctaaaccaaacacagaagaatccaattctgattatcattctgcaaaaactgaattggcttgcttttgactttcgtataaatggctaagactatcgaggcactttgttctattatatactgatttgcaggttcaaaaagaatcacttctattttattaaaacaattactcaa

SEQ ID NO: 74316 - DNA, 127 bp, Glycine max
gacaccaacaccaaaacacgcccactattatggcttcctttgtatccttcctagtgctgcttcttgcagcccttatcctcatgcctcaagggcctgctacttactacaaaccaattaaaaaaccacc

SEQ ID NO: 74317 - DNA, 313 bp, Glycine max
ttgcaagttcttcatcggtgttgccattcaggttctacacgtagaagagtgggaaacgaatttaatatcacccctcttcttggtgatacaaggtacatctatagttacaaggagagtaatgctgcaagcaataactcatcttggtgatacaaggtacattttctagttacaaggagagtaatgctgtacgtaaaaaagaaagttgtacggtgtgtaaattatatgcgtgaaagaataattaaatgtcagtactacagaaaatgaattagaaataatgttgtagaattttcattggagaaatcatggatatgat

SEQ ID NO: 74318 - DNA, 434 bp, Glycine max
ggttctagtgtgtgattgtttgttgttgtagctcgttcttcttcttttgttgttctgtgtttgtgtttgttttttctctcacctgaaaatgtcttgctgcggtggtaactgtggttgcggaagctcctgcaagtgcggcaacggctgcggaggctgcaagatgtacccagacttgagctacactgagtcaaccaccaccgagaccttggtcatgggagtggcacctgttaaggctcaatttgagggtgctgaaatgggtgtgcccgctgagaacgatggctgcaaatgtggaccaaactgctcctgcaacccctgcacttgcaagtgaggtgttgggagagcaagcttcaagcagagatagcccttaattaggaataatgataaactattaatgtgtagctaaaaacttatgtattatgtctgtgatggttttc

SEQ ID NO: 74319 - DNA, 437 bp, Glycine max
gaaggtgcaagagtttgttgtgagctataagctgggttatcgtgaggagaatatgaagttgtttgttttctttgttgctgcagtagttttggtagcatggccatgccatggcgcaggctaccaaaggttccctctccgaatgaaaactggctatggtgagcgttcttcggaggtaaaatgcgcaagttttaggcttgctgtggaagcacacaacatccgagcctttaaaaccattcctgaagagtgcgttgaaccaacaaaggactacattaatggcgaacaatttagatcagactctaaaacagttaaccaacaagctttcttttatgctagtgaacgcgaagtccatcacaacgacatatttatattcggcatagataacaccgtactctctaatatcccatactatgaaaaacatggatatggggtggaggaat

SEQ ID NO: 74320 - DNA, 399 bp, Glycine max
gtccgaccggctgcaagaagccgccagagggggttacctattccattaaagggctggacctttaaaatgggattattatttctggggacccttaataatccagggtttaaaagttcccttggactttgtttagatatcataatatttctagtcaatcaaatatggcttgtggaaggaaaccaaccacagtctagtttcaaggcctcctatgaaacagaaaatagattccctacttttctctgacattgcatgagtgaaccttggtgcaacggtaaggttgctgccttgtgacctagtgctcatggattcaaatcctacagacagcctctcagcttacgagggtggagctgagtatatctaccctcctgagacctcactagtagtgagcctcgtgttggg

SEQ ID NO: 74321 - DNA, 110 bp, Glycine max
cctttcctcccgctcccactaaaatcccgaacccatttccagaaccttaacaccaacactgcgttcatcatcgcaaaagttgttgtgtagttagttttgaggggttaaaa

SEQ ID NO: 74322 - DNA, 214 bp, Glycine max
ttttactagtgtaagattatttattcattcaaccgcaattttttaatatttcgttacaacctctaaaacaaatatattattaatttgaaaacaaaatccataaataatatttccttaaaatatctcttttacttctttacatctttcactttttttatatttactctttctataatcaccattaccttttatttttccatttcttacttttttt

SEQ ID NO: 74323 - DNA, 389 bp, Glycine max
cccacgcgtccgaagacgcgtgggcgagaatacaacacagggggtgctatcactattcagggctgagacacaaccacacaggtggaagaatattaatggtctaaaatttcttctcttcaacctgactcatctactgttctctctctctctctggaactcaccaatttttgggaaaagaactaatctgaaccgtccatctctctcatttctgatatcacacggcagatgttcgaccagacctttacatctttttatgatgctttttcacacgagccaaggcatcataatgatagtattcatttttatcgtcctgctgccgcatgtagagtacaatgttggtccatcgtatgaatcattgctactgaacaaattcaaatgccacactcaca

SEQ ID NO: 74324 - DNA, 203 bp, Glycine max
  unsure (1)..(203): unsure at all n locations
atctgagtcnaatgctccttaagtttaaggggtaagtcctcaacgaaaagccataactcttaaccgttcggatcccatatacgcatgggctacttcactcctttctttatttcacgttttctcgggaaaattagttgcaaatagatttttgcccataaacggaccattaaattgatcaactcgcttaaaccccgtatttttta

SEQ ID NO: 74325 - DNA, 438 bp, Glycine max
aaaaaacaacaaaaggtgcttctactttaagaccacacaaggttcattcggagaaggactattgtaacttgtccacatgtataaatgcatattatctaatatgaaaatagacacagaacacccattatttctaactaattagttcaaaacacataagccaacactattacttataactcttaagcataatgcaaatttctattctcatatcatttataatgaacgagatctatatactccgattaatccatattactgcatctttaccatatatacacttgttccaaactattgagctacagattattaaaattatatgcatcatcttctttaggatgtgggcttaaaacaatatataatgaggattattttatatctacgtaaactcaatattatcatattaccttcattttattgagtacgatacacctttgtttt

SEQ ID NO: 74326 - DNA, 310 bp, Glycine max
gatcgctcgagagacatgcgagttccactatagatcggtccatgcatgttcagcactccttgtccatgatggaactgacgatggcagttccgatcacctacgagatgctagaacgttgatgcattttactgcagtcaaagatattggggtagggatacgcgtaccggaccgcgccttaataggttgtttgagattctctaaggcactacttcttgcatcaatagggcaaagatactgaaaggatacccacgcttcaatcactttttatgtaagaaatcatttactggacggaaaaaaggatacaagctta

SEQ ID NO: 74327 - DNA, 340 bp, Glycine max
cgacggcaacgaaagacgacagattttggtattacccccgtgccttctcaatggggacatgatctttgtgttcctgtctcttccatcatctactttctattcgccgcacccctaaaccattatctgaaaaagagagggtccttctattgtaatcaatctccttaccacctactcttgcgtccctgagtggcaacataaccgcttttaaaacattttcaacgaccaactgatcacaaccactccgccttctttcgtattaactaacacccaccttcttatcttttgattcttccaacaaataaaaaagtcatgaacaccatcaacaacatcttttattcca

SEQ ID NO: 74328 - DNA, 171 bp, Glycine max
gaatatcgcagtgatgaggatgaggatgacaagtgtgcttgttctgagcaggatagggattacaagattttgggaaaagctaaagaaaaaacagtgaaagtgttggaggaagaggatgaagttcccaaatcaggattgctttctttgccttttatgaggcgtggattggag

SEQ ID NO: 74329 - DNA, 176 bp, Glycine max
caggcattagtccagctcgacaacatcaacatactgagaataatctttgatatgttcgcagatagggtttgctatacaataagtattgcagctgcaacgttttcaacgctgtcactggtaacaacaccgctcctttttatgatgcaggttttgctgcttatgatttctagggcatt

SEQ ID NO: 74330 - DNA, 356 bp, Glycine max
agataagttgtttgtgtttggtgtaggtggaaatttggaatcggtttgtggggatgagaaggatttgctgtgaaacttggtaatcgtgacaacagagttaatgacaatacaaaatttcaacattgcatgaggtcctgtgactgtgttgcaagcttgcagttggttgggagtgttgtctgttatttaatttatctattttaatgttgtttgcttgggtgcagttgcaaatgaaaggttaagaagtttaatctccgattaattaaccgccttttacattgacctactgacgacaaataggttcacagcttaaattgtggattgaatcgttgaacgaagcttttccagacgcctaattt

SEQ ID NO: 74331 - DNA, 103 bp, Glycine max
gggtggcgagtgagcgagcgatggaagaagaagattttgatttcgagaagaaggtttcgataaaggaatcgatgtcgatgtcgatgtcgacagagcttgatcc

SEQ ID NO: 74332 - DNA, 437 bp, Glycine max
ctgcgaagacgacagaagggtatatataccagcaaaaatcagaacaattgaacgtggaggcacaaagaagagaattgtcaagttggaggttctaaagcacgatgacatattcccgttagaaaccccattcatcaaaagtgacatcttttcctatgagaaaatcacgtcgaatgagtcttagagggaaaactggattttgtctcagtaatttcccaattcctgtaaagaaacataaacaaacagtatccatgtttgatatggcgctacaatgaagcctagctttatttggaagtgacaaatttagagtctaagatttgcacaaatgtaacaaaagtcacacaccatattggaattatattccttctcaagtgactctatgtgcttatcctcatccgtcccttaaggaagaaaaatgtcgagtgtgatataatatatga

SEQ ID NO: 74333 - DNA, 397 bp, Glycine max
  unsure (1)..(397): unsure at all n locations
ctttcatttaatccttacaaaatggaggtgttgaatggagtgctcatagagaaagtgaagaaagctggcatcatcactggggtgattgatgactttgatatgacattttcatggcattttgataaccggtgtaatgatggaattcactatggaagggctcctgcaaagatgaagtggcgagatggcaaaattggtcatcagtattttgtggatctcatgttagctcatgttctgctcaatgcactatgtgcaagatgaccttggagcttcagttggaagagaggaaacaatcagaaaagaaaaaacttgtctgcaaagtggatagggttggaaatgtangcattccctgtagaataatgcataccatagcangtgtttggataaaaaaaactatgga

SEQ ID NO: 74334 - DNA, 61 bp, Glycine max
  unsure (1)..(61): unsure at all n locations
ggaannncngggncgaccgcacgccgtccgcccacgccgtccgcccacgcccgtccggaag

SEQ ID NO: 74335 - DNA, 56 bp, Glycine max
cgttggggctgggacaatacgacaggggggtggggctgctataagacaacacaagg

SEQ ID NO: 74336 - DNA, 380 bp, Glycine max
gttattttgatttaagtgtatttgtggtgaaaatggtaaagattgatatgggttttacgcttttatactactacaattcaaatttattttcttaattaatcttttttccctttgacacccaaacacagccgtagaccgtagtccgtggataccaagattttattaacaagaattgctaactccaataacacaaactggtccgatatttgacttatatttttttcgcttaaaaaaaatccaaaccaaactagatctataataatgtatatcaacttgagtttttctgattcgggtagaatcctatataactcggctgtgaacaattgtttatcatccctaacaaatgcgtaattaatgaaatgaatcttaaacaatttgaa

SEQ ID NO: 74337 - DNA, 385 bp, Glycine max
  unsure (1)..(385): unsure at all n locations
cgtgcgccacgcgtccgtccactcgtncgaacacttcanaatttacgacacctgggaaactcttgatcattgtggattttaacaagcaactataccaacaccgccaataactaaacatggcatacatatacctaccatatttaaaagaaaagctaaaccattgaccgaaaattttacccacttgttctcttcaattacattcactcagaaacaaaaaacatcccaaaataatattttacccttcattctaaaaaacccaagcttacttacacttacatgctatcaaatatctaatttctcgacacacctaaattcactacactgaccgtcaaataacaacgtctttactaacaaaacccttgcataacccaactaaacctccctg

SEQ ID NO: 74338 - DNA, 335 bp, Glycine max
gaccgcacgcgtccgaacggacaaaaaaacacctcagagaggactttacattatagcgtattatttttttaatggacacagcgaaattttaaaatcgattagcttaaaacaaacaattaaaataattaattttaaactataaactattaatatgaaaaaaattcactttcttcacctttttagcagtattacgactttttcttaacactaaaatatattcattaatttaaatctacatgaacattatttttcttattgtttaatctttttaaataaccattaaatccatactatgaaatatactaaatactattttaacttttaatgatatattt

SEQ ID NO: 74339 - DNA, 398 bp, Glycine max
ctgttgctttattattcaccctggaatttggttgattttattatgttttgaaaaataaggaaagagatttatttgttagcttaattgttttaattggcgaatatgtttttcttttcccttttttgcacagagtgaagctttgttcttagggtaatggattcccttttttgtgatgctagtggatgatttgactgattagtgtttagtggaatgaagaaccagaactagtagtaggtagagggaatcacttttggttttggatgtaaacttagaaatgtgcagcactgcacagaattgatatttgatcgtgggtcaaattgtcaaaatgtgcaaagaatacaaaggcacaggtgatatcattccattttacgttttttaacgaagctgttagtttcaat

SEQ ID NO: 74340 - DNA, 445 bp, Glycine max
gaccacgcgtccgcacaggcgtgcgagaacacatacgggcgatttatgattaacgaaaacgggaaattattgggtattggggacagatagtcttggttttttctcatctaataaaggtttgatgacttttagtaaaaaatagattatagaactttctaaacaaaattacaaaaaaaaacattaatcattccgaaggcttaccattcttcacatacatttataaatcatctctatatataaaaaacattattgtattgaattgaatgagcgtctttaagagctatttttttaacaaaattaaaacctttttagtaatttttctttcacgaaaacattttcataaatttatctaaccttttatctctttgaatctatcctttccatattggatttttaaattgaatctcaataattctaaaataaattttcgatagttaaaaaaata

SEQ ID NO: 74341 - DNA, 143 bp, Glycine max
gatagcagcatcatacaaagcattgaattcaaaaacttaagttcattccttgtgttttgctttcttcctcaaaaccaaacatgtctaacacatgcggcaactgcgactgcgcttacaagactagctgcaccaagggaaacagc

SEQ ID NO: 74342 - DNA, 370 bp, Glycine max
  unsure (1)..(370): unsure at all n locations
accggnatggaatacccgggccgacgcacgcgtccgaccgcttgcaaaaaaccaccaaattgagttttgaggattacatccaatattatgagcccgtgttttctttacggtgcttatagcctctaccttaccatggatcctcatctatccaacaaaagctcccaaacacttcttacgcctaatattgccactattttctacacgaaatcaactacacttacctataatcataatccctactctatgcaaatacaattgatgacctttatgacacttcattgtacgctatcaacatccaatgacttatgctacactttctattgccgtatggagcctgttatatatgaacttacgtctacatcataataaa

SEQ ID NO: 74343 - DNA, 315 bp, Glycine max
gatataaaagtgattaaagctaactgttaacttgctacagtagtaaactaaactgagttactcatatacactcttacaaaatggatgaagtcaagtaacctgcttatttggtctgtcttgtggtacatgcaaatgatgtttttggttcaatctttcattctgtttcctatctctggtttataggcggtgttacattcgttttattagaaaggtaaatgacaagaagggcatggagggtcaagaagagacaagaaaagcttttgattttatgcttaactatgttggtaagttgttttctgttgtcttgtttgcatt

SEQ ID NO: 74344 - DNA, 392 bp, Glycine max
atagtccttgaagatctcttgaacagtggagggtttggaaggcatttagccaaaggctacagatcaaagagtgtagagaaactatgcatcagtttttaatgaataattaaaattggtcaacattatttatcacacaatattcataattaattatttgttttgataataaatagtaacattaaatattatattactatttattataataaccgttgataggatgtaattaaatttaatgaataattaaattgctcaacattatttagtacacaatattgatatttaaatattagttttataataaacaatagcattaaatattatattaatactttcgttcttttttataaaaaataaattatagtgtattttatattataaataagaataga

SEQ ID NO: 74345 - DNA, 294 bp, Glycine max
attcctaaaaccatacaaaatataagtagttggctaagagtacataagacatcaaataattgtggaagcaatgtcttccaaggttattttgatgatgccaaagaatcaagagttaagcgcaaagattcaagaatcaagtttcaagtttcaagattcaagattaatcaagatcaagattcaagactcaaagattcaagaatcaagagaagacttaatcaagataagtattaaaaagtttttcaaaatattgagtagcacaagaagttttcacaaaatcatttaccaaagagtttt

SEQ ID NO: 74346 - DNA, 382 bp, Glycine max
ggtctccgtgcatgccaagtgcgtgtcgaaagggagacgggtcccttcacattcccgccaaccgcacttataaaagacaacacattctctctactcttttgcgttccgttaacgacctctgcgatcgcaacacacagcgcaaaaccctaaaccgtcgagcgatggcgcgtactcctaaacctaaaggcggcccctccgctgcggactccgccgccactgccttcttcaaacccggtactgccgtcgaagtcagttccgaggacgacggattccggcgatcctggttcaccggcaccgtcatccgccgactcgcctacgagaggttcctagtcgaatacgacaacctcttggggacgacaaaaccacaaaaattgagagaagt

SEQ ID NO: 74347 - DNA, 278 bp, Glycine max
cttgcaaaaaaacaacatatcgcatttcttacaacttataattacctgggaaaacgctccttttacatgggatactgcctcactcctaatcacccaaacaaatttttatcaatctacaacaccaataactacctccgtaatttcaaccatccaaatgaacattttcaaacacacactctatcaacttctccaatcattactcaaaacttcactaatcactacaactcctaatcttcaatatattaaaaaaatttttcccctattaacatttcacaaaa

SEQ ID NO: 74348 - DNA, 264 bp, Glycine max
cttgcaaaaaaacaacaaattgcagttctagaaactgataatttctcatggaaacgcgtattttttatggggtagtgcccttactcagataaccttatcaatcacctaactaatacttacaacaaaccccactgtctttaatggaagctactacaagatcaaaaaccaacacagactctgccagatgctcccataattcatcaacacttattcaatcaccacctacaccttcctcatacgaatcacaccaattaatgcccaatc

SEQ ID NO: 74349 - DNA, 342 bp, Glycine max
gatgatactcattttgttggggctaggttcattagctcagaataaggttaatttatagaatattctattgagtttgcagatcagaattcaattccatggtagatcataccaccatatataggacttgcttttcaaactggggtttcaatttctgagtgggtgtccagtggtttgcttaatctataagattttaatatgaattcagctcatttgatcccttatctaatctgcacaaacatgttgtcccacttttagctatagttttgttagctaagcaagaatagttctgctatgttcataaaaaaaaaaaaaaagaatagttcctgtggttgctcttgttta

SEQ ID NO: 74350 - DNA, 360 bp, Glycine max
tgttgagagaaaaaaaagcaaagcggacaaagttcacgttcacattctgttctgctctcattcacactttcacgagcctatcacctactctcttcacctgcaactgcaacttccaacttcaacttcaaccactgcatgcttatctctgaaagaaaagaaaagaaaaagaaaatatctccatttggtttgcttggagaaagttgaaaccttttcacgagctcaagtttgttgttacttttttaacttgacggtctctttttttctacatcgactctcgtttttgtttgcaaagatactatctccgtcttaggatatttcaatgtgaaacgttatgttttttttgttgcatatttattattg

SEQ ID NO: 74351 - DNA, 173 bp, Glycine max
cgggccgaccgacgcgtccgaccggttgcaaaaaaacaccaaatgggcctttcgctattgaacaaaaatacaggcatttgtctatttaagataggatgccggcctatctacatatgctctctggatccatctaactgctgcacttaaaatggccttctctgtcactgccgctc

SEQ ID NO: 74352 - DNA, 166 bp, Glycine max
ggctaaagcaactgccttaaaatgcatactccggataagttactggcggatctgggtaactaataaacttcttataacaactagctacacttatttactcaactgttaaattattgaatgttcttgatactgagctcgaatttagaatgtataactcaccataata

SEQ ID NO: 74353 - DNA, 459 bp, Glycine max
cggaattcccgggtcgaccgcacgcgtccgacgacagaagggatctctatgtatgatgttaactatgtagaagagattatattggtaggggcacatgatcacaaaccatgtaataatttctcactgtgtaggccttttcattttacacctcaaacgtaacttgtgcaaataatgtacaaaacaagagagctgcagtttgataagtctctagttagattctcgcttacttttagtttctcattttagccgggattgtgtaacatatatatatcgcttttgaacatattgtagaaaagatttctgctcaagttggctagctagtataatctctggattgcgtaatatatatgaaattcttctcattgttctaataattaaatgcaaccgcatactttgataaggaatgctatagtaataacttttctaacacactctcttcaatactccttacaattagtt

SEQ ID NO: 74354 - DNA, 218 bp, Glycine max
ataaactctatcttggaattgtctcttatcattatgagagttgcgtatttcccacaaaaaaaaactatttaaaaatataaaaagcgcgccgctctatagtgatccaaacttacatacgcgttcattctacatgataattctttttttgtgccacctaaaattcaattcactgtcctttgttttacaactatcttgaatgagaaaacccttattgttac

SEQ ID NO: 74355 - DNA, 390 bp, Glycine max
gaaccgtcccaatttttttctaaattcttgaattcccattcaattctgggaggtgtttaaatggaggttcctattcttttttggtgccccctgcattattgaccattggattcgacatcgagattaatctaacaatcaataatacttccacccagtctgaagttgctacaacaataatagacttccacaaaattctccttaatgatactgtaatatatatagagcataacttgcatgcatagttgttgggttttatatggatctctacagtgagtttgtatagatctagaagtaaatctaatggtgtgaaatgtgaataggtttgagattttgtttctcttgatttgtgtaacataatccatactgttctggtaaatgcttaatatttct

SEQ ID NO: 74356 - DNA, 431 bp, Glycine max
aattacatgataatttatgattacagataattgggaaccttggttctcgctagttttgaaattctttcaaagtttatacatttgatttacttcatgagatttttaatgtaattattgaattagtaaaattaaatatctataataaaatataaaagatatattattttactaaatttgttatcttttatattttgaaaagacttaagtatgctattacatctattccattaaataatgagatgccataaccaggttatgcaacagaaaaaaatgatttatttgtgacattatttcttaccggaaaaatatattaatagaaattaaaaaaatgtaatgtttgagtaaaattaaggattaaatgaaaaaaaattatactgaaaaaagtatttttgtcaagacgaaaattaaaattatctaatattttatgaatt

SEQ ID NO: 74357 - DNA, 423 bp, Glycine max
gcattacatgtttgattagaatgatccttatcaggcttatgggtatgttaacaatctttcggatgagttaaaatatgaaatcagatttatcctttcataaagaacaactcgagtgataagctaagcttccataacatacttaatggaaaaatcacagaactttgacgagaattaagtttttagtttcaaatgtatttcaaagcattttaatacttaccttttcacatatttttatatgtgtggaatctttcctcaatttaaggataagcaggaataattgatgacataagttctgataggtaatagcactgtagattaagacattaagttattggcttgtattttagatgtcattagattatgtttttgagagaattctaaccgctccatggaataataatacatgtcaacttaatttttttt

SEQ ID NO: 74358 - DNA, 404 bp, Glycine max
gaggccaaaaaaaacgcaacacaaatcgaaggggggcatgctgttgtgtgcgacactgctggatgtgttgagttgagacctttaaactcaactcaacattttcatctctttctctctgctaatttctagggttttgcctttccccaattcccacaaaatgggggtctctttcaaggtgtccaaaaccggcactaggtttcgccccaagtcgattccccaacttcaagatggctcatccgacaattccaagtcccagagtgatcttgttgaggctggtgaaaacattgctcagattccccagtcatctgtttcatctgaaactttttcattagcagatagggaagcttctttcacattgaacctgtttccagatggttattctattggaaaaccctccgagaatg

SEQ ID NO: 74359 - DNA, 407 bp, Glycine max
gattactgacctggcctctgtggactacacccaaagagtcaaaacaccaacccaccaattaatccttccttcaagcattatctcacaatgtcttcaaacctcaccattgaacaaaggctcgaacagctgcaaaaggcaaaggaaagagcacaaccccaaccacccaaaggggccaaaatccaacgggtagcacatcatctccgagaccgaaagcatttcaccaagcattacgagccgaaactgatgtcattgggtcccatccatcacggtgctgaaaaactgcagctgggagagcagtgtaagcaaaggtgggcagcaacgtacatcgaaagcactggaaaaaccccacaaactctacacaaaaaggttgtggacgattttgaaaaccagaagaagttgtttgacga

SEQ ID NO: 74360 - DNA, 397 bp, Glycine max
gtctggtcaagacaaccattagaagagttatgacttttagaaaaacttaaaaaccaatttgaaaaagtcaaaaactatttgaaaagttacatcttttgattttattcagaaacaatcattggtaatcgattaccaaatcagtgtaatcgattacacaaggcttttatgtggaaggatgtgactcttcacatttgaatttgaatttcaacattcaaaggtactggtaatcgattaccaaaacattgtaatcgattatagtttttgaaatcaattggaacgttgtaaattcatttgaaaactttttcgaatctattttgctactggtaatcgattacaacaatctggtaatcgattaccagagagtaaaaactctttggtaaacatgttttgagaaaaa

SEQ ID NO: 74361 - DNA, 395 bp, Glycine max
ggttctagtgtgtgattgtttgttggtgtaactcgttcttcttcttttgttgttctgtgtttgtgtttgttttttctctcacctgaaaatgtcttgctgcggaggtaactgtggttgcggaagctcctgcaagtgctgcaacggctgctgaggctgcaagatgtacccagacttgagctacactgagtcaaccaccaccgagacctttgtcattggagtggcacctgttaacgctcaatttgatggtgctgaaatgggtgtgcccgctgagaacgatggctgcaaatgtggaccaaactgctcctgcaacccctgcacttgcaagtgaggtcgtgggagagcaagcttcaaacagagatagcccttaattaggaataatgataaactattaatgt

SEQ ID NO: 74362 - DNA, 165 bp, Glycine max
gagacctcaggtctggctgttataccctgtaaggggtattgggtaaaatgaagttgctaaatgaaacgaagcgatcgttttaaaggatccaatcttacatacaccagcgtgcgacgccatagtctctcttatcgtgccacctaaattctattgactggccggaac

SEQ ID NO: 74363 - DNA, 392 bp, Glycine max
gactttcaatctctactgtttctacccccaactgcggatttggcctaatgaagagacccatgtctaacaagaacttctttcacccaacgcacctttcattgaggattctacccagcaatcgttcttctattcacacaccaaaattcaatgcacttcccaaagatgtcccatccaatgtacccaaactcactgcatttttctattgcaatgcacgttatgacttatattgttctagaaagccataatccaggatcaaagctccacaagaaagaaacttttgagcctgttacaatcattgatacccctccaaagcctcctgtcgctttgagatttatgtgttaactccacctggactcccaccattgaacactgtcattgcacaacattttaat

SEQ ID NO: 74364 - DNA, 357 bp, Glycine max
cgaaaggaatcagaatcgcttggtggtgatttaataacaaaatctgtgtaactatcatccatacgtcaaataacagaacacatgtataattcaaggtgaaaatgaacataaattgacatgtaatgacataacttgtgttcttacttgatactcgcaaataattctacaatctgacacacgcttatgtctacgatctctaacaactgtacacctactataaccagaaactctgagcccaacgattgggattactatataaaggtaattaacacttatatgctcaatattaacaacgagcattatgagtgcatggcgactctcttgttcgacattacctacactgactgctatacactt

SEQ ID NO: 74365 - DNA, 410 bp, Glycine max
  unsure (1)..(410): unsure at all n locations
ggttctagtgtgtgattgtttgttgtcgtaactggttcttcttcttttgttgttctgtgtttgtgtttgttttttctctcacctgaaaatgtcttgctgcggtggtaactgtggttgcggaagctcctgcaagtgcggcaacggctgcggaggctgcaagatgtacccagacttgagctacactgagtcaaccaccaccgagaccttggtcatgggagtggcacctgttaaggctcaatttgagggtgctgaaatgggtgtgcccgctgagaacgatggctgcaaatgtggaccaaactgctcctgcaacccctgcacttgcaagtgaggtgttgggaaagcaagcttcaagcaaagatagcccttaattaggaataatgatanactattaatgtgtagctaaaaactta

SEQ ID NO: 74366 - DNA, 331 bp, Glycine max
gttatgatcctctaattggccaaattgccgtttgtggaatataataccacttttggaacttcatgccattcacactgaattatcttttgttattaaatgggaaccggtttgagcgcttcagcttgaacacaaatatgcatttatgctcacttgtcgctgccaattcaaatatccaaagttcaaatcccccaatgctatcaataaaagcattattcctcttcataaatactgctattataaactaggtttgcaccccacattcctcagtaaaatttaacgcccttgtcaaaagccatcaaaaaatgttgtcaaaaaagaacttatttttgcc

SEQ ID NO: 74367 - DNA, 396 bp, Glycine max
gacaacagatggggagaacatatcgtgggaaaacaacaccggcttcggggactcacccgagagaactttgtattggaaatctcaaatcgcactgcttcaggaaattttagagcgataccatttaagtggatcaaaattgacacgagaggttggtcgaattataaaagaggtgaaagcttcggatttttgcagctgtttgaaggctaactcttgggattgcaccacctgtttgagaagacgagtggttgatgggctctgccgaacaggattcagtaccaacctttgcatttcataatgggaaaccacaaaaaaatttccaggaggctgtcacgagtatattgaggtgattgcaaacacatcaacaatgaagaagattcattttcttgtggaattgga

SEQ ID NO: 74368 - DNA, 406 bp, Glycine max
aagacgacagaaggggtgtatctccattgtctatcgaatgtacgatgatcttggccagcatgggcttgtcgagggtttatcaccaagaatgggccttcaatgacagggttattggcacaactcttttttgtgcacgatgaatgcaaacaatgtgcatgcgagttttgaagtttataatgcccaaactgatctgatgaagtgtgtgttccaatgcaatataattctaaataactctggaggctttttttttgattagtttgatagctactgggataagagattgtcatggaatattccaaaaacaccatctttttaaaagttttatatgcttatcttatgctaagaataattaaataataaagaattattataatttccctttatttaatcacaattaatttacttt

SEQ ID NO: 74369 - DNA, 176 bp, Glycine max
cttcacctttcttcatacaacacaatatggatgaccaaattggtattaataagttattccaatggcttctcaaggttaatccttacctcaccttattgttccttcatttaaactactcatagttttttatcatcactataatttctttcaatcatttcataattcatttcatactt

SEQ ID NO: 74370 - DNA, 326 bp, Glycine max
cgacagagaccgattttttccttattgatgatccatctgacattgcatcatttgaaacctcttgtgctactccacttggataaattcctaacgcatagtattcaaaaatccttgttcttcatgaacttattgactatcaatcctacgatagtaggcaattcaccaacactatagatatatcttacgataagagaatccttagcagcaactcaaatacaaaatgtgaagcctttcttcttgatattagtccatctccaccaatggaagagaatatgaagtgtgaacaagttcgccttatttgtgagtcaatgatgaatatagatctc

SEQ ID NO: 74371 - DNA, 288 bp, Glycine max
taaaatcccaagcatttaaatggggagaaagatgagcgaggggataagctccatgagtttcaagctcaaggagttcttccagcctgggcccaatcatgccgacaagcttgtggaggacactacttccgaagccctggacgagccctaatgggccctcaatcttaatctctgcaacctcatcaacaccgacaagctcaactgcgtcgaactcttccgtggaatcaaaaaacggatcattctcaaaagccctaagtttcattacccttcccttttcctacttcaaaccct

SEQ ID NO: 74372 - DNA, 425 bp, Glycine max
  unsure (1)..(425): unsure at all n locations
gaattccaaaaagtaaaaagaaaaatattatgaggcgctactgaactggaaaaaaaattaataataacaatactaatattccatctaaatattgtgcccattttcaaaaatatatctcctgtgaagcaacaaaattaaatttttttattggaaaatgttctcactttctaatgtatgtttaacgtgacactaatcagcaatactcattacattattattcattttcattttctagaagaagccaaaaaaagggaaatttatttctgttcattttattttaatttattttcattgttctgatacccgtgatactggtgttgtctttatgtcagcttcaccattcggaaaaattcaatggagtgccatatgggctgtttttgggacccaaggtcagttgcattttcgnttctgtaatcttgtattat

SEQ ID NO: 74373 - DNA, 384 bp, Glycine max
aggcgtacgaaccgatgcaaagacgacttatggggccaacaccaaaacttaatgtatgggcactgtggactatgccttggggcaagactcacacactcactctctgtcacttccgatacactcctgcgctgccaaaccacgatatgtagtggaggattaccaaccagaaaagcgtccgccgaagggccaacgtgcatactactctgtctgaaccttgatgcttttaatctacatatatgacacgtgtcccatgaaactatcaacgtagtatctgctcatcaacaacatgtgttggaatttaatgaccaataccgtcatattgatgattgataatgactatcgagcatcattttcaaacacacatatacgtgaattctatgaaga

SEQ ID NO: 74374 - DNA, 408 bp, Glycine max
acaaaacgtttaaaaggcatctcttaggatcaaatctaacatttattgtgggggcactgtggacaatgagttgaggagaacccacacacataatcttcatcacgttgataacgccgatgctgccaaacaaggttgggttctaaagtatatacaaactgagaagcgaccgacgaagagccaccgtgcataataccccataagaaccttgatgttcttaagctctatgaatcacacgtgacatatgatattattaatgaagtatttgggcctatagccttggtgttgaaattaattaaccccctctgactaattggaggtgaaaaatcacaaccgaaattcattttcattgtcacatatatgttaatacagcactgatgtaaatatataatggaccttcatatatatagc

SEQ ID NO: 74375 - DNA, 416 bp, Glycine max
tccatccctccatttcttacgttaggtaattgagtatgcttgtttagaatgttgatgctatattatctcaaatttcttttaaactaggctcggccgtgttttgctaggtactaaaattatttattttgatgtgtttgtgggtttcaattctcctatattaatccttttattttgtcaaaacaatctatgcccagtaacttttctctcaagtgtgcatccaatacgataatcatgttgaattgatgcttgattcattcatgtgcaaatgatacttagagaacacgatgatgctatttttactgaaaactatgatttttttaatttaacattttatcaaagcctgaatcttttaatacaggatcagatttatacaattttaattaatgtttctccatgatgaaattacactaataaaa

SEQ ID NO: 74376 - DNA, 381 bp, Glycine max
ggttgtagtgtgtgattgtttgttgttgtaactcgttcttcttcttttgttgttctgtgtttgtgtttgttttttctctcacctgaaaatgtcttgctgcggtggtaactgtggttgcggaagctcctgcaagtgcggcaacggctgcggaggctgcaagatgtacccagacttgagctacactgagtcaaccaccaccgagaccttggtcatgggagtggcacctgttaaggctcaatttgagggtgctgaaatgggtgtgcccgctgagaacgatggctgcaaatgtggaccaaactgctcctgcaacccctgcacttgcaagtgaggtgttgggagagcaagcttcaagcagagatagcccttaattaagaataatga

SEQ ID NO: 74377 - DNA, 428 bp, Glycine max
ggttctagtgtgtgattgtttgttgttgtaactcgttcttgttcttttgttgttctgtgtttgtgtttgttttttctctcacctgaaaatgtcttgctgcggtggtaactgtggttgcggaagctcctgcaagtgcggcaacggctgcggaggctgcaagatgtacccagacttgagctacactgagtcaaccaccaccgagaccttggtcatgggagtggcacctgttaaggctcaatttgagggtgctgaaatgggtgtgcccgctgagaacgatggctgcaaatgtggaccaaactgctcctgcaacccctgcacttgcaagtgaggtgttgggagagcaagcttcaagcagagatagcccttaattaggaataatgataaactattaatgtgtaactaaaaacttatgtattatgtctgtgatg

SEQ ID NO: 74378 - DNA, 431 bp, Glycine max
attataaacataccaattattaaactccagcttgtactggaaaattgtattaaaacttatttcaaggagaattcgtttttgtgtaaaaatgctctttacataagtaatttataattactgtacttaatttatacttctggtgtgatgcaggtgattgatagagtctggactgtcaacttagttaggatctcttaccttaaaatgatgttattgcatgcttattacttagaaaaatgattattagaaaattgatgtgatattacgtatagtggtgatatttttgtacagagtaaacaattgcgtataagttgttttttaaattggttatacaagaaatcaatctaaaaatatttttaaataacttttttttaacaaaatgatgatacaaaatgttgacattttttttaatgttgaaatccttgactagattt

SEQ ID NO: 74379 - DNA, 403 bp, Glycine max
catttatattttattttatttttaatttttataggttgaagttataggaattaaaaatataagaatgaaaaaattatatagactaaaaatattatttttaaaattataagaattaaaagaaattaaaatgtaaatgataaagattaaaaagattatttttaaattaaaaaaaaaaataaaaatcatgaatcaaataatcaaatgagtaatttaatcttttataattaatttgtcaagagaatccattagcatttgtcttttttatttaatgaacaatataaaatataaccaagcatataagggattgtatatactatgttttgtgcttaatttggtttaatttgagtgataattactgatatttaattatgggtttggaattggcagaaggtactacaagtgc

SEQ ID NO: 74380 - DNA, 217 bp, Glycine max
ccttgacaggctcatgctcaatatgtaacacggggcgcttgggggatgtgaatatcaaccccggcattgcctcactatttgattcttgatgcgaagaagaaatggggctaacgcgctaatatcgcactgtgcgtacattacgatagcaaaacagacgctggtgacactctggcatatcacaagacggacgatatgtcttattatcattaacaatatg

SEQ ID NO: 74381 - DNA, 182 bp, Glycine max
aacttacatacatcttttttccaaaattcccaacttacatctattccaaattatcaagtgattttattcttctacaataacaatccaatcattttgtaaacaatcccttctctgtattctacatctttactcatttaaaacttatattaatcttttatccacaaatcctatttttctctttt

SEQ ID NO: 74382 - DNA, 421 bp, Glycine max
ggttctagtgtgtgattgtttgttgttgtaactggttcttgttcttttgttgttctgtgtttgtgtttgttttttctctcacctgaaaatgtcttgctgcggtggtaactgtggttgcggaagctcctgcaagtgcggcaacggctgcggaggctgcaagatgtacccagacttgagctacactgagtcaaccaccaccgagaccttggtcatgggagtggcacctgttaaggctcaatttgagggtgctgaaatgggtgtgcccgctgagaacgatggctgcaaatgtggaccaaactgctcctgcaacccctgcacttgcaagtgaggtgttgggagagcaagcttcaagcagagatagcccttaattaggaataatgataaactattaatgtgtagctaaaaacttatgtattatgtc

SEQ ID NO: 74383 - DNA, 417 bp, Glycine max
  unsure (1)..(417): unsure at all n locations
gatttcctcatgcatgaacctcttgatgtaatcggcatgattctacctcaatacattatttcatttcctaatttccctccttaaataaggacaatatcattcaaattttcctaattaaataaggatcatatcttcccaaattttccaaaatcagaagcaaaaaatatatagaaaattcctaaaataaaacaaaaaatatttttaaaattaccgtaaaagataagattgtcatttttgacaccctaatttattaaatgaagtgatgatgttatggcatttgtaccttgttttaagtaggggctgatatcagtagtttggttatcagcaaaaaaaggtgtctccgagtatctcataaagcacacnaggggattgactcccctaccgtctgtatttggaagacaatcttgtatgccgctc

SEQ ID NO: 74384 - DNA, 417 bp, Glycine max
  unsure (1)..(417): unsure at all n locations
attggtctgaaatatctattaattttgttattggtaattaatttttgttaaaaaatttaattgattatttttgttgaaatatttcttattaattatatttttttatttacagaacttaaatctcttgtttaaaaagaagattaagatccaacaccttgtttaaagagattaaaaaatttgatatcactaccaattgactttttggtaaatatgtaggatgtataataatgataattagagtttttatgaaaaatcttttaggggcaaaaattatttttaagaaatatatatacgacttttctagaatacgtggaggcacagctaacaagaagctggagtaaggtccaccatgtcttgngctaatacaacataaaccccttcactttctttaaattgcaataatcacatgcatcgcat

SEQ ID NO: 74385 - DNA, 335 bp, Glycine max
cgaccacgcgtgctacggatacaacaaaaaacagtttgggattttgcttctccttgaaaagcagcgatttttgttgaatttaaatgtgcacagggatcttctaatatataagagcagctaatttgctgataaactttctgaacaatctagtttgtcatgtctccaagttgatgactgagaggatgttgaaatatatgttgagactgttgggcttatttactgcaaagaaatgaaacatcatctaatgaaacaaagtgtttctcacattcttctaatactcaatgtaatagaattccttggcttcaactaatgtattcaatcatgtatggagtact

SEQ ID NO: 74386 - DNA, 282 bp, Glycine max
tgtcagtcctaacgttattgcgcagctacccgctcaggttaatccgactcattttaaacaatgacaagaccatcccatcctctctaaaggatccaagcttactttcgcgcgctttcgacgatccaactttactatctcgtcccttaaattcaatttactttccatagtgtcacaacaattcaatctactaaaaccctttctacacccaacttaatcgcataaccctacatccacctttctcaagctgccttaataacaaacacgcccttacagatcgccctt

SEQ ID NO: 74387 - DNA, 272 bp, Glycine max
ggcacctgttaaggcttaatttgagggtgctgaaatgggtgtgccggctgattacgatggctgcaaatgtggaccaaactgctcctgcaacccctgcacttgcaagtgaggtgttgggagagcaagctttaagcagagatagcccttaattaggaataatgataaactattaatgtgtagctaaaaacttatgtattatgtctgtgatggtttttcgtgcactctggtgttttgtgttaaacaaacattcttaaaataaaagaggtcatgtt

SEQ ID NO: 74388 - DNA, 401 bp, Glycine max
caaatttaaaccatagacccttcctaagagttaatgatgactttgaatgacccaccccaacccaatattctatatcctcacctcatacaatatttttatacatctaaaaaatgaaaaaaagttcaagaaaatgatctctaatgaataacacccgacaatttcgattcatccacacttactacaccaattgatgaagaaaatgtttatatccttgaacatcaaacctctaataaatctaacctctattaaattaacactgttctctgaaccaaacgaaaccaatcctagtctaccttactttaattgaaacatatcactccatttttccatgttcatctttccaaaaaagacacacttacattcacattcttttataataccaccacaaaattttcataaat

SEQ ID NO: 74389 - DNA, 293 bp, Glycine max
  unsure (1)..(293): unsure at all n locations
acggctgcaaaacaacaaaaatttataattgacaaaaaaaaaaacaaaaaccgaaaaatgtgaaattttaaaacacaanccccccncaaaaactaaatacaagacacaaaatgccgtttatacgcctttcaactttattgaataaactttcatcaaatgaaaccctttcttctatctataatgcaaccattgacgcattttaccctctttcaaacaatgctctaatgtatataacataaatagccatacctctaaccttacccaaatccatacacaaatatcttataaaaatt

SEQ ID NO: 74390 - DNA, 237 bp, Glycine max
  unsure (1)..(237): unsure at all n locations
cagaaggtacatttattagatttagttgnttcctgtgagacacgtaccattgccctttttgtttcataaccattcttccncatgtttgatccatttccttggttttcaagaattgctctaagggaanggnttgaagaaccaggnaatggcaaagttggcggaatatgaattttattattgttaaatgaacggcntgaagaaactccattatatggtgttgncttttttttttttttt

SEQ ID NO: 74391 - DNA, 314 bp, Glycine max
cagggatggacgtttattcgtgattcgataactgaatcaagatcggaccgatcgcgccttctctctcttgtgtttatgccaaggctgacagtgtataagaggcaaggcaagaaacgcgagggagagcgtcattgtgaaggtataaagccaccgaatgtaacattaccttacatgaacccacaacctccttattttgaaaactactcactaactcaaagttatctcagtgtgcaccacattgcgttctgctgagttctcttactaacaagtatgaccgcgccaacacgtactatcatacatagtggcatgctgag

SEQ ID NO: 74392 - DNA, 227 bp, Glycine max
ccaatgatgtttctggctattttaaatgcttctccaaagcggcctgcatgcagcggttctttaccgtggatgctacgtccacctcattttcaacagtgctatgatcaacaacaccaccatcaacatcctcagtctttgggaactcctcggcggtctgagtatgatccgtcatccaagcccatcaaaggggtttttggcccacgctcatccgatgttgctatggatct

SEQ ID NO: 74393 - DNA, 318 bp, Glycine max
tggggcgctagttttcatagctttttatattcccttcaccaaacaggacacgcacggggagacaaacagatcatagaagcattgatatcgtattatcggtactaatccaaccgctcgtgggaaacaggacaaagacgaacattattcacagcatacagaccctctaattcgaaagaaaggaaccattcgcatgtatagatggacccggagcagacataaatacgcgtgcagaagaagatttcgcacatgctgactcacaaaggcacaggcgctctggagcacccatacctattaaacgccctcaccaagtgcaggatt

SEQ ID NO: 74394 - DNA, 116 bp, Glycine max
gaacattgggggggatataagcaatttacactcttttaaccaaattattcaccatgcttacatgcccttcagccagcagtgtttgaacattgtttgtttgttttctaatgacgaag

SEQ ID NO: 74395 - DNA, 439 bp, Glycine max
ctctagatgtctttgtcacacacccttctttgcagtaaatgacattttgatcctttagtgagtgtgaaagggattttcctagtcctactctcctctaagtagtgggagtttggttcagccttgacaggtcatttttctttaaacaaatcattgttaaacacctagagactttggttcagctttgacaaatcattgtgctttaaagaaattttatttgtagagattttgtgaagctgtaatttacccaaataaataagtattgagttaatttgttataggtgaatgatgttgataacctgcatgtttaagggaatacttgagaaatataaaaaaagttggaatcatgggtgataatgtttcctatcatattttttctctccatgtttctttgctattggagttggtatccaatattcctttaattggaagggccctcttg

SEQ ID NO: 74396 - DNA, 361 bp, Glycine max
ttatatttttttgcccaactcactatttagtggacggggttgttttgcttctgtaaactgtccaataacagaacctctaatgagtccacgctacagaaggacaaactgtgttgatatctaccaatcttattgatcaggttttagcccacaaggaaatgccaaatatgatcggcgggctaccagcaaattgtaagaccaccatactctgcaagcttatacttggagagatcgctaccacaaattccaccattgaggttaatgagaagacttgtgtgaaacaacaacattagcttcactgtatgcgaaggtcaaggccatgacaatattcgaaccttgtggaagaactacttttaaaaaacac

SEQ ID NO: 74397 - DNA, 272 bp, Glycine max
acgcggacgcgtgggctgacgcgtgggcttttaagtttaccaaaggggggtggtctgtggtggcggttggtttttctttcacctgaaaatggcttggtggggggggaactgtggttgcggaagctcctgcaagggcggcaacggattcggaggctgcgagaggttcccagacttgagctacactgtggtaaccaccacctatacctttgtcatgggagtggcacctgttaaaggtcaacttgagggtgctgtaatgggtgtgcccccttaga

SEQ ID NO: 74398 - DNA, 190 bp, Glycine max
  unsure (1)..(190): unsure at all n locations
agaaaacaacccaaaggggagangcnatagncaaagagtttaaacggggacgaaagcagggacagacccgaacgcggggggctcaaggagaaagccaacggaaccgccaataacaccgtgccaaggcccacacgaagcctgcaagagccgcccctaacagccacaatgtggaacacagggaggcaaagag

SEQ ID NO: 74399 - DNA, 337 bp, Glycine max
gaagaagacgtacggacccacaaacattttcattgtttcataactaatgttctaagctatgaagcacacggatatcggatgcgaatatctggatacgaatatgtggacatctgtcaaatacatcaaactcaattcggacacgaacgtcgatatcatgatattgtgtcggataccggatagagattggggtgtccgtgctttataggtctaagttaagtaaatcctactactttgctacaaagatcagggtgcacaaggtgagtttcaattttttttctttctctttcccactttacccctgcacactcgtctctctcaccagtcaccactgtgaaca

SEQ ID NO: 74400 - DNA, 416 bp, Glycine max
  unsure (1)..(416): unsure at all n locations
ggtncttttgataatatatgnaannacaaaagatgttatcataggtccattacatgccctaatatgaaatttatcantgcacatatnctagtctacacatggganctttgcatgtctaatgttggaacataagtttaatttttcagtaagaactccctcatcattgtttgaatgggtaaatgttttacttttttcccagttttgttaattaactgaatgtcttaaaaaaatagttaaaaccaaaattaattaaattctaattgattaaacacctaagccaattaagttttgataaaatgtttaatatacacaatcaaccactgcaaaaatataaaccattttcattgaaccaggaagggaaaaattactttcttgtcatcttgttaaaaaatttcaatggcaatgcaaactttttc

SEQ ID NO: 74401 - DNA, 402 bp, Glycine max
tttatattcctacaaaaatgtagaaatgtattgtatatgtaacccaattataactttcatttttagtcttacttttattctattatttttttaattttttttaaaaatattactaggaatattataatttaactgaactcatttttttaatgtactcaagaataatttttttttagttatagtattcccgagaatgtcattgctaaaaacgtagtcttataccttgaaataaagttaacttgtagtttaatgaaatttcaaggttaggctaactttcttttaaagtactcttgttttcaattttttaaaccagctttgaaacgaaaaagtagtttgatctattacgcctaacaatcaattctaaacaattgttaaagggaagatccgaaacgcatttcaatg

SEQ ID NO: 74402 - DNA, 177 bp, Glycine max
gggggtgacatacaaaaggaatgtaccctgctcttggtttagaggcttcttggtggactgcagatcttgggaaaaactatgacgggaaaaacgatgccctcataagatgggaggtctcataccattgatcacgggacggcgatgatacaacacatagacgggattccaccagaccag

SEQ ID NO: 74403 - DNA, 368 bp, Glycine max
  unsure (1)..(368): unsure at all n locations
ggagaagacgttttattttacgacatttttgcaanctttttaactngcgaggaatgcgggggtttgctatggaaacctattaattaaaccgacctacttagtatccatgaacagaggcagagaatagagtaagttagacatggctaattgctagaagctattgacaaaagttggagagagtgaaaccaattacccaatatcaaagggtagagatattggtgatttgaagtgctacacttgcactagagcgttctgctattttacaaacccttggtggacattaaacaaaccacataaaaaccaaaactcataggtacagatctttcgtgccatcaagagttaccgaacccaaccatgaaacaacaacc

SEQ ID NO: 74404 - DNA, 396 bp, Glycine max
taaccacttttatgcctggttaggttcaatactgctatactgaacaggagagctctactttagagcattgtggaagtatagttgattcgagattttgggtttgtgaagttagggtatttttttgtttgaaaagagtaaaaggtaaaaaatataattagaatgattcccaagagaatagtattttagacatgctctcctttatggagggaatggtcattcttcatttgatggaatgcacattctcattttaaaggtgctaccaatcattctatcctgtcatttttttagttcatttgtattacatacatttaatctccaagtaatttgcataatcacttttcttgaattggtatgtactacatacatactaaagtatgaagatctgtcttgttgact

SEQ ID NO: 74405 - DNA, 196 bp, Glycine max
acagcgctactttttagcactgaggaccttcactgctttgtgattcagcatttgctacgtacggggatgaatgtgttcaacaagacgtgcttggacaaagaacatagtcacatgatgttccaagagaatgggtcttgaacgaccatcttctttacggagggaacggtgattctagatcagcaggactgcacaactc

SEQ ID NO: 74406 - DNA, 113 bp, Glycine max
  unsure (1)..(113): unsure at all n locations
cacgccgtctcgtacggtctgctggaagaacgactataaggggtgactttttcttggcaccttatgangaaatcaaagagctttgggttctcggggggtagtatcggtcgcac

SEQ ID NO: 74407 - DNA, 227 bp, Glycine max
  unsure (1)..(227): unsure at all n locations
cacttnaattttatcaaattttttnattctctttgcgcagaggcctacctctgggttcaagatgcagatcttcgtcaagaccctcaccggaaagaccatcacccttgaggtggaaagctctgacaccatcgacaacgtcaaggccaagatccaagacaaggaaggaattcccccggatcagcaacgtctcatcttcgccggaaagcagctcgaggacggtcgtaccc

SEQ ID NO: 74408 - DNA, 423 bp, Glycine max
ggtgttcatttgggttctgcacataaaggtcctatgtatggggtaggtgctgcttcgagaaaggggcatgagaagccacgcatgaatcgtcgttgaaattcaagcaactgctattggtgatgaaatggaaagctgggattcttgttgggggaggactgagaagtaacgaaaaaccccatatatttattttgaataacaccggtaggttctttattatttcaaaatgtgaaattcgttgaagctcttattggactgaaaaaccattggtcactggtggatggatatattttacctggctgtgatggattgagataaacgcattaccatgcctttgttgggttggatcacattattgagattggaaatgaaagctttagcgtgaagcaactaaacaagggttgtttctaacttacaaatgttagt

SEQ ID NO: 74409 - DNA, 155 bp, Glycine max
gagacttcaggtcaggcggggctacccgctgagtttaagcgaaaaaaaaaaaaaaaaaaaaaaaaaaaaaggcggccgttttaaaggatcaaagttaacttacccttgcttgcaacgtaatagttttttaatagggtaacctaaattaaattaat

SEQ ID NO: 74410 - DNA, 123 bp, Glycine max
gagatttgattgactttttttcttcttctattctcacacatacccatctactccttccctcatggctgaacaatcttccaactccatttacgattcactgtcaggacatcagggaaagagtga

SEQ ID NO: 74411 - DNA, 258 bp, Glycine max
ggttctagtgtatgtgattgttgtgactcgttcttcttcgtcgttatcttcttcttttgttgtttgtgtgtttgttttttctctcacctgaaaatgtcttgctgcggtggtaactgtggttgcggaagcgcctgcaagtgcggcaacggctgcggaggctgcaagatgtacccagacttgagctacaccgagtcaaccaccaccgagaccttggtcatgggagtggcaccagttaaagctcaattcgagagtgctgaa

SEQ ID NO: 74412 - DNA, 183 bp, Glycine max
gatagtttcattatacaaagcgttgaattcaaaaactaggttcattaaatgtgctttgctttgttcctccaaacccaacatgttttacacatgccgcaactgtgacttctctgaccaaactaactcgcccaaagggaacaccttttgggttataccttaaactgggaaaagcttcatggatac

SEQ ID NO: 74413 - DNA, 268 bp, Glycine max
gcggacgcgtgggttataacgtttctctatttctttttattatactattttgtcaatgaaatcaatcatgtatttctttgtatctctctcaatgcataaatactcaaaagatgtccacgaatcatttttgaatgtgatatacctaggttagttcatccaacggtatgatacgacttagtctataacatgtcattgaacaaagtcctaaatgatgtcatctaatcatctactctctctaatacgaaatccatattttttattccataat

SEQ ID NO: 74414 - DNA, 296 bp, Glycine max
ggggggatagttttattttgtcagacaacccattccaactcgcgcgggctacagtaacttgggcactattgtgaacaaacaccattcgtaggcagagatgagaaggctcacacatgatgatcggaatttggttgaattctatgtttgggatgagcgcgagcgacaagatgatgatgcacaaggttgtcaggaacaaaggacaggcggtagaacacgcaccacgggcccacggattatgtttcgagctcacaatcgatctgatgctcaaattttgtccaacgactcccatattgatc

SEQ ID NO: 74415 - DNA, 377 bp, Glycine max
  unsure (1)..(377): unsure at all n locations
tattgggagaagctttctacagacgcgcaaagcgaggggaaagggcggcacacgtataaagagnctaaaaacatggtccaagacgccatgaggagatatgacggcatgcaacccgctaccgaaccactgaggaaccagaatatcaggtcatccgtgtagtgagacacaacatgactcagcggctatacaatagcaccaagcacaacatagtcaccgagcactaaaaacgagggataaatctgcgaacgacaacccagaggcccgacgggncagccagcagggcaagagagaaagccactttaaagcatcagcaaagaaattattcacagaacaaagctcatctgcacaaaaatggccacattgaggctgagtcatca

SEQ ID NO: 74416 - DNA, 300 bp, Glycine max
aggcgtgcgaacaggtgcgagaggacaacggataggggagtattcaggccggataagacgagcgacactttctacacataccgctggctcagggacgtactacgacctccttcatgattaattatgacgcagccattcaccgatcgcattcaaactcaacacagagcgagatgcttctctgttgatacgtaccaagctacaaactttgagatattatatctcagagtcgctcgcttagcatactgagtctggctcctagctacacgcccatctcatatgcgtgattgtgtcgtatcacga

SEQ ID NO: 74417 - DNA, 439 bp, Glycine max
ggcctgctagtgcgatacacatttcactcaagcttaggtgttgtgctccactctcgtcaccacagagaagaacttgaagttgaacttgctctgagctccgagaaaatgtgcatcggagtccgttgcttaacagtgctgggcgagttcaagccatttggcctcattgccgaagctctcgacggcaagccccccgacaccgtcaccgacaagtacgattactttctcttcgatcccgaaatcgctcgtgaccgtgacgccgatgacgattgcgacgacatcgcttctgcgccgagcaatcgtggggatcacgagctgttcatgcgaggcaatcggattatatggtcgacgggtgcgagagtatttaagagatttaccgtgtcatctgacatcgttaaaggttgagtttttgagttttcatgctttgaatatgaaataaatg

SEQ ID NO: 74418 - DNA, 339 bp, Glycine max
tgccttaacttacggggcggcttcctttctgaactctgaaaaaatccttgagctcaacttaagcctaccctctgtatacattaccatgggataacaccactaaaaactcctcctaatgtgtagccctttgggctcagtgtcaagactttcagggacagacccccgcacacctataccaaaaagaacggttaatttcttttatataccaaaaacgatcatctccgaaaaccctctcaacaattggactaactaatttttgtcccaagccattggctggaataccatcagattcttccctagtatcaaattttatcgacgcccggtgcggaacaatttaaa

SEQ ID NO: 74419 - DNA, 355 bp, Glycine max
gaagactacaaaagtttttccaacaaactccttatgagtcacaagccataggacggtcgagggagaatttgtgtgttattgagtgtcacctcgctgcatacaacacaagaaggacgaccaaaatcagcactggtttataaacctattgactgccacggagagaccttaccttagccatatgagacccacaagttcgatactcagggattgatatcatcacaatagctcctttcaagcatggcattgagtgataatatactgtcaacgtgaccgccatgtagcggatgcaattataaaagtcagactagcacatgtccttgatagaaaactaaaaccaaacataacgctctatatc

SEQ ID NO: 74420 - DNA, 416 bp, Glycine max
ggaagagtgaagagaatggctcccaagggtttaacctttctggctgtgttaatatgcgtttcagcactgtcactgagtccttctgttgcgggggaagggcaaaataatggccttgttatgaacttctacaaggaatcatgccctcaggctgaagacatcatcacagaacaagtcaagcttctctacaagcgccacaagaacactgctttctcctggctcaggaacatcttccatgactgtgctgttcagagttgtgatgcttcactgttgctggactccacaagaaggagcttgtctgagaaggaaacagatagaagctttgggttgagaaatttcaagtacattgagaccatcaaagaagctttggaaagagaatgccctggagttgtttcatgtgctgatatcctcgttctctc

SEQ ID NO: 74421 - DNA, 471 bp, Glycine max
cggatgtctattctgtccccttctatttcaccaaatctcacacctatccttctacttattaaataataatccactttacacactaggtttttttttagcattattattattactataatataacgtttgaaattgaggtcattcatttctattctctcttgttgattagatctcattttctaattccatgtcggttctgtcgtgattttgtttgttgaccatgccattaattaaaggttctatatagaatttagatattagattagattctcttccaccacttcagtgagctgtttctggtacggactttggaggccaagatactagtattttactattttaagcattatgatgtatgcatcttaccctccactagttaactattttcccacttatattatattttaagtatagttatagttaaagtagttaataacatgcattttagttaccttaaaaaaaacatacatt

SEQ ID NO: 74422 - DNA, 312 bp, Glycine max
gtatctattgtgtgatagtgtgcagacgcaactggctctgcttatattgtcgtcctgtgtggagtctagttttgtctctcacctgaaaacaaaatgcttcggtggtaacaaaactcccggaagctactcgcaatccttcaccagcagcggtggctgtgcgacaaaacgaaacttgacctactctaagtcaacattcaccagaaaccttgcccaagtgattagcaccttaccaggctaaacccaactcttctgaaataaacttgctcttatcgaacggaaccatttcaaaaaatcgctactgttccaagaacc

SEQ ID NO: 74423 - DNA, 78 bp, Glycine max
gagcgtattttaaatggaaagatatgaaagctactatcctggagtcaatgcctagacgaaatatacatacgttcacga

SEQ ID NO: 74424 - DNA, 314 bp, Glycine max
tcggaaagggcagatgtcggatgttattatcattcacaccacagagcgaaactacaaactcaggacgagaatgttcttttgagaatgcaacccgagctctacccatccacttttgcagatggggatttttcacgtaactggaggggtcatatacatagtttggagaacaggactatctgtgtgccacgcccaggaaagacaaaccatggtaagtagcacagttcaccactgtcttgatgtaatggaggttgacaatagtatataactcacactatgctctgtgttaacggtcagtgcaagaacacataaagcgt

SEQ ID NO: 74425 - DNA, 438 bp, Glycine max
agctacaacacagactagtgaggctcgtacacaattacactagcaatgaatggttattataaatactagtctaagtctttcggaatttactattccgcttatgaacatcatagtaagggttgggcagcttctattatcgaaaacccagacataagtgttctactttctaattaactccatagtcatgagcacttgcaacacactgcaagaatgcagccctgcaaagaggttaaaaatatattaatgatagttttatctaaattttaataaagagtgttagtatatgtcatcaattattatatataataattattatatgttaatatatatggaaggattactatcttcacacataagttatattatttaaatttataaaaatatattttatatccacacatgcttttatttgatattaatcttttaagaaaaataaaa

SEQ ID NO: 74426 - DNA, 353 bp, Glycine max
caccgattgggacgaagtttaggatcgaaatggaaatagacgggaatagaggggtaatcctaggaggtggcgttgcgggatccgtcgtcgctaaatctcttcaattccatgcccatgtcacactcgttgatccgtaatcaaaacattctctgcaattttttttttttatgtttgattattgaagcagtaatttttttgtttgaatttagctaattacccattttctgtatttaatccataaggttaatgggttgaagtttatgcactgtgttttttggttaatgcatagtgcgcattttatacccttgctaatttttggaacccttatcgcactcaatttttgaaatctttaa

SEQ ID NO: 74427 - DNA, 370 bp, Glycine max
tattggggttctagtgtgtgatcgtttggtgttgcgactggttcttcttcttttggtgttctgtgtttgtgtttgacttttctctcacctgaaaatgtcttgctgcggaggtaactgtggttgctgaagctcctgcaagtgcggcaaccgctgcggaggctgcaagatgtacccatacttgagctacactgggtcaaccaccaccgagaccttggtcataggagtggcacctgttaaggctcaatttgagggtgctgaaatgggtgtgcccgctgagaacgatagctgcaaatgtggaccaaactgctcctgcgacccctgcacttgcaagtgaggtgttgggagagcaagcttcaagcagagatagccc

SEQ ID NO: 74428 - DNA, 445 bp, Glycine max
tcttcttttcattttatatgccactttcgaatttgggttgggctgaatgctacattcacaaaggattgaagctcaactgaacgtaataacaattcaaacccgttgccttgtatctgcttggaaggtgggtcatggagagaaaggaaacgaggataatttttttagattatatattatgtttataaaaacaaacaaaaagttaggacattaaattcatgcctggccggagcataacacatacctttgtatactgctccaaaacctattggtgtctgtgagattatgttagatattattcctgatattgtatttattattagaatattctatttcctattaattaggaatggattgatctttgaatcaatattgcatttcttttccatattataaatagcatgaggtgtggtctacattgacacacaacattacacacgtaaacact

SEQ ID NO: 74429 - DNA, 493 bp, Glycine max
cgcgcgagcagccgccagggcgaccgacacgtgcatactgccgccacactaccacacattgctaaagaatttctctcacaaagtagacgtttgggttataaggcgaatgtgccaaaacagatcgccgaccatagcatgtgcttattgaagctccactgagcgctgaatctacttggtctgcttgagagatcgatcgtgttaacacacatgtaactgcagtaaatcaagtggaataatgatatcacacatgctcagaatataaacctgaccagatttataaattttttagttcacacacactctaatatatccgaccttgagcctttctcctgatcttgatgtgcgaatatacaaaaagctgctaacaactcagtctaatattatggctctgaaagatgaggctaagtatagggtgcctgactctataggaccggtatcatgaatatcaggagcgcagaacccataaatgtagtttacaatagcatggcctata

SEQ ID NO: 74430 - DNA, 411 bp, Glycine max
ccagtggtttcatttttcggaccatctagcaactgcgggtgagatttttgttgtgcttgggcaggtatcaacagattacatggagtggttctttcggatatctcatcccttcatcacacccacacaggcaggtgataagcctagacattcacctgccccacagcatgaggaatacatcgagctaggtatcccggaggttcaagtgggagaaggacgtggaccgtcaaaggcatctgatccccctagacacgttgtggtaagattagttgctttaatgttttataaaatgttatttattttaaaagttgtaataaatgtatatttatgaatgtcataagatgcttatgaaggttgtgaagcgatcggagaaatattggagcgggtgctcaacctaatgatggtcactgaaag

SEQ ID NO: 74431 - DNA, 445 bp, Glycine max
ttttactttgagatatgtcgcgggggtcaggagagcttggggacgtcaggtggggtgctattgcccaaaaccaagcttgaccaatctcgacccaacccggtcatagtcagtcagtgagaacctgtgatgtacctaaacaggcgagctcctggcagtcattcaataaaagaacaaagaccacaaagcaaggaggcttgtgtggtggttggccagctatggatcttgagtgatatctggaatttggcctctggtaatcgattatcaagggtgtgtaatcgattacaaggcttaaaaatggagacaggaagttaagatggcctctggtaatcgattaccaagaggtgtaatcgattacaaggcttaaaaatggagacagaatgttgatgtggcctttggtaatcgattaccaatgctgtgtaatcgattacacagagtaacagggcac

SEQ ID NO: 74432 - DNA, 430 bp, Glycine max
tctgagtttagttttaccattccaaattccaattccacagatcactattaaacggtaaaagcagggctgagaagcaccccactttgataggatgcttatttctcactgctttgatcaaatttcttttttccccctcatggatacactgtataaaactataacattaaacataacctatcctatttattttaaagagagaaaaaacacaaaccccataattatttttttttcaataaaagaaattaagaaaggatcatctaactctgacctggggttgtatgagcaagggaggtggtggctcatatggtccaggtccaggtggagttaactgaaccaaaagatctgtgaatccattggtattgccataaagcgcttcaagtggcagaaatttgatgtcttgttcgtactcatcctttttaactcctgaagt

SEQ ID NO: 74433 - DNA, 252 bp, Glycine max
  unsure (1)..(252): unsure at all n locations
gaaggtgcagaatccagccactggcggcctttactagaggatttgcgacaacancacaggcgggagccancagagaacgctaaacgcgaacaacaacgccggcaacaacaccaaaccaaatgcccgcgcgccaggcaggggcaccacgaccaaacaccgcaaagcataaaaagcgccgacccgacctagaacgaacccggcccctctacgaacagctaaccgacgacacagtcactgacaaacatagccaaa

SEQ ID NO: 74434 - DNA, 127 bp, Glycine max
ggtcaggaatgtgcaaaaaccatcacactgcggcctttactaatggaatgttaccacaccacacgcaagaggcatacacgatcacttttcactaatattactcccccaacacgactaaaccaaattc

SEQ ID NO: 74435 - DNA, 429 bp, Glycine max
  unsure (1)..(429): unsure at all n locations
tctaaggtttcttattctttctncaaattacctttcattgagctcagtgtcatgagttcacctaatgaataaataatgtaacctattacatatgcggaaaatgacatccataccatatcgaataaatgactaaaaataatttctccataaagtataacgactaaattaaataatatacagctatcagatacattttaacatttcatgtaaatatacagactaaaaatacatatttgactttcaattaatttacaatacttaagattctctttatgaaaattaaactcatagtcaattaaccacaatttatcatgtacaataaatttattaactcttccaataattattttaaaaattatataaataattatttgttatctgatgaaattatatgatgatgttactacataggcattaaacatatgattt

SEQ ID NO: 74436 - DNA, 353 bp, Glycine max
  unsure (1)..(353): unsure at all n locations
cgcgtccgcccacgcgttcggctgcgagtttctacagaaggtttttcaagagtttgttgngagctataagctagggtatcgttaggagaatatgaaggtgtttgttttctttgttgctgcagtagttttggtagcatggccatgccatggcgcaggctaccaaaggttccctctccgaatgaaaactggctatggtgagcgttcttcggaggtaaaatgcgcaagttttaggcttgctgtggaagcacacaacatccgagcctttaaaaccattcctgaagagtgcgttgaaccaacaaaggactacattaatggcgaacaatttagatcagactctaaaacagttaaccaac

SEQ ID NO: 74437 - DNA, 356 bp, Glycine max
ctagtagggccgccaggcccatcagtcaacgcggactatacatattgacattccattttcaaagcagcttaatgattaattattgaggcacatattgatggaatcagtattattttctcacttgcttaaactatatagatactatttctatttatataaatcatattttatttattatctataatattatataatattattatggaaatatatcattaataactttttaaatattatcgattatatttaatcatgtttaatgttttttaaaacagaattaaatctttattaaatattatttatactttttattttatttcgaaaattttaatctcttcttttcttgtaaatttttt

SEQ ID NO: 74438 - DNA, 430 bp, Glycine max
ccattcttgaatgttactatatatgttagttttagtttgtctatatgattcctgttggatttcctgatgagatgttcacagataaaaatatgatttataaaatataataacacttaatattttgcgctgctaacacgtctctatacacctataaattttttccttcttttcttttgtctgtatacagcaagtttgaaaagaagaagtcaaaattttcagcagcaaccacatgatgatcaaatctgcacaaattcattgaccatattatgcattccaacatcgttttagaaattttacagctaggagaatattatattaaaaaaattaatttaatataactcaacaattgttattttatttttttcatatcaataataaaattatttatcagaaatttataatcgaatatttttaacattttcttcttaat

SEQ ID NO: 74439 - DNA, 247 bp, Glycine max
ggcttcgcttgagcagacttaacaacagcacagagcgggttactgtctgttcaagctaccatctctctctctctttcttagtgcctccttgccagaagttaaaatggcccaagaaactttcctattcacatctgaatcagtgaacgaggggcaccctgacaagctctgtgaccagatctccgatgctgtgctcgatgcatgcttggagcaagaccctgacagcaaggttgcctgtgaaacctgcacc

SEQ ID NO: 74440 - DNA, 148 bp, Glycine max
  unsure (1)..(148): unsure at all n locations
acgggccgacccacgcgtcgccggcnttcnacattttcaagaagacatattttggccgacaggcccaacattcacgcgggtttacatattgacatgccatttccaaagcatcttaatgattaaatatttgatgcacatatatgattga

SEQ ID NO: 74441 - DNA, 182 bp, Glycine max
ggttccaaaaaaccaccaaagggttcattttcgagatgacaacacaaggggacctggggtacctctaattcgatatccaaaaaaaaaaaaaaagcgggcgctctagaggacccaagcttacgtacccgtacgttccacggcatacccatgctataccggcaccaaccatcaatccagagaca

SEQ ID NO: 74442 - DNA, 75 bp, Glycine max
  unsure (1)..(75): unsure at all n locations
gacttcagaagggtatgtactcctcanaaaaaaaaaaaaaaaaaaaaggaaggttataaaaaaaaaagagggccc

SEQ ID NO: 74443 - DNA, 266 bp, Glycine max
catttgcttgcgtctaaatcgcgatgaaggaagcggccgaactgagatgcaaacctttgttgtaaaactcttcagggcgaacatctaaacagcaagctttccactaacaaaccacttacactatggcattgatattacaagcatcgatgcataaagcgagaatatggaatcatatgctgtgctatattaaaacattgctgaaataccttaagactcaactgtgaccacaagcctacgatcgtgtgcattgctctcgaagctgataa

SEQ ID NO: 74444 - DNA, 310 bp, Glycine max
  unsure (1)..(310): unsure at all n locations
aaaaccggccggcccacgccgtccgncaggcagacgaaaagtgaatggctactttatatcttaaatgacctcaaatttatgcggggcggctaaagcatagacagtgtaaggacaaaaaagagggctctattcttccaaaccacgacataagcagcacgacaatgccactccaaccagatgtacactctcctaatgaacactgcctattgtgcccgtactcccgcagggaaacgcgcaaggtgcacgctatctgagaaagcacacaacatcatatggctatgagaccattcgctgagagtagcgtggaaca

SEQ ID NO: 74445 - DNA, 171 bp, Glycine max
gagtgcacaagtgagtttgttgatcgagataactagaaacagtgtgatgaaaatgaaggtccttgttttcttcgttgctacaattttggtagcatggcaatgccatgcgtacgatatgttctctctccgaatgaacactgcctattgtgcccgtactccggaggtgaaatg

SEQ ID NO: 74446 - DNA, 159 bp, Glycine max
  unsure (1)..(159): unsure at all n locations
cgggccgacccacgcgaccgcccattcctcccnacggtttcgataagactttataaggggagtgcacaagtgagttagttgatcgatttatctagaaacagggtgattaaaatgaatgtccttgttttcttctttgcttcaattttggtagcatggcaa

SEQ ID NO: 74447 - DNA, 399 bp, Glycine max
agatgacaacacaacggagggcgaaatataactgggcctaaataatggtcccacataacgtcaaatgggcaagtctggatgtgaagatcctcgcaggcctgaaaaagaggactagtatgttgcttctcaaagcaagaggctagatcttccactgaggactttctgtgctcatgagcgagatagattgcaatgcagctagcaaatcatttcaacagaaagcccgcttctgggagatgagtgaaaggcactgttctatccgaggccactgatatatgcatgtgtagatcaggatcaaggatcattgcactctgagtcactccacaagactcgggtcaaggcaagacatcattcaaggtcaactagacccttctctttaaccaaagatagcaagagatcatc

SEQ ID NO: 74448 - DNA, 306 bp, Glycine max
cttctgttcactggtcacaggaagcaccctggagagccagcatctaaaacgtgtcatcctatacatctctcttcttcacccttctgtttgattaacacttcaataagaggagaacgaacactccgtttaattaccaatggaattgaagaagcattttctttcatgccaactaggaattggatgctcataaggcgtattgattgaacagatatttactgtagtagacttacaaacgatagccaagcaagctattgtgttctctgtcaatgattcactagaatggaaggactctcccaaaaggctcat

SEQ ID NO: 74449 - DNA, 231 bp, Glycine max
gtttatacaaactctcatgctgttttccacgtgcaaactttaaatacactctgacagtctctgcacctaattaaaaaaaacttaactgacatataaacatagccatcgttatgtctacacaaccaatgctagttcggtttcctagtattaaagacttactgtatgacacatttaattgtcacaggtactaacacaatcctctgaattccacaaatctcacctagactgcaa

SEQ ID NO: 74450 - DNA, 88 bp, Glycine max
atgacaacacgacgggaggggaaagtaactgggcctaaatcagggcgacgtggagggggtaattataaaatgcaggtgtgcatatgga

SEQ ID NO: 74451 - DNA, 364 bp, Glycine max
agagaacaccacagaggggctggcactttgtcactgcaaagggaccccgaggtcggggaggaatggatggccacaaggaacctatgttactgactatgccaggtgcgaacacgactgaacgtgcaccaaccacaccatcacgaagaatctgtacatgatatgccacaaggacatcaagctagctctgaaccccctgaatgcagctaggctcagcaacatactaatcatctacggctaaagcacaaagtctgatctgcccaaaagagcgctaccaaatataatcaaactctagctcctgcctatgacctgaaaggaccaagtgtacatgtacttcagagatactactggggatatacttaatccc

SEQ ID NO: 74452 - DNA, 327 bp, Glycine max
atggcactgagatgggccctttaccatttaattcaatcttggactttgtgagcgaaatttatcaggtcagtttgaccaaattttttttttttgatcagcaaagataaaatatattaataaaagtaccagaggtactaaggttacaaggaaacataagccaacagtcaactggttcccaaatcagactatagtcagtctctataggaaccagaaactggatacaatacagaatgtaatttctactagtgaatctatctgtactaccccctctactaaatgaaggctgatggtaggtttgacgaccaatgattgaaggggatcgtgaaa

SEQ ID NO: 74453 - DNA, 310 bp, Glycine max
gggacctcttaggggttcagcaaacaccacatagaggggggtcttacactaacacacagcccatgacacaagttatgctcaacaactcatgagagctgaccactgcacgccggtcagacaaaaacttttctccatcgtcatcctaaatgaaatcacaggaatacattaaccgcatttgctaaaccaacaagaggacatggctcatcacaccactgaaccggaaatgaccaatctcaccatattggtactctcaacaacaatcgatcgtaaaagcacttccactaccactattgaatctatatactctacc

SEQ ID NO: 74454 - DNA, 188 bp, Glycine max
atgtagctgtcgtaacaggtgggagaaacatgcggcgtgttggagtgatcaaaaactctgtacatcattcaggtaactgtaacacagttcacgctcaagattccactggacatgaatttgcttctcacatgggcaatgtgttcactattggcaaaggcacaaagccatggatattacttgcccaaggg

SEQ ID NO: 74455 - DNA, 382 bp, Glycine max
tatgggtccactaataaagtttttcctgaaatgggaacacctcaaaacatccgtgttaaactcaatgttgttaatttgatgcagcaatcaaaatagttgacagtggtcttcccgtaatattagctcaaagatttcgattcacagccctaaatttaaaaatttagaagcaagggcttacaacattgatcatttggtatgaatggattttaaggaataacttcactcatgactaaggcctatcaaaaaagttcagcacaagttcaaaattaacagcacaaaagtagaattgtagttacgatataccccttaaagtattatctactcctttctcctatttgaagcaatattttcattgaaactaatggccccttgacaaatcttt

SEQ ID NO: 74456 - DNA, 406 bp, Glycine max
atgatttcaaaagctgccaaatggttatggtcgtggcagatcgaggaatagcagctatttctaacagtgattgtatacctataattgttaatatttaataaattatgataattaaaaccaaggcaatataataaaataaaattagaagtacacataaagttgaaccaattgagtttaaattctaaccattagccactagctcatggataagttgttgtaatagttaattccttcttgatttatacctccacttagctttccttcggtaaatatatagtttattaaaaaaaatagttaatgggaaattaacatccaactaggcaaaatttagttcaaattagacattgctttgtttgcaattaacttacttgggagaatccttgaccaataaatggaaaatctatat

SEQ ID NO: 74457 - DNA, 456 bp, Glycine max
cgcgtacgcccactcgtccgtactgtttctagaaacgttttaagggggttctagtgtgtgattgtttgtggttgtttctcaatcttcttcgtttgttgttctgtgtttgtgtttgttttttctctcacctgaaaatgtcttgctgcggtggtaactgtggttgcggaagctcctgcaagtgcggcaacggctgcggaggctgcaagatgtacccagacttgagctacactgagtcaaccaccaccgagaccttggtcatgggagtggcacctgttaaggctcaatttgagggtgctgaaatgggtgtgcccgctgagaacgatggctgcaaatgtggaccaaactgctcctgcaacccctgcacttgcaagtgaggtgttgggagagcaagcttcaagcagagatagcccttaattaggaataatgataaactattaatgtgtaacttaaaactta

SEQ ID NO: 74458 - DNA, 397 bp, Glycine max
gtaattgttaggtatggacaatccactaatatggatgacttatctcaccctaggttttgatatttacaaaagtataaattgttgataaactaataacttgatgttaagtgaacatgaccaacttagtaaaagggcctattcgttatctacaaatctcgttcgtgcttgaagtgaaaatggttgtgctaagatataatcagtgttcaacgcattgtaaaaccaatagtgtccactcattaggaaaattggtgtttacacactaagtgttttcgtcacttgcgttcaattggtataagtcacttactatctccttctacttttttatgtgatgtccaatcaagtacgaaaagctaatattagtcgcaaagagcagtgcacaatctctttgttttgaaat

SEQ ID NO: 74459 - DNA, 341 bp, Glycine max
gcgtgtctaactcacttgcctcagcttgatagagtatggtcacaagagtgaagtgcaatgggaaaaaaggtacactgtgctggcttcgcaacttgcttgttgtttagtgcccatgaccaactcctcaaacgggcacatggtactatgcaaaatccatggattacaccatgtgacaacctacaaaaatggcctatctatagggatgggatggacataaaatggcccatctattggcagctttcttgagtccaagtaatgtgctgaaacttaggagtttggatggcttgtgactcatgttttataattctatctttaggaaaagtgaatgttttattgatttg

SEQ ID NO: 74460 - DNA, 299 bp, Glycine max
gaagcagggcaccatcatacaaagcatggaatccaaaaacttacgtccacgtcaactgaacagactcattccgaaaccaaacatgggaacacacgcagaacagcgactgcgcgacagactgctgaccaaggaacagcatgggtattgaagacgagagagtacatcaaaccggtgcatggagttccagcgctgacatgagggaagtgcaagtgtggcactaactgcacttgcacggactgcacctgtggccattaaggaatatgtatgaaaatgtaaatgccatgtgtttggcaatacaa

SEQ ID NO: 74461 - DNA, 55 bp, Glycine max
  unsure (1)..(55): unsure at all n locations
taccgctagtnagaattcatacagaagggtgggcgccccaaaanacnacanaang

SEQ ID NO: 74462 - DNA, 454 bp, Glycine max
accactcctccagaatattacagaagggattgttacaagaagcatggttatcctcttgagcataaataccataagtctcaaagctcaaacatcaataaaatgaatatgttgaaagactgaaatgaagttgactccttaacaatataaggctctaatggccctactacagcaacaaggctcaagtcacaacaattcacatgtgaatcaaattagtacaataactggttccaacaatgcacacaaaggtaatgccttatccattacttgtattgtaagcaagacaggttctgatgaatggatcattgactcatgagccactgatcatgttataacttttccctaatttgttttcttcttgttagaaagaataaattccataatattgtaaaacttttccaattggtccacacaattcacttataactttattcctttctcaattcaatttttcttt

SEQ ID NO: 74463 - DNA, 228 bp, Glycine max
atgcttctctctccatcgcgaggggggctttcggattttcatgatatcctcaattcattcaccctcgtcacctgcaatagattctttcatgcaatcgagcattgaataacacaccattacaattcctctctcgatttgttttgcacgatcgctaatcacaagcgccctgtgaacacctgtggtatttacataacacttgcttttcaaaatgaaaacgctttgccacta

SEQ ID NO: 74464 - DNA, 303 bp, Glycine max
ggttttacactaaagatggatctcattcagagggggaaggttagaaccgctgtggtgtccgctctacaacatgcttgcaccgatgatatctcaacaaacgtcgccaccggctataggctagcttgagctgcacatacacaagcagctaacatcactctcaatcacgaactctttgaatgacattacttctatccctctcgaagatatgatgtttattcaatatcatccaccaagtatgtactatgcacattgcctaagatgcaaaaactttcaaaagaagtacgtgtagccattccaaatagc

SEQ ID NO: 74465 - DNA, 434 bp, Glycine max
  unsure (1)..(434): unsure at all n locations
cactgcttgcacgtacgggaataaaatagcttactaatgaatattaatataattttgttaataacttacatgaatacatgattgggaatatatttcttgatactattttgtaacacttgaaataattgcatgttaagatgaatataattcttttagcatagaataacattagtaggctataatataagttaaattttagtaaaataaagcaaaaaactaaaaattcttcaaacatgtcggtaaattaggctacatattgtttgttatgatgagcattttaaaccaatggtcattactcaataacaatgtatcanggaattaactaataaatttttcaactttctcccaagaaaaaatattcatctctcacatgtaatattttatgtatagggtctattttaataaatttactttgatattttatatcaatattt

SEQ ID NO: 74466 - DNA, 323 bp, Glycine max
gcagggaaaagagtgtcgtgtggtctgtagcatcaaaaccgtgctgtcaattcgaatttggtagacacactaatacttgttttctttcgatgctcatgatggcagaccaagctcaagtattgttctctttggagtctacagatcacgcgcctgtgaagcgcgttggcacgcacaacggaagctttcactgttacgaggtccatgactgcttcatgattagtgtcacgaacatatatagcagcgacgaaattggtggtttccgaaaccctgaagtggaggaggatcatgatgctgctcacgatgttgggggagtgtatgaccct

SEQ ID NO: 74467 - DNA, 397 bp, Glycine max
ggttctagtgtgtgattgtttgttgttgtaactcgttcttcttcttttgttgttctgtgtttgtgtttgttttttctctcacctgaaaatgtcttgctgcggtggtaactgtggttgcggaagctcctgcaagtgcggcaacggctgcggaggctgcaagatgtacccagacttgagctacactgagtcaaccaccaccgagaccttggtcatgggagtggcacctgttaaggctcaatttgagggtgctgaaatgggtgtgcccgctgagaacgatggctgcaaatgtggaccaaactgctcctgcaacccctgcacttgcaagtgaggtgttgggagagcaagcttcaagcaaagatagcccttaattaagaataatgataaactattaatgtgt

SEQ ID NO: 74468 - DNA, 340 bp, Glycine max
atatgtacgatggaatttcccatatggagagcaccagttcatccaatattataaaaaaggacagaaatcaatggtttgaagaccaaaatgagtgattcaagtggctcaactagagatgaaattaaagttgagccagtaataattaaatatatattttaatattatataattaacataaaaatatattacatgtttaaaaataatataaaatttcataatgcatagttgaataataacagttggtttgtacatctcatatataccagcttttatttatttatttataaagaaagagagaaattattcttttttttaaaattggttcacactggtttggtac

SEQ ID NO: 74469 - DNA, 434 bp, Glycine max
gatatataaagtgttcagcccaccctatctctatttttggtggattggtgacatgcaagccgaaacaagttaaataagttggtctagtatgtttcttcatccttaatactaataacatcctaatgcaaaagctcaatttaaatttttaactctctgttcgtctcttttaatcacatatgatttaagaatactcactaatttttactccaaatgtaaaaacttgagttttaacttacttttaaagggtacaccattttatctctctgttcacataagaactttcattttaacttaaaaatatttttttgacagttaaataaccttggtttttagttatttatataaacaatgtctaacagaatttactgatttgctccaatgatctttttaaatttcttaattttaagaagtaacttaagcaacttcaatggagt

SEQ ID NO: 74470 - DNA, 315 bp, Glycine max
  unsure (1)..(315): unsure at all n locations
tacgacagattggttttagcaaatttcttttatccctatnttttcttccggagtagtgggcatttactgcttctctntctctgcagcaactatgncctaacctctaagggtcttctttgacanttaccatctggcggtcaatcntgctggccgcatctgtgatggagcctctactgccgacgttcactccctcgcactcgtcgagtaacttcctgcgctgctttgcatccgtctatgaagggcgtagcggcggagcggctaagctcctttcactacaatgggctttgtcctttccaccgtgttgatcccgagttt

SEQ ID NO: 74471 - DNA, 433 bp, Glycine max
tagatttgaagcttttgaagggtttggctaaggcgcaacccgcgtggctcaaagccatggaacagtttatcccctaatttctgggcaccatctgcaacgtttcctcgatctgcagggaaaattccgaccatcactcttcctgaggatgtttatgtgaagaagttttataagaaatatccggaatctaaatcccatgacgccataaagtttcatgcttttaaccccctccgtctcgtgtatttggcttgagggttcttgaattgaaggagcagggcgttagtgaggagcaagcaatggctattgctgatatggagtatctcacagagaagaaggcaaagaagaaagatatacccgtttgaaagaaattgcacgtcttcaagaaagcgacttcctcaaaacccatattctagtgccatcaaggagatacaagctt

SEQ ID NO: 74472 - DNA, 409 bp, Glycine max
ccagtctttaggtgcctttgatattcttttctagttaaattaaagttttattttaataatcaacataataaaagttcattatcaaagtaaaactctagtttgcattcaagacaaacatacgttatcaaagttttgcattccgtttctacttagatgcatcatgtttgcaccaagttatgagaaattctctttcacgtattttaatactttttccattgaaatttgttttctatttctgaataaggagaggaactaactccgtataacttctttgccttttataatgtttccttcctcattttaattttaataaaatttcctcgtttctcttgtaggcttccattcattctatgcaccaaaatcatggtaacaaaattaaataaaaccaaagatcaatttatagatatga

SEQ ID NO: 74473 - DNA, 129 bp, Glycine max
gacatcaggtgaggcggggctacacgctgagtgttagcgtatcaataagcaaaaaaaaaaaaaaaaaaaagcggacgatgcggacgatctaaaagaaccaagcttaccttcgcatgcatgcgacgttat

SEQ ID NO: 74474 - DNA, 436 bp, Glycine max
  unsure (1)..(436): unsure at all n locations
cccacgcgtccggaagacgtcagattggaatttttgatcatcttgngcataaaagtcactgtcgggatttcctatttttattttgaaaatgttacgcttaaatgaaatttactggttcctgggttaaatgtttacttattgccatcagttacgtgcattgggtaaaatggtgtggtgataatttagttttagtaggggttataaggttggcttggtggtgaggggggagagattgtgggttcgaatcccccactaacaaaaaactaacaattacttttaagcctgtttgagtaagcccatctatcaattgttgtcggttactttttcctatttttttaatttcttttaaactgctttttttatcttttatgcctgtttgattaagcccaccttttgctctctttttcctattgtatttggagggggaggtcgtggg

SEQ ID NO: 74475 - DNA, 305 bp, Glycine max
  unsure (1)..(305): unsure at all n locations
gtccgaatcgagcggccgcttttttttgtatcttgtttttttatttttggcctcttcatttatctgtagattttcagtggganagccccactatattgacacaagtccctttccccttcagagacactctagaggcttactcacacgcaagggtgcttcatgccctggccataagacgccggctggcatacgctccggggataccagcaagggcagatccgttaattgttagtagatgggactcaactaatgaggatgaactattaccctccatgccctgaaccagataaggaccttgtgcctac

SEQ ID NO: 74476 - DNA, 375 bp, Glycine max
  unsure (1)..(375): unsure at all n locations
ggatcaagagtgcttcatcaaggtaatgcatcaatacactgatgcatggtgttgaccattacaactctcaatgtgtgcttcttgactatgtagacatgtttatcttcacttgtagtcaaaccattgcatcttctaatgattcttaagtcatgtgcagcttccaatatctgccccttgacttaaactacctccaaaatgatacttctagtcatatacaacttctaatatatgcactttgacatagaaaacatgactgcccttcttcttttggtttcttgcttctaaagttggaacaagcttcagggttgggaaaccaagtctgtcggaaaaaagcttaacacctgntctctatgtttcttgataagtcacaatttt

SEQ ID NO: 74477 - DNA, 344 bp, Glycine max
gatctgtcagcagaagaacaagtagttgagaactaagaaggagaagcaaatggcttcctcaatgatctcttccccagctgttaccactgtcaaccgtgccggtgccggcatggttgctccattcactggcctcaagtccatggctggcttccccaccaggaagaccaacaatgacattacctccattgctagcaacggtggaagagtgcaatgcatgcaggtgtggccaccagttggcaagaagaagtttgagactctttcctacctgccagaccttgatgatgcacaattggcaaaggaagtagaataccttcttaggaagggatggattccttgcttggaat

SEQ ID NO: 74478 - DNA, 441 bp, Glycine max
  unsure (1)..(441): unsure at all n locations
tggtgcaactttctggagcttatataacaaaccggaataggggcccaataagaaagaagagtcatcacaaggaaaaaggggaaagaaaagatgccttgcctttacatctccaccaacataaacttagatggagttaacatcgatccaatcttttctcaagccaccactgcagtttccacaatcatcggcaagccagagaaggtatgccactctattctcttttctctctaatcatcttttttccaatcatagcttatgaaatttggtctcaattctcaagacgtgtgaaaaattcgcttttggggtattcttattcttattctttngttggtctattgtaaatttgatgcatatctgttaatggttcaactgtttgatttttatatactcccccaacaactcaatctactgcaaaaaggaatttgaattctatattgtaaa

SEQ ID NO: 74479 - DNA, 256 bp, Glycine max
  unsure (1)..(256): unsure at all n locations
ggtacttttgtgcttttgtttgcngctgcaactcgacggtcttctggtgctgttctgagtttgcgtttgttttttctctcacctgaaaatgtcttgctgcggtggtaactgtggttgcggaagctcctgcaagtgctgcaacggctgcggaggctgcaagatgtacccagacttgagctacactgagtcaaccaccaccgagaccttggtcatgggagtggcacctgttaaaggctcaatttgagggtgctgaaat

SEQ ID NO: 74480 - DNA, 354 bp, Glycine max
tgaaggttcaagagtttgttgtgagctataagctagtttatcgtgaggagaatatgaagttgtttgttttctttgttgctgcagtagttttggtagcatggccatgccatggcgcaggctaccaaaggttccctctccgaatgaaaactggctatggtgagcgttcttcggaggtaaaatgcgcaagttttacgcttgctgtggaagcacacaacatccgagcctttaaaaccattcctgaagagtgcgttgaaccaacaaaggactacattaatggcgaacaatttagatcagactctaaaacaatttaaccaacaagctctcttttatgctagtgaacgcgaagtccatcac

SEQ ID NO: 74481 - DNA, 432 bp, Glycine max
gaaggttcaagagtttgttgtgagctataagctagtttatcgtgaggagaatatgaagttgtttgttttctttgttgctgcagtagttttggtagcatggccatgccatggcgcaggctaccaaaggttccctctccgaatgaaaactggctatggtgagcgttcttcggaggtaaaatgcgcaagttttaggcttgctgtggaagcacacaacatccgagcctttaaaaccattcctgaagagtgcgttgaaccaacaaaggactacattaatggcgaacaatttagatcagactctaaaacagttaaccaacaagctttcttttatgctagtgaacgcgaagtccatcacaacgacatatttatattcggcatagataacaccgtactctctaatatcccatactatgaaaaacatggatatggggtgga

SEQ ID NO: 74482 - DNA, 224 bp, Glycine max
cccaaacactacacaaggggacttttgtcagtgttggtataacagcaacaggcggggtacgtcggtgaaaaatttctgatgaacttgcaccacacttgaatggccacacgtctatactgaattgcacacagaccaagtaccggcactgcacattatcagcctcattttacaatactcttctgcattaagctttcataaaaatgatctgtttcattttttgctat

SEQ ID NO: 74483 - DNA, 345 bp, Glycine max
ttgtagacctttttttgcttatatttctggtttgagaacttagacaagtctagctagaatgtataaaaatgttcgatttcatgagttacggaatgacaaaatcagattcttggtgttgattattggggaagcattgggaacatttggggtgtgtgatacaaagactaaacatactttaaggattttgagagtattgtggaatgtggacaaagtagaggctcaaagaatggaggaaatatttgtgcaccctgctggaaggatgaccctcattaattctatcccttcttaccacaagtcttttgatcttctttccaagagaataagtgactttacttgatagaagtg

SEQ ID NO: 74484 - DNA, 229 bp, Glycine max
  unsure (1)..(229): unsure at all n locations
cggnccggaangaccgagtcgaccgacccgttgtnagaacagttcttagaggactacttttggggtttgtctatcaggaaccaacgggtgggaatgggcggggcttgtgctgttcggtgtcccagactttaaagctccaaaccttactattcaaatgattcctatccagatacttccttcctggataacagaatgcagcttcacagaaagcatgctgtgatgcttttct

SEQ ID NO: 74485 - DNA, 341 bp, Glycine max
  unsure (1)..(341): unsure at all n locations
gacgactgatttgtatacatgacatgctttgnctgagaagctgtttcatgggtcgtggtgcaatcatatgatctcagatgtacaagtttttggcaaattaccagctagcgctgaccagtgcagcaacttgatgatttgagattcttttcaatgacagttaatgattgcatgcgtgcacatccacactgacattaaaagcatgatcttctaatcttgttccattgatttgcacaaactaacctgtctaatttatatgttgcagatgatntttcattactctacatctatgttaatttgacaatgctacctatcaactggtggtttaaaagagagttattttt

SEQ ID NO: 74486 - DNA, 206 bp, Glycine max
tagtgacaacaaagacaaaaataacagacaactactttacaaggacattattcacgctatatgctaaaatgctacagaaaatggaaaattgccgcaaaaatttttaagaaattccaaaacaccatagtaaatgtcaaaaaaacattttgattcttgtaattttggtgatttaaagcatgaatagaaatatcaaagtgataatataa

SEQ ID NO: 74487 - DNA, 170 bp, Glycine max
cttttttggggttcctctctgcaacgtagggttgggcagattataagctctctctctctttgcttttcgtcattcaaatccaatccaatatcaaatatgagtcgtcatcccgaggttaagtgggctcagagacttgacaaggtctatatcacggtgcaattggctgattc

SEQ ID NO: 74488 - DNA, 406 bp, Glycine max
gataccaaaaacaaaacacaagccaagtgaaagtgagaaaaaataaaaatcaaagagcataatgtcagggatcattcacaagattggggagacccttcatgtgggagggcacaagaaggaggaggagcataagggtgagcaccatgctggagaatacaaaggggagcaccatggtgaacacagtagtgagtacaaaggagagcatcatggtgaacacaaagctggagagtaccatggtgagcacaagccagagcacaaagaggggttcctagacaaagtcaaggacaagatccatggtgagggcggcgccgccgagggcgagaagaagaagaaggagaagaagaagaaggagcatggccatgaacatggccatgacagcagcagcagcagtgacagtgattaaact

SEQ ID NO: 74489 - DNA, 432 bp, Glycine max
agaaggggagggttagatggatgagcttgcttgtaggactttggaacgtcggggttgccctcatgggcgccttcctcatcttgctcactttccgcctctgtcatgcctccttcttgcttcccttcgtcctggtttccttcgccgctttgcttagggttctgctcatgattcttaccgcttccgcccaacaagccgctgccaccctcatccttcaacactcctcctccgatctccttatacgcctccgccgaaggctttagctttacttcaaagccatggaaactctaccgaatcctatgaagaatccatggaagcaccagagatgaaaattagggaggctgaagctcttcataaatttgctgaagctgcgtacacgggtccattgcttgatgttggacgaaatccatttgtatttccttgtgcatggctgta

SEQ ID NO: 74490 - DNA, 383 bp, Glycine max
  unsure (1)..(383): unsure at all n locations
cggaattcccccgggtcggacccacgccgtnccgtacgggctggcgaaaaagaacaacaagaagggggggttagggtttttttctttagaatttggagtgggagaaagtgccatgcggattaagaaaatttatttcaattaggggtttttggttttacctttcctgggctggtttggagaaacccttaactagnnngtttttagaatgtnntggataattggttttaagaattccggggctttttgttggagggagaaggaaggggaaaaaaagggggaagaatggtaatgaactnnngatgatttaatnnttgtgaaatttgtcaatggtgaagaannatttgtacccgatttgagggctgnngaattgggtttcaagaaag

SEQ ID NO: 74491 - DNA, 387 bp, Glycine max
  unsure (1)..(387): unsure at all n locations
gggttttcgatcacgagataatttatgtaggttgggaccgggttaatgaaannaactagggtcangnnaattaattgactnnntggatatttgnnatgctttnncaaatgtgtnnttgactgggttgaggtaccgaagaaccannatgaattnncttggatcacangnntctcagttctttacccttccaaacacactttnngcggaaatgaagaacagcagnnaatgaaagcactnnngcttttggtacccagttggacccggcaagctctttgatggatctacannaatagcaaccaccaaanattgggtggcttactttgcnagctaccaagacacaaaagtggctggtggtgcgatctatgcctttgctcaatgtgttgaaac

SEQ ID NO: 74492 - DNA, 131 bp, Glycine max
  unsure (1)..(131): unsure at all n locations
ttgggttgatgatcgnttatgataaatcaaggattaggtgtttattgagtgattaaaactgcctgaaagcaagttaaatgtttatttgctgtgaattgagtctgaaattacattttacaggtacaaatttt

SEQ ID NO: 74493 - DNA, 52 bp, Glycine max
  unsure (1)..(52): unsure at all n locations
gagacctcaggtcaggcggngctacccgctgagtttaagcatncnananaaa

SEQ ID NO: 74494 - DNA, 242 bp, Glycine max
aaacctattagttagggcaccatttcgacttttattgtcgatgaaaatatacgcctgcattcctgaaaatttaaagaacatgccacttggcattgacaaaccttgtctaggctagggctagtttgtgctggaccagtctgatgggtgaatggttattgtgttgttgaaagttttctgtgactggtttccttttttgggtggttaagctgattggaccaagctgttgattggtcatgtatata

SEQ ID NO: 74495 - DNA, 430 bp, Glycine max
atctgagacctcccttctgctcttcatttagacctagtcctcactttgagcccagtcaaatgtcaccttgaactaggattttagacctaatgtttcttatctaggcttcagtcttaaatcttgcagattcacaaccaaaatgagcaccaacacgaacatccattcttgtcactatttcaaaattaccactgcattcacatgtgatctttagtaatatttttttaacacttaataaaaatgttgctaaaatcttttggcaccatttaaaactatcgttaaatataaataaatgttattaatatatttttgtgacattttatcaaattgcgaaaacatattagtgacatttgtttatatttgatgtcattttttaaatgttaggttaaattactcatttggttcttatagttttacgattcttacctttttg

SEQ ID NO: 74496 - DNA, 430 bp, Glycine max
gtttcttttctcacatattcaaaacttcaagtctaactggtagcgtttagcactattgcaataattcctgagctgcagtgagtcaaaactcaaaagggcttcagtgaatcatgatttagatgaatctccaatttgtaggtatattactactgttttgattactgatttggtaattgcttctctacttaaatcagatgggaacacattagctactgcagcagcacaattgaagatttttaactgttctaatcacaaaaagattcaaaagttctctggtcatcctggatctgttcgatgcatgcttttcactgaagatgggaagtatgtcctctcgtctgctgttggagaaagatatgttgctgtttggaggatagatggtgctaaaaagcagtcagctagttgtgttcttgcgatggagcaccctgctgtc

SEQ ID NO: 74497 - DNA, 142 bp, Glycine max
  unsure (1)..(142): unsure at all n locations
gatcggcanggtctctcctttctttaaatcccaatattttctgggccgattttggctggaaccggttggtggtattcctaaaaatctaagatttccattcgtttgttgaccgatttttaggggtgataattacgtttttttt

SEQ ID NO: 74498 - DNA, 96 bp, Glycine max
ggatccatgggcatatgctagggttgtccttcttctcctccacacaccgagagggctggctggtcagaaatgagaatggcttcagcattgtccctg

SEQ ID NO: 74499 - DNA, 418 bp, Glycine max
ttaatgttactctgaatcttaaggaacaaccggataaactattgagattttttgtgctgcttaatttgcaatgataattatacttttctgccttctggagtaatctacttgtttattactggggcctaacccaagaaaagacacttcactttaggcctaggctaaataatagtttttggtgggaactttgacagagactaaattttgcaaaataagcttaacttgaaagtggttacaactatttctacagtttcatgctgcttattttaatcaaatatttcccattagcaggctaattcaattataccaattaccaagcaaagataggttagtatcatgaaattatgaattgtaacaactgctctttcttgtcaattagttgtctgttgtaggattagatgtggaaatgctggttttt

SEQ ID NO: 74500 - DNA, 393 bp, Glycine max
  unsure (1)..(393): unsure at all n locations
ctttcgtacgataagacnacagaatggcatttatgatcttaagaaannaatcaagcaagtggggccggaaggtatcccccctgtgggagtccactaatcacaaacggtaagacgattgtttttccgccaaccggctcggtttgagtattcagatactgttataaaatatgaaataaatgatcttatcaccaactaataactgttgaatgtgttagttcaatctaactactggaaaaaatatggaccaatataaattctagctttctttactaaatattttgaagactatgtcagtgttactttttttaacaacttgatgtcatgtttaatattttgtttttttttatatttaacctttatatgatactgcgtgttttattctcataataaaat

SEQ ID NO: 74501 - DNA, 412 bp, Glycine max
gagattcgcctggttgagaaatgtgtccagatgttcatctagattagtggttccattgttctgatctaggttgagtggtttccaacctagggatatgtcagcttccatgatatgatcgacaaagggacgttgataggtagtctgctcttcttggtggtgtatgtgtgacagaatgggatcatcttgggtgttaacagtttgtcaggggtgtgattccccttgagtgcactcatgcattgtgtgggcggaatgctcgttgccctgggggcattgtacatgagcctccaactagtcgtggttagccttcatatttttaagcttctcttcatggtgtcgctccatctctacaatgcgggtttgaacttgttggagaataccaatatatgtcatggttgttgggggcgaaaggggt

SEQ ID NO: 74502 - DNA, 431 bp, Glycine max
gaagctatgaaaggcgcctatgataggcagataaagcaaagaggctacatcatcaagggtgatggtcacttctcttacaggaagatgaaaactcctagtttccttatgtcatctctctgcaaaagcctatataagtctctgatagccagtgtccaatgaacatgcgataagaaaacttaatcttgtggtagtaactaagcctttaatctctacatcaagctcccgaatttctgaactttccttccatgggaagataacttcaattcaggatggtcctaaaaaaatgaatttaataattttaacaataataacaaatacttattgaaatataacttatttaaaaatacaaatacctcttcattatagacaatgactgcaacatgatcaacatagccaatcagaattgacgtgtcatgcggtccgctgggaaa

SEQ ID NO: 74503 - DNA, 476 bp, Glycine max
ccgggccgaccccacccgtccgcggcctcttggccaaaattacgacagaaggttagatttatgcgagcaagagcctttcacaggttggggccaaaaggcactggagatatgcttatcctcttcctagaggaaagaagtgatggggctcctcctctacttgatagttatagggatgcgaagagtaggattataccttttcttggtaaatggaaaggtcattccatcacaaaacgaagtggtgtgtatggatctacaattgctaatgctgatactgttgtgttgcacgatatggatgacaatggccaacttatgcaggatgttacttcaagttcaacttttgatggggaaaatgttactaccaatgtgcattggactggcacagtatcagactatttggttacatttgatggaggttatcagatgatactattacccggtggcatgtacatggggtgcccttgtgatgtagcaaaaag

SEQ ID NO: 74504 - DNA, 421 bp, Glycine max
gttttagtgtgtgattgtttgttgttgtaactcggtcttcttcttttgttgttctgtgtttgtgtttgttttttctctcacctgaaaatgtcttgctgcggtggtaactgtggttgcggaagctcctgcaagtgcggcaacggctgcggaggctgcaagatgtacccagacttgagctacactgagtcaaccaccaccgagaccttggtcatgggagtggcacctgttaaggctcaatttgagggtgctgaaatgggtgtgcccgctgagaacgatggctgcaaatgtggaccaaactgctcctgcaacccctgcacttgcaagtgaggtgttgggagagcaagcttcaagcagagatagcccttaattaggaataatgataaactattaatgtgtagctaaaaacttatgtattatgtct

SEQ ID NO: 74505 - DNA, 425 bp, Glycine max
  unsure (1)..(425): unsure at all n locations
tggggttctagtgtgtgattgtttgttgttgggactggttcttcttcttttgttgttctgtgtttgtgtttgttttttctctcacctgaaaatgtcttgctgcggtggtaactgtggttgcggaagctcctgcaagtgcggcaacggctgcggaggctgcaagatgtacccagacttgagctacactgagtcaaccaccaccgagaccttggtcatgggagtggcacctgttaaggctcaatttgagggtgctgaaatgggtgtgcccgctgagaacgatggctgcaaatgtggaccaaactgctcctgcaacccctgcacttgcaagtgaagtgttgggagagcaagcttcaagcagagatagcccttaattaggaataatgataaactattaatgtgtagctaanaacttatgtattatgtct

SEQ ID NO: 74506 - DNA, 420 bp, Glycine max
cgctcttgtgattaaactcgtcgggtccgcttaggggttcccatcgcaatactcgtcacgcattaactcgtcgcccttaaagggtcttatagtcgtgtgattgtgctacaattcatagctcacaactcaatgcacacaacatctcaatgcacatatatattacaagtcaatactgttagaccctaatttcgtccgggaactattattcactgatgttttgattctcactaattgaaaggtgttgttgacaccagtttctacacaaggcgtgagatcgttcgatgttttggtcaaggatgcgaaaaatacctaaggggaggggaaaaatttcattttaggcaattttctggaccctggctcgcctggccccacaaattgcttagggctgaaagaaccaactcacctgggcgagccagtttc

SEQ ID NO: 74507 - DNA, 422 bp, Glycine max
  unsure (1)..(422): unsure at all n locations
gcataacattgttttggccactatttttggtttgtcatattctttatttagttaaaaacaaatttatactatttttatgaatttcccttacctaagtgacaagctttgtacgtatttttctttttcttaagaaacacacagaacaaacatattaagaaatttttttctctcatcctccgtttattctttttacagttggaccacatgtcaaagcacacaaagggcttttgtgaataattgttaattaggaccgtgttgttcaagggagggcttgtcgaaaggacaagattactgctatctatttcaacattagcaatcaatgattttttggacaaatatcaagcaaattgagaacaaaattgttcaataaaagaggactnntaatcctttttagtcttcattatttgtggcactatgcgttg

SEQ ID NO: 74508 - DNA, 406 bp, Glycine max
  unsure (1)..(406): unsure at all n locations
cacactcnngatttgactcggtgtttatttcagaagacgacagaaggctnttgtgtgctgcaatacattatagactgtggttatctttgagcatgaaacatggtaaccttgttatatatttttgctcttgcataaatattttggggataatttcttgatgttggttggatatgttgtccagtgttatatgttctatttaacattctatgtaactatggaaagaatttgactttaaaaataaattgttttatagaaattgatcggaaattgaatttccttattctttcatttgactcttactttacctttatttgtcattcacattgttatttttttaaccaaatttttattcttgaacaatatttctatacacttattacttacaattaacaaactttttactctt

SEQ ID NO: 74509 - DNA, 421 bp, Glycine max
gaatgtgcatgagtttgttgtgagctataagctagtttatcgtgaggagaatatgaagttgtttgttttctttgttgctgcagtagttttggtagcatggccatgccatggcgcaggctaccaaaggttccctctccgaatgaaaactggctatggtgagcgttcttcggaggtaaaatgcgcaagttttaggcttgctgtggaagcacacaacatccgagcctttaaaaccattcctgaagagtgcgttgaaccaacaaaggactacattaatggcgaacaatttagatcagactctaaaacagttaaccaacaagctttcttttatgctagtgaacgcgaaatccatcacaacgacatatttatattcggcatagattacaccgtactctctaatatcccatactatgaaaaacatgga

SEQ ID NO: 74510 - DNA, 425 bp, Glycine max
tcattaattgttttgtgtactttcactataatttcggttactttcagttttcttttcttccgtttttaacgtgctttagtcatttacttaagtcattttctcgcctaatcaaaaaaataaaataaatttccaccgatcatttgaattgtaacatccattaatttctgttaaaatgaaattcgaccgttcggtcttgccgtaaccacgttggaaaccaaaaagaggtaaaataataatataataatcaaaaatatcttttagtaaaataaatcaaaaaaatcaatcggacgtttttctttgggatttctctttcttaaatcgaatcgactaataaccaaagtgaaactaaggctaaaatcaattcataaaccaaacttttgtcatcgcctaaaaaagccattttcaaaggtccaacgccttgaaat

SEQ ID NO: 74511 - DNA, 463 bp, Glycine max
gccgtcggaccggttgcaaaagaactcaaatgggggattttattgcaataaggttagaaatgggatagggtttgggaaggttgaaaatgagatgagaaaagttgtgaattggatacgatagtttttgtggtattttaccgagatctaaaagaaagaacgaaaaatgcaggatatataagctgacaaaaaaaaaaccctgtaatgtgaaagtattagaaattcaagaagacaaacaaaatgtagcttactatagtagaattcaatttggagtggtaaaagaaacccttaagttcgaggtttataagacatgtgtgatggagtatgtattaatttgagaattctaagcgcaaacaataaagacttttctacaagggtatatatttttgtgttacttagggctgaaccatagatagtattagatatgtttccttgggatataaaaaaaatctataaatgcatgctt

SEQ ID NO: 74512 - DNA, 62 bp, Glycine max
  unsure (1)..(62): unsure at all n locations
tgtgagatctcaggncaggcggggctacccgcggagtgtaagcatatcaaaaaaaaaaaaga

SEQ ID NO: 74513 - DNA, 419 bp, Glycine max
  unsure (1)..(419): unsure at all n locations
aagtatttgaagcanatgagtgatttataattttacgattttgttcataattattttagccaagtgtggattgtttttaattttttttaaactatactaatttactaatttgtttttattttgcttttttattatttttatgtgtctcatctcttgttaggaggctagtttttggttcttgtgtttgaaactaagtacccaattttctgagatgagaaaaaagaccaaaaactttttttttttatcagcaaagactaaaaaactttgatataaaataaatgcatttattgttatgattctattctcttaacccgaagtgttgaaatcttttataattttccccccattgtatagctaagtttcngtaggtggtggttttgtgacatatgtttggtagtgaaaattaaatattcgcatgg

SEQ ID NO: 74514 - DNA, 292 bp, Glycine max
aaaaaaattaattaataattttttatttaaaattaaatttattttttttttaataattataaattttttttttttataattttttttttttattttttttttttttttatttttaaaattattttttttttatttatttttttattttattttattattttttttttattaattatttttaatttttaatttttcaattctatattttattaattttttaaattttttatttttttaaattttttttattttattatattttttacttttttttaaatttataattttttta

SEQ ID NO: 74515 - DNA, 456 bp, Glycine max
  unsure (1)..(456): unsure at all n locations
cgggccgacccacgcgtccnacttctctatagactacagaatggttttctcaaaaacagagaagagaggggggtaggttatttttgtagaatttaaaagacgatctcacataagacattatttatttgaatttattacacaaatattatatatataataagttgttgattttcataataaacatcttgtaaaataatttttaattgattgataatgtaaaaaatactaataatatatgtcaagggatctaattcattagttgagaaaatacattagttatgttgttttttattcttataatatcaaattttaggtttgaatatttttacttattttttatataattagaagagaaatgaaataaaaaagacataaaataaattatgaaataatgttacaaagacaggataattaacgcgagaataaataattaagtattgtaaactattttgaatt

SEQ ID NO: 74516 - DNA, 104 bp, Glycine max
  unsure (1)..(104): unsure at all n locations
ttcaccggattggcannaccatgtcgagnngagaaagggttagagaagccaannaggaggannaaacgtgactttctgggcncnncagctgttaagaagaatgg

SEQ ID NO: 74517 - DNA, 374 bp, Glycine max
cagaggggggtgttagtatttaattgtttgttgtccaaactcgttcttcttcttttgttgttctgtgtttgtgtttgttttttctctcacctgaaaatgtcttgctgcggtggtaactgtggttgcggaagctcctgcaagtgcggcaactgctgcggaggctgcaagatgtacccagacttgagctacactgagtcaaccaccaccgagaccttggtcatgggagtggcacctgttaaggctcaatttgagggtgctgaaatgggtgtgcccgctgagaacgatggctgcaaatgtggaccaaactgctcctgcaacccctgcacttgcaagtgaggtgttgggagagcaagcttcaagcatagatagccctt

SEQ ID NO: 74518 - DNA, 421 bp, Glycine max
  unsure (1)..(421): unsure at all n locations
tttttattttgcaagagtttgntgngagctatgagctggtttattttgaggagaatatgaacttgtttgttttctttgttgctgcagtagttttggtagcatggccatgccatggcgcaggctaccaaaggttccctctccgaatgaaaactggctatggtgagcgttcttcggaggtaaaatgcgcaagttttaggcttgctgtggaagcacacaacatccgagcctttaaaaccattcctgaagagtgcgttgaaccaacaaaggactacattaatggcgaacaatttagatcagactctaaaacagttaaccaacaagctttcttttatgctagtgaacgcgaagtccatcacaacgacatatttatattcggcataaataacaccgtactctctaatatcccatactatgaaaaaca

SEQ ID NO: 74519 - DNA, 477 bp, Glycine max
  unsure (1)..(477): unsure at all n locations
gaattcccgggntcggacccacgcccgtccgtaccggcnttgcgagaagaacgatcagaagggggagagtannnagttggtgnnnaagttggattatttgtggtgagtattgagagannngtttcgtnnttaataccatnnngcattcnnaattatnnntaaacccttatanntgttttgggttnnntttttctttcnnttctggannaataagaaatgttttcattttcgtcgannaaattaatangcnttttannatttnntttagagnnngagagaaattatangnnaaataannnattttatttatttctttcnnaataannatatgtntnntggttttgggttttnntttttttaannaaaaaatattattattnnttattccggtggcttattaagttaccaagtaatttaatttgaaggttnnaccatttaccaaccgtgttgtaagtcgtaaaagcatgattaaagcga

SEQ ID NO: 74520 - DNA, 320 bp, Glycine max
tttcaaaactaaacaaatactaaaaccatataagatcgagttcttcatacccttatatttttagattatatacattaataacctcattaattaattcactttttttccattccaaatttttttccccctttccccaaaaactatatcaacttcttattatcgccacaaatatataatatctttcaaccaacttccactcaaacttctttttgttcaatatttaatttttttctatttttctttcaccctatccttttcttatatttccaaagatcttttccaaaattaaattttaaccccaatttatttataaatttttt

SEQ ID NO: 74521 - DNA, 304 bp, Glycine max
gagtggtggatatgatttatgtttccactaccacccgacttgtgatgttcaaatgggatgatgtttgcggattgatgatagagagactgatctcgcttatgctataaaatgagataatgaaggatcactggagaaatcgggggagggtgagtgctatctgactgaaccagatatggggtgataagccattgaataggaactgccggccatcagagaacagctatgtggacagatgcagtggatacagctttagtgacctatacaccacgagcaatcaacactatggtgatctccattgacaatt

SEQ ID NO: 74522 - DNA, 92 bp, Glycine max
ctggtggcccaattccatacatggtagactcaagaggaactcctgttgtgcctcaggttgagggatcttcctcaactgtcctgtcatcttat

SEQ ID NO: 74523 - DNA, 425 bp, Glycine max
  unsure (1)..(425): unsure at all n locations
gacatttgcaactgaaaaggggacagatgattatatgcaatgatattaccaatgggattacattaagttatagtttttggcaagtaaatatagaagttaaatcagttaatatggtccatattccttaaaacaacaaaaaagaacatatattttgacgtactggttggatgagtttgcaatggtttggcttaaaatatggtttgtctatctgaggtgtctttattaataatggagggtaggtcactgttaaagatgtaaaccattggttgcatgtgtctgtatatgcaagtatgtctatatatttactatatttttgtacagattatactaacaaattagttgtctgaacatccaacattttcttttcatgcagctatgggacttggataatattctacaaggctcangaaacacacaaagtaatg

SEQ ID NO: 74524 - DNA, 335 bp, Glycine max
gttcttgaatgcggggagggactaatccaaagggctgaactctctcgtggtaacacactaacaccatgggcacaacagaccagagcccgtcggatactgcagatgcttgcactaactggagctggcatgtgatacgctgggtgcttacgcttctgtgcaccctcaggtgacgacactgctggaattataacgctagatccgagattgtactactacatgcatcgggggtgaataacattcatttgcgaaggaagtgtaggtgattaattatgggtcatgagtaggctaaaaaactgtgattggaaaactctattatgctgtaagcgcatggtctg

SEQ ID NO: 74525 - DNA, 347 bp, Glycine max
gatcctaaatttttttaattggtttttcattggccactggttcgttctttttttttccgccacacctaactgcagggcacctggatttgacttttcccccccttttattttctgttgctaattctcagctcttctccacacggttcatgctttccttccttcgcctttcgtgacgtgcaatccatgttgttcacctttcttctaggttcttcattatgagagtgaagaagggagtgacgtcgtgctgatgtgtatagcttgaaacttattcaataaagcagttgataaaaatgacttttgggccattggattggtatagtcgcccaattgcaaatggagtatggaca

SEQ ID NO: 74526 - DNA, 412 bp, Glycine max
tcttgttggttacgattttggtctgatggtgggtgggaattgggcccattttttgctataatagatttttatgccaaaaacacattttttgaatttttaaaggatttagcttacttttaaaaaaaagaagtaaattggtcattttttaattatactggactaggtcaaaatagacttttacactaaaaacacattttttttaatgtctttaaggattttgcttacttttttttttaaaaaaaaaatgaccacaaaagaagacaatggccattttctaattgtcgtggcccaaaggctaaaattttatgtataataataacaataatcataatacttatcaattttaacataaatattatattgaaggaacaaacattaaaacttaatgagaaatacatttattaagagacta

SEQ ID NO: 74527 - DNA, 417 bp, Glycine max
gggggccttttccttttttggtttttccttcaattcaatgggggggaggagaggagaggagggggaaccccagatcctttccttcctttccacaaaaaaaaggtttttcatcgctcttcttgccgattccgccatttctcatttcggattcgagattgttgcaggtgcattgcttttgcctctcgatggtatgttccccgggaagtgggagaatggaagtcatggccaggcttctcgctgctgagactttctctcacactgtagcagatgactttgcccgtgagaagttggctgctgagtatatttgtagagaactacgtgaggcagatgaaacaaatttgcttcaggaagaagatatgcatgtctatggtgagagccccatgactgatgccttgcagctggtatgctgcaacactt

SEQ ID NO: 74528 - DNA, 402 bp, Glycine max
caaaagccacaggtggataatacctctacccaggctgatggcaaagacgaacctgttaggagcaatggagggcatggccaactgcatgtatacccttcactactgccaactgccattcctgagaaattgaatgaggatccttctgataaattaaggaaaggccatgggattgtgggaaattccgaaaatagaaataatggctcgatcaggacatctgatgggcagagtaatagtgggcatagttatcagaagcaatcagatagtgaagagaattcagggaaatcttctggacagacctggagacaccctaatgtaaatagttcttccgattgcttggttaccatgtcagctcatgtttctggtacaaaaacatcaccgcataagcttggatttgatttgcat

SEQ ID NO: 74529 - DNA, 258 bp, Glycine max
acgggggcgaccgacgcttacgcccacgcttcctaccacataatggaactgtttttagaagacgacagaagttttcgggggcgggattactacggaagggttcggttgttttaagactacatatgggggctcttatcaattaatcaacacttacatttactatatacacatcttcaatttatccatgactctatctaagcttattgtgcttacctttttgcctcgcttctcctttttcatctagtagatgctgatcaa

SEQ ID NO: 74530 - DNA, 364 bp, Glycine max
tatatctagaataaaaagtaacagatttcaatttttttagaaataaaaaaattattcaaaatttttatatttgtaaaaatgaaaaacatattttaacaaaaaaaaacagtaacaattaggttattttttatactaaaatcacattttttttaatcttaaacaaaatagtccttatactagcatatttaattatactcagttcaaatgtaatcattttttactttaataaatggctttgttttatattattaaatatgtgtcacaacatatatattagaaaaattgtatgatatgcctttttttttactttgttaataaatgcctttgttttgagtattctttgtcaatttttaggctcttaacc

SEQ ID NO: 74531 - DNA, 419 bp, Glycine max
ggttctagtgtgtgattgtttgttgttgtaactcgttcttcttcttttgttgttctgtgtttgtgtttgttttttctctcacctgaaaatgtcttgctgcggtggtaactgtggttgcggaagctcctgcaagtgcggcaacggctgcggaggctgcaagatgtacccagacttgagctacactgagtcaaccaccaccgagaccttggtcatgggagtggcacctgttaaggctcaatttgagggtgctgaaatgggtgtgcccgctgagaacgatggctgcaaatgtggaccaaactgctcctgcaacccctgcacttgcaagtgaggtgttgggagagcaagcttcaagcagagatagcccttaattaggaataatgataaactattaatgtgtagctaaaaacttatgtattatg

SEQ ID NO: 74532 - DNA, 381 bp, Glycine max
  unsure (1)..(381): unsure at all n locations
gggcccctaacaatcctatcggtaatttccttggctgcctcaaatgtcattggactagatttttctgtgtgggtcatcttccacttcacatgtcgtctaatggaagatggacgatcaataattgtgtcagtgctcttggattgngttgtttcctctaattgtttctttttcttgtcatccataaacttttattctagaaaagcataacctccacgagacaacacgtgagggacaatgttttgtttcttaatggcctgcgccatctttcaaacatcttgtaatagttacagattaagataacttaatatgtttgacaataatgcgtaaatatgaagtttataaacaatcaaaatcaactaaccctcccatgaaggatctcta

SEQ ID NO: 74533 - DNA, 360 bp, Glycine max
tggtgagagagcgagcgagcgagcagtttcaaagagaggatttgggattgggaaggcgagggattgcgctgcgtctcttcctcttctctttcgattcatccctcattcataatcttccaatccaacaacctcagcctcacactcacacatacacacatctgaacgcgtatcgtccctcccatggcttcaaagcgcatcctcaaggagctcaaggacttgcagaaagacccaccaacttcttgcagcgctggtccagtagctgaggacatgttccattggcaagcaacgattatgggtcctgctgatagtccttatgctggaggtgtattcctagtcacttattcactttcctccggatta

SEQ ID NO: 74534 - DNA, 277 bp, Glycine max
ccggggcgccacgcgttctactgtttcatataatacacaagtttatttttcacagtaccaacatctccctgcggggggattgatttgcttcttccgatcccatcactaattgcatattgcaattcctctactcacaaaaaacctattcctataccctttctcttttcctgaacccaacacaacaactcaacacaggattaataaattaaattaaaatctatcttaaatcctctctctctctctttctcttttaacggtttgcatttctcttcctccc

SEQ ID NO: 74535 - DNA, 271 bp, Glycine max
ggtgggtggaactggaagaacctttgataatcctttggttggttcatcgaccactctgtctgtatagatctgtgcaaatctccgaacatttccgctccaattatcatttcactgaacagaaccaaaccctaaccctgtctttctgtatgacgcctgattcccccccagaggcgttgctgttgagtcgatttgtaaatgctttcggaagcttaggttagaattttttgagacgatctcatggttttgaatcggtgagatgaatcaccacgac

SEQ ID NO: 74536 - DNA, 53 bp, Glycine max
  unsure (1)..(53): unsure at all n locations
gagacctcaggtcaggcggggctacccgctgagtttaagcatatcaatnngcg

SEQ ID NO: 74537 - DNA, 208 bp, Glycine max
aaaacaacaaaagggctcaattaagcaacactgccacttttacctggaaccgcactattaacacgtgtgcagggctcattaattacaattcactaaccttatactactattccaaaacaaccccatatccaccatctcatttttcacaaccaaatatttataccttccctaaatacaaaactcttacccattcacttcttcaaataca

SEQ ID NO: 74538 - DNA, 428 bp, Glycine max
cactctcccactcttatggaaaccatttgctcctaaccgcaacgttcctgtgacctaaagaaaataaaataaaacaagattaatggctgtagaaatgaaccaatttgatcttttgatcaaattttatccaaatattaataaataccttatttgttatattttactaaaatatctattcttttttactaaaaatttgattaatcacactgagaatttttttatattcacaaaatttaaatccaatatttgcttaagagattcactcaaatattttttttaccctctcaatttgagacattttgtttttagtctcttaatcaaattcacaaaattttaattttggtccctcaacttcattttataagactatgcttttttttttttaagtttctgaaattcactcaagggaactaaaaacgacattatgt

SEQ ID NO: 74539 - DNA, 300 bp, Glycine max
  unsure (1)..(300): unsure at all n locations
aaattatattttttaaataatatatataataattaaatttataaatattataatatttatatatttatatttaaatttaataataaattatatttaattatataaataatattattaaaatattatatataataaaattntaaaatttaatatttaaatataaaataaaaatatattaatataaatatataataatatattattaaaatttaaaaaatattatttatattataaaaataatataataataattatattaaaattaaaaattataaatattaaaataaatatatttaataa

SEQ ID NO: 74540 - DNA, 268 bp, Glycine max
  unsure (1)..(268): unsure at all n locations
atatacctcaggtatttaagaagtcaaagatagtggaatacagtatcaaagaaaatatggtttcaccaggaaaaggagaggttagtaaatctggtatcacttaatgtagtatgtagcacttcagttttttgttctgctaaaaagttcaagtgcttgcttgcttgatctcttactggaaggtccaaattgacgaatgttgcatacagatattaattgacaataagcaatactacanattcttgggggaaggatataaatatggtatcac

SEQ ID NO: 74541 - DNA, 448 bp, Glycine max
  unsure (1)..(448): unsure at all n locations
ggnctattagtatggaccaatcttactaagcgtgtcttggagataaatataaaatcgggaacctgattcggggcatcctagcttttttttactggtacccatttagcagtttttttaaaataccggaaaatattccttatgggtatntttcagttataaaccagtagaattagttttttcatttcagcagtacctttttttcccgtaaaaccgcactcctttagtataatttgttttcattagcatccttttatgaacgcttgttatcgtcgatggtatacgtacgttgtttacaaatatacaatgaagttcggtggctcttgattgctggagaaaaagaggtgtgtatttttttaaaaacatatgatccgtatgaccatacgaattatcaatccgtgtgttttgaatgtttttaaaaaattataattaattttaaattttttataca

SEQ ID NO: 74542 - DNA, 295 bp, Glycine max
gcatctagtctcagcgactgtcccaactgctgcgggccagtaaaatcaacggacatggcagactaattcttcattgacaaatctcaacagaataacactatctgtggtaggaactatgcatacgaaaacgctatgaaggacaatgtactgaatttgatgcttattcaagcacccacacactatctaccacaagcgcaccatctccaatacatttgccataggaaaggctccaattgaaaatcatttttgtaccattgagatgggtgccaaacttgacaaccatagcctgatatga

SEQ ID NO: 74543 - DNA, 110 bp, Glycine max
  unsure (1)..(110): unsure at all n locations
cccacacntcctaattcaaacggccactttttttttttttttaaacttatttttttacaccgccccggttttatctttactcccacttttcaattaacacctatcccttc

SEQ ID NO: 74544 - DNA, 321 bp, Glycine max
ggaccggctatttctattctagctggtactgacgtaaggttatatgtgtagggtatggatgcatgttttaagatgcctgtaatagcacaattctttgtcttttgacagtgcttactgtgaactgtacttgcatgtatatatgtaaaataaagctaatgctaaaaataatggaacatgttgaaattgataaatttaatatagatacttttagtattcaaacaaaacacagagtggaagacattaatgtatttgtttgtttgggtctttgtggatggagattaattcaagctaagctttatgaataaactgacttttgaagga

SEQ ID NO: 74545 - DNA, 64 bp, Glycine max
  unsure (1)..(64): unsure at all n locations
gacacacatttactcactcactgtgagagcggcaaanaaaaaaaaaaaaaaaaaaaaaaagaag

SEQ ID NO: 74546 - DNA, 255 bp, Glycine max
gtggtgcttctcacccatcagggggcgattggtgaaattccaggacatgccgaaaaaccaaataaatattgatgcacaatccgtaagtttccgtcacacaccgtaaatcaaattgtatcatcgctgcataattaaatgaagttccctaacattccctaagttaaaaatgggataactatgtaatccccaaggttacgtaacattacggaaagaaaacatttatcatttcgaaattcataagtttacgtaacttta

SEQ ID NO: 74547 - DNA, 404 bp, Glycine max
ggcaccgcttgagcagacttaacaacagcacaaagcgggttactgtctgttcaagctaccatctctctctctctttcttagtgcctccttgccagaagttaaaatggcccaagaaactttcctattcacatctgaatcagtgaacgaggggcaccctgacaagctctgtgaccagatctccgatgctgtgctcgatgcatgcttggagcaagaccctgacagcaaggttgcctgtgaaacctgcaccaagaccaacatggtgatggttttcggagagatcacaaccaaggccaacgtggactatgagaagattgtgcgtgacacatgcaagaacattggttttgtctctgatgatgttggtcttgatgctgacaactgcaaggtcctcgtcaacattgagcaac

SEQ ID NO: 74548 - DNA, 87 bp, Glycine max
actacaaaccggacattgaaacatcaacaacatgcggtctcacgggagggaacacaacaagatacaaacataactttgtacaaccaa

SEQ ID NO: 74549 - DNA, 308 bp, Glycine max
ggggagaaggactatacattactgtgttcttgggctgtcctcattccctacattcaccactcatttatcttatagctatattctgatacatacactgctttgaatccatctccactagcggtttctgttgagagctttaacaaagacttcaagctcatggggtttgagaggattgctgctattcaaacatttgtgattgtgacaaatctgtatgagtacgcaaagcaaaattatgggccttagagatcctctagatgaacggcttagaactctgttaccaccatactttgtcctgtgtgcagcaaatt

SEQ ID NO: 74550 - DNA, 391 bp, Glycine max
gaagcttatgtcatagttactctgatagggtcgggactgaagggcaagcagttggtggtgtacccctgccaaacactttggagggccctcagttttgcccacaaccacaacccttgcattttgcggtgggaagagcccctcctgctatggatgaaaagggaaagttggatcagatagaggaaagactaagggccgttgaaagaggcaaagattatgccctcgctgacgtggaagatttgtgcctagtacccgacgtggtcattcctccaaagttcaaggtatcggacttcgataaatacaaagggactacctaccccaagaatcacctaaaggtgtagtgcaagaaaatgggaacatatgcgaaagatgacaaattgttgatgcatttctt

SEQ ID NO: 74551 - DNA, 164 bp, Glycine max
gcatttcaacaattcttccataaaaaatatatagaatttcttttgcttaccctcttctcctaacacctaaaagatccctacttttcctatacaactacaattctttcactctttcacaccaaaatcttttcttattactgaaaacagtgcaattttgagtcttt

SEQ ID NO: 74552 - DNA, 314 bp, Glycine max
atatatctacagcaacactacactggcccatcggcggaaaaaaactatggccatggttatgtcgctacttcacttgttaatcactagcgtttacgctaagtgggggggcgcagccttcactgggagagatgctactatctgtggggagctgagagaattgaactaaccaaccgaacaaaacatgaggcctgtgagaatgaataaaaatatgatttggcattagaatatacacatgacgagttacaacgttggtggatttgatagacgataaacacaatgtaaaataatggatatgagtcactagcactaaaaac

SEQ ID NO: 74553 - DNA, 430 bp, Glycine max
gatgatgatgatgatggaaacaacacaattggtcgggtatgtgaaacactctgcccatttcgctctggagatggaggctgcagatggccaaatggtggctgtgctcaactaggtagccagtatgttggtctgaaggcaaattttgatgcatttgaccaactatcaattaatgatagttatttcaagtctgagtgaacagggaatttacttcctaaaagactccgatagtgaacagtcgcataatcaattttggtttctttaagctatgaggatagttgttaattctttttaacactcctcgtgatgaaaaaatggggagaagtagtggaccctgtcattttgattgggtttcgggaattgtacaggctataagagttggctggagatcatcttggtgcatatgggaatgcattgggttgatacgcatcat

SEQ ID NO: 74554 - DNA, 159 bp, Glycine max
cagcttagacatgttcaactggacaatagccatgcccaggagcagacacagactcagtcacagtgccacaatggcaaagctactgcctactgattagcactctgataccatgtatgctcaatgtttgtgatatgaatctgaataggatattgcatgacc

SEQ ID NO: 74555 - DNA, 380 bp, Glycine max
  unsure (1)..(380): unsure at all n locations
aagacacagagggtagtttntaaanagatattgaaagtaagcatatccagacacataagggaatgattgggtgtggacggcagatccacgtgggcagtactcaacgcaaagtgcttacaatatgttgaggggggaagcaatagaggggatctaggatcgagcctttgaggaactgtggaagttgaaggtcccaaccaaattttcagtgtttgcatggaggctacttagagatagattgccaattaaaataaaccttcacaggagacaagttgaggtcaatgataggcgctgtccattttgcagcacgatggatgttgatgcatgacacttgttctttcactgcaataaaatcaaccctattcgggaggaatccttgtctt

SEQ ID NO: 74556 - DNA, 324 bp, Glycine max
agacgccaaaacgacagacaggttaatctacaataattataagaactataaagtgtagaagatattggatagctatacgatggccgattaaaaaataaatattcactaaagaccaaaatccaaaattccttatgaggcgatgcaaatacaaatggacagagatttgtgcaccatactgaagggcaagcgcatagaaatgggcattgcttgtctaaagggtttacttgactaaaagactggaacacttcggtcatcggcgttgtcagtgttaggtctcgatttcttaatatgttccacagtctatttctcacgctatcaaacttt

SEQ ID NO: 74557 - DNA, 239 bp, Glycine max
gaaaacgcgtgcggacaagagcaaaaagacgacagaaggggattctagtgtgttattgtttgttaatataactgaagcttttggttttgttattctgcgtctattttacatctttctctcacctaaaaatgcctttctgcaatgataactgtggttgctgaagctacttcaagtgctaaaactgctgctgatgcttctagatttacccatactttatcttcactgattcaaccaccacc

SEQ ID NO: 74558 - DNA, 378 bp, Glycine max
  unsure (1)..(378): unsure at all n locations
aaagggccgaccacgcggacgnacaggcgtaaaaacggtttttttacgactttttgggacgacggaaaatggggctaatcgggggacataccctaatttcctctggagattattactngangacatgcaacctttagttatccgttttgacgtactagtcgttcttcgaagcacaataaatgaagtccctatacgtctcggaaatcaaaaggaaacatgcttgcgctatccaggatatttcttaatgttagctaatagtctataatagatgtttttgcgcaatcctcgagtttccgtaacttcttcgaaagctaaaaaatattaattacataattcacttagattcttagccttgcgcaagggaaataagtatctata

SEQ ID NO: 74559 - DNA, 418 bp, Glycine max
cactataataattgtacaggacttggaatccagggtctcacttaaggagattaagttcattaggagactaaaaacttgttggtaaaaatttaaatgtttttttatagagttacttttacttaataattgaaacaatttaatgtgttaaagttataaccttttcatttaatatttgtatttaaactatttaactaacttataattttaaattattacactacaacacatgtgatctttaataacattttatttttgtctaacacttagttaaaatgttgctaaaaaattttgttgataacatttaaaaaatgttgtcaaatatgaataaatgttactaatatattttcatgacattttatcaaatgttgtgtatagtccatggtgttaaaaaatcacatgtctagtggtgttattttat

SEQ ID NO: 74560 - DNA, 408 bp, Glycine max
ggttctagtgtatgtgattgttgtgactcgttctgcttcatcgggatcttcttcttttgttgtttgtgtgtttgttttttctctcacctgaaaatgtcttgctgcggtggtaactgtggttgcggaagcgcctgcaagtgcggcaacggctgcggaggctgcaagatgtacccagacttgagctacaccgagtcaaccaccaccgagaccttggtcatgggagtggcaccagttaaggctcaattcgagagtgctgaaatgggtgttcccgctgagaacgatggctgcaaatgtggagctaactgcacctgcaacccctgcacttgcaagtgaggtgttggagagctaaagctttcaacagaaatggcccttagaaataatgataaaaactatatgtagtttcaaaac

SEQ ID NO: 74561 - DNA, 286 bp, Glycine max
aaaaaaaaaaattgttaataataaaaatatataaaaatttaatatataaatttaataaaatttaaaatatattaaattaaaaaaattataaaatataaatattaatgtataaattaaaaaaaatataaaaaataaatataatataatatatataaaaaaataaatataaaaataataatttaaaaaaaaaaattaattaaataataataaaataaaaaaatatataaaataataaaatatatataaaatataaaaaaataaaaaaaaaatattattgatttataat

SEQ ID NO: 74562 - DNA, 421 bp, Glycine max
catccacttggttgttcaaagagaacaagggatggtacataccttgtggatctttgcttgtaaaggcttttataaggttgaaaagaaatctcaaggaccgcaggtcgcttggggactgtatgtatgcacgggttgttgccgaaccagtataaaattcttgtgtttgtcttcttcttccctacactctttaatttccgctgtgcactttaattatcgcttttacttttggttaagtttctatttctgttctttattttcttaacattatagtaaaagcctaattgaatctagtaacattaagaaggatatcttttaattagtaaaggttcattaataattaattcaatccccccttcttaattattccgaggccacttgatccaacaagatacaacagagtcagttctcaattattaaaatg

SEQ ID NO: 74563 - DNA, 356 bp, Glycine max
gtagccagaggcttcttgaggaagatttctaagcgcatcccatttactaagttcaccccccttttcatattttatggaaaagttacggaatccttacagaagtgttttggatttgattttaatcttttttatcttccctttcaccaatgttaagtgaaatatgcttacccatggttttcagaaattttacggaagcattacggaagccacgaaagccccaaaaaccatttttcaacaacgtggaggagcttgccgcccagttgcttcccccttaagcaatcccaattgcctagattcaaattgctatttacacccctatcttgataagttcacccccttatttttgtgtttttggg

SEQ ID NO: 74564 - DNA, 331 bp, Glycine max
gatacttctccttcttttgaaataattttatgctctctaaaaaagttgtaaattttatgagatttggactcgaatatctgcttgcgttttttgctacactgaagtatacaatagaaagaagcatgacattatcttttatatgagggggcattgcacatggtcatgaggaagcgaacatcatataaattacaaagttaaaagcgaacgatattatcaactcttttatgccatttctattaacacgtgctgcaccaaatttacagatgcatttaacttattgtgtctgaacatttacatacaaaactatttgaatgtcaaacgtatttttata

SEQ ID NO: 74565 - DNA, 281 bp, Glycine max
ttggttccaatttttcaacccagtagttttccgtcaaagttcatttcatataccagtttatggtcttactaatctcaatacactagaactccaatgataacattctttttaagacgagtaaatcatattctggaaattaagctttcatagtaccattacattctttcatcctaatcaaatatacgagcacaaagtcctaagcaaatatttgatgatggccagggagggttgaatcgaggttagcaaatagcaatgacacattttgagtaatgcaacgcgtg

SEQ ID NO: 74566 - DNA, 285 bp, Glycine max
ccgggatttgagtacctgtaccggctggcgttccagctttccctaatgcgtgtcgacttaaaatgaggtactgtgtacaatatacgtctagcttgccattgataccattcattcgtttatgtgtaatgaggactggattgagactactacagcttttactgaggaccttagatgctcccaatagaagcaccgcgcctctctatagagctttttcttaagacttgaacacttactgcaacaatctctcgagcgcttaaaacatcttaaaaggtcactacttaaaat

SEQ ID NO: 74567 - DNA, 320 bp, Glycine max
  unsure (1)..(320): unsure at all n locations
gacttttcaatacattttaaccactggtctagcaatattagagaagggtttttgtattaaaaaagttaagtcatataggctagtttatggcagggagtagcctgtttggttcctctctagactctattaagtctgatttggaaccaattgcacggccatccaaaactatgtatttcagtacctctggtactcagtttcatatatataaatatctatctttgctgaanaaaaaaaaaaaaaaaaaaaaaaaaagcgcgggctctctagaagacacaattttacacacgcgcgcgtgagacgatatatcttttatattgtgt

SEQ ID NO: 74568 - DNA, 299 bp, Glycine max
ccactcgttcgtacaggtgttgaagacaactgttagttttacacacaggtgtggtgcatcagaggcccgggtttcatgcctacttgcactgcgataccatctcttactgaaacaccccatatggcacctcaaagctcacaacgtaacataccttacgatatctaaggtgacgtcaccttcactaagagggatgatatggacatcagctccgttcactcttgcttatgctaattccatatccatggactatcaacacagaccatacttgtatgctaaagctcttcgtgtttgcgatactt

SEQ ID NO: 74569 - DNA, 418 bp, Glycine max
cttcgttcgttcttcattcttcatctggttagcatttgtctttaaggatttgaacatgattcatggacccttaggggtcctttttattgttttgtgcatctttatctccttctcttatcatcggtaattgtttttctcttgtaaagcatgttttaaccgatcattagtcctgcaagttatctttaaaaaaggttgaaggttaataagcaaaaaccaagataaaaccaactcataactaacttcctttttatcaaatatcacttgagatcgtttcaaggtccaacgccttagcgattctctcctctttacaaaaaaaaaaaagatcgtttcaaggtccaatgccttaacgatcctcttcgctttttaaaagtttgaaacatcgtttcaaggtctaacgccttaaatgacttttgttcgt

SEQ ID NO: 74570 - DNA, 327 bp, Glycine max
ggttctagtgtgtgattgtttgttgttgtaactcgttcttcttcttttgttgttctgtgtttgtgtttgttttttctctcacctgaaaatgtcttgctgcggtggtaactgtggttgcggaagctcctgcaagtgcggcaacggctgcggaggctgcaagatgtacccagacttgagctacactgagtcaaccaccaccgagaccttggtcatgggagtggcacctgttaaggctcaatttgagggtgctgaaatgggtgtgcccgctgagaacgatggctgcaaatgtggaccaaactgctcctgcaacccctgcacttgcaagtg

SEQ ID NO: 74571 - DNA, 311 bp, Glycine max
cccgctgcggctagacgacgacaggagactgcactgagagcacgaaccattactactgtggttcatgctgtcgcataacagtcatataactagaactacatgtatcatgattacgcacagccgttcaattcctggattacagcagtggacgctcatgcaccagtggcattgtggatgcctacacagacccatgcatatgcaggtagaatcatgccctaagatcacttcaacaccatgtcaaaaaccatgttgagtcattgtctcacgctaacaagctttctccttctgctgtgatatccacaacactcaaa

SEQ ID NO: 74572 - DNA, 383 bp, Glycine max
gaaaatggaaagagatcactcgggatgatagttcttccttcgggaaggaatcagagaaggatgtgtcaagctttagccaaactactgggaaaaagaagaatgaaaagggcagtaagagcacatacaagaaaacctcatctttggatgataatgtcatttctccaatgaaagtggatacaaaaccactgttagataactcagatggtgggtttatcaattcaactaccactatggaagtagatacattaaataaggtagatcatgaggaaaaagttaaacacgccagaatttatgatgacaaggagcaaaatgaatctgtgcctggattggaccaaatttcttttgattggatgcctgattacaattttggatccctggatgtg

SEQ ID NO: 74573 - DNA, 121 bp, Glycine max
ttacatgtattatttagttcacaactcttttcaaagtaagtggtcaattggaattttaaccttttatttgagtttattaagatgattaccagggacaaaaacctggttacctaatataaaa

SEQ ID NO: 74574 - DNA, 215 bp, Glycine max
  unsure (1)..(215): unsure at all n locations
ggacggcaataccattcattcatcaacagcgatatgccgncaatgaagtttgtggtgaaaaaagcatggagcaatggtggatgtggtccggtaggaacactagagatgggaagctgcccgggacccataaagacacccggtcttcttctatctactcgtaaagggctttcttactttatcttccctgaactaattaattttcttcctttccccga

SEQ ID NO: 74575 - DNA, 421 bp, Glycine max
  unsure (1)..(421): unsure at all n locations
gacagtaaggggctactttttctgttctgtatgctttganntaacttgtttaggttcgcatgttgataggtagnggaagttgtaacccgatggtgtgcggtgaaagagggtgcaataactgggtagaagtggtttgtaatagctcttccaaatcatcgagaactctcgtggtttctgagaattcgggaaagctatcaagtagctcatcttgttcagagaagaaataagaaaaatcagcatttgggtcatccatggtgatggcttcaccggtgcttcctcttacaatagcttccaaatcccaatctctcaagcacgcaaattcatccatcaaccaagttgcaactaattaagttataatatatcaagatatatcaaattaaaaatgaaaaaagaacttgaaagggggtgttggaccgtgtga

SEQ ID NO: 74576 - DNA, 350 bp, Glycine max
gtttgatatataactaatactatagcacgtatagagcactttcgcactacacaactaagatttataatatagtatataaagtaaactataattaaaattcgctatgaataaatattttttaacacgcttcatcattaagcgacgatcgaagttagttattacgagctattagaagttacgtgaataattactctagttatgttactagaagttattgaagttagttattaggaattactagaaattggttattctctatatttgtataaataaatcacctttctaatactttgatgaatgaattcgaaaactatcggttcatttctttcattctcgatatgggatcaaaa

SEQ ID NO: 74577 - DNA, 453 bp, Glycine max
  unsure (1)..(453): unsure at all n locations
cccacgcgtccgacgacagaaggctcttacatctctggcccaatcttcttggagtcgctaccgaatcgcgatcatgatcattccctacattgttctcttgttttgtgtcgctcgtgcaacaattggttagtcttttccaagagtttaatgtaatctatgtacccttaggggttccctctgttattatgtgcatattcatcttctccatttatcatcggtgatcacattttttatttgtaaagtttaatcctaaccgatcactagtacagtaacattgtctttaaagcgattgaaagttaataaacaaaactagaataaaaaacaacaactcataactaaatttctctccatgaaaaatcacttgagatcgtttcaaggtccaacgccttaacgacctgcttgtttgtcatanaaatgaatatctcaaaatcataaaaccaactcaacacacaa

SEQ ID NO: 74578 - DNA, 428 bp, Glycine max
gtcattcattttaaatataaaagtttttatacaatcaagtaatgaaaaacatttttagtggaattgttaaggaaattgattaattattctaaaaaaatttatatatatagttgcaattacataataatgttaagaaaattttagaacattaatacatatattatttatttaaggaaaatttatttgacttgcatctaaataggatgattttttctcttgggttagagattgtctttcaatttgctgagacatatactaattattaatttaacaaatttttacacacaaaaaaaagcacatcaatcctatgaattactctaaataggatatgtcaaactaaagaacaattcaataatttaatgtatttagaggatttactatttaattaaaatatttatttttcatttaaaaatcatatgtatattttt

SEQ ID NO: 74579 - DNA, 165 bp, Glycine max
  unsure (1)..(165): unsure at all n locations
ttatttatgtgcatttttgagcaaatgaggagcgatatcagactagatatactgtcgatgatcaagatggttcacttanggaagtctatatctcgagaagcaaaattagcattgtgctgatgcaaaatgtatgataaatataaaaatttttaatcaaaatgattt

SEQ ID NO: 74580 - DNA, 239 bp, Glycine max
cgcgtccagagcaacaaagagatggtgctggcgcgaaaatgcatacaagagactctgatgaaaatgaacatctgatacgaggtatacacactgtgataagatgtgataaatgcacaatattcataaactataaagagagattgatcagtgattgctctgtaatacataagtagatcagtggatggtgatcactcacaaaaacaatgctcgcgatcttgacaaagaccttttttacacat

SEQ ID NO: 74581 - DNA, 421 bp, Glycine max
cacctagtctctaaggggaccaagaattggttatatggataacaagcttgacgcttatgctccagcttgagggggaatgtagagaatcagtattgatattctgcattcattgtaataaatatagtttataggcacataatcactgatttagaggaaatcaaatatcctccatttatttgcaataagtgcaataagcctctgttctttctcctttaacaagaccaatcaaagtccacaataatgttaatggttgatttctcctcacctacttttgcagcttgttcgagagacagctattcaatgtcttggtgccttgtctgaattgccccacgcccgtatctatcctatgaggacacaggtttggcatgcttttaacttgaaaggatgaatatcagcttttgatagatattcttattgatct

SEQ ID NO: 74582 - DNA, 334 bp, Glycine max
  unsure (1)..(334): unsure at all n locations
gttctagtgtgtgattgtttgttgttgtaactcgttctgtcttcttttgttgttctgtgtttgtgtttgttttttctctcacctgaaaatgtcttgctgcggtggtaactgtggttgcggaagctcctgcaagtgcggcaacggctgcggaggctgcaagatgtacccagacttgagctacactgagtcaaccaccaccgagaccttggtcatgggagtggcatctgttaaggctcaatttgagggtgctgaaatgggtgtgcccgctgagaacgatggctgcaaatgtggaccaaactgctcctgcaaccnctgcactttcaaagtgaggtgt

SEQ ID NO: 74583 - DNA, 148 bp, Glycine max
agctgaagttaaagtcagtgatgtcaaacaccagtgcaagcgcctgcgtagaaagtgtcccgcctcatacttcactgggtgctctggtctttacgatgctcgatgggactggctgaacaagcttataacttatgagcgtgataagcgg

SEQ ID NO: 74584 - DNA, 314 bp, Glycine max
ggaagactggactaccagaaaggtattgacctgattcggttggcaatgccagagctcatggaagctgatgttcagtttgtaagtgattttgtatatgtgttctataaacagatgatgtttcaatcacaaattaaatccctggcctatccaaaaaaaaaaaactaattaaatccctggacatggtggtatcaaaatgtaggctgtgtttactggtagggtataaaatatatcttgagacgttgcagaatatacctgctaaataaattttaaacaacttgatacttgccataaaaaaaatatgtgatggatcattc

SEQ ID NO: 74585 - DNA, 274 bp, Glycine max
acctgtttttcttggccaagaccaatgttgataccttctttgggtatatctaccagaagtggtgaggaattggataaggttggtggtggtaatctgtgatttgctataatatgtaggttgtgttcaaggactcattctatcttccttctaagcttagtttgtgttatatgtattccttaatagatgagggaacctgttctccgtagattcccaagggaaccagttcaaatgttcaatacttgactaaacatccaacccttaattactatttaaa

SEQ ID NO: 74586 - DNA, 306 bp, Glycine max
actgattaattgtgttaagaaatttaagtgaggagtgagagagtgatgatgaagtctgctatgtgtgcagaggcggttgtagcacttcttcttctggcggaggtggggcccatggctgacgctgcgacatgcaccccaacagagtctagtgatcccttgagagaaatccatatgataaataaggcggagaatgcatcataatgtaacagcacatacccttcacttacattatgaccaccccatgatgatgatgatgatgatgatgaagtgaataatcaaccacccaagtcaaaactgagtcctatg

SEQ ID NO: 74587 - DNA, 422 bp, Glycine max
tttggcatctcaatatatatataacaacacggggatggtaatagaaagatagagatccatcaagtctacgttgaaatttattgctacaaggtagacagaaaacgataccaaatctataaaatgtatggaataaaaaacacataaaatgaaggtaaaagaaaagaaaataaaaacgatggctgtttttttgctaaagggaatttttgtatagtgaatacaagcaaacaaacaaggggctagaagaaacatcttttgttatcatgcaatttgcgaaataattaacttccccattgaacaatatgatgtttaaggggttagccaaccaactcatagtgaaaataaagttagcaatttcatgtaaaatacatcagtataaaaatctatttaaatttggattcgcttgtctactttactttaataat

SEQ ID NO: 74588 - DNA, 106 bp, Glycine max
ggacgtcgtttcttttgctgctcaatgcggtagcggacaatctttagaaattgttaagaacttttccattttagcatttattttttaaaattatttgttggtttta

SEQ ID NO: 74589 - DNA, 152 bp, Glycine max
  unsure (1)..(152): unsure at all n locations
gaaccgcntgcggagacccacgctcgacccacgcgtgcgacaacacatcacgagggaacacgacagattgatatgaagaagatcactgaggcttaccggctcaagacataagattatccttctgaagctaccaacatttttaacatctatgc

SEQ ID NO: 74590 - DNA, 174 bp, Glycine max
aaccgccgggtcgacccacgcggccgatcacacgcacttccgggcccatttataattcacaaggatcatctaaaccgcggaaccgagataggctctacaggactttaaaacccttcatcattctttctttgccgaattacggagtgggatttatttatacatatgtctaaacca

SEQ ID NO: 74591 - DNA, 54 bp, Glycine max
tgggcataccactgcaagcagattttgactttgagcaggggtagactactaaat

SEQ ID NO: 74592 - DNA, 404 bp, Glycine max
atgatggcgaaaccgaattcaatttctaaacaaacaaaaaatcaatcaaaacaatttagtttttgaagaaagaaaaaacttacaaaataatagtttcttttttttaggaaatacaaaataactgtttctaaagattacaaatattgaacactttagtctttccaatcatttgagtaaacatttttaggcaccaatttagatcactaatgattttgtcatgaactaaatacacaattcactttttttaatttactcacatagcgtttgaaccagtagttaatgaatagtattgatgagatgtatagaattatcaatgattcaatgtattattattctattttgtatttaccgctaagaaaattttagattcgtgagaaatatttgctataggctcttaacgtagg

SEQ ID NO: 74593 - DNA, 108 bp, Glycine max
actgttacattactacacaatgttatcgtttacaccccgactgcttggaatgggagcacacatcctccctatatgtccctcgccagaaccacacaatcatatcttcta

SEQ ID NO: 74594 - DNA, 326 bp, Glycine max
actcgtcttaacacaacatatctacttaccgagccggcccttttttagcggccccgttttatacactccgcggccacctatatctatgccgaccattaagttgtgaaaaaggtgaacgaggctctgcatagatgcgagtacatcctcaataatctaggtttgatctctcccaatttgaccaaataagatactaacaccacaaatctcaaattcattctgtttctattatatttaaccgagctcacagaaataatatctcaagatgacatacatacatattctaactacttaaaagcaaaacattactgattgtatctcattttgtg

SEQ ID NO: 74595 - DNA, 264 bp, Glycine max
tttgataacccaaccagtctctgtattcgtgcactggtttatacttgtggctgtggtatacattactctccaacctcttcatttgaaaatggtgaacggccgtcagatcgttgcaaaatcctatccgcctattgattcaatcaacaccactctgtccaaccttcaacaactccgatcgcactttaacgattttttgtctctctccgaccctcatactctctctcaaatgcccacctcttcaactggctcattccctcttcatac

SEQ ID NO: 74596 - DNA, 220 bp, Glycine max
gcttgttggattgcaaaatcttcttgttcaggggtctccggactgggagtagagcctatgtgaggttctacgcacttccagatgttcaggcgatggacgatgatatagccagttaacctgtgccgccttgtggacaaatatattattggccaggatgaatcacactgacttgtgaaacagtcctattggcagcgggataaggtatgactgtttattatca

SEQ ID NO: 74597 - DNA, 414 bp, Glycine max
agaaggggaaggtgcaagagtttgttgtgagctataagctagtttatcgtgaggagaatatgaagttgtttgttttctttgttgctgcagtagttttggtagcatggccatgccatggcgcaggctaccaaaggttccctctccgaatgaaaactggctatggtgagcgttcttcggaggtaaaatgcgcaagttttaggcttgctgtggaagcacacaacatccgagcctttaaaaccattcctgaagagtgcgttgaaccaacaaaggactacattaatggcgaacaatttagatcagactctaaaacagttaaccaacaagctttcttttatgctagtgaacgcgaagtccatcacaacgacatatttatattcggcatagataacaccgtactctctaatatcccatact

SEQ ID NO: 74598 - DNA, 392 bp, Glycine max
gatgcttcaaaaccaagaaaaattagtgacaattcctggtcctcgtctgactttttttatatcagcaaaaatataatgatcagttggtgtccaaaaaagttttatgcaattgtgctgcttttatggtatgcagcaggatccattcatggattttcaatggtgcagaaataaagtgcatagagagggagagaatggcactcctcaacttcaaagaaggcctcatagatgtctatggcatgctgtctacatggagtggcgatgaaactaatagagattgctgcaaatggaaaggaatagatgcaacaatgaaacagctcttgtacaaaagcttcgtcttcgtggtcagtatacacaatatttgagagtggctatatttaactggatttccaact

SEQ ID NO: 74599 - DNA, 161 bp, Glycine max
acgtgtccgcacacgcgtgcacacgtttgagagaagacaacgagaaggtgctactagtgtgtgagtgctatatgctagaacatcgtcatgtgattatgaaggtgtgcgtttgctttgtggctgcactctcaccggaaacatggttcctccattgttaactg

SEQ ID NO: 74600 - DNA, 306 bp, Glycine max
  unsure (1)..(306): unsure at all n locations
gggacgagccacgcgtgcgtaccaccacattctatcgtcctataatatataatactactaggctgtggtccggtatggcttgtccgagccaaggaagaatacancagaagctagcaaacaacatgagtggtgccatggacatggtgcgagccgcgtgacccaaacaaactacatacgcctgcctagctaggagagagcagacattgagagctcagaagcgtgcgtgcacacgtaatgatcgatgtgctgaggaggaaaagagaacgagatcgaagggattattaaagttctgtcacgtcttttttc

SEQ ID NO: 74601 - DNA, 234 bp, Glycine max
cattggtattcaaaaactattcttattcatgcgaacattattttagattaaattacaacaacaccactatacttttatataataccctcattcttattcacccaatcgtccggctcacaacagcttaagcacacaataatcccaccttatctataatctataacgtccaccaatatatctacttctacctaactatctaaactactgacacaaggcctttaacattactcaatc

SEQ ID NO: 74602 - DNA, 318 bp, Glycine max
aacacgcgcgcgcgcacgcgtttttttactctttcgtactgttttgacaagacgagagagtgtagacccacaaaggactttaataattaatactttttaaccactactataaagccagtctagattatctatgcgacttttctcgcaaagaaaaaataactcaatatctctctataatagttcgagctagatctgaactaggcagacactcgcatacgggtcttagctaacatatactaatttatgacatatatgacatgtgcacaacaaagttgccacctttatcagtgaagctcctcacctcaagatcgatgttac

SEQ ID NO: 74603 - DNA, 431 bp, Glycine max
  unsure (1)..(431): unsure at all n locations
agaagacgacagaagggcaataaaatatctcatatatttttcaaaaaatgatactattttagtgattaaaatcatttaagagtacatcttcaatgttgttatgtaccaaatacaaaaaaaaagtacattttaaatcagattaattatctttatctaaatatctaagaaatatttttatccttttgcatatttaactattggtgatatttaaaatcgtatttttttgtagccaaaattagttttttatagtaattctacttgattaatnttaaaaatataatatccacagtgccattcacatttcacaatttaaataatgtaataaatttttatttcataatattctatttcattttattttctctcatttcattccaataatctagatattacaagttctgattcacgcctatactgcataataggacatt

SEQ ID NO: 74604 - DNA, 195 bp, Glycine max
ggggcgacccacgcgtgcgcacacgcgtgcgtacagatgacaacagactacttagggttcgataataacatagaacggggctgttgagataagtctgaagagtgttactgtttcgatgaaacgactcatggattcgattgattaatgacatcgaatgggaacttttgtcgttgacgaacttccaacacaagggct

SEQ ID NO: 74605 - DNA, 229 bp, Glycine max
ttatatactacagatgggggcataaaagagaggtgaggtgaactcccgtggtttgtggtaatgttgcatcgacacgtatcaactacaataatcgcatcgaagaagcagttttcggagcatatcatcgtctacgaaaatgaacgtatcatatgtctcgaagcatattcaacacatggtgcggatcatccgtcaggaagctgctgaaaaagccaacgagatctctgtctcc

SEQ ID NO: 74606 - DNA, 84 bp, Glycine max
ccggaacggaattcccgggcggacgcacgctttcgaacagacgtccgaacacgccagctggagttttctatactaccacctaca

SEQ ID NO: 74607 - DNA, 420 bp, Glycine max
gagtgcacaagtgagtttgttgatccagataactagaaacagggtgatgaaaatgaaggtccttgttttcttccttgctacaattttggtagcatggcaatgccatgcgtacgatatgttccctctccgaatgaacactggctatggtgcccgtactccggaggtgaaatgcgcaagttggaagcttgctgtggaaacacacaacatctttggctttgagaccattcctgaagagtgcgttgaaccaacaaaggactacattaatggccaacaatttagatcggactctaaaacaattaaccagcaagctttcttttatgctaatgaacgcgaagtccatcacaacgacatatttatattctggatagataacaccgtactctttaatatcccatactatgaaaaacatggatatggggt

SEQ ID NO: 74608 - DNA, 433 bp, Glycine max
cccacgcgtgggcggctgccagatcgacagacgggggcacctaaactacttggggatggtcatggatttgatatcttgatttcttaaactacatggattcttccttccttctcatggtttgtcacataccaactagcttgggaccaataattcgatatgttgacccactagatgttccttctacatggtgctccaatctatcaaatacactttggcaaatctggtgaggcattcatatacctcttgttggttatggggactacaacctttcaaataccgaagtccttgcgatggatcctatcgtttcctgcttccctattgtacttgaatgtcagacttacttcatcttcttcctttaattatgaggctgtttatagaaaaccatattaatattctaactatggggaaggacctgtatctactaccatttcgg

SEQ ID NO: 74609 - DNA, 200 bp, Glycine max
ccacgcgtaagaacggttaattaagaatacagacgcggccctcactctttcgcatcgatctgtcactacaactctcatctctaaaacacacaattaactttctgccttcttacacctctctttatatcatctattccaatatcctccagcacattattttcaacctcactgctactaaataccccattattctgcattta

SEQ ID NO: 74610 - DNA, 222 bp, Glycine max
gaatcgtgttacaaatataaaagtctatttgcgctgatcgggtggtttttgaatggtaatcactcacctctttcatacacgtgtgtaggctggttgagaagccatggccgaggatgtggagtgcctacgcgctggcaacatggatatgcctgaggaggaagaggatgagagtccaatcctgaaggttgtcgtggaaaaagagattcgcaaaatggcgttgag

SEQ ID NO: 74611 - DNA, 301 bp, Glycine max
gggagacccacgcgtacgcacgcgtgcgaacagatgagagagggaacactggggtctgcttatatacactcatatggggaactatggggagccaatgatgatacagcccacgtgtatacttatttgcttgagaaagtagttgacaactctattactgtgagacaccatgaggttgctcaataccaacgagcaaatggcctactatgctaggaggacaatttataaaatctaacccttgagagctcagacagaattggaatactattaaatgcatgcctttgatttacactataaaacaaaa

SEQ ID NO: 74612 - DNA, 276 bp, Glycine max
agggggacagagagatagagatagggagagtgctggatcatagacgcgaaaacttcaatcacaacatcaacacttgaatcctgatattcagagtagggtctctctattcttaaatgatccaagggaaggtagtatgataacatgacttaacaccgagctcccatatcttgcctcatactcatctatagctatctcaacctatttgtctttgccagcgactctgtttgatgctaatccccaatgactgaaccttgcaaggtcattcacgatctaaat

SEQ ID NO: 74613 - DNA, 350 bp, Glycine max
ggcaaaacttggaagacccaccgtggcatacatgatggaagtgacagtgactctgaatgagttgatttgcattcttggacaagaactgtctgtcctttgatgagatctacttcagcaaatattttcgttgattctctacaaaacttaaaggttgttacagatcctaattaaggcttatagagttacattatccataatgattcataggttcatatgatcaggctcacatcactattataggaactctgatagcacagaatctgagccatgggatactggctacagagctgtcaatgtgtccagcgtacttgagacccaatgtgttctactgcaacctgaaacgttccata

SEQ ID NO: 74614 - DNA, 277 bp, Glycine max
aaccgaccgacgcatccacgcggacctccttccacttccacacctttctcatccctttcataaaacgcatcacgcccggcgatgctctacctcatctggaggcactaccccaatctccataccgacatcaccctcacttccttcgaccgcttccgcatacacccctcttaccagaccttcctctacctcagtcacgaccccatgccctatcatgcctcacccaaggagctacactctacctcactaatactgctttcacacaaggataagaaaatta

SEQ ID NO: 74615 - DNA, 300 bp, Glycine max
gaattgccggatcgacccacgcgtacgcccacgcgtctgatacctcagtattgtcgtcatagacctgtttatcaaacgtgcggagtgttaaattcctataccgaactcaaccccctggttaattgcaccttgccttttgccggagctctactgtgacatgctgaaactcttattccgctctctatactaacaagcctattgcgaacgtgcctcgtctattggtggcgtcgggaatgcgttaaactgcgacctcagtggaggaaactccactaacctctcctcctaagaagtgttggccga

SEQ ID NO: 74616 - DNA, 406 bp, Glycine max
ctgccactctagaaccagggtttttttttaatcaattccaatgtatagttgtcatggagaaacttaatctcttcactcatggaacttagccatttttctttctccttactagctaagacaactttaagagtttttggatcttcctctaaaacttcactggcagctaccaaagcaaatgctattagatgagcatatccatacctttcaggttgttcgattgcccttctggttctatctcgagctagtatattgccagcttcttcttgatgtttttctatagatttctcttcatcaagaggccaattaacaacttgcgttatagcatgctagacctcagtctccaccttaaaatttaatttttcagagccagtttccttactctgatcagtgctagactgaaccatgc

SEQ ID NO: 74617 - DNA, 240 bp, Glycine max
gggagacccacgcgtgacccacacgcgtccgcgcgagaaaaagaacgcttgatgatgtttctattgccctaggaacgggggccactggttgcatctgccaacaaaacttttaatgaataaattattcctaaaactataaatattccttctgtggagaatttgtcagtctatgatgttgcagagaaatacaacgatgaacggcatgatatgactatcttgcctagtgctgaggatgtgagc

SEQ ID NO: 74618 - DNA, 304 bp, Glycine max
ctatatgacgacagtttgttccattaccatcttaactatgccgggcacagcactactgttgaagaagacactaccttccttattatgataagccacctctcacagaacacaacaccgtgtcatccaaaagctcttcttgcgcctccctacacacaagccttatgcaacaggctccctctctaccatgagatcggactcctagaatggttgacctggcttaaggatactatcccgagtcagggttcgataatgcatctgccattgccggctgatattacaaccatatttaactcatggtccacta

SEQ ID NO: 74619 - DNA, 293 bp, Glycine max
cccacgcgttcgggggagcaagtttgaagagcgaagagaatggctcccaagggtttaatctttttggctgtgttatgcttctcaacactgtcactgagtcgttgtcttgcggaggataatggacttgttatgaacttctacaaggaatcatgccctcaggctgaagacatcatcaaagaacaagtcaagcttctctacaagcgccacaagaacactgctttctcctggctcagaaacatcttccatgactgtgctgatcagagttgtgatgcttcactgttgctgactccaca

SEQ ID NO: 74620 - DNA, 429 bp, Glycine max
  unsure (1)..(429): unsure at all n locations
gcacatgtgagtttgttgatcgagataactagggacggtgtgatgaaaatgaaggtccttgttttcttcgttgctacaattttggtagcatggcaatgccatgcgtacgatatgttccctctccgaatgaacactggctatggtgcccgtactccggaggtgaaatgcgcaagttggaggcttgctgtggaagcacacaacatctttggctttgagaccattcctgaagagtgcgttgaagcaacaaaggaatacatccatggcgaacaatatagatcagactccaaaacagttaaccaacaagcttacttttatgccagagacctcgaagtccatcccaaggacacatttgtgttcagtatagatggcaccgtactctctaatattccatactacnnanaaaaaaaaatatataaatttaattatgcg

SEQ ID NO: 74621 - DNA, 311 bp, Glycine max
aaccggtccggagttcccggctcgacgccccgcgtgcagaggacgacagaagggaacggctgcggaaggacgacggactgtgcctgggtgctagtagacaacagagggggccgggtgtctgatgacgactacacgttccgggtgggagatgacggctgcaagacatatcctatagcaggcggagctacccgttggattactcgtatcatgttactggctatgatgatttaaacttgaagagcggccgctctaatcgatccttgctcattgctacttgcatgcggacgcatggcatttcaatcaagtgacct

SEQ ID NO: 74622 - DNA, 185 bp, Glycine max
gaccgctgttacacgacgactgattgattcgggcccatgtcgacatcagatggttacacccgactgatgacgacatcaagtgtctgaaactggatgacgacatgaagagatacttcatgtcagcgcagactcactgctgagagtcagcatgtgcttaaaggagcctttgcactaccaaattcttg

SEQ ID NO: 74623 - DNA, 418 bp, Glycine max
gctgacgtttattatctctcatctagctgaatgtcattggtttgacaggctttaaaggttgattcaacaaggatgctcattgctgaaggtggagtcaacaatcttgcttctttgcacaataattatgccaatggacccaatacctcatctgaaaaaggcatactagttaactatactccgactgcaaatcattctaactcagatctagagaagctccaaattctttcagattcaaaaaagatattatctcaaactgccctagctgctttgatacgaaagatgaatgaattggtaaaacttttcattgctttcttctaattacaagaatgattatactttatatctattctcagtagctatgcatgggcacactgaggacatacacttgatatactagaagaacatatatacatgttcc

SEQ ID NO: 74624 - DNA, 469 bp, Glycine max
ggccgcttttttttttttttttttttttttttttttttattatttaatttttgcaattggatgaataaaattgggggttggggctgaaacctatgccttttcagctgcaccaatttatttcatttttagggtttggtgaactatatatattttcgtcaaaatgaatgaaagggacttttgacattcttttcaaatacgtgagaaagcttatctcagggttcctgttgaaccaaattctgacttatcaaggttgattccttgtggcgtcaccgtgacttatcttccatctctggaagtggcgtctctctccgtcaacatttctgtatcaaacgttctgccccgtaaggttcacgtcagaaggggatacagaaggggtgtggggagcaggagttatttagatgaaacttgagagagggaacaggtctgtgtattctgttaaatagagatattaaaagtaaggaggggtcat

SEQ ID NO: 74625 - DNA, 315 bp, Glycine max
ggcgattgttgagttgacgagtgaagaatgaatgagagagagtgtgtgtgtgtgtgattcacattctgatcttgaatcgaatgcatctacaacttcatggctgcggcgatgaggatcgatttatgtcttctcacttttgtcaccgtcagaatgattataggcgctctctctcaattggacataatacaaagatgggaaaactctaacggcaccgattctttgccatttaaaaaattgcttgaactcgaaactgatcgtcactttaaattgccaaaaggtgttcctttttggattattgacacggaagcagaattc

SEQ ID NO: 74626 - DNA, 236 bp, Glycine max
acagaaggagaccaccaggttatgtcataaatcgtaacctcggacttagaaggggaagggcccagccttgatgtctatcgaaaacggtaggtctgtataccgaccaagctgaccgtgaagatcatacattcactctacaaacgtgcttgcttatgtctatcacaacactgatcgctgctgacattcctatggtgacatccatgggtggatgcggttctccgggcgtggactgctcc

SEQ ID NO: 74627 - DNA, 422 bp, Glycine max
ggcagacagcaataatcaattcaattacattacatagctgcctgcaagcaccaacctccttctactctcttctcctctttttctctctcgcgcccaattcaccttcaccgattcactctctctctccccacctcctccctaatttccgtcaaatccttgatcggaacagacgatcggaagcgaacgccactccgtgccggagtcttctagaaggtggattggacttccataatttcaatgaatatttgttagcttcttcgaaaataacttgatggaagacaaggaagaaccaaaagagataaagatatctggtaatgaattagatactgatgaaataatacagagtggtgtaaaacaatttgttgagagtcctcatcacgaaaatgtaaattctagcagcagttttggggttgaacttatag

SEQ ID NO: 74628 - DNA, 446 bp, Glycine max
taatcataatttataattgtcatttttatttggaggcgtggttttctggaaaaaaaattggtcacagagttggcagaactagaaaggaagctcaaaataaggctgctgaggattctatcaaacatttggcaggtaagatattctaaattttttcattgtgacttgctatagtattatctagtctacatttttttgccttttgtaatttttgtcccctccaaaaaatacatatggtagtttatatttttaaaaaaattcaaaacatcaaaagcatagcctgccttgttaaatcaacctattggcttgatattgaggtttagttaatgatgttttaagctcatgcatggtcctgccatcaataaaaactcagtgtataccttgttagagatctaaaaccatttttgggcattcttcttatagctttagctttctaagggagttgatct

SEQ ID NO: 74629 - DNA, 318 bp, Glycine max
ggactgtcaagctgactgactcggctctggagtgtggctgcgtcactgattcaacttatcagaacattctattttctcaatcagctgaaagggactgcctctgcgaacacaccaacgtctgctacgccttctcctgttctaagccggcgaagtctatcaaagagattatcaaagtccaggagaactctgtccatgtgtagcttgccctaaacgcgcttctaattagctctatatctcaccgtatattagacatgcacacacactcctaaaagctcaggtgcgatatgatagatatcttagcatagcgatgctcattac

SEQ ID NO: 74630 - DNA, 379 bp, Glycine max
  unsure (1)..(379): unsure at all n locations
gggcacctttttggattccacgggggacactgtaaagaaaaaggaggaagaaacaccattgtatcacttaccgcatggacattgttccaaagacactcttttgtctatcacagaaatctacaccatttataccacacctcgctcgatgtgattatagtgattattacacgatatatactcttatcatgcgctatacgcagtacatatgagctgtgttttttgcccttgtgtgtgaataatatagctgtggaacactctgacttacacactgaggtgagacactatgttgtgctctgatatgtgagctctccactgagactgtgttatatgtaaatgagctctattattttgcgtctnccnaataaaaangacacaaaaa

SEQ ID NO: 74631 - DNA, 266 bp, Glycine max
cgaaggcctaagctaccaggagctcgctatctacagagtatccctctctttctctctctgtctgtgcaaaagctacgactctgtggtagactcctttagattaggcagtaagcttttatggggagtgtaaatggatgcttcgccgaggattagatcaacttgatcttacttgaaataatttagaaattttgacggactccgaaactaattctagagctctcccagaacaccatcagaatacgtgtgagattcagacccttgatgca

SEQ ID NO: 74632 - DNA, 155 bp, Glycine max
accacgcctcacgacagatgagagaagcgacggaaggcgtgtttatgtatgaaatactggtagctgggaaacagcgaatggctctgtttgtttctcttagctcgcttgatggcttgtctacaaaaataaccgtggccactatacagataacacga

SEQ ID NO: 74633 - DNA, 445 bp, Glycine max
  unsure (1)..(445): unsure at all n locations
ggattcatcaatattttcttctcatcgcttaatttggaagtgttttccttcattaatttctcatccaaatatatattcacttcattctcttcttggctaccttggcagtttaacttcacgtggctttgcatgatgcagattccaccaagaatggccacttcattttctgccaactctcccaatattgcagcaaacaaggtactactatatcaattaattaataagagaataatattcataaataatttctaccatcatgcacgttacctgtcttactcttgcaaagagtaatatacctttcaaacattttagaaaggtaaattgaacagcgttcttttaatatttaacacatctaaatttacaaggngtctaacgtgtcaaataattaatcataactactatacttatcctccatctttttccttcaaaatttgaataaacatgg

SEQ ID NO: 74634 - DNA, 403 bp, Glycine max
  unsure (1)..(403): unsure at all n locations
cattatcattttactcatatttttgtttgaaaacatattatttggcttgaaagatttgtaaattcaaggaaccaataacgtatatatttatatatggatttcatatgcatatttgtgaaatgttttattaaattaatctatagaccaatatatgaaatgtggtacttttgatagtgaccaaaattcaaattactatgagcttcatgtgtgtgtgtgcgtgtgtgtgttgtcatctttatatttataagtacattcagtgagttatcagttctttttgtttatcatggacatacctaattatatattaaaaggactatgaaattgctttaaagttatctattgtccatgattgatttcatatagctaaatataatagctcntacatgtatcaaggtcacaatac

SEQ ID NO: 74635 - DNA, 69 bp, Glycine max
  unsure (1)..(69): unsure at all n locations
gacccacgcgnccggcgagaagacgacagaggggctccncatcaaaccaagacatagcaaacganccaa

SEQ ID NO: 74636 - DNA, 219 bp, Glycine max
gccacaagaccacacaaggtgctccttttcattccaagacatagcaaacgaaccaatgtgtttgttcatttacatcatcaaaatgagtcctaacaacgatggtagcggcacctgtagctctaggtttttgaaagtgactagtgcagcttcctctacagccgccttttccgacggtttatatgccattctttcatcctcaacctctgctagctctgacat

SEQ ID NO: 74637 - DNA, 387 bp, Glycine max
gatattgaagcttatgtataacattttgatttgattctctgtagtctttccaattcacgaaatgctaatatgttatgtatcagtgagatgacagaatgagcttgagtgcccgagaatattcgattcaattcaaataaaatttgttcacccacagcaaatggttaactaacatattttgtggtaatttttctcttctaataaaggtattttttcgaaaatgaacaaaacaatatataatctaaagattaatttttcatttaaaatctactaatgcttaatatttttttcttctattttctttgaatattagcaatgtttttaaaaatagaagtatactaagaagacaaacatgttcaactatacttaagagacaaacaaattataaaa

SEQ ID NO: 74638 - DNA, 402 bp, Glycine max
  unsure (1)..(402): unsure at all n locations
gtttgcatatatatatatatccagcataagatgtttgaaattgttttatctatgaatactattggtaggcccattaatgcataaaaattaacgatggagagaaaattcgtttcaaacctaaatatatgcataaagacccaaaattaataataaaagaatataatgaaaaatcattatcttttcgttaatcattcaacacttatctttcttgagtgagcaatgagtaagatgcatgttttctgtctctagtgaagggatcttgtagggacattcaactcttatcttttttttagttgcatcgatcatgatcttctcatanatactcatcttagggacattcaacttcgtgaaaaatagctaaagcgaagagaacaccatgtgattaaattcttgcattttgtt

SEQ ID NO: 74639 - DNA, 422 bp, Glycine max
gtgtgtcaaacgaaaagttatttggttgtttaagattacctggtgtctatgttcttgactaatcttttacatacatgttcaaaatttaccattaacgaaaaaaaattaatactatgttgtgcagaaattaatcttgatcataatagtactgaatcatataataatttctcgtgtgttttttatatttctctttattacaataccaatttttttttgcatgcagtgacaagcaaataaattggaaaaaaaacaaacgaatgaattaagaaactagctatgatggacatagaaaagcagaaagggtaaaggtgttggaaatggaattgcaagactgtgtgacatgaaggggaaaagagttgaacttttactgcagtaatgggaaattcatactgaaacaggtatgcttctagaatgaagaaatg

SEQ ID NO: 74640 - DNA, 386 bp, Glycine max
cggaattcccgggtcgacccacacgctcgcccacactgttgtacagctccgaaaatacaactcaaggggacgtccacattcaggaagggtgttgttcaaaaattcgccatcgtcgatagaagcatgatagccttactcgatcatgatgatacctatgcgcaagaataagcgcatgatgacgctgatgagctagcgcctaacgatgagacattaatctacttaagtgcttgagcaggagtagatatgagctttccatctgctaccagcctcatcacattataagctcgcatggctcttatgatctttaagtctagccactaggagagcttcactcttgacttactttgctttactgacccttgtcctgggcccatactattgagtgt

SEQ ID NO: 74641 - DNA, 292 bp, Glycine max
tcgcggacgcgtgggctgggataagacaacagaacggagggcaccgcactggaataatgagaatggatgctaggcttatgcaatatttgttgcaaatttgcccatgaatgcaacataggcacagctggaacgtgcttacaagaaatttgggcccattaaacaagatggtattcaagttagaagttatatgcaacagcactcttgttttggctctgtgcaatgagaatcttcttcttcaatgcagagcgcaattgaggcctcacctgccgttaccttaaatggacggatactt

SEQ ID NO: 74642 - DNA, 128 bp, Glycine max
tggcactcaggaccttgactgcgtgaggactagctggcatgaggagattcacggcctctcttcagagaacggctagtctcaagcgcgaatcggatacctacaggaggtctctgaccacaatgttgggc

SEQ ID NO: 74643 - DNA, 70 bp, Glycine max
gattgcagctagcgagcaagaaaacggatgcgcgaacgcggctttctttcgccttgcttgttgctttact

SEQ ID NO: 74644 - DNA, 354 bp, Glycine max
gtgagagagagagcgagcagtttcagacacagagagaggggtttgggattggagggattgacgctgcgtctcttcctcttctctttcgatccatccctcattcctaatcctccaatccaaccacctcagcctcacactcacatatacacatatctgaacgcgtatcgtccctcctatggcttcaaagcgcatcctcaaggagctcaaggacttgcagaaagacccaccaacttcttgcagcgctggtccagtagctgaggacatgttccattggcaagcaacaataatgggtcctgctgatagtccttatgctggaggtgtattcctagtcactattcacttccctccggatta

SEQ ID NO: 74645 - DNA, 78 bp, Glycine max
ggcagcgcttgatttgaggccagtcaagcctgggggaatttctacacctgtgttgggtcaccctacccttttctgctc

SEQ ID NO: 74646 - DNA, 400 bp, Glycine max
ccatacaaaagagcgagagccgtggccacatttgactggaagcatggaaactatttgcatcgcgctatacaatggctactattaaataccgcgacatgaaccttaatagaaatgaactagtttgaaaaataaaccaacgtcgaatgtaaaaatatgtaaaaggagtgtagtgacttattaaagtgctttgtaacaatgttatttatcattatgacttgtcaagtacttacttaataatagatccaaacactatagaattgcataatagctcattacctgcagatctatctaagaacataaataactcattaagtatcagacactcatgggatgaactgttggatgtgttacatgacttatttgatgcgatcttgatcaaactgattatcacacatgtgta

SEQ ID NO: 74647 - DNA, 104 bp, Glycine max
cccggccggaatccgggcgcccacgcgtccgctgcggaagacacagaaggggacacgctataccgctgaagcttgctactgacactctcacgactgcatacgct

SEQ ID NO: 74648 - DNA, 365 bp, Glycine max
ccctgagaccaggagatgttctttctattattttcggacagaagtgcccttgaggttgggaaaaattactttgttgcatgaaccggcattgctcgtcaaccgtagttacttataatcacaattagggacgtatgaagggtcccaaatcacccaacacgtgttaaacgagagccacatcgtgccacgtgtgagtcagccatgcacggatgaaagtcaaagttactaagtactgtagtggttaaataaagaatagatggagttaattactaacattaatgaggtaattaattgagacataaagaaattataaataaaactaagaaaacgccaagaggaaaacagggtccagtatggagggcactgag

SEQ ID NO: 74649 - DNA, 323 bp, Glycine max
ggttctagtgtatgtgattgttgtgactcgttcttcttcgtcgatatcttcttcttttgttgtttgtgtgtttgttttttctctcacctgaaaatgtcttgctgcggtggtaactgtggttgcggaagcgcctgcaagtgcggcaacggctgcggaggctgcaagatgtacccagacttgagctacaccgagtcaaccaccaccgagaccttggtcatgggagtggcaccagttaaagctcaattcgagagtgctgaaatgggtgttcccgctgagaacgatggctgcatatgtggagctaactgcacctgcaacccctgcac

SEQ ID NO: 74650 - DNA, 54 bp, Glycine max
  unsure (1)..(54): unsure at all n locations
gacctcaggtcaggcggggctacccgctgagtttaagcatatcaataagcggng

SEQ ID NO: 74651 - DNA, 303 bp, Glycine max
aaaaccggccgacggacgcgtacgacacgcttccgtacagtttcaaaaagactacagaatgggatgatgacgaggatgaggagcaggattaacatgggggtgaggtgtccatttaaaagaagatcttcagattttttacaacttgatggaagtatttttatcacaaatatatatacatatgtcatcatttcttatttaagatattaagcatttaatattacttcggattaactttcatgttttttttttgtatttattacttgacagataataatcattgttcttctgcctgtgttctcaata

SEQ ID NO: 74652 - DNA, 446 bp, Glycine max
ccccaaaagaacaacaaagggtattttttataattttccaaaaaaccattatttttggggtgtattaaaaaaggagtcctatttgggcctttccgttggtggaaaaaataaggctttcctccccaaaattccaatccaaagtttacttccttccaccgattaaatgattaactatcacaaccgaaatattcctttattttttgaaagtccctttttattttacttccacaaaaaagactaggataaaaacaaaaaaaaaagtgatcccccttttcttgttggtcttatatccatattaatggagatagaattcatgtcataatttaaaaaatgaacatgtataattctttttcctattcaaaaatgatgagggggttattgataattggaaaagagtttttatggaagatttaagttttactaacaattttaatttgaatttttta

SEQ ID NO: 74653 - DNA, 126 bp, Glycine max
gattattgccgtcgaaaaacccctttttttggagggacctatttaccatataatttttataggttaaataaaaatttttaccgggtaggtttcttaaaaaatggatatttaaaatttatttattta

SEQ ID NO: 74654 - DNA, 247 bp, Glycine max
cgtgctcttacattgcctagtgcggccatgtcgactctgaggaacctctgccggtgtcgtgggttgtgtctatccggagcaagatataatacatgttttgacaacgtatatactagcaatgcttgccgatggccgaaactgctgtctttgcttattctggcaacaaccttgtggctggcactcaaggatacctccattgaggagcaacggtcacacacagactaatacaccgctcatgatgaccact

SEQ ID NO: 74655 - DNA, 401 bp, Glycine max
cccacgcgtccggacgacagaaggggaatacagttaagttattctcactgggctttgtagatattaagcatgggtcaaacacctaatcatttaaatagcctgatgagaccctttatgtattgcaacttggtttggttcattttttttaaaggtgcatatttctacatgaagcttaattttgggtcttttacatttttttccagatgtttatcatgaaaagcaagaggtttttgatcgtgaagcacaaagatatgagaagttagcccaggcaaattatgatatgtttgctgatgatgacgagcatgataccagtaagccatctacggatgaaaataatgcagttagtcaatcttcttcagatgccataaattctggtcctgagggtggagcatctcaaagcg

SEQ ID NO: 74656 - DNA, 399 bp, Glycine max
ggaagagtgaagagaatggctcccaagggtttaacctttctggctgtgttaatatgcgtttcagcactgtcactgagtccttctgttgcgggggaagggcaaaataatggccttgttatgaacttctacaaggaatcatgccctcaggctgaagacatcatcacagaacaagtcaagcttctctacaagcgccacaagaacactgctttctcctggctcaggaacatcttccatgactgtgctgttcagagttgtgatgcttcactgttgctggactccacaagaaggagcttgtctgagaaggaaacagatagaagctttgggttgagaaatttcaggtacattgagaccatcaagaagctttggaaagagaattgccctgaagtgttcatgtgctga

SEQ ID NO: 74657 - DNA, 169 bp, Glycine max
gtacaattcaaaaaaatgcttccaatggctggggctttttagctggggtaagatgccccataaaaactgtgacttgaatcgttcttttgcaggggaaaggcaacataattggcccttggtatgaacttctacaaaagaatcattgcccttcaagcttgaagacatcatc

SEQ ID NO: 74658 - DNA, 181 bp, Glycine max
cggccgaatcccggtcgcccacgctccgacggctggagagaccaagaggggcagctgctatttacgacccaagggaaagggttgcagaggcgcttcctgctaaccatacatttcgctgtggtctatcttgactattaaacattatagcggccgattaggggatatctactagtaccgtgca

SEQ ID NO: 74659 - DNA, 98 bp, Glycine max
gacacacactggacctttatcgatgtctggagggtaagcctcatctttgctgagatccttcttagaaagccaatcttgcctgagactgagactctcaa

SEQ ID NO: 74660 - DNA, 419 bp, Glycine max
gttgatgcagaggttgcttgtagtagtgctcaaaagttcaacatatttggttcaatacttgtaaattaccagcttaattatactcctagtgcattgttcaaagcttcgtctgttgccacaacacaggaccaggagatgcatcttgatctctccaattttgaagttcatatgattgggagtgttgatgatgatgtggcggctaagtttggctgaatgaattgctgaagcaaaattttacctagtggctgctgaagtaggtaggtaaccagaatgttaattcatctggtcgtccatttttctgttaagagatattttttgttgtaggattcctttagttatagttcagtagttttgtaattcattttctagttttctgtatagctttgtcaactgaccctcttttgtagttgccatcattc

SEQ ID NO: 74661 - DNA, 420 bp, Glycine max
  unsure (1)..(420): unsure at all n locations
ggttctagtgtgtgattgtttgttgttgtaactcgttcttcttcttttgttgttctgtgtttgtgtttgttttttctctcacctgaaaatgtcttgctgcggtggtaactgtggttgcggaagctcctgcaagtgcggcaacggctgcggaggctgcaagatgtacccagacttgagctacactgagtcaaccaccaccgagaccttggtcatgggagtggcacctgttaaggctcaatttgagggtgctgaaatgggtgtgcccgctgagaacgatggctgcaaatgtggaccaaactgctcctgcaacccctgcacttgcaagtgaggtgttgggagagcaagcttcaagcagaaatagcccttaattangaataatgataaactattaatgtgtagcttaaaacctatgtattatgt

SEQ ID NO: 74662 - DNA, 415 bp, Glycine max
aatattgcgtaatttaataatacaaaccattggtggcgcctattcgacatcatatattgtgtatagttcagagacaacatagactttttttaagccttgtaatttaaaggttaactccatcttacacaaagtttgataaaatgtggtagtagaaaattagtcttcaaaagcttaagaaaaattctctaaaaaacacataaatgataaaatatcaactataatcattgattaacgagcgcgtaaagcacaaagtctacatttcttccactagaacccatgtcacatcttgggttttcttttcccacccgagtcaaacgaaccatataattccaattttacttttagattctataccattaccagtagcacgtccatccagtgattcaaatgcaaacatagtagatatgattgattt

SEQ ID NO: 74663 - DNA, 243 bp, Glycine max
ggcatttcaaaaaaacaaagaaggatatgaaagcgcggcttcttcttcttcagctgctgctgctgctgctgcttcaacttcccaacaaatatttcaacacactctctcatttcttcaatttccgttacgtaaagccactttctcaaacctcaatttcctgttgttgcggctgaagctggcgagagactaatcttggggaattttggatctgtttgccgtgaaaccctaatttcttccttgtga

SEQ ID NO: 74664 - DNA, 93 bp, Glycine max
ggctgcaggaaaattaatgcccctttcattttgtgtgcatctgtagtatctatcaccaatcaattccactcttcttcccatcaaacaacacat

SEQ ID NO: 74665 - DNA, 407 bp, Glycine max
gatcatggacatctgagatgaggctgaaccacgacatagtttcatacgagttcttctattatcaccataccttagccgttcaactcccatataacccaagcaaatttgcctttagattctcattttccgtcaagactatctctctctctctctctaggaatccaaaatattccaactaaacctttcttccttttcatggcagattctacccgtctttcattcagttcaatctcatacctgtatgtgtatctttaatgcaatcagttgatgaatgagaagaggaatccaaaacgtcaaaaaccactgactttcatcatgcctgtgacagactcaaatgatccgcagaattttgatgataacattcttttccctgttgaagagattgaacaatacccgttgtccggata

SEQ ID NO: 74666 - DNA, 268 bp, Glycine max
agggtgctcgaatgggcgaggtgactcaaaaaatgcggggtttatgagaacaagggtggagctgttgttggtgctgctatcggggttttggcgcgtatccggtgtgaaacaaagaaaaagaaatgcttacgctacgatgatgttcgtatgaacgccgtgggactactaattctacataggcatactcgtgctggtcatatcgctggctacgctcgacactcaagctgatcttgttgtctttgcttcctttggagcatctcctcgatgg

SEQ ID NO: 74667 - DNA, 338 bp, Glycine max
cgacatactgatgacagagagggaattgtctcaagttaatgatattaataacctcaaaattgtccatctcacgacaaacatccttaaagccaagatcccaagcattaccaaaaaatatgaatttaaatcgctcagtttggtcgctcaaagtatcaatgatcaaaatggtgaccaaataacgtgtgtcgcaaaaaccctactctcgaagtctttagcgaccgaatttcacttttgtcgctaaatagcgaccaaaacaatcaatcaaaagaaaagaaaattcggtaattgcatatttggttgctattttgcttgggattagttgcgcaaccgaaatattc

SEQ ID NO: 74668 - DNA, 333 bp, Glycine max
ttgtaagagaacaccagagggggtttacggatatgcgctctgttgggaataacgagggacatgttatgcccacttcgtttcccggcatcaaatattacacaaaatgaacaatattggcatcaccatttcctataccaatatctgatcccaggagatcaagtgaacttgagatagcacggttctaagtatcgatgaaacttgaatactttttttcaaagaaatgccgccctgaaactcattctaagtgaaaagctcacggtgtgacaactctactcagaagtattagactaattatatgaggaaaggtgaccttacaggactattcatgtttat

SEQ ID NO: 74669 - DNA, 223 bp, Glycine max
ggtaatgtgaagatgttggttaaaattcacacaaatgtgtttgtcccatttgcgttcccagtccgactggcacacaagattgagggttgttttgagttgagtaagtacgtgttatttacgcgttcttccatatctttattatttttagtggataacgattaatcccattttattttttttaataaaaaaataaagctgtcgctctttaggatccaagcttact

SEQ ID NO: 74670 - DNA, 389 bp, Glycine max
gggataccataacctataattagggagcaaggataaaggacaatgcatggagcaatccaacctagaaacctactatatcaagcatattgatcattaattaatttgaaaagggatgaatagtgtgggaagtgcgcaaactttgccttaaacaattggttaattgaattgaaataattcccttttaaatcatgcatgttcattgtagctagttgctatcatgctgaaatttttatattttgatgctaacaggtgacaagcctacttaataattgaactcctctttgttgcatgtggctttgcttcctttttttttaatgtgttgagatcgatatacagtaggaccaagaaaaacaaacaggctacacacagtttagagaagccacttgcgt

SEQ ID NO: 74671 - DNA, 423 bp, Glycine max
ggttctagcgtgcgattgtttgttgttgtaactcgttcttcttcttttgttgttctgcgtttgtgtttgctttttctctcacctgaaaatgtcttgctgcggtggtaactgtggttgcggaagctcctgcaagtgcggcaacggctgcggaggctgcaagatgtacccagacttgagctacactgagtcaaccaccaccgagaccttggtcatgggagtggcacctgttaaggctcaatttgagggtgctgaaatggctgtgcccgctgagaacgatggctgcaaatgtggaccaaactactcctgcaacccctgcacttgcaagtgaggtgttgggagagcaagcttcaagcagagatagcccttaattaggaataatgatcaactattaatgagtagctaagaacttatgtattatgtctg

SEQ ID NO: 74672 - DNA, 316 bp, Glycine max
ggttacactgggtgtcatgatcagtcattttgggtgtgttcttcagccctttactgtgtgctgtattcccatgatggcgcgaacgcctccctgagggcgctgacgtagctgctactgagtcagccactgcggctgcaacaagcactgttatgacatgaactatccttctatgtctaccgtccaaactcttggaaagggtgtctggctctgtgaacgcccaactgggggtggctgatatggacgtagtcattgagaacgggaggtctgactgtgtatcccgctgcgcgtgcaagcccttccactgcatgtgaggtcg

SEQ ID NO: 74673 - DNA, 200 bp, Glycine max
ggagactagggtaaggtcaccttgaaacctaccatgtcaagcgctgttactatgtatgtagtttttgatggcagaccaaaccctaaatccgcataacaaccatctttaccaagcgatgaggaaaagctaatcctttgcttaaacacaagtctgattagatggatcacgacgaggttgacatggataacattcataataaa

SEQ ID NO: 74674 - DNA, 189 bp, Glycine max
agtcttctatagcgtcacctaaataccttggcggtatcatggaaatccctattaacattcaaagattttctgtttgtggctttaagatttccaagacgtctctcgtgcagtgtttctgaacttggtgagggaaaccgtacgtgccttataaaaaaaagacatgatcactcactgtctacctttatactt

SEQ ID NO: 74675 - DNA, 136 bp, Glycine max
ttacttttgtgataagactacagatggtttcggttgcgaagacgacagaagggtactgctgctataatacgacagaatggtacttctgttataagacgacagatgggtactgttgttatatgacgacagaagggta

SEQ ID NO: 74676 - DNA, 235 bp, Glycine max
ttaaaggaactgatatgctaagacaactatggggtactgggtgcatattacaagatacactcacctattcgacaaaacgatagaaacggatcagatccttagctaatcattagaccatacgtaatatatgtcatatgattaccagccgatagagtgtgggaagagatcgccacaacaaatacgttcgtgactctggcgacctctacatagattttctgatcgtactaacagaacc

SEQ ID NO: 74677 - DNA, 420 bp, Glycine max
gacttggttactctatgttttactgcatttcatggttttaactcaactttttgtggccttctgtttcttgtatcgaccatttaaatgaaataacaaaaggaggagatagaggaaatcaactggtggctccatttgtgcttggtgctggttttatcctgtaactggatctgcttaatttctatcctagctttcttattttgaaatagttgaagtctgttcctgtatggtggaaagttgcccagtgctaactgcgttgttcttaaatttaatctctgcgtaacttacatccagaccattgatttattgaccacccatgtgatgtgtttttgaatttgaatgttgatgcagactccatatggtcctcctttcgcacttattcaaggaacattggaatcctatgggtctatgttcaaggatatt

SEQ ID NO: 74678 - DNA, 87 bp, Glycine max
ttacgggtacttctgctataagacgacccatgggtaccggtgtgagatcactagagattggtccgcctattatacgacatcaaacgg

SEQ ID NO: 74679 - DNA, 395 bp, Glycine max
aacagggacttggttactctatgtgctactgcatttcatggttctaactcaactttttgtggccttctgtttctcgtatcgaccatttaaatgaaacttcaaatggaggagatggaggaaaccaactggtggctccattccttcttccttcttggtttatcctgaagctcgatctgctcaatttctatcctaccttccttatttctaaatactagacaactgttcctgtataggggaaagctgcccatcgctaactgcattgaacttaaatataatctatgtgttacttacatccacaccattgttttatttaccacccatgtcatgtgtttctgaatctatatgttgatgcgaactccatatggtcctcctttcgcacttattcaaggaacatt

SEQ ID NO: 74680 - DNA, 214 bp, Glycine max
cacctggagtatgcgccacctggcaaattgaagcggggcacccttaataccttgtactaacatgtgtcttgatctaccgcgaattggtgcccaataaagtagcttttgatttcactggcactggccgcgggggcgaaactcactgtcacccctcatgacacgtggaatgcattgaacttgacaaatgagtgtacgagagaacaggatttgatgg

SEQ ID NO: 74681 - DNA, 148 bp, Glycine max
aagatacaatttgcatcattcatttagattgtgaatcaaagcatcaaatttcctaacacattgacgtaaaacaaaggatttccaaacacattgacataaagcatcggattccctaacaccctgacgcaaaacaaaagatttcctgaca

SEQ ID NO: 74682 - DNA, 317 bp, Glycine max
accggcgcggaagacccgggccgacgcacgcgtccgaaacgcgtgcgcactgtagaggatgaagactgaggggcaagggcacgcgtggacttaggggtccttttgtgttaggtaaaaacaccaaatcattttaacttaaacaatgactacggtgggtatatattgtcgtcccttgtacttttctccgatgcaaatatctaatttttggctgtctagactatagctattagatctggagagatcggctgtcgaatcgggaggatatcattaatggcgagggatgagcgcttatatcgatcgcatattataacaatgtg

SEQ ID NO: 74683 - DNA, 254 bp, Glycine max
ttgttcatgcatcctccaccagctaatcttattcggagtcccatgaattaatcgtcgttcatgcatcctccaccattgtgtctggatccccacgaatggattgcctagcgctgttcgtacatccttcatcatcaaatcttattcggagccccatgaatagattgacgttcatgtatccttcaccatcgtgtccgaagcaacacgaattgattccctagcgctgttcgaggaacctccatcatcatatcttattc

SEQ ID NO: 74684 - DNA, 181 bp, Glycine max
gactccaccccttttggttcacgttctaaccaaagtgcaacggctattgttctttggctcctatgatccactacaatatcacatttcctcttactctatattcatgtccatttaactccacgatgcagatccgcacaaccaaccccttcactattactgtttccttatcctatttcaaact

SEQ ID NO: 74685 - DNA, 267 bp, Glycine max
ggcgaagagtgaagagaatggctcccaagggtttaacctttctggctgtgttaatatgcgtttcagcactgtcactgagtccttctgttgcgggggaagggcaaaataatggccttgttatgaacttctacaaggaatcatgccctcaggctgaagacatcatcacagaacaagtcaagcttctctacaagcgccacaagaacactgctttctcctggctcaagaacatcttccatgactgtgctgttcagagatgtgatgctttac

SEQ ID NO: 74686 - DNA, 356 bp, Glycine max
actagttagctttacccctgcctttgcatcactttcttctcttgcaatgatccatttttggtgcctctgtgtgaagccatggtttgaagtccctcttcaaccttgaggacaaggttgattttccagcggtaggtaatgatagcaacaccagttgtaacatgtcccataatagacccaagaggactactaagaagtccatccatttacgtgattacgtgtcccataacagttggagaatatcccatcacatatcattttgttactactacatatcattctattattgccttttatccatcatccatttccgttgtaaccgtttcagtgtaagtttgttagtcatgtagtggtagctg

SEQ ID NO: 74687 - DNA, 187 bp, Glycine max
cactctacccctcgtgcttcttctcctattaaaagagcctccgcttttggtctaggcctctacgaattcacgactgggaccattttgtttcgactacagaaacatgcctatctagagtagcaaggtggatagtcctaacgtggactgcacacagtctgagtaacattccttgtactactatgaaacc

SEQ ID NO: 74688 - DNA, 412 bp, Glycine max
ggcacaagtgagtttgttgatcgagataactagaaacagtgcgatgaaaatgaaggtccttgttttcttcgttgctacaattttggtagcatggcaatgccatgcgtacgatatgttccctctccgaatgaacactggctatggtgcccgtactccggaggtgaaatgcgcaagttggaggcttgctgtggaagcacacaacatctttggctttgagaccattcctgaagagtgcgttgaagcaacaaaggaatacatccatggcgaacaatatagatcagactccaaaacagttaaccaacaagcttacttttatgccagagacctcgaagtccatcccaaggacatatttgtgttcagtatagatggcaccgtactctctaatattccatactacaaaaaacatggatat

SEQ ID NO: 74689 - DNA, 216 bp, Glycine max
cactagagacaacgggagctccaactcactttatgataccgcagcataggatgcctttgttagtgatctccaccttgtctactacggatgtgaggtcactatctctggcaaagtggccgaatgaggaagatacactgattgtattgaccctgaactctgtcagcagaatgctcaatacagacaaccctgttgggcttaagaaaagcacctaatctt

SEQ ID NO: 74690 - DNA, 260 bp, Glycine max
aactcgaaagtacggcttcgagaatttcccaatttgtacatctttgggacctttgagatgccttcacatgtgattttaatctctgtcacactataatgagaggtcctacataatgacaacgaatctttacactgaaggttgtctaattcagacaacactagttcttagatctatggatgattcatacactcagaacagacttgagcgtctggcttaaaaaagaaatcattttggggcacaagcatcttcatctattttag

SEQ ID NO: 74691 - DNA, 317 bp, Glycine max
agagtgcatctttccatttctgatttctgtggcatttaggaacctaagagagaataccaaatatctattagtttttccttcctgtgaaaattgtaatatataatttaatttctctaagtttattgccaacaggtgaacaagatttgggagtcattagaaaagtatacaaagaagcttgcccgtgctgaagcagtatatgcagggtcgaaaacaactgccaaaccagaaggaacaagacctacaaacaagactggcttccttggatttgttgtaaaaaggtggataccatagaatattgcaacgagaagattatgaac

SEQ ID NO: 74692 - DNA, 92 bp, Glycine max
ataagggcacctttacgatctttccatgaaccatatccttgcggaacacgtggaagctttcaagtgtaaacttacaatcaataagactgtaa

SEQ ID NO: 74693 - DNA, 242 bp, Glycine max
gatacctcaggtcatgcagggctacccgatgaggttaagcgtatcattcagctaaaaaaaaaataaaaacaccaattaatcaagcggcctctctaaacgatccaagcttaattacacgtgcatgcaacgtagttgctcttctataatggcaacgaaaatcaattcacttgacgccgaattacatcgtagaaactggctaaacattgacgttacccaacataatcggcttgcagcatatatac

SEQ ID NO: 74694 - DNA, 172 bp, Glycine max
cagtatgaggttttttcattgttctctgtttgtgtttaaccttaacaagcgatcgattatattcttacaatttattgttcggtagtctgatgctggatttcttttaactttttgaaggtgatgcacaggatgcattctaataagacaagaggctagagattgatcattggaa

SEQ ID NO: 74695 - DNA, 316 bp, Glycine max
gacaaggtgcctttgataagtgacatattaaaatccatacttgttccaagaagtgacgaaagactgcgagacagggagaggtctttgtcgaggtcgcaatctagcatcaaatgctcttgttactctagatccctttattccacacccccaaatctatatgataaattgtctcctcaacctttttgcattgtatacatccatctctgtattcctccaatttgttttagttttttatagatatgccattccttttttaagctctttgaagataggtttttttctctatagttctagttgatcaccttatttctttttc

SEQ ID NO: 74696 - DNA, 410 bp, Glycine max
cttctttgggatcagcttgaagaaggttattggctcaagggtccccaacaccaagatcccctatgagtacattatcactggacttcgccagtaagtaatcactaatcacatatttacatatttatgatcagtttgtataaacttaaaataagtcattttaaaaaataaagactgcttctgccactatacccaactataagtgatgaaagaaccaatgttgaatgtctaaaataatcgatgttaaaagtattttttctaatagtgatgaaagaagaagcaggaacaaaaataaaattgaaagaaagataaagacaaaaatgaagagtttattaaacataacactatataataaccaacatgatgacttgatctctacaaaattgtgcattagtatattgtgtgatggaagc

SEQ ID NO: 74697 - DNA, 413 bp, Glycine max
attcccgttaatgatgtgataacagctggaccgggacccagttcctttgttcaacacgttacaataatggcccatttttctctctcccctctctcctgtgcaccttctcctctaccaccacgccgccgaatctttctctctcctcctcgagccgccgcatcttccgccaccgacgtcgtttccacttccacttccacttcatcttctgcttcgaatttcgcgcccaaagtcgttgtcaccagagagcgcggcaagaacgccaagcttatcgctgctctggtacgcgcttctgttcactcacttcacatttcgcacctacgatttgttttcctacaactgcattgcaatgtgcttaaccttagtcactcgaactccaaccagctagttgtgtccgttttttttttccgagtctc

SEQ ID NO: 74698 - DNA, 418 bp, Glycine max
  unsure (1)..(418): unsure at all n locations
gaaggtgcaagagtttgttgtgagctataagctagtttatcgtgaggagaatatgaagttgtttgttttctttgttgctgcagtagttttggtagcatggccatgccatggcgcaggctaccaaaggttccctctccgaatgaaaactggctatggtgagcgttcttcggaggtaaaatgcgcaagttttaggcttgctgtggaagcacacaacatccgagcctttaaaaccattcctgaagagtgcgttgaaccaacaaaggactacattaatggcgaacaatttagatcagactctaaaacagttaaccaacaagctttcttttatgctagtgaacgcgaagtccatcacaacgacatatttatattcggcatagataacaccgtactctctaatatcccatactatgaanaacat

SEQ ID NO: 74699 - DNA, 160 bp, Glycine max
aacgggccgaccgacgcgtacgcccactcctccgtacaattactagaacacttcttaaaattccacattacattaaaaactagatgcaattttatagactaacacaacactctaactctccaaaacatatcaaaccaacaaaccaattacttctcattca

SEQ ID NO: 74700 - DNA, 191 bp, Glycine max
aggcgtgcgaacaggtgagagacgactgaagggggaccgtaatcattgcatcttcacgctccacactggagcgctaaggacgttgaactgctgttactcacacacgccatgggtgaatgaatggtttttgagcaacagcagttaaaagagaaaaggggttcaccgtatatgacatccaatgttacgtaccc

SEQ ID NO: 74701 - DNA, 225 bp, Glycine max
gcccggaagacccacgcgtacccacgcgtccgcacacgcgtgagaacacgtcttataggacctcaaaagggaccctatgcatcgtgtgatgggttcctactgaaagatacactcttccattatcccgaaaggtagtgacggatgacttattcagacacctactgaccgctgcatatatatggacatctctttacgacccataaagatagacgggatggatcacta

SEQ ID NO: 74702 - DNA, 306 bp, Glycine max
ccacgcgaacaccaacgcgtgcgacgaggtatagaccactgatgggtgtcttattgtgtgacagaatcaaaccatacagacctttcctgacttaatcttactccttttaaatgcattgagccagactctaacattgagttaatgaaataaaccactctacattatatgtactgaagagcgaaatttttatcctcgatcttaaaaatgggcaactgttctcaagatgtgaaataactgctgaagactgtgataatactaacactacccaatgtacttaccccctcagcaagagaacaactaagtgac

SEQ ID NO: 74703 - DNA, 448 bp, Glycine max
gcggaccagcggcgtacgttgctaaagcgacagattgaccttttccttgccccattacaacctgaaatgcctttttatcctcatggcttgtctttatgggttgattgtcaattttagaatcttgccaagtttatgtggtgctggttttcatgggtgctttgagggtaaatagtatcctagacacttgagagatggagtgcatatcttgtgaggctttatcacatttcattcttgagctgattaactattttgccatgattgggttgcttggatgatcttcactaatgtctagactctatggatctcttcatgttagatgttacccatttctttcattccttgatgttcattgagaaaaatgtgaatggtttttgtctttctctctttgatatcctaagattttgttcttttgttcattttttcccagcaattccatactgcaaaattt

SEQ ID NO: 74704 - DNA, 238 bp, Glycine max
ctaccctcactaatataaaaataacatctatcttctatacattccaaaccatatctcattgattccatatcaagaattatctaattacatcattaaacttctcatgttacatctataacacgcactcaccaacctacaatttcaatttttttaaatatattatatacccttcttcaattaaaaaaaaaaaattgatttcatacttatcatccttcatccctttaataatacatacaaa

SEQ ID NO: 74705 - DNA, 174 bp, Glycine max
atacgttgcggctgctagaacactactgaaaggagacctcatgtcatgcgacgctacccgctgtgtttatgctacatgtctaacacgcactctccaacctccgcggccgctctataggatccaaatttacgtaccctttcatactaaaaaataatacttttttagtgtctccta

SEQ ID NO: 74706 - DNA, 361 bp, Glycine max
aaggtaacagcatccagtggaaactaagaggagcttaactttttggttaacttctacgttcacgaatataaaattaagttctatcttctatgcattgcaaaccattgtgcattgatgccatagcaggaattatgttattacatcatttagtttctcatgttacatgtctagcacgcacgcaccaacctgcaattgcaatggtttgaagtatatgatggacccttgttagattaaaaaagaatagatgatgtcatacttatcatccttcataccgtttaagatacatagaatgctgaacgacgttttgctttatagatgaatgcctgatgatgttaaacagatgccaataacacataaaatc

SEQ ID NO: 74707 - DNA, 54 bp, Glycine max
  unsure (1)..(54): unsure at all n locations
agacctcaggtcaggcggggctacccgctgagtttaaacacannaaataaaatg

SEQ ID NO: 74708 - DNA, 352 bp, Glycine max
  unsure (1)..(352): unsure at all n locations
gcggagccacgcgtccgccacgcgttcgacgactactttatgactttataatgtcacgtctcctnataagaccactgacctgttctaatggcaaaaaacaacttaatttttctgttcctttaatacttcataaatattcatttgctataacactacaaaaagttacaactcctagaatactacatacaatacacctaatttcaaacaacactacactctttgtttaaacaccacaactaatccgaataatacaataaactctaccactttaaatatatccatacttacctacactctcattctactctataatttttttatacattcatataaattaaacttactttatacc

SEQ ID NO: 74709 - DNA, 235 bp, Glycine max
ggttctagtgtgtggttgtggggtgttgtaactcgttcttcttcttttgctgttctgcgtttgtgtttgatttttctctcacctgaaaatgtcttgctgcggagagcactgtggttgctgaagctcctgcaagtgcggctactgctgcggaggctgcaagatgtacccagacttgagctacactgagtcaaccaccaccgataccttgttcatgggagtggcacctgttaaggct

SEQ ID NO: 74710 - DNA, 310 bp, Glycine max
cggaacgaccgacccgaccgacccgtccatacacacatacaaccacgactattaccttttctaaaagactacacaacttcggggtgagggggttccaattaacgactatcattctatatctaatataatactacaaaaatgtacacttaactaaaatcatgattaggcattaaaaaatattcgaattaacacttaatacccttagtaagcagcttctaccaattttacatgtcctacagcagaatctacttagacaaatcttctcatgttacaaaagatctacgtcacttcatgatctgcattacacatt

SEQ ID NO: 74711 - DNA, 311 bp, Glycine max
ggaaagacccacccgtccgaaccgtccaaaaaacaacacaaaggcagacttaacttgtctgaacatatattcaacttttggtgcatggtgctctcatttccaacaatcccattttaataatatattaatagaaaaatatccacttaaataaaataatgattaggcattccaaaatgattgtattgaaactaaacatccttatgaagcaccaactacgacttttaaatgtgctacagcaaaagcttgaatacgcaaaattattctaatattaaaaatacatgagggcactttaaacactgatatgagaaaca

SEQ ID NO: 74712 - DNA, 343 bp, Glycine max
tgaggcatctttaaggactgaggatccacattatcaagataaaagaatggtggctcaaagaaatggaaagatatcacttcaagtatttcatgtatatgctgggaaggaaagggaagctgtcttagatatgcttcgctatatgcgtgtgtgctatatctcatatccttctgagacggaatctgtacatcttctctcaaagtccattctgtcctgaacgccattgtatataacattctgcatcggatcatgtgcctgattactttaaggcacagtatgactggctaccctacaacattggctgaaggtgaatgtatgctgacagatgataatgtgaatccaaaca

SEQ ID NO: 74713 - DNA, 291 bp, Glycine max
tatcggggttttttatgtatcaacacctcctgactcattgatgcattaacaacaccgctcaaacactattcacaaaaaactctctcccaaagtaccaaactctttcctaacagaaacttaccccaattctatcaagatttagatattcagcacagctcacattttagaaaacatactatacgctcacaaagactcattctacatactcataaaactcccattccagcatagacaagatcatatgttgcacaaggaaaaacaatactggtccaattctatacaaaccttctt

SEQ ID NO: 74714 - DNA, 340 bp, Glycine max
tttagagtgctttctgcgaaaaaaccacaaaagggaacgggtgaaattcgaccactctagggcttccttccattccttctcaacatagctagcctattcttctttaaatgaaggcctttgattcaatataacttccgattttcatcactcactattctcctaatacccgttatcttcccagcttcatattttatacctacatttcggtatgctcacctgttttcttgaccaactgccccagactgattgccattcattattacagctcacattacatttcaaaaccgctacaccatttcacctaacataaacaagatattgtgtgtcattatcatacacc

SEQ ID NO: 74715 - DNA, 369 bp, Glycine max
ttcatacggcaatattaccatctgaaacctgtgtaaaaatataatactaatagttatgtaaaaactattaacctgttcctaaagtacatataattatttttaaaagaaaagaaaaaaaaagctgagagaatggaatattattagtacaaattatatgaagcaattagtatatctcaatatttagaaatatggtaagtgaatgaaactcaataaatgcgtaccttagtcgaaagtcaaaaccattcaaagccctcaaagcagcaccaaatatctgatgccacgtgttacgacctgtattcaatcattagaaatgttcgaattttttacatcttatacacgagaagttaaataagaattatttacatataa

SEQ ID NO: 74716 - DNA, 409 bp, Glycine max
attctaaccttgtctgcatgatgtctgagagcggccttgtggtatgccttcttgatatctgttgctgtatcagctgatttgattcctctgatattgacattgtaagaggttgggtctttaataaccttacggttctgaatgaggtaaggcacattgcagagtgtgtgaaattgagagagatgttgaataacaagaaaatagaagatgagaaaacatcttctagctatctttatcttttggtttttggcatagaaccggatttcaaacttagtagattttgagtaagaaattgattgtttgtaagtatgaaattgctatggaaaacagtttttaaaaccaaaaaatgagaatgaaatcaaagaggcctttaatgcttcactcaaagggaacaaaataaagggtcccaaaa

SEQ ID NO: 74717 - DNA, 340 bp, Glycine max
gctgcgcgaacacgccggtgggggatgacaaccaatgggatcacgacttaaataccatcggatgttggggcattgacggacatgtgctcaccttaaacctccatgaaaaagtcaatatggagaaccgtgctctctctcagctccttctcgggatgggcccaaagcttgtcaacaagcatgacggatatagaagaaccgaggatcgtacctggatcgatgtgtgaattagcgtataataaatataagcgatggcaacggtggtgccttgtgacactcagcatagcctgtcttatagtagggcaatctgctattgttatccttggcagattgtatcatgatc

SEQ ID NO: 74718 - DNA, 160 bp, Glycine max
cccacccgtccacaccgatactataagacttcaaattgcttcaccccttacaggcaatcgaattcttatcaatgcgcgccactactaatctcttaaacttacttactaaaacccccacagcaaccctttttcttttttaacccctaattgcaatacaact

SEQ ID NO: 74719 - DNA, 281 bp, Glycine max
  unsure (1)..(281): unsure at all n locations
cgaccgacccgtccnncacaacattcaaagacgacatttaaagacttataaacgcaaaaaaacaaaactggaaaacttgtaaaatttttcctttctataccatccaaacatactatctcacccattcaacatcttacctcttttatacattaacctaataacaataaacctgccgaaatttaacaacaacaaatctaataaaaccctcaacatacccaacttaatatccttacaacacattaacctatcaacaccagtcaaattaaccattaaacccaaac

SEQ ID NO: 74720 - DNA, 340 bp, Glycine max
  unsure (1)..(340): unsure at all n locations
tgccgtacaaccactcagatttgcggtctcaaaacgaccacataangggggacagagttaaaatggaactggatccagagaccatccangtcaaaatgcactggattatacacatccgacaaacctactactactatccatatacacgatctctttcactataaccacagcaccaagcgtttatcgagaagaagctaaagaactttgacaataagcttacgacatagcttatcacgcctttaatggatacatggaccacgctttcctcctacattaattgacacctccctcctgcacaagacataatacgcttgcaagctatgcaataaccttgattgac

SEQ ID NO: 74721 - DNA, 316 bp, Glycine max
catcaaaaagtgttgagaaactattcctcacttttttatgaataatttaaatttgtcaacattatttatcacacaatattcataattaattatttgttttgataataaatagtcacattaaatattatattactatttattataataacccctgattgtatgtgatttaattttatgaataattaaattgctcaacattatttattacacaacattgatatttaaaaatatttttataataaacaatatcctttaatattatattaatactttcggtccttttataaaaaaaaaaatatataggattttttatttt

SEQ ID NO: 74722 - DNA, 259 bp, Glycine max
cggccacgcgaacaccacctataagacttacaatcgaggacacaaacaggggtttagaacaaatgccaactacactaatatctacaacaactcacattacattaaggaaccgatacacgtttaatatactcatcaaatcgaaaggcatatagtcacttactcagcgacaataatctcatgctcttctaggaagaacaacccaaataaaacaactacatacaaaaatctgaaatggagaggttgctgcaacataatcaac

SEQ ID NO: 74723 - DNA, 204 bp, Glycine max
tatcgagatacctaaacactctcataaaaaagactattgtagcttttttcatcccaaccggctcccaacctgcccagaacactgatcttcccagctcaccgccagtctcactcactcaccaagccttcttctacgtctacaagagccactcgcattctctcaagatttcaatacattcttcccactccaacaaccgcatatcct

SEQ ID NO: 74724 - DNA, 328 bp, Glycine max
acaacaaaagcacccccctgatatttgtaaactttaaattactctcccccattcacatttcaaatcctcctttctttcatcacatcatacaacctcacaaactcctcaatcattcatacactataactactaacaaataaatatcaaccttccttctcccattcaaaaaccaaatctgctacaaactactttcaataaacactagcctatttacttaaccaacccaatcatattaaaatcaatgtcaaacaaccttatcttaataatcatcccaacatccaacaaaaacatttcgtatcatactctccttcccacactattcaaaaac

SEQ ID NO: 74725 - DNA, 248 bp, Glycine max
  unsure (1)..(248): unsure at all n locations
ggaacaggaaaatcggggacatgtaactttatacaagattctttctcgactaaatancctcgatcccaccaatagcaacaaacatattaattgcatccgtatacacgatcccattttacataatcacatcaacaacaggtcttacttgtaccagcagatcacatttactatcatattactacaaaactttcaattgcatacaccagattcatcatctaagctttctattaccacaaaggcacatctca

SEQ ID NO: 74726 - DNA, 336 bp, Glycine max
aactgcagctagaagacaacaggagggcccagggtgctgaggacggcataaaggtactgtagcgaaagaacaacttataggcacgtattatcatccatacaacagaatacataaaccttatacaggtgatagaatgttgcacaagggggaagagagagagagaatgtgaggcacaatgaataactgcgatgggtgagagattgcgtgggataaacactagacgactctaggtcgtaagtgagtgttttagacataaaagtaatcacacatgtaagtgaagatctaaccaacagcacatagaagtgataagaatcaactgatcagtgaacgggattt

SEQ ID NO: 74727 - DNA, 408 bp, Glycine max
gtggtcatgatgtggctcttggtttgtttcatgagttagttgattctttatgcaagattcttcctggtggtggagcctcgatctcacgtatggcaacaaacatattaattgactccgcatacacgatcccatgttacataatcacatcaacaaagggtgttgagggtagtgcaagagctgtgttactatcatcttgctacaaaactttcaatttcagacacctatatatgtatctttgttgtcttttaccttagaggcacattttgaaggttaattagaagatattgtctgcaaccctaacgaaacccacgtaattctgatccctcgctcagacccgatcggactcatctaattacacttgtatgcatatgtagataaaattgacgagggttgatataagtagttaat

SEQ ID NO: 74728 - DNA, 367 bp, Glycine max
tacaacaacacatacgggctgttcctaaaatacctcataatgtggaacatggttaagatggaagtgaattcaagattcatcctggtcaaaatgccatggatcttacatatccgacagacctattactactatccatatacacgagctctttcactataactagatccacatggcgtttctctagaagaagctaaagatcttctactataagttaaggatatgtcttatcacgccttaaatgtatacatgaaccacgctttccttctcgatgaattgacacctatctcctgcgcaagacatatatacgcttgatggctatgcgataaccttgattgactctctatacactcatactatacttggtgac

SEQ ID NO: 74729 - DNA, 375 bp, Glycine max
tataaggggtttaagctagtagaccaatgccccagatcaaattgtaatattatttttctaacattctctctccataccatttcaacatttttaacaattttatatatcaatatacattcctatttacctcacagtcaatgaacaacctacacccatacaaactatgcgaccaaactttctatgctgccctcaacactccccttgaacaatacccacactactaggttgccttctaaacatccaccacgaccatcttcgaaatttctatcctaaacatcaccaccaatctctacaacaactaccataagatctatagtaacacctccataaacatatactccacctaaaactaaattcaacataaatcttacaact

SEQ ID NO: 74730 - DNA, 297 bp, Glycine max
  unsure (1)..(297): unsure at all n locations
cccgaccgaacggttccacaagacgtcagaaggggctttatgatcttgctcttgattagtaacatgagttattctgatctttattcaagatacttccttgtganntaacctccatctcacctatggcaacaaacatattaatcgactccctatacaccatcccatactacatcatcacatcaacaaagaatgttgatggtattgtaacatctgccttactataatattactacaacactttcaatttcagacaccactgtatgtatctttgttgtctttcaccatataggcacattt

SEQ ID NO: 74731 - DNA, 397 bp, Glycine max
  unsure (1)..(397): unsure at all n locations
tggcgtnagaacacttcagaaaggggttctctggcttacagctccaccatcttcggggtctccggggtcgatatgcacgacatgctctcctctatctaaacgtttccacccacttaccttccgatctttccacccattctgatactcatgctaaacaacaccagcgctatcataggcaattaccatatcacatcactgaattcggtgctattcaacagtgctcacctgagcattgaagtcatatacgagctttgtagcaattatcccaacagaaccatccttaaaggttatactttgactgaatccaccaatgtttgcgactacaccgactccttgtatgagattacaaggtacaggacagatggactattgtctcccgacacccaagctatgatcg

SEQ ID NO: 74732 - DNA, 295 bp, Glycine max
atttggaaaaattgtttcttgcactgtgaagccagagcaagaacccctataaaaggagaatgttggtgttcctgtccctgaaatttcataaccaaaagaccacaacgctcgaagtaactgcatgggaatttaccaaagttctctgtctggggaaaatgaaaatgatgtgcctctgaatataactgacatttcggtacataatttctggaggcgaggcaatgagaatattttttttaaagaaataactcacttccacgccatacaactcccgccaaaacatttatacaaatttttt

SEQ ID NO: 74733 - DNA, 81 bp, Glycine max
  unsure (1)..(81): unsure at all n locations
tacggctgctaggggacgagggaatgtttcagctgctaaaagaccacanaaaggttctgctgccataagacgacaaaagga

SEQ ID NO: 74734 - DNA, 295 bp, Glycine max
tctcggcaacaaatatccctgctctttgataaatttaaaacgcaccaaaacgccattcttgttataaattgcaaaaacccataaaccatcaactctcttaacgcataatgcgcccaaagccattaaacctatgtcacacctgcctgcgtgtcacacatctaattcccaacgcaaacatgtaacaatctttctgctcagcgaatatgctgacctcccacaatcacccccctccaacttcgttgaaatctaagatcatggcctactattccaacataaaacccagcattaaccactc

SEQ ID NO: 74735 - DNA, 280 bp, Glycine max
acgcgtccgaaccgatgaaacgacagactgcggttctagcgtatctgaccgctgagagtcattcgtttacttcgctatcttcttcttttgttgtttgtagtgtatgctttttctctcacctaaccatgccttcctgcgcgtgcaactgcggctgcgcaagcgcctgcaagtgcctaaactcaatgcagtggctgcaagatgtacccagacttgctctacaccccgtgaaccaccaccgataccttgctcatgggagcatcaccagttaaggctcaattct

SEQ ID NO: 74736 - DNA, 277 bp, Glycine max
accaaaccaactgtgcattgaaaacttttatcaacaaaatcacccctataattccataccattccaacattcataatcccttacatcactttattttcaaatcacacttaaatatataattcttctaccaacagactacatttctataaataaacttcgtaccccaccgcctatacgctcttcgctctgcaaaaaaatcgccgacggatattgtacccacccttacccttgcatatgcaaacaagctctttctcagattcaaacccatcactcaaca

SEQ ID NO: 74737 - DNA, 292 bp, Glycine max
  unsure (1)..(292): unsure at all n locations
ccacaaatttnaaactttacttactganacaaaaaagtgctttttgcctatgttatacagcccnngtacccaaaatatttattaaatataaatctctattcatccaacatatgaatgtaagtcggaccttcctatcataatgaaccaattatcaaaaacgacacaaagttacattactagaatgtgggccatactacaaacatattcttaataccatatgttattcgccagtttatcctgcctctacatcctgtttactaattcttataattttcttgataagtacaaattt

SEQ ID NO: 74738 - DNA, 433 bp, Glycine max
gacagaaggggatgtcatgttttctttcactctctctccaattagggttttcctgattcccaatgccttctaattctctctgcctattcgcaaccgttcctactccttcgatcactcttcgaatttggtttctcgttcactctcgctcttcgattcggagaaaatcgggcgctattgcttgacactggtttcgtgccatgccgcctagtcgtagaaagggcggaaagaaaagcgccggcggtgccgccgcctgccggcagtttaagctcggcgatctcgtgctcgctaaggttaaggggttccctgcttgcctgcgacggtgagtgagccgcagaagtggggttactctgctgatcggaagaaagtatttgtttgcttctttggagccgccccacaaatagctttctgcaatcctgccgatgttgaaagtatt

SEQ ID NO: 74739 - DNA, 256 bp, Glycine max
aagacgcctgaactagattacaactttatggggtgctatcactattcacgactgatgcacaattacacaggtgcaaaactatcaatggtctaaaatttcttctcttcaacctgactcatctactattctctctctctctctgtaactcaccatttttttttaaaagaactaaacagaaccgtccatctctctcatttcttatatttcacggcatatcttcaaccatacctttccatctttttatcttgctatttca

SEQ ID NO: 74740 - DNA, 164 bp, Glycine max
aaacgacgttttgggtctctttttttgcgctatattttagttcaaagattaatataatatgctaacagcaaatctttatttctaaattctgattttttttttttacaaatgaacagaaattaaattcttttccattcataatttttttttgcataagttctgac

SEQ ID NO: 74741 - DNA, 294 bp, Glycine max
tcattaaatctaaatatctatccgtccaacatattgatctaacatctaccttactatcataatcaaccaatcatcaaaaactaaaaatctatacattatactatttttcttatactataaacacattcttaatatcatattttatttcacaaactattttatctttttaaactcctatctaatccctataattatcgtcaaaaatacaaattttccttcttcacccttcctttatacacatcaatcacctcaaaaactcaattacacatattattcaaacttatttccaaaatt

SEQ ID NO: 74742 - DNA, 261 bp, Glycine max
aaacaacataatttacgatttttacacgctccccaaactttagacatttgttaatttcataaaaccacagcccatctttatttcataaactcttaatacaatctaatccaaataattcatcatcaaattattctccaatcttaaaatccacaacaacaatgattaaaagatttctcaacaatctcctatctctctcactctcaatcaccaaaaaatgtcatcacacttaacttccccatctcaacattcactattaccatt

SEQ ID NO: 74743 - DNA, 306 bp, Glycine max
  unsure (1)..(306): unsure at all n locations
tactttaagggattttacattttcnaaactcatatgttacatttgttatcttttaaaaaccanagagcaaaacattnccctgctttctatttttttcactcataaaagtgacgtataaaataaaatcacaaaaaatatacagcaaatatcataattaacatcaaagtcagtccctatcacatgtcaaacatttaatataatcactagctaactatttagacaatatatacacacatataggtttattaattttacaactgtcaaaaaattacttacaaaaaaaaattttacatgataaaaatgtta

SEQ ID NO: 74744 - DNA, 234 bp, Glycine max
tttcacatgctacacaacgacgtaacgttgcgggtgttcgaagacgccatagttttacttttttgatatcactacataaaataccgtcgggttaatttttgatcagtgtgaatgtacaatcttgcaatctacaacatccatgcttacgaacacttctctacaacctcatatctctcttattgtgtcacctaaataaaattcactacactcaacttacacccctcaacatgcaca

SEQ ID NO: 74745 - DNA, 385 bp, Glycine max
gccacgcatacggaaagaaaaccactaatttttccgtttttcacaccctgctacaactgggaactttgaaggatatcataaagccacaggctctctttttttaatttctctttatataatcgaatccagttaatttttcatcatgtgactgtccaatcttgaaatccacaacaacaattgtgacaggattgctcaacaacctcctctctcactccctctcagtcgcccgaaaatggcagcacaatcaactacaccaccttaacatacactagtaccagtgtgctaaatttatgatcaaacacgcagtcaacgttccgagaagcctcgctgtttactctgttgaagaggtcagaaatgtcatcaatgaccttttccctaattaaaa

SEQ ID NO: 74746 - DNA, 277 bp, Glycine max
  unsure (1)..(277): unsure at all n locations
aacatttaaaaagatcctagccccccccnttttctttatttaatttctctttttataatcaaatccatttaatttttcatcctcttactaacccatctttaaatccacatcatcaaaaataacaatattgcccatcaaactctnatctctctccctctcttacacccgattttttttaccacaattttttttttctccttatcatccatttttaccattgaaccttaanncatgaacaaacaccgacccaaacctcccataaacctcccttatcctc

SEQ ID NO: 74747 - DNA, 248 bp, Glycine max
acgtgtgcgtacaggtgcgagaggaccacatacgggagtatttgattttggagcagatgaggccataggtcgtatggtggcagctggacctatacaacagacgggtatacctcaagcccagcggtgctatttgttgggttttagcgaatccccttcttccccgttgcgcttatggttgtgggagtaaccgatatatcctcacaacccaaccctattgaattgatatgtttgaagtagagcatcctaag

SEQ ID NO: 74748 - DNA, 131 bp, Glycine max
atttcagaaccatttgaaccatcaccctttatgcctggaggcactagaggttttgtagatgacttcaattcaattagcagaaagcaggagagaggagaagcagattctgatgcatcacttttcttaccttc

SEQ ID NO: 74749 - DNA, 298 bp, Glycine max
gacaccactgacggtccaattgttggtacaggacccatatgatggccgtattgagtttcctttcctccggttcgggctttttcagcccgtaaccggaagcactcagtgttggcttggcgtcctgccatgggaacaaacacaacacaaggctccttgtgaattgtgatgacgtgaccagtgaccaccattcatccatccatccatcctcaacacaacgatccaccatcactcctttctttttcccatcccaagaaacaaagaaaccagtcccactttaattatttttattaacccattc

SEQ ID NO: 74750 - DNA, 243 bp, Glycine max
acaggtgtgcgaacaggtgcgagaggacagcagatggttgttgtatattttggctgaagatgctttatactcatggtttctgtgtgtggacgatgtttatgtatcttgacactatatattggcactctacgtttgagtgatattaattgtacagtcaagtatttattatgtatgtttgaatacggcgtatacactggtatacatgtggcgttcaccgaattatgggtcttgagctatatacat

SEQ ID NO: 74751 - DNA, 172 bp, Glycine max
  unsure (1)..(172): unsure at all n locations
ggggccacaggcacaacacacgacacacacagagcggnagcggcgacaccaagaccggagaaagaanggcgaaaacgacgccgangcagcacgcaacacggcnccacgacggaacccnagcgcncaaccaggcgaagaaancgaaggaggaaaagaaggaggngacccacaa

SEQ ID NO: 74752 - DNA, 429 bp, Glycine max
acctttgaatcacctttgattcaccatgaagctttgcttctacatgatcccattcgtaacatccctaattatcgacttctcggtggctctcacactacgacatttcactcaacatcattgttgataaaaaatctccataggtatccttttctacgacctcgatcactagctttgacatcactcaactgctcttaagatcattgactatcctcacaaaccaacaccaaacattttagcatgctttgtcctaacctaaacactttctaaggaaccttctaagaaggcaaccattccaatacttcctccagtcgaaccttcttaaatgtaaatttcttaaattattaggtatttgaaagtaaatgcctcctggtggtattaggaggacccaataatttctttaagtcaccctccactggataatctcatgcc

SEQ ID NO: 74753 - DNA, 249 bp, Glycine max
atcacgttcaataaagaacgataatcggcatcaggatgcaaatcagtactatatatgcagcgtacatatttacaacgctatggtggttaaggatagggatatattgttgatcaacaaatcaacgtgagttgtgaagtatattaattattaggaattattcgatttagaacttttactgttaggttgattaatgttttatgagtagctttaatgttattgacacatgtttattatctttttgaggcctgt

SEQ ID NO: 74754 - DNA, 409 bp, Glycine max
  unsure (1)..(409): unsure at all n locations
ggttggaaccacgcggccgaccaacccgnccgaccaggcgcgagaagaccaccgaaggggcaacngaggggggaacaaggccngcgctaggcgagatagaggagaaacacgcaannccaaggaacccagacagccaaaaccgagacnaccacgcactnagaggaaangcaagaactnnaagaaagaaggggtattgggtatcttgttttccaactcaataagatagtggggaggaaagagatatggctgtaggtagcaaaaccagaaatatgcttgaaggtctggttaaagaaggatcatttaaatggttgcttgtcaagaagagttacttttatgaagaatttgaagaaatggaaaattctccttttgctgggaagaaattttatacgagagctttctcctgttgcaa

SEQ ID NO: 74755 - DNA, 258 bp, Glycine max
aggtggaaagctctgacaccatcgacaacgtcaaggccaagatccaggacaaggaaggaatccccccggaccagcaacgtctcattttcgccggaaagcaacttgaggacggccgtacccttgctgactacaacattcagaaggagagtactcttcacctcgtcctccgtctccgtggtggcatgcagatcttcgttaagacactcaccggcaagaccataaccctagaggttgaaagctccgacaccatcgataacg

SEQ ID NO: 74756 - DNA, 217 bp, Glycine max
  unsure (1)..(217): unsure at all n locations
gtaatgataacctganntaacatagagaaganngtgggagaaggaagcccttagtgagtgtgaagaattanngaaaagaagaaacatgaataanannttggtaatgnnaatttccttgggtcaccgaagggccttatgttgaagctgcttgagaaaaatttcgaaattggaagtctggaaccttgaaccaagaccataagaatcttnnngcaacaat

SEQ ID NO: 74757 - DNA, 226 bp, Glycine max
  unsure (1)..(226): unsure at all n locations
gaagcacgcagcaaggaacnaggancancancaaagngcaaaacagncgagaccgaacaccacgagcagcaaccaaggagaccncccaaacgaccaccggagaagagacaacgngnnccnncngcnnanaaccggancaacaaggaggaaacacaaagaagaaaggcnagnaanccagagancagccacagggaagcagnnagcacagcagccaaaaaccgggcac

SEQ ID NO: 74758 - DNA, 409 bp, Glycine max
cagttattgcttttataattttgggcattacaaggatctctatttaaacagataattattcaataaaatgtggccattcatctcccttcattctgtgagttaagtttttttccaacaaattcctatcctagattgtttttgaatccaaagaatcaaaaggaatgtattaatcaagtagggaggtgggaaggtgaactttggaggcgggaattgaagtggcgtagatcgtggtttcaataggagctaaacttgatgcataatttccaaaatctgatcaacaatggtcaacttcataaagaggtagatgatactttgtggtgggaaggggaaggagctggaaagttctcggttcactcaccatacttagcaatgcagaattggtattatggcagccatgaagtggtttttt

SEQ ID NO: 74759 - DNA, 280 bp, Glycine max
gactggaggaagggggcgtataggagtgccctgtgtcatgggcaccaagaccacgtgtgtaatcatagacactgggtggcgaaaacttcacgaacacttcacaatgtgtcaaaccctgcaccaaccaatactcctatacttaatcaacccacaggagtggtcctctatcaaagtctctacaaaaccctgcttaagcttgtgtggtaacatcatcaaaaaaagaatagagagactttatgtaattcaagtagatcgagatcgcgaaaatgacgaactgcat

SEQ ID NO: 74760 - DNA, 196 bp, Glycine max
ggcagttcaattccaatatattccattctctctgtgtatttccctacctctcccttcaagatgcagatcttcgtcaagaccctcaccggcaagaccatcacccttgaggtggaaagctctgacaccatcgacaacgtcaaggccaagatccaggacaaggaaggaatccccccggaccagcaacgtctcattttcg

SEQ ID NO: 74761 - DNA, 194 bp, Glycine max
  unsure (1)..(194): unsure at all n locations
cttcaaacnnnnccnncncagagacacnacncggggannnncaaccgnnggcaagncacaaagacagcancncagngaacaagaagcangcagcaaggaaccaggancancancaaagngcaaaacannngagaccggagaccangancagcaaccgaggannccnccaaagcgccccccngagaagagacaac

SEQ ID NO: 74762 - DNA, 111 bp, Glycine max
  unsure (1)..(111): unsure at all n locations
gnagngaccggggganggcaggggaaaaagaaaaagggccgaaaccaannaaggaccaagacaaaggggggcacaagaangggaaagagaagaaagacaaggcaaggaaag

SEQ ID NO: 74763 - DNA, 389 bp, Glycine max
ggttcttaatccatttacttttagatgcggttttgaatatagcttttgttagaaaggaatttattgtgctgtgttattaccacacacaatacctttatttataataagaattgatacatcataagggaaacctaataatgaagattaaataaggaaatccctaattttagctatacaattaaagcatatcaatcatatcctaattgtatatttcacactaccctcaagctagagcattgtcacataataatttggtatggtgaaacgtttccaattttatcttttggagaaagtgccttaatgatgggaacttaaattcaactgctggcatgacacaatacttaacttcggaactagatttaacaaccgatttttgcttcttgaacttt

SEQ ID NO: 74764 - DNA, 256 bp, Glycine max
atgtattttttagctattattggatttaaaattgaaggtcaacttcaattattaaaataaattttaaaccaaaaataatataaaatagcatttatgatagtgtccttaattaaggttgttccattttttgtgtaaaaatatatatcagacatgacaaaacagcaagcacattttggaggagctgaagcataccatgtgtggttaataaaacttattgaaaaagcagctaaaaaacatgtgccctgccttataatat

SEQ ID NO: 74765 - DNA, 249 bp, Glycine max
gaaaaccaacaagacaacaacaactacaacaactacaactcttccctctctccttaacactgtttcatgcaaaaccatttctagggttttcggttttctcgccattcttcaattctcgcgctccggcatcgcttcgccatggcatttccgaccaaaaagctcatcgacgcccccaatgatgttgtgactgatttaattgaaggtttggtgaaaacatatcctgaactacagaatttaaatggttttctt

SEQ ID NO: 74766 - DNA, 346 bp, Glycine max
attatcgacaagcgcatcaccccgcgctttatccgctatgttcgctgggacctctgcctgggcatctttcgggtggtgctcggcgcggttgcgatgatgagctttgccgcggcggtctttgccggacagcccgaattcggcaactacaccgacgcactcggcaccgtcgtcgggctggaaaaatacgccggccggcttcccgcgatcctgttcgctcttgcgttgctcgaggccagtattatctggtgccgtggtcgtatcgttcgggactgcctttgctatcggcgacgtgttttcgttcaagccctctttgctttgcaggccgaaggatgcaaaggggtttatt

SEQ ID NO: 74767 - DNA, 151 bp, Glycine max
  unsure (1)..(151): unsure at all n locations
ggaancaaaangnaagccaacagnaaanccagcggnaccnancaaacgcaaggaaacaccagngaanaangcnaaagaaaccaacaaaaagaccaaggcnggnggnnggaagaagaagaaanagnnggcnnngngncnngacaaggnnaga

SEQ ID NO: 74768 - DNA, 70 bp, Glycine max
  unsure (1)..(70): unsure at all n locations
nngnccaanagaggcngaagcggaaagancncggggganacnngncnnnanaaagaaaaaggaaagaaaa

SEQ ID NO: 74769 - DNA, 337 bp, Glycine max
ggaaaaccaggcgcgacccacgcgtgcgacaggaccaagaaggacccatagcgggctctactaacaaaatatcatactggtatcaaatgcactcattatgcgcgaaagacttaaataaagtgcatgataaacatacaaggtctagttaaaagctgagtctgcaagcaggtgaagatagcgtcctttgaggcttaccactaagcatagtgatcgctatgacacatatcatactcgactccgcgttaagaatacattacagtgccacatcgccagcaccggtacatcaaagactgtgctttgaagcttccaaaaacatctctttcagtgcaaaatgaga

SEQ ID NO: 74770 - DNA, 353 bp, Glycine max
ggttctagtgtgtgattgtttgttgttgtaactcgttcttcttcttttgttgttctgtgtttgtgtttgttttttctctcacctgaaaatgtcttgctgtggtggtaactgtggttgcggaagctcctgcaagtgcggcaacggctgcggaggctgcaagatgtacccagacttgagctacactgagtcaaccaccaccgagaccttggtcatgggagtggcgcctgttaaggctcaatttgagggtgctgaaatgggtgtgcccgctgagaacgatggctgcaaatgtggaccaaactgctcctgcaacccctgcacttgcaagtgaggtgttgggagaacaagcttcaagc

SEQ ID NO: 74771 - DNA, 309 bp, Glycine max
gagttcaattccaatatattccattctctctgggtatttccgtacctctcccttcaagatgcagatcttcgtcaagaccctcaccggcaagaccatcacccttgaggtggaaagctctgacaccatcgacaacgtcaaggccaagatccaggacaaggaaggaatccccccggaccagcaacgtctcattttcgccggaaagcaacttgaggacggccgtacccttgctgactacaacattcagaaggagagtactcttcacctcgtcctccgtctccgtggtggcatgcagatcttcgttaagacact

SEQ ID NO: 74772 - DNA, 218 bp, Glycine max
acgacacaagggaacaactgtatcttgccgctacgtgatcttgtgcttaaaaatcccgcactttgtcaccagctgattaaaacacctgaaaatgtcttgcttaaccggtaactgtagctgcagaagctcctgaaagtgcaactgcgcatgcaaatgctgcaagatgtacccagacttgatctacactgagtcaaccaccacctcatacctacttaatc

SEQ ID NO: 74773 - DNA, 262 bp, Glycine max
gagtgctattgtgacgttgtgacgggtacggagggaaatggagggcggtgacggtgtgcattggttctctcacctccaaatgcctcgctgtacccataactgtgcatgcacctactcctgaaagtgcttcgactgctcccacttgctgactgatatacccagacttaaactacacttattctaccaccactgaaacaccactcattcgatgggtgtctgcccaagctcaatctgaagaccctcaaactcctgtacccactta

SEQ ID NO: 74774 - DNA, 105 bp, Glycine max
aatcaaaaccaaatcaagcgggccagaacgaatgagttaacaaggccaaaagatgatgatgaagacggcagatcatctggatcagagaagaatgtttcagtttcg

SEQ ID NO: 74775 - DNA, 362 bp, Glycine max
ggtagctccatgagggatgagagtcgtatgatgtcacataacaaaaattgatgtgctacaatgccactgaaattgtcgcgtggttccatttccatagaagaagaatcaaaaaaaagagcattgtagcgtttcaagttgatcataaatgcaagtgcgttactcctacgttcgaagactatgctttttgctctgttcacctttagccaaactcggcacttccaaaactcaatcttcttcttcttttttagccaatttattcgtcgatgacgattccacgctgttaagccttaagctttatcgacccttttatccaaataaatatcgtctaatggggtgtttaaacatattttctttctattttc

SEQ ID NO: 74776 - DNA, 347 bp, Glycine max
aactcatggttgcttgatttggttttagtaaatgtactttgattttttattgatcaactatatgatattctttcctcattagcttttgactgatctggttccactcttcattttgttgaagagatgtaattgtacctagtacaagaaaatcaaggtcaaagcatggacgctgtgtcatccgcactactagagccagtaactaattctgtgttggatctgattaaaaagcaagtggattacatccgttataggcaaaactttgatgaactacgcgagtgtgtaaagcagcttaaacttgtaaaggagaaagtagatcatcaatgtgaggaagctttcaaaaatggaca

SEQ ID NO: 74777 - DNA, 294 bp, Glycine max
gacaagtgagtttgttgatcgagataactagaaacagtgtgatgaaaatgaaggtccttgttttcttcgttgctacaattttggtagcatggcaatgccatgcgtacgatatgttccctctccgaatgaacactggctatggtgcccgtactccggaggtgaaatgcgcaagttggaggcttgctgtggaagcacacaacatctttggctttgagaccattcctgaagagtgcgttgaagcaacaaaagaatacatccatggcgaacaatatagatccagactccaaaacagtt

SEQ ID NO: 74778 - DNA, 356 bp, Glycine max
aactcatggttgcttgatttggcctgagtaaatgtactatgattctttatctatcaactatattatataatatcctcattatcttatgactgacctggttccactcttcattccgatgaacatatttaaacttacctcatacatcaaaatcattgtcaacatattgacactgaggcctacactctactagatccttgaacttattctgtgtctgatctgattaaaaagcaacttgattacatcccatatattcaatactcttactaactacgcgagctcgtaaaacgacatactctaggaaattatacatttaaagcattacatagaatcacgcctccaaaatcgacacaaaaatg

SEQ ID NO: 74779 - DNA, 378 bp, Glycine max
  unsure (1)..(378): unsure at all n locations
gcactannngaactttacttgtcttcctgtttttcaaaggaaaatntttaaaagggtgaaatacacgtgaattgatgttanncctaataaaagtaggacattaaaacaattctaatccaaaggntgtctttattagttcacataanagttgcagggttgcacctagctgtgtgaatggcttaggaagggtttgaaatgttcnnaattcattgtggatctttgtgttttttgtttgaaatgtttcaatttggcaaggttaaaatcacaaattaatctaattggtcaagatttttaaactaaattctaaaacactcagcttcaaggggtgaaaaattgaaaaagttattataccggcgactatattataccatacaaaat

SEQ ID NO: 74780 - DNA, 125 bp, Glycine max
ggttctagtgtgtgattgtttgttgttgtaactcgttcttcttcttttgttgttctgtgtttgtgtttgatatttctctcacctgaaaatgtcttgctgcggtggtcactgtggttgcagaagct

SEQ ID NO: 74781 - DNA, 241 bp, Glycine max
tacggcgaatgtgcccgacttatctgaccgcgatatgcgagtttatccaaactagaatatgattttcatcatcaactttattgctaccaacgatttgatcgcatggtcatgctatggctcatgctaccaaactatcccatttcccattacaaccgcctatggcgaccgttcatctgccgttaaatgctcatgatccatgcctacttcggaaacacacatcccgttagccattacacccctt

SEQ ID NO: 74782 - DNA, 294 bp, Glycine max
acgacagaagacttcatcaagcggttcaatcccaacataccctagtgcctatctgtatttatctaccactcactacaacattcaaatccaatcttagaccctaacaccctagaccatcacccttgagactgaaagcacttacaccattctcaaccccaatgtcaaaatccaacacatgtacacaattcctccggaccatccacgattcaatctctcacaaaagcatcttaagaatggtcgtacccttttttactacatcatttataattatagaacttttcaccttttcctaca

SEQ ID NO: 74783 - DNA, 407 bp, Glycine max
aggatgctattgatattcaagatgggcatatagtattgggcttaacggaatttctaatgtgtatgagccctatgattacatatcaaaaacggtattttcaatgtatgaattgcctgactttttttttatctgtaagagctacctattgcaatgtaatttattaaaaaaaaataatagttcagtctaaacttgtttaaggatgataaaaaaaaaaacatttcggattgtggcacactatgcataacgtaaataattttgtttgtatgttgggcttcattagttcctattatgtatgacaacgaccactgcgactcctattatataattggaagaagcccatactcccaacaaaatgtgtactaagagactgcttttatttttcttcaccgcacaaaaataattccaaa

SEQ ID NO: 74784 - DNA, 217 bp, Glycine max
  unsure (1)..(217): unsure at all n locations
ttgatcctgccagtagtcatatntgggnttttttggaaatttntaactttatttttaaattctactataatattattttttttttttttttagtactttaatatttttaaaatttttttatttttttacttaactgtattcctactatttctaaaaaactcaaaaatcttatttttatttattattagaataaattcattttttaaattaaaatttt

SEQ ID NO: 74785 - DNA, 405 bp, Glycine max
gaagacgacagaagggattagagtaataaggaggtaatagtttcatgatttcaaattatcactaacataatatactaattatcaatatttatggattaaaaatatcacttccagttagtgttttaaattcaaagattggaaattaattgtgtgctaaatattttatttaggtttttgaatttatcataattaaagattaaatgtgcattttatgtttattattatttttttagttgttgttactactcttaatttcactactcaaattaatcatatcctaaaattacatgtacaaattttaatgtttggaaggagtctcttgagattgttctcaattgcatggaatggacgaatcagtccattttaactataaaaaaatctaataagacttaatttttatgacac

SEQ ID NO: 74786 - DNA, 365 bp, Glycine max
ttcctatttacagatgctccaatcttgcatttactacaagactttgtacaacaagtggcttgcattcaaaacctttaacctcacatttcatcacaaaaaatatgatctataccgacgaaatcatatggttgcaccatttttgcctacttgcattattggcttcacaactctaacatgaacagaatgtttgtatctatattgctcaatgtcagtgaatatgattactcaataagcacttgttgctgcaaagtcttggaatcttaggaattacttcctccgtttttttcttcaagaaacatgcttcagttttttatgtaactataagtatcgcaaatagctcttggattgtattcttatctgtagca

SEQ ID NO: 74787 - DNA, 367 bp, Glycine max
ggaagagtgaagagaatggctcccgagggttgaacctttctggctgtgttaatatgcgtttcagcactgtcactgagtccttctgttgcgggggaagggcaaaataatggccttgttatgaacttctacaaggaatcatgccctcaggctgaagacatcatcacagaacaagtcaaacttctctacaagcgccacaagaacactgctttctcctggctcaggaacatcttccatgactgtgctgttcagagttgtgatgcttcactgttgctggactccacaagaaggagcttgtctgagaaggaaacagatagaagctttgggttgagaaatttcaggtacattgagaccatcaaagaagctttgg

SEQ ID NO: 74788 - DNA, 303 bp, Glycine max
  unsure (1)..(303): unsure at all n locations
gaagtagaacccatggatgcagagcgtctgctgctgaccgcgtcgtgggattggggcttaaggtttccgctagtgaaagagatgattgttgaagaatgtgagtgggcgctaggggtggaaataggccaggccagaccaggctttaaaaggcctgagcctagcctacgatgaattttttaggcctgagcctggcctatagcctatcaaaagcttttattttggctcggcctgtaccttttaaaagcctagcctgacctgatagcctttttaaaagcctntttatatttgtttgctttggggtag

SEQ ID NO: 74789 - DNA, 415 bp, Glycine max
  unsure (1)..(415): unsure at all n locations
cgcgtccgaccacgcctnccaaccgttcgaacacacatccgaacggttgcgtctagtgagtgaatgtgggttgcggggaactaaaacaaaacttttgttgttctgtgcatgtgtttgttttttctctcacctgaaaatgtcttgctgcggtggtaactgtggttgctgaagattatgcaaatagattataaggatgcggaggctgcaagatgtacccagacttgaactacactgatttaaccacaaccctacacctatggacattaagattgaacaaaagtatgcaaaaagtgcaggtgctaaaatggtttgttccacgatgaaaacatatgtttaataaatcccacattaaatacgaaaaactcaaaacaacctccaaattaataatataaggattaaaaaaaaggcaatttat

SEQ ID NO: 74790 - DNA, 337 bp, Glycine max
ggttctagtgtgtgattgtttgttgttgtaactcgttcttcttcttttgttgttctgtgtttgtgtttgttttttctctcacctgaaaatgtcttgctgcggtggtaactgtggttgcggaagctcctgcaagtgcggcaacggctgcggaggctgcaagatgtacccagacttgagctacactgagtcaaccaccaccgagaccttggtcatgggaatggcacctgttaaagctcaatttgagggtgctgaaatgggtgtgcccgctgagaacgatggctgcaaatgtggaccaaactgctcctgcaacccctgcacttgcaagtgaggtgttggg

SEQ ID NO: 74791 - DNA, 412 bp, Glycine max
ttggtaatatatgaatgttttaaagtaatttttggaacatattaaatacattttaaaaataattttcagaaatgttaagatttacatattttagaaattaatttccaaaaatattaaatttttcaaaatttatttttaataataataggtaaatgttgttgaaattaaattctaaaatatattagttacattatgaaaattaattttcaaaagtaaaatattaaaattataaaacttctaaaagttaattccacactcatacaacatgaatccaataactgagttatatgccaaaaaattcagattacacacattgatcttattgcagagacacagaacatcattggtttactctttcatgagaatgaggcaccttattcccttcccttttagcattaattcaaatgctttg

SEQ ID NO: 74792 - DNA, 396 bp, Glycine max
accttgctatgagaaaagaataagattttaattgggtgagaatgatatatatattataaattttatttacattgaaaaattctaaacatttttatattgatgaagacaaaaattatattttaactttttttttatcatactattgtactagctgacaatttcttttagttttttaaacagtgttcttaaagttagttgaccatgtaaaaactgtccggccatattcaatccaatttttaacataagtctgactacgtctaaggctttaattaacatattgagtctagcatataaaatctctttcccttgtcttctgtacaaagtgctttgtgttgttagtggccgggttcagtttccatggattcgatgcatgttattatgtcttcttctaatgct

SEQ ID NO: 74793 - DNA, 305 bp, Glycine max
  unsure (1)..(305): unsure at all n locations
ggcacaagtgagtntgttgatcggtataactagaaacagtgtgatgaaaatgaatgtccttgttttcttcgttgctacaattttggtagcatggcaatgccatgcgtacgatatgttccctctccgaatgaacactggctatggtgcccgtactccggaggtgaaatgcgcaagttggaggcttgctgtggaagcacacaacatctatggctttgagaccatttctgaagagtgcgttgaagcaacaaaggaatacattcatggcgaacaatatatatcagacttcaaaacagttaaccaacaag

SEQ ID NO: 74794 - DNA, 414 bp, Glycine max
ggggtttggtcgtttggtgtttttgcgaattagggtttgtgatttgatctccatcttcaccaatcaccattaccataacttgatcttctctctcgccatgacggacggcttctggaatcggcagcagcagcagccgcttcaaccttcttccgccatgctcaaacgacctcgtactgaatatgatatgtcaccttctggtctgacagggggtaatgagatgcataattatattgctcgaaatgatgaccataccggtcatcgaatgctaaaggacactaaaacacttggatctgcttatgaccgctaccttcaaagtgcaaggcttacttcgtttaattcttgggaagccaatgcaatttgtgggtgttgatttggaaagggtgttggtggataccacccatttactaactgatc

SEQ ID NO: 74795 - DNA, 315 bp, Glycine max
agaagacgacagaaggggaaacagagatggctcttgcagagcatcaggggaggtatgtggctattgtagtcaacaagctcgcccagtcatgaatggtgttttcttcatttcattctattcttgttgatcatctgtatttttttaccgttcttttttgtcaaaattggttctggcattttaccattgcattgtgatgaggaatggaagctctgttacactattttaattgattctgttgggtttgggggttctgcattgtatccggaaggtttagatgttgataaaatttcgtctaataataattgttaatttttg

SEQ ID NO: 74796 - DNA, 396 bp, Glycine max
ttactgtttactattgtgctgtgctggctttctggtagcttaatgacttttggatattgattttatctaagtaaccaatatatactttatggaaattatggaaggttactctgtttatgctttccttgacctagcgttaagtaatcaatattttatcttggatttaagttgtttcaagctaattgtggtgaagttctgtcaaatattactccatattcttcatttcttttctctgtcatataaacctgtgttgttgataacagatcatataaatttggacttaaactttgaattgatgatgtgccagtgtgataatttctgatttttgggattgagttctttggtattagtttggaaattattctttctcttcagatttagttcacattgttgtct

SEQ ID NO: 74797 - DNA, 374 bp, Glycine max
  unsure (1)..(374): unsure at all n locations
acgcgtncccgacagtatgacaatacttcaaataggacactaaatactttcggcctgtggaggatacaggggggctcagttagcgagaaatcacacaaatgatcagctgacaaataactacatgaaggggaaaaaaaaacaagccgtacttgatggagacgcatcatctctcctactgaaatagatattactgcagacactcataactgttaccctctgcacaaggagcgtatattgacagatgtcaccaccccaagctctgctgatggaattccatgctataactaggctatgctatccagaatattgtcatgttcacctacagcagatcagcattcatcatgggtgcagaccaccaccgatgaactaaataa

SEQ ID NO: 74798 - DNA, 304 bp, Glycine max
tgaactaataaagtgatatgttgagtgtgggcgattatatcatgtttatatgttgttcttgttacaagggaacataatgtctattagttgttagactacaattgagaatgagttagtacaataagaggaataatattacatgagttaaggtaaatgtctagagtgtcctagagcattaatgatgttagattgatcttgttaaatacttttaagtgtttgatagagaagagtatgttaggtcctgacgaccagtcttctcatctattttggatttgatgaataacaataagtataaattactgat

SEQ ID NO: 74799 - DNA, 193 bp, Glycine max
tacgtttcaaagaatatttcataagggtttccccactaccacttctgtgaaattttctggttcttaccagataaaaaatgaaatttttctttaatatccctcccccatcctataatatttaattttaaattatcgtctaaactgatgttagctatcttataggtgtgtcaaaaaatgtacatatgtatgtgtg

SEQ ID NO: 74800 - DNA, 208 bp, Glycine max
gaacaagcaggattgatattctccaaccctttcagggtcctccgaacacactaatgcaaggggcaaactcgggaagaagaaaaagaagcagaaaaataagaaaagctgcacacgagaattctttgaaaattgactagaacacatttatctcatcttacacaggattgaagacagcactaggttcaaccacccaagcccccctccactg

SEQ ID NO: 74801 - DNA, 358 bp, Glycine max
ggatgttggacttgctgccaatgttgctatcattgatttaatttagactgcttatgatcttgggaaacctttcctttaatgtgctattcagctctacattccttcgatacgaatttcaaacatgaggatccgcatatggaaacactgatattggactaaggtttcgatgtttctattaacgacttcatcatcggaccagcgaacgaggcgaggaacgcctgcgccatgatacggggtggaatcgagtatatatagttaagaaatgtggtatttatattactgcctaaccttagctgtagatcattaacttgatccaatagttactggcttattggggcactgtggtgttgttcaatac

SEQ ID NO: 74802 - DNA, 406 bp, Glycine max
ggacaccacaatgtaggggttccacctagaaaacgtcaattgttaagtcttacctacaacaaatactttgtaatataattagtcgatcaaagtgtgatcatacctagatagaggggtgtgttgaaagtcccacataacagatagtcatgagaaaaatgagacatattaaagtctcacatcgaataaagatagtgtcgaaataaattatatagatgaggagtaattctcaccttacaagttgattttgtgaaaattgcaagtgtgagatatgtgtgataatgtgacgtgagaaggttaattgaagaacaaattcagtagtttgctcttgcttcattttcgagttatactgaaccaatctcagacaagctccttccagatttgctttctcaggagcaacatgtttcta

SEQ ID NO: 74803 - DNA, 290 bp, Glycine max
ttataccaaaaacaaaacacaatccaactaaattaattatatatttaaaataatttctcctttcttattattcaactttttacctttcatctacttcatattctttatattttacctaaattattttatttttccatttttacttcttccttacttatataaactttttctttaccctattaatttctttttatatattttaattttttcattttttcttatatcttaatattccttatataattttttctttcaaatatttttttctatctttatttatcaatttatat

SEQ ID NO: 74804 - DNA, 431 bp, Glycine max
gataccaaaaacaaaacacacgccaagtgaaagtgagaaaaaataaaaatcaacgagcataatgtcagggatcattcacaagattggggagacccttcatgtgggagggcacaagaaggaggaggagcataagggtgagcaccatgctggagaatacaaaggggagcaccatggtgaacacagtagtgagtacaaaggagagcatcatggtgaacacaaagctggagagtaccatggtgagcacaagccagagcacaaagaggggttcctagacaaagtcaaggacaagatccatggtgagggcggcgccgccgagggcgagaagaagaagaaggagaagaagaagaaggagcatggccatgagcatggccatgacagcagcagcagcagtgacagtgattaaactgctgcatcacctatatatttaaaag

SEQ ID NO: 74805 - DNA, 414 bp, Glycine max
ggttctagtgtatgtgattgttgtgactcgttcttcttcgtcgttatcttcttcttttgttgtttgtgtgtttgttttttctctcacctgaaaatgtcttgctgcggtggtaactgtggttgcggaagcgcctgcaagtgcggcaacggctgcggaggctgcaagatgtacccagacttgagctacaccgagtcaaccaccaccgagaccttggtcatgggagtggcaccagttaaggctcaattcgagagtgctgaaatgggtgttcccgctgagaacgatggctgcaaatgtggagctaactgcacctgcaacccctgcacttgcaagtgaggtgttggagagctaaagcttcaagcagaaatggcccttagaaataatgataaaaactatatgtagtttcaaaacttcaaa

SEQ ID NO: 74806 - DNA, 271 bp, Glycine max
agactacggattgggggatacaatacgtgttcctacccaaaacaaaaattaaatgtgtggaacagttggaggagatcaataatttatataggtccatcgaccatagaagatacgataaacccaaggcaatgattatgcgggatcggacctatgggatactagcgtcgataggtctgatgcacatagaggcctagatctgatgctagggccttgatatacgctggcaaaactaccatgcttcacatgctcgatgatgagagattagtacagc

SEQ ID NO: 74807 - DNA, 212 bp, Glycine max
  unsure (1)..(212): unsure at all n locations
gcacacacacacgcacacacacacactttcacacgctccctccctccngcgctctaggccgcgcccgggcgcccgctcgccctccccccctcctcttacgcaccggcctcggctccccgcgcccagcgtcgagcgaagattttctaggatcggagcagctcatggagaaagtgcccggcgacatggagatagagcgcaaggagaggaacgag

SEQ ID NO: 74808 - DNA, 173 bp, Glycine max
atttattccaataaaaaaatctccttataaaaaactcaactattttatttccctcacatcctacttcataaattacacaaaactaattcttaattcataaaattcaaaaaccatatcacaacaataatttcaataaaacaccccccaatttctaacatagtagaccaaaataa

SEQ ID NO: 74809 - DNA, 430 bp, Glycine max
tctgaggggatcgcacttcaattgcaatcaaggtaattcattggctttgcgcagatccctacctctcctttcaagatgcagatcttcgtcaagaccctcaccggaaagaccatcacccttgaggtggaaagctctgacaccatcgacaacgtcaaggccaagatccaggacaaggaaggaattcccccggatcagcaacgtctcatcttcgccggaaagcagctcgaggacggccgtaccctcgccgactacaacatccagaaggagtcaacccttcaccttgtccttcgtctccgtggtggcatgcagatcttcgtcaagactctcactggcaaaaccataaccctagaggtcgaaagctctgacaccattgacaacgtcaaggccaagatccaagacaaggagggaatccccccagaccagcaacgtc

SEQ ID NO: 74810 - DNA, 245 bp, Glycine max
ggatatttgttgcgaaattttaaaattggagggaacaagcaaagtcgaagcggcgcatggcggatccggcagatccaatcattgaagtagaagaagtagaggaggatggtaccacgcaccaccctgctgctacttgacacgagttttttgatttatcaacgacagctgatccgagttacataatctccttgataagaaagcatttgccgttggattctgcttctcggagaagcttgagagaagtt

SEQ ID NO: 74811 - DNA, 427 bp, Glycine max
cgagacatagtctcttcacgatcttaattcactcatgtacactatctaacttacataaatagttcgtcctagttagatcagttcagttttttttccaataaaaaaatgtctctttaaaagactcatgtatggtattttcctcactgcatacaagaaaaaatacaagaatctaaaggtggttaataaaatacaaaagaaatatcagaaaataattaaagcaaaacaacacacaaatactaaaattgttaagcgtagcataatttttagcaataaaagtgatttaattgaattgaatataaacatgagtaatgaaatgaaccactcacggcaattgagatataagcatgtttactgttcacaggcccgactgtgaagccagtatatgcagccatagctccatgaacagcaccatgtgcaagaagagtgc

SEQ ID NO: 74812 - DNA, 220 bp, Glycine max
agaaggggttgcagatgtagttggatggagaagctggatttgatgatgctcaacatgagggaggaaagggagctcttgatgactctagttgaaaaagtcactaattcaaggtttggtgaaataataatggaacctcaaagagcaaattatgatgtatcatttggagttcctccaattgaattggagagaaagttgcatgaactgctttgaacacgactgg

SEQ ID NO: 74813 - DNA, 264 bp, Glycine max
  unsure (1)..(264): unsure at all n locations
gggccgaccgacgcgntacaacacctccaaaagacaactttacgggaccactatattctaagacacttatgggaaaaccgtgcgaataaatatgatttcatattatcatctcactttttatcacgggacctaaccgccgtagaatatcctgtagacttgacttgacacatcataattgtaatatttaaatctcaatctaattctccatttacacagatattttgctactttatcctttttgctcattaaatttatcctaaacac

SEQ ID NO: 74814 - DNA, 253 bp, Glycine max
gacgagaacaaagtgagcaacttcccttctttcagagtcattcaaaatgaacgaacttaaaaaacaatgcagtttcaaggtgtttaagcatggtagtcccgagggttcacccattgtctaaataaaggtgcacacgatctaaacaagtcctacttgttaccaagtaacacacattaaggtcgcttgtatgatgatcacactctactcattaatattataccatcttagaactaggagatcacatgtccaagga

SEQ ID NO: 74815 - DNA, 329 bp, Glycine max
ctgcgatacgaccacagaatggatatttattaaaatagctctaaagatgggggcttaatatcaattacatctgtaaaaggcatccccaatggttaggagaaaaaaatgcttataaactaccattaatatcaattactacgcactaatggcttaaagagtttgagctcttgatttacaaatattgtgatctcaagtccttcaagtccgctgcattgttagatttacttcatctgaatgtattattcgatttaataaagaatctttatcatttatctatggcgtccattactaactaatatgagactttttagtgcaactggacatctttg

SEQ ID NO: 74816 - DNA, 190 bp, Glycine max
ttcttaaaggcttattgagaataaagacttggggatttaagagtgagatttaaagcactctctatttatttattgatgcaacaactctgtaatgcaatttttagacaaagtcaacaatatatcttttgtcaaatgcacaaatacagtagctttatttaaggttgatgttgcaccatgtcatattgtatac

SEQ ID NO: 74817 - DNA, 178 bp, Glycine max
gtactacatttggcataatgacggaatatgagggagagcatatgataatctggtagttttatatttgctcacaactaactttttaaagagttatttttaatcctaaaagagatttccctgctttgatccttatagaaatgatttcgtataattaaggctaaaaaatgcacttagtcat

SEQ ID NO: 74818 - DNA, 159 bp, Glycine max
aggcgctgtgtgttatgctcaagtgaagacgagactattaaacacatttttttggactgcatagtcgcaaaaaaaatatggcagcaggtttgtctttggctggatgttccgattgtggaaggggaagttattcatgtctacatttattgatttttggat

SEQ ID NO: 74819 - DNA, 282 bp, Glycine max
  unsure (1)..(282): unsure at all n locations
cccacgcgtccgaattcgagcggcccttnntttttttttttttttttttttttttggccaattctatttattctttctaataataaaaaatattctaataactaataataaaaaggaaaataaagattcatttgaatattataaaataaccaattattgaacaaaacaagattctttagttatatatgtaaaaaaaaaatggtttatttataagaatacatattccattctatatcaaaacaaaatataaaaatttggaatagattctttgaaatctcaaaa

SEQ ID NO: 74820 - DNA, 417 bp, Glycine max
ggttctagtgtgtgattgtttgtggatgtaactcgttcttcttcttttgttgttctgtgtttgcgtttgttttttctctcacctgaaaatgtcttgctgcggtggtaactgtggttgctgaagctcctgcaagtgcggcaacggctgctgaggctgcaagatgtacccagacttgagctacactgagtcaaccaccaccgagaccttggtcatgggagtggcacctgttaaggctcaatttgagggtgctgaaatgggtgtgcccgctgagaacgatggctgcaaatgtggaccaaactgctcctgcaacccctgcacttgcaagtgatgtgttgggagagcaagcttcaagcaaagatagcccttaattatgaataatgataaactattaatgtgtatctaaaaacttatgtatta

SEQ ID NO: 74821 - DNA, 178 bp, Glycine max
ggtaaaccgcattccttatgaggttacctaacggaaccgttcccttttaaactcttatctctctttttcgcccaaaatttaatttttttttattattaaatcgcgttttatgatcatgcttacttacaagcttagcttttgactgcgcataaattttaaccttccttccttggatccc

SEQ ID NO: 74822 - DNA, 123 bp, Glycine max
cgtccgaccgcgcgttccaatccgatcggacctactttttttgggggttttttctcctctttcccaagggtaaattatgagcttcaattaacaaagatatttctactatctaataatcaaaag

SEQ ID NO: 74823 - DNA, 214 bp, Glycine max
tttataatacacttaacggtgccaatttgagagacgacaaaaggcgaagacagaaacatattttttacggatttcaaagatggtttgaccaaatttcttatattaacacatattctttctcatgtctttcatcagtaacaacttaatttgctctttcattatgatcttcctactaaattctttggcgcttatgagccataacttaatatgaact

SEQ ID NO: 74824 - DNA, 397 bp, Glycine max
ggttctagtgtgtgattgtttgttgttgtaactcgttcttcttcttttgttgttctgtgtttgtgtttgttttttctctcacctgaaaatgtcttgctgcggtggtaactgtggttgcggaagctcctgcaagtgcagcaacagctgcgcaggctgcctgatgtacccagacttgagctacactgagtcaaccaccaccgagaccttggtcatgggagtggcacctgttaaggctcaatttgagggtgctgaaatgggtgtgcccgctgagaacgatggctgcaaatgtggaccaaactgctcctgcaacccctgcacttgcaagtgaggtgttgggagagcaagcttcaagcagagatagcccttaattaggaataatgataaactattaatgtgt

SEQ ID NO: 74825 - DNA, 312 bp, Glycine max
cactgtcattattgatgaaaaacagacccggtttactccagggcaaatatcttactcaatcatcttcaacaatcccacactttcactccttctaatagaacaccccccctcaaatcaaccctcttactaccctccccattcattcatacaaaactctctcctctaccacactcctttaaaccacaaacagtccaataaaacccaaatcaccaaaccattcgacctatttacagcctccaccaattaaaagacccaatcccacatccttcatttccaactgactttacagagtaacccaaacgctcttatacc

SEQ ID NO: 74826 - DNA, 178 bp, Glycine max
tctatgggaatgtttaaatatcttttatcgaattgaattaaggtatttaataggcaaagttcataagaaatgataaaataaaatcgatagcatatcatatgatatcataagtgagtgtctcattatcgaagcatctcctagttacctactcaagtagctataataattcttgactcct

SEQ ID NO: 74827 - DNA, 385 bp, Glycine max
ggttctagtgtgtgattgtttgttgttgtaactcgttcttcttcttttgttgttctgtgtttgtgtttgttttttctctcacctgaaaatgtcttgctgcggtggtaactgtggttgcggaagctcctgcaagtgcggcaacggctgcggaggctgcaagatgtacccagacttgagctacactgagtcaaccaccaccgagaccttggtcatgggagtggcacctgttaaagctcaatttgagggtgctgaaatgggtgtgcccccttagaacgattgctgcaaatgtggaccaaacttgctctgcaaccccttcacttgcaagtgaagtgttgggagaaccaacttcaaaccaaaatagcccttaattaagaattatgattaa

SEQ ID NO: 74828 - DNA, 219 bp, Glycine max
gatgagattatctaacaaagcattgaattagaaaactgaagttcattccttgtgttttgctttcttcctcaaaaccaaacatgtcgaacacatgcggcaactgcgactgtgctgacaagactagctgtatcaagggaaacagctatggagtgtattgtatatactgacaagagttacattgatactgttgtcatgtgatgtccagcagctgagcatgat

SEQ ID NO: 74829 - DNA, 332 bp, Glycine max
tatggtgagtgttgctatttaatttgatgaatttggggtttggttcaaattattattgtgaagctttgttagcagcagtagcagacacaagaattaatttcgatcacgcatctctcataaccctatttattattattgaaattattttttattcgacagtgacagatagaccctcatggcgggtcactgcttcttctgtctctctctctctcttctcaattatggagggattggattggatgcattgcctgatgcaaccactgccagaaaaaaaaaaaaaaatttgtcgaaatttcattggaatcaaaatcaaattttcgagccttactttg

SEQ ID NO: 74830 - DNA, 290 bp, Glycine max
cccacgcgtccgaagacgacaacagggggtggttcgagtttctaattgattggagtaatggggggtggggctcaaattattgttctgaaactgtgtttgcaccatctcccacacacaaaatgtattgctgcggaggcaactgttattacccaagctcctacaatgtgaattattttttattccagctgcaacatatacacactcatggcgggtcacttgcttattctgtctctctttctttttttttaatttattggacggaattggaattgggattcatttggctggat

SEQ ID NO: 74831 - DNA, 427 bp, Glycine max
accgacccacgcgtgcgtccaggcgtgcgaacaggtgagatacgacttatgggaccccattctacaatgaaggtgcgggtccattgtgaattgtgaattatgatgttttcagaatctttgaatgggattttgatccaaaagcaatcttgataggaccaataacaatttcatgttattcataatctattatcttttcttatgttaaaatactatgatattttatgagcttatgaactatcacttttgacttcttcttttaaaaataccttgatcctttaaatttccacttacctcaattaagattgcttacatagggttgtgatttaaaacttaaacaatttatttctatataatgaccattgcattaaaaataaactacttttaggcttaattacatattttgtcttcaaagattaaaatgtttgat

SEQ ID NO: 74832 - DNA, 362 bp, Glycine max
agaagggtcattctgagtaaggccatggcatttgttatgtaacatttcatgcataggcctcattgtgtgctagtccaaaaccgaaatttgtcatgtacagtcaacaacaatgcactttggtcaatcgtaaacactattttaactatttttgttttgagaaacaagatatttgactaaaaactttttgcccatgtaagttataaatttctggtactaaaaaagtaactctagcatggtatttaggggggaattatgttacttaacatttgcctaaaaatcaacaaacaatatttgctaaaaaaaatcacacaatttttcaaacttcgaaaaagaatcagataaccaaattaggttggtgggat

SEQ ID NO: 74833 - DNA, 201 bp, Glycine max
gacacaaggggtaacaaaaagggtcgggctgccaatccttaccggtctgttgatccagatttggctgcttcagctgcagaaataatcttacagggtattgtctcccgataagcaaaatcattggattcgtatgaagactctgtgactttggttaatggaggcaacaatcattacatttgaataaaccatctgatcctattg

SEQ ID NO: 74834 - DNA, 227 bp, Glycine max
cccacgcgtccgcacaggtgcattacgacgtctgaagggggcggccgtcagcgggccgatgactagagctaccttgccttcaaacattccactcttctttactttgccaatcctgggaataatatatattctagatattccgaaaccacggctcacgccaatcctatgatttttgctgtaggaattctaagtaacacatgacttcttactgttgctttctagcacca

SEQ ID NO: 74835 - DNA, 265 bp, Glycine max
  unsure (1)..(265): unsure at all n locations
tacggctgctataagactattgaagggattccaatccattttgcatatgataatattatttagtaatttagggtgttacaaatgaattttttatcangagagttagataaaggtgataaaggtaatcattataaaatggatgtggtagggtgtaaatggtaaatatattcccaacacaatcaaatgacgaatccatatctacgttagagacttttctttctagagttttttttcgaatgctttttctttaataaataaactatgc

SEQ ID NO: 74836 - DNA, 381 bp, Glycine max
atacgaattgagagaattttttttaccaatgtagtattaacttatttaatgatgaataatttttaatcatgaacaagcatgtaaatctttgatacttttaccttgcttgtttttgtcacacgtcacttctagcttgatcccacatatttttagtctttctacatgttcaattttttctatttttgcttcgcattttactggcatagcaaagagtggtcaatatgataatcaaaataattagccaagcaaaagtgaaaaccatattgaaatttggaattctgtgggaaaaaaatgtcaaggcaatatgtgaaggttcttaattttatggtcttcaagaacatatggggggttttaagtaagccctggtttaaggattaaaaa

SEQ ID NO: 74837 - DNA, 245 bp, Glycine max
ggttctagtgtatgtgattgttgtgactcgttcttcttcgtcgttatcttcttcttttgttgtttgtgtgtttgatttttctctcacctgaaaatgtcttgctgcggtggtaactgtggttgcggaagcgcctgcaagtgcggcaaccgctgccgaggctgcaagatgtacccatacttgagctacaccgaatcaaccaccaccgataccttggtcatgggagtggcaccagtttatgctcaatt

SEQ ID NO: 74838 - DNA, 136 bp, Glycine max
tgtgagggggcttcagaacgtacgacggcgcgtctggtgtatgttcttatgttatcggcgtcatttctccatttatataaacttatgaaaaagctttaatagatgacacctttgtcagcgttcacatcactgctaa

SEQ ID NO: 74839 - DNA, 281 bp, Glycine max
acatgcgaatagaaggactagagcaccaaatgaattcaaatactggaagaccttatggtggcaacaaaagggtcaatgatggatcgaaccgaatagaggggcaagacagaattgagggagtaaaactcaatgtatcatcttttaaagtcaagagtgacccagacgcctaccttacctgggagatgaagattcagcatgcattctcctacaatgattatccggaagagcagaaggtgaagttagcaatagctacattctcatattatgcccttgtttggtga

SEQ ID NO: 74840 - DNA, 419 bp, Glycine max
tataccatgtataaaacatccttttaagtgttccaggtacacgacatttaattgcttaattcttaaacacatcttatatcctttaattgaaaaagttaactaattgttttccgcagtaattctgcaattcaagaaggaacaagttttcattcgaaatttaatgacatttaaacgatacagatatccgataatgtacatggttactactttctattagatggcataaaaggccataaaatatggatgtttgtgacaaaatatatgcttgctagtttcataacatactaacgtctacaaataacttcattacgcttcacaatacccaaattacacacagaagattcttgatgaagaatgttatctataggtggctctacgaagcccatgttagccctaatcatgaagagatcaccttcatg

SEQ ID NO: 74841 - DNA, 392 bp, Glycine max
ggttctagtgtatgcgattgttgtgactcgttcttcttcgtcgttatcttcttcttttgttgtttgtgtgtttgttttttctctcacctgaaaatgtcttgctgcggtggtaactgtggttgcggaagcgcctgcaagtgcggcaacggctgcggaggctgcaagatgtacccagacttgagctacaccgagtcaaccaccaccgagaccttggtcatgggagtggcaccagttaaggctcaattcgagagtgctgaaatgggtgttcccgctgagaacgatggctgcaaatgtggagctaactgcacctgcaacccctgcacttgcaagtgaggtgttggagagctaaagcttcaagcagaaatggcccttagaaataatgattaaaacta

SEQ ID NO: 74842 - DNA, 189 bp, Glycine max
gggccgagatttaggctctcttacttcccatacgctctgatgctactgtgctgcggcggcttgacgactgcttggttttccgctcttgtccaccattgactctgcagcatttccataggagccgcctgcttcgactttatgaggataatacaatctattgaacttcatctataggatcatgaacttgac

SEQ ID NO: 74843 - DNA, 161 bp, Glycine max
gacggcagatcgagacgcggatcattattggcgaggtctgacaacaggtgtctgttgctctcaagaacctccccgagcattcttgtgcttgtataacggctgggaacccttgaacgaagagccaccgagctctgcgttggttgctaaatacaacatcaatt

SEQ ID NO: 74844 - DNA, 86 bp, Glycine max
gactccaaatttactccctaaacatacaatgcggggtccgacaacaagtttatattgctctcaatacccctcccaagcattcttct

SEQ ID NO: 74845 - DNA, 212 bp, Glycine max
aggaggacatgatggttatgccattataactcgctcgttcacacggtaatgtttttgagatgcctgaaacactgcaagtgaatcgtactatgatgaaagatggacactacagaattgcagttggggatccaagcctgggccacctgattgctcgaggaccaagttccaaccaaatgcgtaagctagaataataaactatcacagttatacat

SEQ ID NO: 74846 - DNA, 358 bp, Glycine max
atatgggacccgatattacaatgaatttgcaggtccattgtgaatcgggaataagcgatgttactacaatttttgaatggtattatgatccaagagcaatcttgatcggaccaataacaatttcatgttatttatcatctattatcttttcttatgttaaaatactttcatctctgatgtttttagtaactttcacttttgtctttttcttttaaaaataccttgatcctttatattgacacttacgtcagtttgatgcttacatagttagtgtttaaacattaaaacagtttattttaatatattgccaattttatcaaaaataaattacttttaggctcaattcataatttggcct

SEQ ID NO: 74847 - DNA, 292 bp, Glycine max
gaccgaagcgttcttacagctgaaaaaagactacataaggggatgcgaattatatatctagacgctggaaattggtcaatggtagctctcgtgcaattcaaatggtcataactttgcactctgatttgcgattcatgctcataatatatcgtgacccttgtaatagatcaactgaagctctcgagcacataaatgatcctaacttttcacttggagttcctattaaggcgcataatatatgtagacgctctaaattgaataacgttggctcttgtgaaatgcatatggtcat

SEQ ID NO: 74848 - DNA, 259 bp, Glycine max
ccacgcgttcgttgggtgcaaaaagacgcttaaggggttccaaacagaaagatatccaggagacatggggagtgttattggggtgttcgcataattcacatacatccctctatctattatgatattaaatagcatagttgattgttaggaacaatgttttacatctacaattaatgaaccaaatcaatcctatacaattgtttagagtttaacaaattcttaagaagtaccccacaccttcccaacaaatttaaaacat

SEQ ID NO: 74849 - DNA, 357 bp, Glycine max
gtgccaaagagaaagagatagagaaaaaatgatgagtgttaatgtggtgtttgtataattgggatatccaaatataactattatgatattaaatagcatagttgattgtaatgaacaatgttttacatctacaattaatgaaccaaatcaatcctatacaattgtttagagtttaacaaattcttaagaagtaccccacacctccccaacaaatttaaaacattacggtgaaaggttggaataaataaaggaaccttgttccctcagtaacgggcaaagaaagaagttgtacatgtaggttaatgatgtatcatatgtactaaacactggcatataaaatgttcatgggatggagag

SEQ ID NO: 74850 - DNA, 238 bp, Glycine max
cccacacgttcgtacgcgagaagactgatgttttggggtgcttgctttgactagattctctggcttcttccacacatactcacatttctttttacccttttataatgggttttttgataatgctgtaatcttgtgtctttcacaattgtcaaaagagtggtagtagcaatctgtctccgtcccatctgttataaaacttggtttctcaatgtaagtgtcattttcattcactatatcc

SEQ ID NO: 74851 - DNA, 184 bp, Glycine max
caacacaacagaagggggtttgtgaacgctgtgactcggtcttgttcaccgttatcttcttgtttagtcgcctgtgggtatgacaaactctgacctgagaaacgcctcgctgcgctcgtaactgtcggtgccgaagctcctacaagtacatcaaccactcggtagcctgcatgatgtacccata

SEQ ID NO: 74852 - DNA, 158 bp, Glycine max
aggcggcaatcatataacatctattatatggggcaagagtggataattctgctttggggcgcttatcagatttctcgtaacagtactctgatgcaccatggacaatactgaattccgtaggtgtgttcttgtttgggaattattatgtaactaggatt

SEQ ID NO: 74853 - DNA, 161 bp, Glycine max
tgttaataataataattggattccaaaatcgtagcgtatcgttggtgcgattgaacgattcgatgggaagaggattattctagagcttgcccactggccgccgtctgtttttcaccccggaagattttcttgctggaacctctatccgttcttgaactttt

SEQ ID NO: 74854 - DNA, 305 bp, Glycine max
ataaaaaaaagagggcattacggtgattacccacccaactatccaatccatcaaccatgtaacgtaggctttaagtgatagaaattaaaaacagcaccatcttcacggcatgtcttctcttctcttctctccctccatcttcaaacttgccttttattacctctcaatgccactccctttttctcttcactctcactctctccaacattctccataccttcttattccactttgttttttccgcaactggttttaaccaaaatgccggtttatttaaattaagccctttttttttctttttgaat

SEQ ID NO: 74855 - DNA, 246 bp, Glycine max
ctgcgatgacaacagacgggggatctagtgtgtgattgtttgttgttgtaactcgttcttcttcttttgtcgttctgtgtatgtgatcgatttttactctcacctgaaaatgtcttgctgcggtggtaactgtggcagcggaagctcctgcaagtgcggcaactgttgcggaggctgctagatatacccagactttagctacactgagtcaaccaccaccgatacctctttcttgggagtggcacc

SEQ ID NO: 74856 - DNA, 236 bp, Glycine max
ttcaacagggtcatcattgtcgatgtcttaggaccttggtcatgcccatggcgtctttattcagatcaaggggatatgcatctactgtcacataaatggggagaagggccggataatgccaccgcgaagcgctttcatactccagagattaattcgaggagcttatctatgtccagaatatgcatggtggaatgagacaggacacttgccatgcttaccctgaggcagggagcttt

SEQ ID NO: 74857 - DNA, 235 bp, Glycine max
gatgacggggcgtccacacggccgcccaaacacgcccgattgtgtatgtgagtgcaaggatttgtctttcaaactaaacctaggttcactctctacggtaaggtcatgcattatcttgtcacgagggaattgaatggcactagtattcactcgatcaggagaacagaagctggacagattgtagggtatgctgttcttagttgtgaggcgaaggggactgaaccctatacatcat

SEQ ID NO: 74858 - DNA, 331 bp, Glycine max
ctgccacacgacctcccacggggacgcaatgaccacctcagggcttcattggacgcagggatgatataccagaccctagccagcctgtacaggctactcgctctgatgttgccggtcctgctcgtgcataaggatcttgaagtataagacgaataagtatttcgtgttatgctttgagatagtcgtactcgaatggatgagaacttggatcatgtaggggagagttctttattgttttaaagaccgatactcagttaaatctggatggtaatgagcggttgagaatacatgtcggaacttgaaacttcataataattgtttgattgcatat

SEQ ID NO: 74859 - DNA, 374 bp, Glycine max
gtattatatttgtatcacatataactatttagtttcaaggtttatgaatgataaaatatcaatattttttagtccaaattaatattttaatttgaaaacttaaagtagaattaaaaaatataaaatatgagttgcataattttttgtttatcatttgaacaaatttatgcattgtttaggagaaaaattatagatgagttgtttaagtatgatgtgatattggggggactactaaaattattttaatataacataagataaaatacctaaatgggaatataaaagctcttataattctaacaagaatatatttaataaaattatatgttatatattctaggaaaatcaccaacacacgttcattattctgacat

SEQ ID NO: 74860 - DNA, 188 bp, Glycine max
caaaaaacaacgaaaggggattcgagtacgaatgccaatctaaagtgtatgggttattactacagggattatgcatttaaaactatacggtagaatcagacgctttacaggattctgactgacacactctagcgagctacataacaaatatattcttgtgtctactaaaaataatttacagcacatga

SEQ ID NO: 74861 - DNA, 295 bp, Glycine max
gattctagtgtgttaaggacacaaagagggtctggtacctataactcgggagctcatggataatctaaacattactatacgactgaagatgaacaactacggaggaacccgtgcacgagtcggcatttaatcagcggaaacgagacactgaaaacccccgacatctctgtaaaaaagatactctctgataatgaccagcaaaaacattataaggtgtgctccacctgcaacagtgtaggttctgacgtgtctaaagagaagaacataactgatcgtgttctttatgtttgtaccc

SEQ ID NO: 74862 - DNA, 420 bp, Glycine max
  unsure (1)..(420): unsure at all n locations
cccacgcgttcgcaagtagaaaaattgtgtgaatggattgatgtattantctaaaacttggttcactcttaaaggaaacatcttaattttatcttctcacgagtgaattgaatgttactaatatttactctatcaggatatatgaatttgactgatttttggctttgctgttctgatttgagttgtgttggggactgaaaactagacaacatttggatggttgtctttatatatgcagctcttagatcttcatatgcaattaccgttatgcacttgataatatcaatttcttgtgtcaagtggttgagtatgtgaatgtgcacaggtgtggcagatgagaactggaccacgtctcttatctatccagtgtgctaaaggctgcagattgtacagcccacatacagggttggatcattatca

SEQ ID NO: 74863 - DNA, 312 bp, Glycine max
  unsure (1)..(312): unsure at all n locations
gctaaattatctatgcgctccctaaatcttgattcgccctctcttccatcaaggagcatgagatgcggagaagagaattctaacacaaaggagacatctgcaagcacgaggagcttataagtggagcttacagtccctgttgctgttaaaaaaatggaagctgtttcaacctctcataccacttcatgttcggaggacatagcattatcttttaagtctttgggatgacggtttccaccattaaactatgaattgnagctgtaaaaaaaatggatgctgtttcaacctactgaagaggatgctactcattaa

SEQ ID NO: 74864 - DNA, 255 bp, Glycine max
aggtatacctgcgagagtgaaatgagaaggtaaatttgtaagactcaaatacaagaaagcagttatgggaaaggtaggaattattgaaggattgattgataagggtgattggatgacttgtctcatcatggactatatatgtaagcactatattctaattgaaatcacaaaccatttttattagtaagaaggactattggaattaccatcaaacaccataaaatgagttttacatgcgcagatgtatggtgtgca

SEQ ID NO: 74865 - DNA, 426 bp, Glycine max
  unsure (1)..(426): unsure at all n locations
gctactcctcatatatattgagaaattattagatgattttaaattattatatgtccatgatttcgaccaatctaattttcgtatgacactaatcaaatttttgtaatgtactgactagaaagaattattaattgtcatgtatacattagtanctactagtagctagagatcatgatagtaccaaactacttaataacttaaggataaaataaaatttagatgtagttcttttggagttttaactcggtaagtctttatcatacggataattaagctgaaatttcaattctaataaaaaaaataccaaaaagttatataagaaagtagatttgtcctatttttttattttttttgagaggagttatgtcctaattcttgtcgctcacttttaatcctgatagtttttcaatagctaaaatgatttct

SEQ ID NO: 74866 - DNA, 192 bp, Glycine max
atttttcaggataaaattggctttatagcaccaacaataaaaaaaaaaaaaaggaaaatgtgaataaggagaaagataaaaaacaatcttaaaacaaaaaaaaactgggcggcccctctaaaggatccaaacttacatacccgcgcatgcgaagtaataatttttttattgggtcacctaaattaaattaaa

SEQ ID NO: 74867 - DNA, 521 bp, Glycine max
  unsure (1)..(521): unsure at all n locations
cggaanncgccgggncggacccacgcccgtccggttccatcnnccaaatatttatggcgtgtatggtatgcatcgtggtttaggaccacnntctacaaagagtcagtgggggagtccagaatttatagagtagtatgcttgcaataccttgacatcntnnattcaagtcattgggctttgtgatcnnncaaatcactaattcnnccctgcaaattctagaagtctgtctcggatagtttagtggagaaccaagcgccgaataccaataggagagtaccgtgagatatgtcgagcagagtntggacgctgctgattgatctctcatgttnggatttccatagtcagaacaaagcgtggatacattaggagagcatgtgagactgtcaagcatagttggactgctgattgatagctcaacgtttggtttggtttctatggaacgtcaaaaatagtccaatgtcgtgtctaaataacattgaacaccgcaaatgtgttgcaaactactttgtctntattatgtt

SEQ ID NO: 74868 - DNA, 382 bp, Glycine max
ccaacgcatgcgaacagctacaaaatgacgacaaagtgtgatgtgattgcagaaacagttggggcactgattgttgtgactgagaaagatcccacaaatgacactgcgacatacaccacgacaaagatgcatacaggtctctcaacagacaaattgcagggcttacactccacatacttgttacacgctgctgaaacaacaaaaaccatgcttatatggctacctcaaaaacgctagcttgaaccaggatgctaactatactaatgcccgaaaaaccgctgcttcttgtaagatggcgtctccaactagttaaataattaagccttcatataattaaagtgtgggatatatgtatatgtctaaagtacactcatctttatta

SEQ ID NO: 74869 - DNA, 338 bp, Glycine max
  unsure (1)..(338): unsure at all n locations
agggattcctgttggggtatcatccactttgacaaattttctttcaactccacccctcccaattcggtcttttcttccccttttttcaatgtatgcggggagcaagagtaggatggttgtttaaagaagcctgatagatatatcaagataatttatgaagtgacgttaggaatatctttattgcagtttctaaacagtcaacttattgagttattattaggagtagtagtagctatgctagtcttgtgcgtccatttaaacactattaaaagataccacaggatgattaaagaaggtgaaaattnttgtcgntntaaaanaaaacttatatatattat

SEQ ID NO: 74870 - DNA, 389 bp, Glycine max
tgagggcagttgcttaaggactgcataagaggggttgcatgcagaccttaggcttaatctttcagatagggagttgtcataagaagacgaccgtccaaaacattcaattctctatacaagcccataattttattcgtcataccaaattgcatcacaggtaaacacgggctggttgacgctgaccaagatagagatacaagaggaaggatcagaggatccatccgtgagatctattaacaatgaagctagagtgctaacactcatctacagaggatgacaaacatatgcatggtggctctggaagcagatatataagtgctgaactgggaggagaacattgagagaaatctcaatgagattctcattggtggacaggatctgtacacaga

SEQ ID NO: 74871 - DNA, 425 bp, Glycine max
gaacacttaagcggtaaaaagaagagggaagataagtttgctttagtttggcgtgtgtaattggtagagcgagaaacagagaaatggacgattacacttagggaaatgatggacctgaagacactggtcactccactctcgagaagaaaggcgtcctatgcaggatccgtgtacatacacaccttagggccgaactcagggcgagtgtgttcgaagccatcgaataagaagatcgtgtgattgagaaggaacaatgtctacctcctgcattgctaggtagttgcaacgatcgagctaagcagcttcacgcttcttcttcagggagacttcttacggcaatgatatgtgaataccttgactgggcgcagctcagttatacgctaaaagtttatcttccggaatgtaatttggagaaagatttttgg

SEQ ID NO: 74872 - DNA, 296 bp, Glycine max
attttcttatgagctggataagaaggggggcatggggatcttatgtttagactctaaaaaaggtttattttttaagaggacaaccgtctacttcatttttttatctatggacgcgaatatattgatttgtcattttaatatgcataacatgtaacatgatgtgatttatgacgttcacgataatgatacaaaagcagggttcaaggggtcgatgcatgagatatatagagctgatgtgagagagcgatcactgtcttacttctaggacaaaactttggtgcaacgatccatatgct

SEQ ID NO: 74873 - DNA, 412 bp, Glycine max
  unsure (1)..(412): unsure at all n locations
gcgtgcgnacagacgaccgcacacgcggaagagcatgtatataatcaccatacttctatgggggatgagcgcttattgcatacgggcagaaaactatttctcattaccagcaccactcctagtgcagttgatccaaaagatgcaagtgctaaagatgatcaatctcagattgtttatgaagaacatagagatcatgacaatacttttgtggttgaggagcctgaaagcatacaggagaagattattcaacagacaggaaccactcctagtgcagcttaaccaaaggaagcaagtaataacgatgatcaatctcagatttttgatgaagagcatatagatcatgacaatacttctgttgttgatgagcctgaaagcatacaagagaagactattcacagacaggaaccactcc

SEQ ID NO: 74874 - DNA, 291 bp, Glycine max
ccgccagggcagccgtcactgaaactgagggaccgtgcctgtccgtcattgcttagatacctgtcgaggtggccaagcgccttcgtgagccaagactggttgtgaaatgcatatggatggaaaagatcatgaggcttggcctggagcgagtcctgccgggccacggcactgtacctataaggccgtactcattgtgggcccggaatgatgccttggcagagcggaaggcctgtgtacaaagtaccgccacggatttctgagaggacgatgaggatgctcctcaatcaggcc

SEQ ID NO: 74875 - DNA, 285 bp, Glycine max
gctgccagacgacctcggaagggggttctagatgcatgattgcttaccgacctgacggagttgagcctatagtgatgggccccgttcgtcttggtagaaaaatacacatgacattgccaaagctaacagtggatactggggatgctgaagatccatgctgttcgcattggcgatgatggtgcatttgaatgtgcccaggctggagctcctccggagcgaccacctgcggcacctctaccataggagtgcgccctggccaggctgacttcgatgctgccgaaacgg

SEQ ID NO: 74876 - DNA, 388 bp, Glycine max
  unsure (1)..(388): unsure at all n locations
cacgcgtncgccatgcccaaaaaaagaggatttcgggtgctggtcaggatgtgcagcaaaggggtgagcagagggggttcatccctcgcgtggtcaaggagcttgccttcttagatgccagtaaccatggctgactcaccgaggaagatcatttgagagatgccaagtgttgcaaacgaatctacgacgatgaattacgccggataaacagtggttctttgaaaataaaaaggcctaagactgattgaggggtagaaggcaacaatggtgaaaccaaatccattatggcatcaggacattacagtgatgagacaaataagatgtcggaggaagaagattagctcgcgtatataaattttaagttttgaacgatgaaactagagcttta

SEQ ID NO: 74877 - DNA, 392 bp, Glycine max
gaagagcatagagatcatgacaatacttctgtggttgaggagcctgaaagcatacaggagaagattattcaacagacaggcaccactcctagtgcagctgaaccaaaggaagcaagtaataaggatgatcaatctcagatttttgatgaagagcatagagatcatgacaatacttctgtggttgaggagcctgaaagcatacaggagaagattattcaacagacaggaaccactcctagtgcagctgaaccaaaggaagcaagtaataaggatgatcaatctcagatttttgatgaagagcatagagatcatgacaatacttctgttgttgaggagcctgaaagcatacaggagaagactattcaacagacaggaaccactcctagtgcagc

SEQ ID NO: 74878 - DNA, 229 bp, Glycine max
gacgggagggggttctagtgtgtgttacaggtgcgactcgtcctggttattcgggatcgtcttcttttgatgcctaggatatatcatttttatatcacccgaaaacgtcttgctgctttggtaactgaggtgtgccgtatcgccttcgtgtgccgcaacggatgcagaagctggagggttgccccatgcttgaccttcaccgtaataccaaccaacagagagcttggtc

SEQ ID NO: 74879 - DNA, 422 bp, Glycine max
gaataaacaaggtacaccaataaacaattgcaatctctttaaacaaaaaaataaaaataatcttggtatgcattttgcaactcatctagactatggtatagctgtgtgtgtcattttgtgctagacccttcaccatggaagagaagtcaaacgtggttgaatattttgcaatagcctatataagatggtaagggtaaaggaccaaatgttcaagatttgtgcatgccctttaacatgtgcctagtttggcttatgttacaaggcaattcatgatgggtgcaagaccttggctatctgagaaggagacagagaaatagaggcagcaggaaattacttccctctttcaaactgcaatttcttccactataagttgccagagaggaccagttgaagtgtgtggtacacattacacaatgtgaaat

SEQ ID NO: 74880 - DNA, 423 bp, Glycine max
gtatcttgctaacacccctatcatcaatgcaaggggaggatgtcaacctttttcataccttgcccatggtggtgctagaggtggcattatcatcagtcatgatttattgtttttaacttgcaatggacaatagccccaagactagagaaggtagtgttttgtttttcggatcaagcaataaaacaaacaaagggctttaatgaaaaagtgtgcaaagggtattttaatgatcttgacagggaaaaatgagaagttagggatgaagaagggttgaaagagaaggtggttttgaagatgaagagggattgagagaaaaacatcaacgattttgttaggattcttatttttatctgtagttttggatactttatatttaacatcaagtatttcatgaaggcaaatattgtctaaaacatataatct

SEQ ID NO: 74881 - DNA, 350 bp, Glycine max
tgccacgcgtccggctgaaacttgggcggtatttatttttgatagattattgatatatgagatgcaattggcaaatttcgcaatgtgcatgtttggatcttttttggttctaggcttcaaacattatctagatttgatgaattaatcctcagagactgaagcatttgttgaagtccattgttaattgtgtatttcttattgtttttcttttttggcatttttatttttttaaattatcattcaattcgagagtgtcttgaatactcgacttgtatgaatatacatcatatttcagaagtttttttgtttttgaaaaaaaaatccaaaaagaagaagaaaacaaaaaatat

SEQ ID NO: 74882 - DNA, 228 bp, Glycine max
ggaaaaccatagcacaatacctcacgtgcctctggataacttgcatcttgggcaaatcacaattttaacaacggtaacgggacccgtcaacggcctacgacgaccggaaagctacctatttttctctttttgtaaacacacgcgcgctggcttttggggtgaattttacgatttggtggtccctgtggtgggatccctttcttgttttggccgaaccgacaaggtttt

SEQ ID NO: 74883 - DNA, 394 bp, Glycine max
ttggggaatataccataacacaatatcctcacgtggctctggcataacttccatctgtggccgaatcacaactttcaccaccgtcaccggcaccgatcaccgccctacgacaaccggtaatctctctctctctctctctctctaacacacgcgcgcttgctttttgtgtgaatcttacgattttgctgttcctgttgttggatccctttctttctttcgccgaaacgacgatgcttttctagatccaactcgtcaatagtcttttcccttaattgttcggatcaatttattcgccttctattttggagcttcgtgtgtgaatcgctaaactgtggcgtgtggttgcttgtttgaaggcaagacacttggacatctgaatcattggtataaaaat

SEQ ID NO: 74884 - DNA, 96 bp, Glycine max
ctctctctctctctctctctctcccccccgcgcgcttgctttttgtgtgtctcttgccggcttgctgttcctgctgttggctccctttctttcttt

SEQ ID NO: 74885 - DNA, 258 bp, Glycine max
gaactctacagagggggttttcaccacgcccaccaacaaacaattgtattctcttggaacagagctatcaacttaacctacatatgcgttcacgcaactcacctcaactccagtgtagcatgactgtgtcaattcgagcaataccctacaccatggaagagaccccctaagagggtgcgtatttcgccttcgccgatataacatggcccgggttaaggaccaactgctcatgatctgagcatgccctttaacatgccc

SEQ ID NO: 74886 - DNA, 304 bp, Glycine max
  unsure (1)..(304): unsure at all n locations
gaagaagaagcattgtgcgactgaaaaaaggtcttagatcgtaaaaactaatcactactaaaacaagagatatcgtatatggctcctcccaaagctaatgggatcgtgtcgtccaataccgtcttcannganatataaatctattgacctttgtgcgtagatttgaacaagctactagatgacctatgtgctaattactaggcgctcttaatagactcttaatattatggaaaggagtttgaaataccattaggtgagaggactgatcgtctaacctagcataatatgcttatcggcagaaacc

SEQ ID NO: 74887 - DNA, 106 bp, Glycine max
gaaaaaaaagaatttggtgacggagctaccgttctagagggtccaaacttacttacgcgtacatccgacatcataaatattctatagtaccaacctaaattcaatt

SEQ ID NO: 74888 - DNA, 301 bp, Glycine max
caacggataatgtcgccatgccaacgcctggctaggaagagggttgagactaatagcgctcagccgaaaaatactattaatggagaagattttgtatggcaacctgctttataaggagagcaaaaagaggcatgaaatacttctattgccatatggacctgtgaagaagggtatcaccggcggaattatcgacaaaaacatgtaaacggtggtgagtatgccacattctataataaactcacacagactatgtgtgtgggacatacaccagtagcacgatggtgttagggtctggtgacag

SEQ ID NO: 74889 - DNA, 266 bp, Glycine max
ggcgagccgcgcgtgcgaccacgcgcgcgcgctgttgttagaagacgacagaaggggacaccacacgagccatctcggggtaaggttctgcacgctgtgctttcagcgagtgtgcttttttcgtttcaacaccccaattttcacacgctgcttctttagattcagaaatggcgcaagaaacccttttatttacataataatctgttaacaaaggtgacccccacaagcggtgcgaccacatatctgaggcacagcgccatgggtgc

SEQ ID NO: 74890 - DNA, 211 bp, Glycine max
gaagagattgtagaaacagttagtgaagagattgttgagactgagaaagatgtcaacaaagtgcatggcattccagttgaggaagatgatacaaagagtgtactgaaggacagaatgaatgtatatataccgctcagacgtgagaaatgctatataaaacaatagagagggttatttcagtagttagaaaatgtggatttcatcccctcgg

SEQ ID NO: 74891 - DNA, 227 bp, Glycine max
  unsure (1)..(227): unsure at all n locations
aaaagaccaccgaagggggggcaacagaaaagaaaaaaaacancaggggcggggcgngaaaggacgcgccacgaacggaaccagaaacgaanncaaggcagccacgcacagacgagcccaagcagagggaggaacgacaacgaaaagnancaaccccacaacgaagagaaggccacgcagccagaacaaaaaaggccaccaccggncacaagaacagggacaacaaa

SEQ ID NO: 74892 - DNA, 177 bp, Glycine max
  unsure (1)..(177): unsure at all n locations
tttggttttttctaaataaaaaacataattggggccaggtttctttataaagggactcatacttattctcanactcaaatcttttctttcactgaatgacttaccactctaaataattttcaatcctgtcacatctcattctttttcattacaaaatatatatcacccacaaatcta

SEQ ID NO: 74893 - DNA, 408 bp, Glycine max
cccacgcgtccggaaaaagcctctaaatgtggctagctaataacggcaatgttcctttttggctctattgctgaagctggtctaaaattctgcaattatccaaaaggggggaaaaagggccttaaaaaacattgaggctttgctgtggcattgttattctgaaaaaaactttttattgcaagcaaggaccctcatttccaagctaactgaggagaaaaactctgccattcatcaaaatatcaagcttcagcaagaactggaactgttgagacgcgaagccaaaagaaaccaaagagggattccattcatttatgtatttcttgcgggcttgatcggcatcattttgggatacctattgaaaagaacatggccaccaccgtgttacacattcttcagtttctttgatgc

SEQ ID NO: 74894 - DNA, 346 bp, Glycine max
accttcgacgggcctgaacatgctggccacggtctctaggtatatggcggtctataatccctaattactgttaacatagacagcactgaacgtgtatcccaaatcatgaacttccatagatcaaatgttatgctcctacaccctcagttgtggattaagaaaaacctctttttttttacggtgaagaatttgcttacacatatagatactgaaatactatgcattctttttttctttccaaatgtttattagttgcagacaacagtgaacatttaaaaaaaaatgtactcactcgtaactgttatgaaagcgtcttttgcatcagattaaacaaaatttaattctt

SEQ ID NO: 74895 - DNA, 241 bp, Glycine max
acctccctttgttaaaagaaagcctccaagatcctcacttcttgattaattagagatttctttttttttacggtgaggaattgcttacaaggatgtatactcgaatactttgtattctttttttcttttcaaatctttataaggtgcgggcaacaaggaacattttaaagaatatctccctaatgtaagcttttatgagtgcggccttttgcctccgattaaaaaaaaatttaattttttt

SEQ ID NO: 74896 - DNA, 439 bp, Glycine max
gagtgtatgtgattgttgtgactcgttcttcttcgtcgttatcttcttcttttgttgtttgtgtgtttgttttttctctcacctgaaaatgtcttgctgcggtggtaactgtggttgcggaagcgcctgcaagtgcggcaacggctgcggaggctgcaagatgtacccagacttgagctacaccgagtcaaccaccaccgagaccttggtcatgggagtggcaccagttaaggctcaattcgagagtgctgaaatgggtgttcccgctgagaacgatggctgcaaatgtggagctaactgcacctgcaacccctgcacttcaagtgaggtgttggagagctaaagcttcaagcagaaatggcccttagaaataatgataaaaactatatgtagtttcaaaacttcaaaattatgtagtatgtattatgttgcactctgg

SEQ ID NO: 74897 - DNA, 437 bp, Glycine max
ggatgtccgcatgcatattagccgagtaaaatttgttctatactcgatgcagggttttggcaaaacccaaatgtccgccaattggtgttgagtggaattcttcgatcaacaacacaatgaaagggttttctagttcaagccaaactttgtggttgaagaatagcaggccatcatggtactcgatcccaggatgggaagtgggattggtgcaaatttgctgaagcttatcttgaaaagaagaactagtggtaaaatgtttgtgcatggcatcgatgaagatgaagtggggtgtggagagtatcatgcactgaccactggtgggaggaggtattctggataaggcatctgtgacaacattcgtttttccgaacttgtattggatcgtgtagtcgtaacctagtagcttggagagataattttgttgttctagcgtctta

SEQ ID NO: 74898 - DNA, 156 bp, Glycine max
ttggggagttttgtcgcagcattccatacgaggccgaatggaagagtttttgttgggtttggaagctaaataaggtttgcgttgaaaaaaaaaaaaatgggaagagaaaaagagacaacaaaggtagcttacacaatggaacatcttgtaaccttt

SEQ ID NO: 74899 - DNA, 325 bp, Glycine max
ttaaatttttcactttttttttttttccttgttttttaaattggaagttgtacatttatttttcagtttttttttctttgaaaatttccttttgggttttttaacttggtttatttaagtggttttttttttcttgttttaatttttttcttttatataaaaaaagttttataatattttttttgtttcttaatatctgattttttttccccattttattttttttttttttattttattttttaatttttttttttattttttttttttaatttttttttgttgcggttttttttattgtttatatttttttattttttttttt

SEQ ID NO: 74900 - DNA, 212 bp, Glycine max
  unsure (1)..(212): unsure at all n locations
cggttgtaagaccaccggaggggccattctttaatcttaaacacttggaaggaaaatatagttgcccacttcttccattatctcattttctattacatcggcatgatgaaaccttgtatattatactctaaaatttagaatcattcttaatttggtataattatactaaatattntactggtcgatatgggaaatgcactgatcacggatac

SEQ ID NO: 74901 - DNA, 105 bp, Glycine max
  unsure (1)..(105): unsure at all n locations
ggttctagtgtatgtgattgttgtgactcgttcttcttcngtcgtatcttcttctttggttgtttgtgtgtttgttttttctctcacctgaaaatgtcttgctgc

SEQ ID NO: 74902 - DNA, 97 bp, Glycine max
gacgcgctgctatgcgcaatgcctggtagagagaacgtgtggcgcatgaagccaactgtcgattctactccctctagagatgcgcatgttcgtgaag

SEQ ID NO: 74903 - DNA, 320 bp, Glycine max
  unsure (1)..(320): unsure at all n locations
ggaagatgagggttggaaggaagagaggaacccagagagataaagctgttggaaaaagctgaaagtgaggtaaccgaaagaggaaaaaaaaagctttttaatttccttcctctattctattctcttagtcttaggtacccgtatctatcatcatcttctctagcgagctcagagctcatcctgctccttctcttaattctattatcatacaactaagaatgatcgacatgttagtgatccataactcattacctnccacttctgatgccgagaatggtactgctgctactgncactaataaaaggaagagaaggcctgca

SEQ ID NO: 74904 - DNA, 373 bp, Glycine max
ggtccggaattcccgggtcgacccacgccgtccgccaagccttccgggagtacattgaccaccatgaaggttgatggttcacgtactatgtatgaacatgtcattgagatgacagacattggaccaagacttaagaccttggaaatataatggctgtgaatgagaactttcttgctcagattgttctaaactcattaccgtctgagtttggtccgttctatatgaactatactaccacgaaagatacacggaatgagcatggatcgcacagtatgttagttcagaaaaaaaatatggctcacgaatcaaggaagccactcagttcattatgtgagccaccaatgacatcaaagagcttgataagaaatttatg

SEQ ID NO: 74905 - DNA, 153 bp, Glycine max
gaacaaagaaacaacgcttcatatacccaacttgcgggttcttttcatctgtatacaatctaaatcctcctaaatactcctccctctttaacccatccaatcttacttacccatcccaacgactttccatactcttctttattatcacttaaa

SEQ ID NO: 74906 - DNA, 275 bp, Glycine max
atctaaaagaaagactaaaagttttatatattaagaaataaggagatttgattaacaaaatcttgtaagactatctattcttatttgagttttgcttttattactcatgttatttagacaaatagttgataattatgagtttggatatttatttaattaatccttgataatccatataaatctatctatgtgggcaatgacaataaaattatagtaaataagcttttaaaacttttaaactatagctatagattgattttcaaatcgttttatgt

SEQ ID NO: 74907 - DNA, 245 bp, Glycine max
aagaatgtatttacaagaaggaaccactgctagctgggacattttgaacctgagttaaagtcagcatcaaacacttcggatcagttaaaaaaacaattatttcatctaatattttttttcacgtatcatgtgtgtgatgattgacatatgggtcaacatgtgccaacatcaaatattgtatgatgtttccttacatgcaatatatcattaattaattgacagaacttattttatgttttattttc

SEQ ID NO: 74908 - DNA, 120 bp, Glycine max
gatttctgtttctctaagataaacaacatgtgatggggtttttattgaagtgaaccaaattgatttatctcccatatcctaatttgcaatgatgtttgtttattctgcactgtccattat

SEQ ID NO: 74909 - DNA, 361 bp, Glycine max
  unsure (1)..(361): unsure at all n locations
gggcccacttaaaagcatggttcctgactatgaaaatcaggcaacaacacagggaattccatctgtaagctgaagcatccttcatggacatatnttacactctgccatgtgaaacatgctaaggagatataagggtggttggatgattaagatagaagggaatgggggaaaggtcgcgggttcgattccccagctaacaaattaacaactaacatttgccgataaaaaaaaatgtgaaacatgctaacaactgattcttgattgtgtgtatattttttttttcagggaggtacttttacaggaatggaaacaacctttcagggaatgcatctggctgagaaatacttnntcccaacacaac

SEQ ID NO: 74910 - DNA, 266 bp, Glycine max
ggctgctcaaccttttctttgtttctctcacttggtgggtctctctctaaaagctcaggactcagattgtgccctttttgacaaacctctgctctttgattccagggaatgtttagatgcagttgcaaatggatactctatttatttatttgtgggaatgatttactgtcttgtaatgcaatgtggggtttaagggctgattttggctttgtctgtgtgattcttattcagttggcttctcagaagtgggttagtgaaagttttta

SEQ ID NO: 74911 - DNA, 277 bp, Glycine max
attattatggatcgcaatacggggtctctcgctgggtactatcttcaattcttcatcacagaactcttggttccaagttccagcaacatcatcactattgtgtttatgaaacgttatttgcttatttatttaagtttgaatgctgatgggagcgtttttggttttggaattgatgtttcgcctaactctgattgtctactgagtcatgacagtgaccttccctgccatagacacagatgaagtgatatgctatatcattttgtaattctctctctct

SEQ ID NO: 74912 - DNA, 158 bp, Glycine max
cccacgcgtccgtctgcgtgagacaacacaacggtgatcgcgggctgcgaggataggaaagcgctagtaataagaatagcgttggatgacggatcgccatgcctcgcatactgtattacttttgcagagctcacaacaccgaaccttcattcccgact

SEQ ID NO: 74913 - DNA, 314 bp, Glycine max
  unsure (1)..(314): unsure at all n locations
cggaattcccgggtcgacccacgccttccttccggttggcaaaagaacaacagaaagagcctacccctttctcttctttcttgtagatcgngatggcggcgcagctaatccgtgatcgagtagagatggagtgcctagagggagcttgggagaccctcgaaggcaacacgaggtgccgatttcggggcaccattcgattcacggctacttctttggtgcatccagatgaacctgcacggacgcttcagcgcactgtggagtggatactacccacgcctacaccatatcgtctagtggagcccgttcaagtgatc

SEQ ID NO: 74914 - DNA, 263 bp, Glycine max
gtcgaccgactcgtccgttcatagtctacataaggttgatctagagccaaaaatgagccactagcagtctagcacaagggcgcactgtcatgtttgccatttctctttcctttcctccttttttcctttatcagcacccttttgatttgccacttgtacttgcagaccctaatcaacatatttttcaatgcttcttctctcattcaacctatgttcgtgcgcctctaattataattgaaaatctccgatcttcaaggtttttc

SEQ ID NO: 74915 - DNA, 183 bp, Glycine max
actttaaacacctaaataattttgcctttttgattgactgggttgaatacttgtaacttgtggcattaaattatttgtacgatgctgaaatttatactatatctgttatatgctataagtgctgatatgatctaaatgttgtctttgaattaacatacaggagtaccagggtgaagtacattt

SEQ ID NO: 74916 - DNA, 271 bp, Glycine max
atacgacagaagggcgaaggagataattttgggggccccggctttttaatcccctgattgagggtccaaccgaatggccatttcatttctttgactcgctttcaagtcaacatttcattgccagcaagctttttggtgtactcgggtatctcatcatatacacacgacatcttccatatatcaacctattgcctgtgcatatgcggtggagtattgactgatgctggcggccgcatatcaaagagctttcttctctagtgtgcctaaatat

SEQ ID NO: 74917 - DNA, 69 bp, Glycine max
  unsure (1)..(69): unsure at all n locations
aggaatggtacctttgtttccttgaaggccaaanaaaaagagagaatttaaaaaaggggagggggcggc

SEQ ID NO: 74918 - DNA, 291 bp, Glycine max
ggggttctagtgtgtgatggtttgttgttgtaactcgttcttcttcttttgttgttctgtgtttgtgtttgttttttctctcacctgaaaatgtcttgctgcggtggtaactgtggttgcggaagctcctgcaagtgcggcaacggctgcggaggctgcaagatgtacccagacttgagctacactgagtcaaccaccaccgagaccttggtcatgggagtggcacctgttaaggctcaatttgagggtgctgaaatgggtgtgcccgctgagaacgatggctgcaaatgt

SEQ ID NO: 74919 - DNA, 108 bp, Glycine max
gctcgctcactgtgatacagcaaattaacgggagcgggagccttatacagaggcttcgaatcctacctcgaaagaccaatcgtcgtatctcaggaatcgcaatcgcca

SEQ ID NO: 74920 - DNA, 351 bp, Glycine max
  unsure (1)..(351): unsure at all n locations
gggtgtagggtattgacatttgcantactatccggcactaggaggaaaatgggtagtttttccccaatattccactttcttcttgccactcccttctcttttatacggcgtcggcaccaccacctccaccgtaacctattattactgtccacccattccctccccttatcttccttcacttttttttttaaacttcaagcctaccaatcccaagctttcgtccctaacaccttttcctgcccttgagtggtcctcatttctcttccacattttcttcggcgggtaccttccctgcctcccctaccaaacctttcatcggctctcccgaacgtttcttctacttcttttctt

SEQ ID NO: 74921 - DNA, 412 bp, Glycine max
acctacagcgttgcatgacataaatggggatagtgacaaggatgattatcaacatcggtactattaatgggttgcctaacctcacaattactgtcggggacaaacctatgacccttacatattggaagacattgaatgaggactagggatcgcatgagcgagatgatgactgatgtgtattatgagcgatgaacatgcctacttcgcggtgtcctctttgcggttgggagaagaccatgataaggggtttttatacacaaattccatctggttagctttcgaggagggtatgacaacgctgacgcactggacattcaacaggttatattgcgtatgcatcaactaccgctgatgaggattgtgaaaaagccatttgggacgacgatattgcaggtgaacattatgaattctg

SEQ ID NO: 74922 - DNA, 399 bp, Glycine max
gaatggtcttggtgtgaaccatagcaatggcaacttcttcaaccacgctattgctatcatcactcacacttggaagcaccccatcaatcaactcccgaaacctctcattttttttgcttcaaaatcgttctttgaatcgacccaagaagcgagtttccttcgttgttcaagcagccaagcccactgttggtggaaattccaaaggtgcagcctcaatttaagcctccgtttcttgggttgactaagactgcagaaatatggaactctagagcttgcatgattggaatcattggagtttttattgtagagtttgtgagtattttatattgcattttagtttcacgtatacaataatgcttttaagcttttgaattgataaaactgtgttggtataatgag

SEQ ID NO: 74923 - DNA, 131 bp, Glycine max
gggttgttcttggtgtgcaccatatcaatggggggctctggaaccaggctatgggttttttcactcacacttcaaagctccccatcaaataagttgcgccccccattatttttttttgctttaaaattttt

SEQ ID NO: 74924 - DNA, 382 bp, Glycine max
taagcatcaagagtaaaagtataattgatttgagtgataagtttgatagaagtttagaaagaaaaaaaagtttaaaagtgacatttttttgttgttgaatgtttctaggcgtcattttcgcccgataaaaaaagttccggttaacgattgaaattagctaccaatatcaatcactattttcattccctcgctttttctgaaatgtgcaattttttttattattaatttgacattcaatatttataaaatgctaatgtaacaatatatagtgttgatagaaaagtgcaaatgtggagttagaattggtgctggaatttgagtcattatatatttcaaataatgcaatctagatcttcctctttttcaaatatccaacagttaa

SEQ ID NO: 74925 - DNA, 404 bp, Glycine max
attttcttatgagctgggtaagaaggtttgcatttagatcttatgtttaaactctaaaaaatgttttttttttaggaagacaaccatatttttcatttttttctctataaatttttatatttttatttgtcattttaatatacataacatgtaacatgttttgatttatgaggtttaagataatgatacaaaagtttggttcaatgtgtagatgcaggagatttatagagcttatgtgtgtttgtgttcacttttttatttttaggacaaaactttggtgcagttttgtatatgcttttagtgttgttctttaattagaataggagtttcaccttggtaacaaacattaacattagatggaaacctttactacatggtttacgtgagtaaaactcaaattttga

SEQ ID NO: 74926 - DNA, 197 bp, Glycine max
agtttgttattagctgcgttagaaggattgcgcgtatagcttatgtgtaaactctacaaaatctattttttttagtgagacaaccacatttttcactctttttctctctaaaacttcataaaagtatttgtcattttaatatacataacatatgacaagttgtgatttatgaggttatagaaaatgattcaaaagat

SEQ ID NO: 74927 - DNA, 263 bp, Glycine max
  unsure (1)..(263): unsure at all n locations
ggaanacagggccgacccactcgtccgnactgtttctggatgacgacttattgtgttgtcttgtgtgtgattgttatgttttgttactcgtttttcttcttgtgcttgtctgtgtttgtgtttgttttttctctcaccttatgttgtcttgctgctgtggtaactgtggttgctgtggctcctgctggtgcgatacttgtttcttatgctgttgattgttcccttacagtttcttctctgtttcaaccaccaccgagaccttg

SEQ ID NO: 74928 - DNA, 254 bp, Glycine max
tgagaaaccagaaggggattggagtgtgaggatcactttttgagcgtgtttttgggattcgcttggttttgttcaaatagaagagacaactgatgagtataatgaagtaacctaggaatctaaaggtgtccactcacactggtgcttatctcatttaactgcttacaattactaagcgtctgaggacgtcaatcaatacggattctgacgaggtccgctataccattctgtgacggattttttatatgtcaacg

SEQ ID NO: 74929 - DNA, 366 bp, Glycine max
agaaaacaacatatgggggtttaagatagcgaacccaaatcgagaacggggttattttcaaaggtgacaatcttttttcctatttcaaacaagggaataatatttcttatagatattcccaaaccatgactcattccaacactattactcctgttgtttgaatactagataaaaaatatcttcttttgttacatatctaccaccattaccaacatactatttactatttaagaaaaaaaccatctattgtttccaatcactttcttacgtggttgtacatctaactaaaatacttagtatatattatgcttacataaatactgtctaaatacttctcataaccattaacgcattctgttgtcatat

SEQ ID NO: 74930 - DNA, 201 bp, Glycine max
cggtatgcactgaggccgttgttgtcaatggcggtacaagctcttccgccggcagcaatggcgacaccccgtaaataacagaccccctgtgtaatatgtttaaaaggaaccatgtttgtgaaattgtttctaaatcaagccctgtatagtaaatatgtcgagattaaagagtctttacttaagcccgttatacaatacaca

SEQ ID NO: 74931 - DNA, 181 bp, Glycine max
  unsure (1)..(181): unsure at all n locations
cccacacgtccgcggaggaggagaagcnacagaggaggaagagagaagcgnaaaagggaggnaagagagaggaggtngggcaggaggtgaccgaacgaacanatagagggtttgcaggttggtggggcagagaagagagagngaaagtgcctaactacatgcgaggggaggctccaggtgt

SEQ ID NO: 74932 - DNA, 404 bp, Glycine max
ctttgacgtcgacggggaggaattcggtggttgaatcaaagattgatggtaaatggggtaaagggctggagtatgctgacaaggacagttctgcgaagcttgtggttgaggaaaagggaaatgaagaaaaccagcaccgttttaattatagggacatttctccaccagaattgttgcaggaagatggaaaaactttggctgcagaaacattaccagcatggggggtggatgaggaccaagaagctaagattgtggaagatgttgacggcaatcaattgagaagtgtggtactagggaggcatgagcttaattcaatatctgatgatttgaaaaggggttctcctgtggctagtgatggaagttctgattcatatacagattttggttcgacatctgattcttaa

SEQ ID NO: 74933 - DNA, 425 bp, Glycine max
gcgtccgtccaggagttcgaacgggtgagataagacttattgattgtaaaattgttgatcaccacgggtaacggaaaccgtgtgaaggttccccacaaatctcaacacattttaatattttaaaatcaaatatttttggaaaataccacatcagtttttagctttctacaacgtttgatttggatcacttttcgagagaaaatatttgatcatataaacattgcttctcaatcatatgttgtgtgccaacaaaacgttttttgtgttggatgtgtactatttttcaaataatggaagctatgtttaccacatcggagactctgattcttttttttcttcgtgatttgatcgattttgtttcattgagttattttttgtcgagttactcactatacattatgattttaatgtttcatatttgatct

SEQ ID NO: 74934 - DNA, 224 bp, Glycine max
gcgtacgacggatgaaaaaaaaaaatatatgggattttacaacatctctaaacccacggggccgggggacaatccaagggggctaccccttaatatatacttacaaaattcgtataattaaaactgctcctgtgacactgtttttacactgttttttttaatacttttttttttcacactttttaaacaacataaactttctatctaatttaattttaatttaa

SEQ ID NO: 74935 - DNA, 359 bp, Glycine max
ctatcccatattaccaaaacaagcactaattggatataaagaaatctcaatatttgaaactaaaatcagtgaaccggtttgttattctttccgccactctcccgacaacaatagcaaatttaacaagtacaaaatcgaaacagaaatctcactacttatgagggttaaagagtaagcaaacaaacactggtacgaacaatgatagtgtgttgaacacgagtttccaactgttacttcacgaaaacaaagcgggacagaatcggaaagagtaagtccaagttgggggaaagaaagaaacatagaggattctaggttttatttagcgaaaacaaatttgacaaaaacaaaaaaaaaacagt

SEQ ID NO: 74936 - DNA, 298 bp, Glycine max
  unsure (1)..(298): unsure at all n locations
atggtttgtttttttggcaatgcaagagaagttcgactcaagtcattacgaattgatcatatctcttcctttcctttatcgtttcatttagaatatatggtcaccgngactctgtcactcctttctcttatgccggttcctgtccgtacaattgtttcatttgcatagacctcttgctctgtctctttcactctttcttactcctgctcggccaggcagaggttgtcttttttatantatatctgttatttttgtattttttctctgcggttccaaaacttacggtgacatgcggtgc

SEQ ID NO: 74937 - DNA, 225 bp, Glycine max
aaggaactttgaacttgaactcttggcaaaataattctgtttcctacttcactgcaaaataatgaactatcccttggctgtgtaatttgtgctctgtttgtacagattaaaaatattatttttccttgtatattgtaaaacattgatgtgtgggtttatactattgttctagctgattttcatataacttgtatatttaaaaaacattaatctgtcaggtttata

SEQ ID NO: 74938 - DNA, 376 bp, Glycine max
tacggttgtgataagactacatagcggggttctagtgtgtgattgaatgttgagggaactcgacacacttactttggtggactgggactggcgacgtttatactctaacaacaaaatgtcttgcttcgatggtaacatgtggaagatgaagctcctgcaaatgcagaaacaactgttgaggcttattgatgtacaaacacttgagctacactggctcaaccacacatcgagacctcaggaatgcaagactgacctgttaatacatcaatttgaagattctaaaatggattaacgatcttataactaaggctcgaaatgttgaccaaacagatgctgcaacatgtgcacttgatatatgaggtgttgggatgagcat

SEQ ID NO: 74939 - DNA, 404 bp, Glycine max
gtacgatatgattataattaatctttgaagctctatttttgtatttctctacttgtattattctattgtttactctctgttatgcaatgaatgactgacaaatgtctgaaaattccatagatgagatattgtgattcatgatattgtctagtagtaggaacgaggaaggtgaagtaaatacctatcctgatttgtattgcttctgaagacaaagaaggaagcaatagatgtttaggagattgagggcattttgtttcaaagattggcactttatgccttctgcttatcaggaggggtgttaaccatttgggatgctagagtaactacacagttgattttctcttcacgaatctatcactctgtatgttttgctggatagaagtcatagacattggtagctaatg

SEQ ID NO: 74940 - DNA, 373 bp, Glycine max
ggacttcaacatctaattacatgcatggatgaacattgtaatgaaagaaatggcaaaaagggtgatattgcctgatattgaaattattcttgaacttgtgctagaaaaaatatattaaaaaaaaactgaatgattcatcttggatttctataatgtatgatatcaaaacctgctctgcaattgcggcacagaaagattcataccccgtctcgtctccttttttttttttttggtttttcttaaaaaaagttcaggtgacttgaactcttgagattcacttcatagcgtccacgttaatcttgtatctaccggcattggtggttgccaacggttagctaggtccagtagcttcacttcacaactaataatggtt

SEQ ID NO: 74941 - DNA, 379 bp, Glycine max
  unsure (1)..(379): unsure at all n locations
catattacaaagaggtgacttgcacattaccatcccccacaaggaaacttgcaaacaagtttttctcaatagtttccccctcaccatctcacgcaatccttctaataacatatgtaaacaagataagtgttaatgggtcaccttgtatgtaaattttttgagcgaaagattcataaatatttcagcaacatcaaatggtacttgattgtaaacatttccttaattcaatagaatcactttttattaaaacccaacctcttcatatagaacaaganattccaattaatcaaataataggtttttcataatctaactttaaagatagactttttcttttttcctttttctttatcaatggtattattcacccgccacacac

SEQ ID NO: 74942 - DNA, 59 bp, Glycine max
ttcggttgttaaaattactacacatgggcacgggtgccagaacacgacagaatggttct

SEQ ID NO: 74943 - DNA, 72 bp, Glycine max
ctcttagaaaagcttcaccgatctgacagcagctctagctcttcaagtgaggaggaaggagaagatggaggg

SEQ ID NO: 74944 - DNA, 408 bp, Glycine max
tatgggacgttgtactctactcagaagtaacaaatcatttaacccataacttcatgtgattcatgtcatatgggagtcaaaattaatgggcaatttgtagcagactatgatgcatgcatgtagcccatggattatggatagcaatgagcagctagtattttccaaaacaggggaaagaaaaatatgcagctacacagtgtcctttttatcacttttgaacttggactctcatttctttcaagtgatatagatgttgcattgttcagctcaaacgataaaaattattctaacataattttaaaaagctaacctaggtttctatcccttttccaaaagttaattcgaatggttggctttgaccaataagtatttcttatttttttaaaaaggccaaaaataaactttaag

SEQ ID NO: 74945 - DNA, 383 bp, Glycine max
  unsure (1)..(383): unsure at all n locations
tgtgacacacgtatgaataaaaatcaagctcttttctttctagtttctttctagtaactaacgctagctatgcaagatacatcaaaacccagttgatcatgttgtgtatagctctatagcctcagttggaaaagacacatagaagaagatactgcatatgattggagaggacaattcaacatgcgggtcgacacagagaaaacaggtggaacacaaaatccacatggactgtctatatccatagaggcaaagcttaaggggaaaaaatttctttaagttgcttggggatggaattctctctcttcattncattntatgtgcattgggtaatcttgtgcttgtaattaaaccacatgtaacttttatgtattcacttttatgga

SEQ ID NO: 74946 - DNA, 398 bp, Glycine max
gataccatctttcgtggaattagtgtgataacttggttagacctaatctgttaattgtcattaaatgtcatccctggaatcggattttgttgttggttgtaacatagtaatcagattgaagaggacgattaagttaatcagagcaggggagaccactctaagttcccatttgcttcagtatgctaaataaaacatcagtttgctgttgttgtacaggccctgtcattggttttcagaaaacaatatgccatgacgttctctgagcgtaactgattgcaatttgcagaagaccattgaagcacgtgaccacaattttttagttgctcaattacgtatcaaattctgattacactgtcattatattgttaaatgcgcaagcagtatacacttggttcaat

SEQ ID NO: 74947 - DNA, 397 bp, Glycine max
ccggaccggaatgcccggctccgacccatcgcgtccgttcgcgataagacgacagacggggaaagattttggaggttctagttttgatgggagggatttgttgggtggtcttgttggggtggtcaagaaaaagaaggatgtgctgaagcaaactgatttccatgatcctgtgagagaatcctttgaggcggagcttgaaagggttcagaggatgcaagaacaggagcggcagcgaatcattgaggagcaagaaagggcattggagttggctcgcagagaagaggaggaaagattaaggcaggctagagaacaggaagagaggcagaggagattggaagaagaggcaagagaggcagcatggagagctgaacaagagaggattgaagctttgcgaaag

SEQ ID NO: 74948 - DNA, 381 bp, Glycine max
ggttctagtgtgtgattgtttgttgttgtaactcgttcttcttcttttgttgttctgtgtttgtgtttgttttttctctcacctgaaaatgtcttgctgcggtggtaactgtggttgcggaagctcctgcaagtgcggcaacggctgcggaggctgcaagatgtacccagacttgagctacactgagtcaaccaccaccgagaccttggtcatgggagtggcacctgttaaggctcaatttgagggtgctgaaatgggtgtgcccgctgagaacgatggctgcaaatgtggaccaaactgctcctgcaacccctgcacttgcaagtgaggtgttgggagagcaagcttcaagcagagatagcccttaattaggaataatga

SEQ ID NO: 74949 - DNA, 265 bp, Glycine max
agcgagacctcaggtcaggcggggcggccatcttagattaagcatatcaataccctgcaataatatatcacaccaaaaaaaaaaactatgcggcccctttatatgaaccaagcttacgtactcgcgcattcgacttaataacacttctatagtgtaacctaaatgaaatgcaatggccgataattaacaacatcgcgactgggaaaacactgacgaaacccaactaaatcgctttgaataacattcccttttaaccagctgttgt

SEQ ID NO: 74950 - DNA, 233 bp, Glycine max
gacgttattttgggacaaggccaagaaccaggacaagggtgtaattttttctgaccagcaacgtctaattttcgccggaaagcaacttgaggacggccgtacccttgctgactacaacattcaaaaggagagtactcttcacctcgttcttcgtctccgtggtggcatgcatatcttcgttaagacactcaccggcaagaccattaccctatatgttgaaagctcctacacca

SEQ ID NO: 74951 - DNA, 316 bp, Glycine max
  unsure (1)..(316): unsure at all n locations
cggcgacggtgcanaatacacagaagggaaattttttcttctatcctaacccctaccatgggcgggggcttttggattgattccataaacaaatttatttactattataatatttgtagcatttaataaatattatcttcgacctaaatatttaataaagttatcacttttttttttgaaagaataaagtcttcattaattggcttatttaatattacattattctacttaatttttatattatctgtattaagataattaaactgatatttatattaaaactaatatttttccatgaaagaaaaatgttatttaa

SEQ ID NO: 74952 - DNA, 143 bp, Glycine max
  unsure (1)..(143): unsure at all n locations
cccggnccggaattnncccgggtcgaacccacgcccgtccgtaccggcnttgtcgagaagaaacgacagaaggggtgatgtgtaaaatttggtcattaccttgcaccnaacttttttcgaactgatgtttttgggtattaccg

SEQ ID NO: 74953 - DNA, 410 bp, Glycine max
cgaccccacgcccgtccgtacccggctgctgagaaagacccgacagaagtggggatgtaacttatgaatagatgtactcatctcacattaaattcgagagtgtcaatgttgtgactcccaagcgaacgcgctacatagacccataatcgatagtccaataaacgacacctgcaatggagattggacgtcaccgctacctactttcgagtcgctttcattataccttttaacaaaagcttcaattaccaattgacaagtgggtatatctgaaacctttgccaaaattgtagaagaatactagtcgtgccaatgatattggcgtggagaggtaccttaagatgataaaatgggtgccagaggagggactatatgctgaaagcctatgccatattggcactgcgcatttgata

SEQ ID NO: 74954 - DNA, 172 bp, Glycine max
gggtttggaaagaaaatagaaatatttatgcggtggggaccaatatctagtgccctgcaagacaaagaaagaagggagagaagaagttgttgggttgagttggattggatttctaatctaatctattcctttcttttttcctatgcttttaaagcacaaacccttttttctt

SEQ ID NO: 74955 - DNA, 91 bp, Glycine max
ggttgctgctgcttagttgaaacttgtatggtgattagctattaagaggaaagaagaacgaaaaaaacagtttaaccgctacagccttctc

SEQ ID NO: 74956 - DNA, 357 bp, Glycine max
ggcattgtaggtgctgttacataatacatgttggatgttggttgccagttggataatcgttgatgcttattatgcagtagaggtcattggacaatattgtaatccttgttgctatctattgttatgatttatgaagcaccgtttggtatcttcatttgagaattttgatatgctagggggattattctttgatgttctgacatgaatgggtgctaaaaatggataaagattgcttgtacctccacattctctctgattttacagaataggaaaacattctacattttctgagctatccattgtttgttgatagcccttatgttattgggaattatattcaaagattcagcttcggaa

SEQ ID NO: 74957 - DNA, 382 bp, Glycine max
ggttctagtgtgtgattgtttgttgttgtaactcgttgttcttcttttgttgttctgtgtttgtgtttgttttttctctcacctgaaaatgtcttgctgcggtggtaactgtggttgcggaagctcctgcaagtgcggcaacggctgcggaggctgcaagatgtacccagacttgagctacactgagtcaaccaccaccgagaccttggtcatgggagtggcacctgttaaggctcaatttgagggtgctgaaatgggtgtgcccgctgagaacgatggctgcaaatgtggaccaaactgctcctgcaacccctgcacttgcaagtgaagtgttgggagagcaagcttcaagcagagatagcccttaattaggaataatgat

SEQ ID NO: 74958 - DNA, 324 bp, Glycine max
gactctcttagcgctcaagcgggggattcccaataacaataatatgcgcatgttcaattaagctccttctactatacccatggctgctactaagctcataattgcttccctacttgcgtcgattctacttcttgatttcgtagatgctgatcaatgggaacatgcacaaacgcacgggtctattcttcatcagatagattgtaacggagcatgtgctgtgaggtgccgataatcatctcgtgcacgcctttgccaaagagcttgtagaacttgtggtagacgctagaactgcgtgccacctggaactgttggaaaccaagaagt

SEQ ID NO: 74959 - DNA, 406 bp, Glycine max
gagggtgggcttcaagcagagagcacagaccgaaacgccccatcaaaccgttagtttcacagccggtaacacacgaaacgaaaggaaccaaccacccacaggccaaagcacaaaccctacacttctcctaagtcctaacccccgagagagagagaaatggatactgacgcagtgggaagcgaagggtactctccgctgaaggaattaagactggaaattgaagtaaaggaaggaactttctctctctgcttttggctatatttgacgagtttcactacatttcctgttaccattatccaacacggttttttctgttttctccgaaagtgcttctttttcttgttacttgatgataaataagagaaatccatatgttaccaatttttttctttatcatgaaaaagct

SEQ ID NO: 74960 - DNA, 424 bp, Glycine max
  unsure (1)..(424): unsure at all n locations
atgaatacttaacaataatacttacatccattgatccacacaagtgagggccataactatgttttttggattgtctgcttcccaatattatatatatccatccctgcatataaatgcaacttttctatattgtgatatgaaggaccacacaccatgttccgcaacagtgatctcacgccaagagctttagttggacgaaaaatctttctagctctttgcccctataagtacaatagatctaccatgcatatatggcaattaactaccttgggtgatattttaatatcagaataagtacaaaggcatccaggccataatcacactttcactttattaattttataacaacttgcatattgctaagaaaatggtacatttttttttcttgtaccacttattaancttttaattatttttttttaaa

SEQ ID NO: 74961 - DNA, 258 bp, Glycine max
agaatatgaaaaagaaaaaaaaagattctaaagaaatataactaatattctttagaataatcaaaaagaatattaaattcaaataaattttagatagaaaaaagacttaaaaaggaggatttgaaatgcgagatctaaaaacatatctttccgtggcaccagtagtaagtactctatggttcggggctttggcgggtctcttgatagagatcaatcgtttttttcagatgcattgatatccccttttttttcatctag

SEQ ID NO: 74962 - DNA, 352 bp, Glycine max
agacctcatggaccatcagacattggatgaacatgctgtgaggttgcaagcagaggcagtccatctggcaaagcttcaataccttcattatctaatccgatcctcaaactccttgagcaccaacaagtcctatgaccaaagtgccaccaccaacatggaacctgcagctttcagtttgttgaactcaatctccaatgtgaaagagaatccagtcatgttgcaaccagctgatgatactcctgctgcctcattgtctgatggcattgatagctctcaaccactccaccacccgaacgtgctacctcatcaccttttagagccacaagtctcttttagctatcaatcatgtttg

SEQ ID NO: 74963 - DNA, 206 bp, Glycine max
acaaatcaaacagctgccggggctttctctatgcctctgaacacattttattttacattcatattacttacactacacatagacagcaatacacaatgataggatcttttattaacaatgcacttgagatggttttaggttatgcctttccactctataaatgctataaatcaattgaaaagaatatgccataaattgaacaactt

SEQ ID NO: 74964 - DNA, 350 bp, Glycine max
aaaaaaacgacaaaaagttgttttgaaaaacacgcaaaaattttacatttggttgtttattcttaaaatggttcggatcctaataccggaaagacgattatatatacttgacaccacacttgttatacgtgaacttcaataaattgcaactcgcatcttgattgtcaactaccataaatgatgtatgtaatgttccctattcaaactggaagatattaaagttttattaacagatctaaattgctcaattgtattattaacttattgtacaccatatattgtatcctccaacttaaattttattttgtgccagaaatttttatcaaaacttaacctattatttatcaaaa

SEQ ID NO: 74965 - DNA, 421 bp, Glycine max
accacgcgtccggacgacagaacggtccttcaccatcatacgatcatcactacaaaatttcccattaaatactggtatgtggaatggaccctaatttcatattatttcctcattaattatcaattattgcgcgctatttaactttctagcatagagtttaggcggcaccaatatactctctccaacctataattattatcgagatttctttttttatctcacaacagatcttattttaattttttaatataatattaattacatttttatttataatattaatggtaaacaaaaaatatataaataaattaataataatataaaattaatgttataaatacatttatgattattttttatttatgtaaagtaatctaaaatgactgatattttgtaactaagtagatatctttttcagaag

SEQ ID NO: 74966 - DNA, 220 bp, Glycine max
catccaggcccgatcatgtccgatggtacgcagagataaattatggtcattttgcgccttgtgtcaaccaagaggagcgaattcgacagtatcaggatgatgttggtcgttcagtgctgatcattttcaaaatttttgcaagttccgctggcggggaaattgaccgaccgaatggtgtttcgctcgaacgaaatagtgtcttatctttactttcctttta

SEQ ID NO: 74967 - DNA, 199 bp, Glycine max
actcaacttaacataactaacatgaattcattctctaatttcatcattatctttttaatcatctctacaacatgcaaattactcatcttaaactactatacaaaaacataccctaaatgtgatattatttattccaattcactaaatcattccactcctatgaacaaaacttttccatcatcaattctaccaatccact

SEQ ID NO: 74968 - DNA, 330 bp, Glycine max
ccacgcgtacgaccacgcgagcgggcgtgtgctataagacgacagaaggggaccaaggcactcgctttcacttcaaattgattggatggggctctattacttcaacggatacgccgggctagctcatgtaattaggaagtgttaattcaaagtgagacaccgtctgcttataaataaccttcttaccgatatatcatgatttccaactctttagatacaaaatctgaatactctcagaagaactgtaaccactacataccgcaacataaactttgtagagtcactttgaaatcaaatcgacactgatcatcattgctatatagcgaatat

SEQ ID NO: 74969 - DNA, 235 bp, Glycine max
  unsure (1)..(235): unsure at all n locations
gtcncgctcttcttcggcgatatctacttcgtgtgatgtttgagagcttgatatttctctcacatgaaaatgtctagcatgcggaggtaactgtggttgcggaagcgcctgcacgtgcggatacggctgcacgaggctgcaagatgtacccagacttgcgctacaccgagtcatccaccaccgagaccttggtcatgggaccggcaccagttattgctcaatgcaagagtgctct

SEQ ID NO: 74970 - DNA, 379 bp, Glycine max
ttttagggttctgctgaaaggaaacgacaaaggggtatggttgctagaaaaggagaaagagttacagatgcgagaacacgacatgtggatccggatgaaaaagcactacaaaaggatactgttggtagaacacgacataagggttcagatgcaagaaaacaacaggatggtacggattgcagaggactacagaagggtactgttgctagaaaacaacaaaagggtgtgatagataagataaccggaaccgacctaataactatctgcacggtgaagtgccagaagacgcttatcaagctgaggatggtgccaactcatgcaaaaatcccttttggcgagactgagattgatgaaaatattgatcagtctttcacgcaca

SEQ ID NO: 74971 - DNA, 392 bp, Glycine max
tttatggtttaccaaaaacaaaacacaagccgggtgaaagtgagaaaaaataaaaatcaaagagcataatgtcagggatcattcacaagattggggagacccttcatgtgggagggcacaagaaggaggaggagcataagggtgagcaccatgctggagaatacaaaggggagcaccatggtgaacacagtagtgagtacaaaggagagcatcatggtgaacacaaagctggagagtaccatggtgagcacaagccagagcacaaagaggggttcctagacaaagtcaaggacaagatccatggtgagggcggcgccgccgagggcgagaagaagaagaaggagaagaagaagaaggagcatggccatgagcatggccatgacagcagcagc

SEQ ID NO: 74972 - DNA, 404 bp, Glycine max
ttatggggtaggtgcaagagtttgttgtgagctataagctagtttatcgtgaggagaatatgaagttgtttgttttctttgttgctgcagtagttttggtagcatggccatgccatggcgcaggctaccaaaggttccctctccgaatgaaaactggctatggtgagcgttcttcggaggtaaaatgcgcaagttttaggcttgctgtggaagcacacaacatccgagcctttaaaaccattcctgaagagtgcgttgaaccaacaaaggactacattaatggcgaacaatttagatcagactctaaaacagttaaccaacaagctttcttttatgctagtgaacgcgaagtccatcacaacgacatatttatattcggcatagataacaccgtactctctaat

SEQ ID NO: 74973 - DNA, 285 bp, Glycine max
  unsure (1)..(285): unsure at all n locations
cttctanaaagggtgtgtaaccttttttttgaggggctcacctgagagacatcttggatgtacggcgccgcatcggtaaatcataacccccactgtgtacattggatagcattccttactgaaaaacccaacggcgtctccccattatccttgcgcttattcaacaccaaaagaacgtgacagtgaacagcgcttgcattttataaacatttaggaatctcaataatgtttccgagagaaactcgtgtaaacttgactcaattagcatacggatataacactaac

SEQ ID NO: 74974 - DNA, 399 bp, Glycine max
acatggaaaccaaggattgtgattctctccaaaatgacacccacatgtattgcgtttcacaggtgaatcattcttctccaaattcacaatggatttccctccatactgtcgatcccaattgcgtagcaacacttaccgtgccctcgttcacctcctctctcacatttctgcttacaacgcttcaattcttgaagcttcaactcaacccgtcaacattcccgataatggcagtggtagaatggatcaagaaaaccaggaaaaggagcctaagtgctccgaagttgttgattctgattttttggatcccaaggatcctatatgccagaaggatataccggaggtccaggaaaccattgagggggttgaagacaaggatatggattttacttctaacaagat

SEQ ID NO: 74975 - DNA, 412 bp, Glycine max
aagagacttaaggggccatgttagtttgttgatcgagataactagaaacagtgtgatgaaaatgaaggtccttgttttcttcgatgctacaattttggtagcatggcaatgccatgcgtacgatatgttccctctccgaatgaacactggctatggtgcccgtactccggaggtgaaatgcgcaagttggaggcttgctgtggaagcacacaacatctttggctgtgagaccattcctgaagagtgcgttgaagcaacaaaggaatacatccatggcgaacaatatagatcagactccaaaacagttaaccaacaagcttacttttatgccagagacctcgaagtccatcccaaggacacatttgtgttcagtatagatggcaccgtactttctaatattccatactacaaa

SEQ ID NO: 74976 - DNA, 252 bp, Glycine max
tttttattagactcatataccatattccatcaagctatcccccctgagtgtgacaagccatttgattgctcacggcttggttattaaaaatgcttttttgttgctttgcttcaaaccacaggtttgttggtaaggagtttttttttttttttatacggtttaaaaaaaaaaagttaataaacaaatacacctcaaccctaaaaatttcaaaaatctaaccccattaatataagtacatgctttaatataccc

SEQ ID NO: 74977 - DNA, 240 bp, Glycine max
acgagtatgggtttcaaaggaaaccaacaccggggccggacagggcgacgacccaagagctacgaccttgtctaagaggctatgagacacggtgctagccagtatggaacgacatgttcttccacggacaaaccacgatgttacggagtgacccggtcgaagattttaagtccgtatcgaaggtgacggggttattcgatatgagtaaagggcatcaaccaacttagagaacctgtgatt

SEQ ID NO: 74978 - DNA, 399 bp, Glycine max
tttccctatttctaaggtcagagaaacatgctagaacaccagattgcatttatatatattttaccttttgtaccttattttataattacccttatgtttagttgaatttcatcaaaaccctaagaatctaagttgttggcatatagatattgagtcttagatgtttaagtggtttttaccttttgtatcttattttacaattacccttatgtttagctgaattttatcaaataatgtttatttagtatctgacaaaacatacaaaagggtcccacattccgttgtgagacacatcagaattgatggtgcatgtagttacaaatcaagtagagagaacggagcctcctttaatttacccggttatatattggtagtagtgagctgtttgtggacactgca

SEQ ID NO: 74979 - DNA, 352 bp, Glycine max
aagttatgtgtgtcaggcatcactactttatctgatagagggatattaacatgcaagaagggataaaagtgaagcatgtctttgtcattggtgcttgttgcacagttgcaccttgcatcaagttaacaacacaaagtgacttgtgatagttgtattatttttcttcccattagcttaaggcctcaagtgataagagtcacttcctctttagctgtcttgtgaatttattttaatcacttccttttgttgacagactgaagctgtggctcttcattgcatatgttgtatcctttgtttctttagctggatcagcaggcctgctgatccaagattcacttgataaatccgcccc

SEQ ID NO: 74980 - DNA, 58 bp, Glycine max
  unsure (1)..(58): unsure at all n locations
gagacctcatgtcaggcggngctacccgctgagtttaagcatatcaatangcgnnnna

SEQ ID NO: 74981 - DNA, 344 bp, Glycine max
ttagggttctcaggaacatgcaactctttggagatcaaagtcaaactcaagctcctgtgatgatcttgtatagattacgggatgaatttgagtttttgtttctataattttttctagaagcgtaaataacttgagctgaacagaactttgaatagctcaactcaaagtaaacttatctggtaataacttacttcataaaaagaaaagcaaaatcaatatacgattggtgttagatcatttgaaagtttttaataatcgcacatgattcttgttaagagaattttatatttttttggattccgtccaatttaaaatatggtctattcaaaaatatcacaatggtc

SEQ ID NO: 74982 - DNA, 462 bp, Glycine max
  unsure (1)..(462): unsure at all n locations
aaaaanntaaaaaaaaaaattaatttaaaaagttnaaaaaaaaaaaaaaaaaaaggagaaagggggaaaaaaaaaaaggaaaaagaaaaaaaaaaaaaaaaaaaanaaaaaaaaaaaaaaaaaagaaaaaaaaaaaaaaaaaaaaaaaaaaagaaaaaaaaaaaaaaaaagaaaaaaaaaaaaggaaaaaaaaaaaaaaaaaaaaaaaaaaaaaaaaaaaaaaaaaaaaaaaaaaagaaaaaaaaaaaaagaaaaaaaaaaaaaaaaaaaaaaaaaaaaaaaaaagaaaagaaaaaaaaaaaaaagaaaaaaaaggaaaaggaaaaaaaaaaaaaaaaaaagaaagaaaaaaaaaagaaaaaaaaaaaaaaaaaanaagaaaaaaaaaaaaaagaaaaaaaaaaaaaaaaaaaaaaaaagagaaaaggaaaaaaaaaaaaaaaaaaaaagaaaaaaaaaaaa

SEQ ID NO: 74983 - DNA, 411 bp, Glycine max
ggggtgaattgaatttatatttggagaaagaaaaggtagcagcgacgcaatgcacaatgggagcatccaaaccacagagttaatgcatctttcttgctaccgcagacacttttgaacatggagtgaacttggaatgacaatatattataattatgttacatattcgatatatataattaatatatatgtgtcttaattatatgaattatcttgaacttaacgtattttattccttaaattttaaaaaatttatgaaatttatctcatttatttatccattaataagcataaaaatggagatagaatttgctaaaaaataaaaagttggaatacaacgtgtcaaaaactaaaaaaatcgaatgtaaaatgtgtcaaaaattaaaaaaactggaggtacaaagcgtaattata

SEQ ID NO: 74984 - DNA, 401 bp, Glycine max
tatataacatatttctaatatagatttataatatgtatattaacagatcgatcaggaatcacgaaaacacatctaataatatgacttctcttttcgcagtaacgggatcgagtgctaaacatttttttttattatgcgtgcatgtgttccagattccttttcttcttctccttctatttaatattgcagattcctatcaatccacaattcttattcttaaatccaccgacaggacaaactacaggatcattattgctcgttaatgtcatatcacatattgacaaaacaatctcattaataatatgatatttcaaatgaaatcacatgaaatccatggcttctataccccaagaatgggaatgggatctcatgcatcaataatagattgatgtcgtgctaca

SEQ ID NO: 74985 - DNA, 407 bp, Glycine max
ggtttcattttcatgagaaataacgacaaataggagccaaacgagagagaatgagaggaagagagaccgagagacagagagactgagagtgggtgagtgacaaacagagagcatgtgggtgatcggttctgtgtccacttcggaagaagagggcatgacatctacgacacagtggacttgtcggagtggtggtggagagacagcacgagaaactcaagagacgcttgacatatctcgtctttctgctatacgcgtttccctgaagacattcgagaaaaagaattgtggtttactttcaagaaatgaggcgatgtcagggaggtttatatagctaaggacaagaatagaagtggatggagatatggttttgttcgactcaagggtgtatatcatgtgcaacaacttgg

SEQ ID NO: 74986 - DNA, 362 bp, Glycine max
aacatccgagcctttaaaaccattcctgaagagggcgttgaaccaacaaaggactacattaatggcgaacaatttagatcagactctaaaacagttaaccaacaagctttcttttatgctagtgaacgcgaagtccatcacaacgacatatttatattcggcatagataacaccgtactctctaatatcccatactatgaaaaacatggatatggggtggaggaatttaatgaaaccttatatgatgaatgggttaacaagggcgactcaccggcattgccagagactcttaaaaattacaacaagctgttgtctcttggcttcaagattgtattcttgtcaagaagatatcttgacaaaat

SEQ ID NO: 74987 - DNA, 421 bp, Glycine max
ggttctagtgtgtgattgtttgttgttgtaactcggtcttcttcttttgttgttctgtgtttgtgtttgttttttctctcacctgaaaatgtcttgctgcggtggtaactgtggttgcggaagctcctgcaagtgcggcaacggctgcggaggctgcaagatgtacccagacttgagctacactgagtcaaccaccaccgagaccttggtcatgggagtggcacctgttaaggctcaatttgagggtgctgaaatgggtgtgcccgctgagaacgatggctgcaaatgtggaccaaactgctcctgcaacccctgcacttgcaagtgaggtgttgggagagcaagcttcaagcagagatagcccttaattaggaataatgataaactattaatgtgtagctaaaaacttatgtattatgtc

SEQ ID NO: 74988 - DNA, 323 bp, Glycine max
attccgggtcgagccaacgctcatacagatgccataagacgactgatggagctgcctatgccattttatttcgctatacctacaggcttctacggttcgcagcttggctctcatacaatggccctgttccttatctacaaatccaattcttgctacaccctagcctacgttcactggctcgacaaaatcacacagaacaccgaaccgactcagaactccatcccagacctaaacaggctcctactagcaactaaacttacttgcttcaaacctattacttccgctctacatgctctcatacaatgcaccaccacctctgaaag

SEQ ID NO: 74989 - DNA, 385 bp, Glycine max
cagaagttgaagaggaagaagaaggtgatgttgtggcttatttagtgccttcttggtcaacattatccattgaagtttttaatagttattggtctgtttgtcaggtagaaggctaacattgaagttgctcatctctctacagctggcaagagttatggtgtagatagaacgacaaacaacctggctgctgctgttgatgctgagttaagtgaattggtgccggaatccacttttttagattctgaacaagttggtgacagtgcatcaaacaaccagactgatgctgtgaatgctgaatcaagtgaattggttccagaatccacttgtttagagtctgaacaagttagttatagtgcaacaaacaaccagactgatgctgtggatg

SEQ ID NO: 74990 - DNA, 406 bp, Glycine max
  unsure (1)..(406): unsure at all n locations
atcaattaaattatttttttaaaaaatttttatgaattaggtacgaatcttatatataaaaatgaaaggaggattaaaattcattgatattgaaagggataacaaaaaatgcggtgaaacgggtcgatgcatgattaaagttgaaatatgtgcctgacttgaatttggcagtgcatagaatatgtagtcaactagtcaatgatctatagtcatatgtaataccaatttactaactgctatttttgaccactttcatgttttttttttctccttatgtcgntgacttatgtgcgatgcattatttattatataaatatagtgtcatctagaattgcatgcataaccatgacggagtgtggtcactgtttgggattagtttaagaaaatgtaattaaaatgtcatttt

SEQ ID NO: 74991 - DNA, 409 bp, Glycine max
attcgagcggccgatatacttatggggtgttttttttttttccattctacctttggagggttggtcccttcaaagcccaagtttactgccttataaaatatagctgctgatattttatttgtggtatgatacaattaacttttctttaaacttaaaaaatactttgcaataacaacaaaaccttaatgttgttttccattttgatcacccaacttaagtgacatcttaaataacttatttatcattttctttgcaatgcatatatacttaatctattcctactcaagtaaaaatcctttgattcaatgtttgtgtccaaaactcaagtttggagttaacttcttgccttattttctcaatcagaaattctattttaggtaaaaaagcctgcatttatagaatttttttt

SEQ ID NO: 74992 - DNA, 192 bp, Glycine max
tgggtcaatatcgcattatgcatgcttgtttcccaaatgctattcctaatcatcaagaagcaatgtctcgctcgttttacaaattcactaatcagtaccattttgctctacttgattgtttgtcactttgggacttcacctttctttatataacgaaaaaaaaagtaaaggctaaatggtgaaattttggtt

SEQ ID NO: 74993 - DNA, 394 bp, Glycine max
ccatttacgttgttaatgtgtgtagaaatctaggttaaagcctacttttatgctcttatatatgaaaatcataagaatattacgtgtttttaaattctaaatggtacttggtatcaagatggtggagatgaaagttatgatgagctacaaagcgtgtgagaagaaggtaaatgaggttaagggataagtatggaagtgagggtgaaaatggtgatgtttatgttaataatttttatgtaatgtgggacataattaaaaatttgaaagtacatccaaggactaaaatgacatatgacagtatgtgattaaattcagtaatcaaaatgacatcaaatagttaactttaaggactaagttaaaaatgatatatatgttgtaacatccaagtcttgat

SEQ ID NO: 74994 - DNA, 236 bp, Glycine max
aactctcttctacctgggggttatttacttaactttgtctctcttatctgatctcacaacaatatactgtaacaacacgcgaatatgcctgtcttcttgtaatatttccttcacctctcaaaacccattgtgagaaccctaaattctacagagaggttccatttggcccgatgcgattctaccaccacattatgcaatacattaaaattgtactttacactttcttgaacatagac

SEQ ID NO: 74995 - DNA, 414 bp, Glycine max
gcatgatgtctcaatggtggctggaggtggcatggcttatattggagagaaaggagttaacttatcaagtggacagagagctcatcttgctttggcaaggtgctagcttcatgttctcttttcaatttgtgtagccaatcccattgacaataactttgtagttcacatttcatgatatatatgtatgtgaagaatgtatatatttcaaatcctactacatttattttcatgataagaaaaggtaggcaattcttatataaaaaaaattattatatatctcctttattattattgtaagttgtaaataaacatgttgtacatatacatatgtaatcctttattatatttataactttttaattatatttaaataaatttttaatttaatttgtatatatttataacgttttaatt

SEQ ID NO: 74996 - DNA, 81 bp, Glycine max
aggactatctaaaaatgaagaattattcatgaagtacgtggtggatacgtgttccttctgttctataaatgtgtggatgtc

SEQ ID NO: 74997 - DNA, 406 bp, Glycine max
  unsure (1)..(406): unsure at all n locations
agggtggagcacattacggtggataggggcaagcttgccaagatcatggcagacttcgaggcctggttgaaggagttagagtccaagctgaaggagttcgagcagcgggcgactagggagagagaggtcaggcagcaacttgaagaagagttgctgatctacaagaatgaggttttggagcagcatgagaaaggctttaaaaaggttgtcaagcaggccggattcttccaaaaggaccttgacttgggtctttttgaccctttcaattgtttttggaaggttattatgactgaatttgattgtcaatgtttttcaaaagacctagtcaattacccatgcatttagatttgtcgtgctcatctttatacatgttctaaaatcacttaataatatggntattagtttt

SEQ ID NO: 74998 - DNA, 412 bp, Glycine max
ggttctagtgtgtgattgtttgttggtgtaactggttcttcttcttttgttgttctgtgtttgtgtttgttttttctctcacctgaaaatgtcttgctgcggtggtaactgtggttgcggaagctcctgcaagtgcggcaacggctgcggaggctgcaagatgtacccagacttgagctacactgagtcaaccaccaccgagaccttggtcatgggagtggcacctgttaaggctcaatttgagggtgctgaaatgggtgtgcccgctgagaacgatggctgcaaatgtggaccaaactgctcctgcaacccctgcacttgcaagtgaggtgttgggagagcaagcttcaagcagagattgcccttaattaggaataatgataaactattaatgtgtagcttaaaacttatg

SEQ ID NO: 74999 - DNA, 404 bp, Glycine max
tttactgtcgttttaacaaaggtttttatttattaatttttcaactatacattttttataattctaagatatcacgcatagtttagttaatattataattttttataacttttcataatttataaaaaaaaataaaagttattttgtagaaaattatatataatttactgaaatagtaattttttatttcaacataattctaggagtaattttggttccaagcaatgctattatatcctcaacattaaaccaaatccttagttccaaacaatgcttatacagttgggataagatagtgtataacaaatatgctgaatataacgtggccaaaaatatatccagaaagattagtaatcatttttacgataaaccccaaaacataacaaaaacatgataaagcacgg

SEQ ID NO: 75000 - DNA, 90 bp, Glycine max
gagacctcaggtcaggcggggctaccctctgagtttaagcatatcaataaccggacgaatatagggcaaaataattatactcaaaatgcg

SEQ ID NO: 75001 - DNA, 230 bp, Glycine max
tactacaaaaaaaacgacagagatctttttcacaacctatccatacatttactaggctgctttttctccattatacaaccaacatctccaacttaacttctcaacatagacatatctcacatacccattttaacattactcaacattccactgggggaacacccattcttctttacacacttaaatttactgtaagcacttgctttctactactccgataccaaaagcca

SEQ ID NO: 75002 - DNA, 403 bp, Glycine max
ggcacaagtgagtttgttgatcgagataactgtggacattgtgatgaaaatgaaggtccttgttttcttcgttgctacaattttggtagcatggcaatgccatgcgtacgatatgttccctctccgaatgaacactggctattgtgcccgtactccggaggtgaaatgcgcaagttggaggcttgctgtggaagcacacaacatctttggctttgagaccattcctgaagagtgcgttgaagcaacaaaggaatacatccatggcgaacaatatagatcagactccaaaacagttaaccaacaagcttacttttatgccacagacctcgaagtccattccaaggacacatttgcgttcagtatagatggcaccgtactcttttatattccatacttacaaaaa

SEQ ID NO: 75003 - DNA, 168 bp, Glycine max
ggaaaaccggcggacgacgcgtccagttgcattgaacgaacggatgttgcataccactaataggaatacacaaacccaatggagggctactattgacctgatatacgtacctgatcattttgttgtagaatttataagtgttcccaaaagacaaagggattgctactt

SEQ ID NO: 75004 - DNA, 344 bp, Glycine max
cacaaaaccacaaacaaacggcgtcaaatacaaacccatacatccatcctaacccttcttctttctttctctatccttatctcttaatccacttctatttactacccaccagttaatactccatcatttttcaagctttcataatacaaaccaatactctacaaactactcctactattatccaaaaacatcaaattacaatcctaaactccctctttaacaaccatcatataataatcctccatacaatattccaccttatccttaatacccttctccaaattaccccccccatacctaacttaagtcatgaaatctattttctactttataaataacattta

SEQ ID NO: 75005 - DNA, 276 bp, Glycine max
gagattgcttgccatttctgattcccactccgaggtctttcttttatgtggtgaccactgaactctacttgatagatcatacccacatggatgctaccaatctcaccttgcatcaagaatatcactcatctaacttttatctgaaaagattgtgcgcgcacatacactatctgctcatgctacacatgtgaaatctgtttgttcaacgcccttaccctgccacatcatgaccagtacatttactgatgatgctactctcaaactcttccaaagtta

SEQ ID NO: 75006 - DNA, 330 bp, Glycine max
gatgttataaaacaactgaaatatgctattttactatccttcaatctttttcattggggggtgtactaaatataccgttccttctttcacaaaatatctattaaaaagatatctgctcacccatatatctcttaccttctcacatcatatcctttcttcccttttgattctctataataaactatacatgtaaaatttaccatacttattaaaacaatctttatcatggtatcaacaaatatccagcatcttttaactttaaaactctaacaatgaataacaactcatatttcctttcttaaaaaatatcttaccaattcaaaaaacaac

SEQ ID NO: 75007 - DNA, 276 bp, Glycine max
gtttccagtaaataatgttgatgagaaaaaaaatgcaaattggaacctacacaatattcatcactaaatgtttcattctttatcatgattttttcaggaaatgatcgttgctcaaagaaaagcaaaaacataagttgtgagaacctttgttgaagaatttctttcagaagctcattaaaatcagcttcacatgttcaacccataatcaacaaaaattaactattttgtaatattcaaactgaatgaaaaacattatcaatcaaatttaattaaata

SEQ ID NO: 75008 - DNA, 226 bp, Glycine max
ggatctagagtaaatgttaatgttgtagtctaacgataacctagtgaaaatttcatatacattcagattcaacatcctctcctaaccgcttgagtcaccctttcacatacaaattatctccaattaataatatatcgtttgaatgagcctcacgaaaactgtcatgttcacaaaatctgcgtgtgtagcaaatctctttgctttcaccatacataatgagtttgtc

SEQ ID NO: 75009 - DNA, 131 bp, Glycine max
aattcccgggccgacgcacgcgtccgtccactcgtccgaacacctctgaaaagactttttatagccgatcctctgaattatcataagaggtttttttctatcgccttagagcatccaaacgacccacaact

SEQ ID NO: 75010 - DNA, 273 bp, Glycine max
accacactcaaaagaacaaccaaagggagaccgggagtcttttttgctaccttctaacagaaaaatatactttcaagaatcaccattaccttatgggcgccttgcttccttcaacgggagcatcacaacatgcgtagatcaacataaaggaactatatgccaccaaccatgatggcgcccattctactgcctgtgatattgctatgaagctgatgcaggagcagatgagcactggtcaaactcttgatctcatcctgattttcgtcaacaacc

SEQ ID NO: 75011 - DNA, 290 bp, Glycine max
tcttgctagcagacgaccgatgggcaatctggggccttttattcatggtccaaataatctaatatattctgtaaaatttacattctatcatttgatcctccctcccttcaacgcggggatcaaaagtgatttgcatgacaatgaaacacaatcatcggttgatcatcatgctgctgcctatcctacgtctgagatagctcttgcttttacccacaaccagcttatccgcaataacacacattatcatatactcatttacatcaaccagccctgcgataaaatgcctatcc

SEQ ID NO: 75012 - DNA, 184 bp, Glycine max
tgtaagataagaaaataaagaagtgaaataaataagtgttctaaattagttgaaatcaggttatgtgtaacctttgaagaagttagaagaggaaacttttaaagaaacctaggtgcataaattgactttaacttatgagagaagtttgattcattggaactccttattttcttcttctataaga

SEQ ID NO: 75013 - DNA, 240 bp, Glycine max
  unsure (1)..(240): unsure at all n locations
agttctttatttgtttatgtacttagtgatttttatttgattggtcatcttatagatgaattcaggaattgacttgcgttttgacaagcctttttgaaacccaaacatgaattgagtacttaattaggattatctccaggaatagaataatcttggttaagtctcgctaattctcgaccattaatgttaattgcttgtgtcaatatgttcaagggattgagtatcangcaggtagtttgg

SEQ ID NO: 75014 - DNA, 386 bp, Glycine max
ctctgccataccatgtgctgaagcccttctttgtctattcatcagatgatcttatcatttgagcttccttttgctttggttccactcctcaagtttacaagcagcaaaaccaagatggggacacatgtcaactctaccatggtaaatttttttggtaacatgaaatttgtagttgtgcattgcaaccaaatagtaaattgattacatatttgacaaaaatcagtagagaggtgctgttagaactgtaaacataaaaagatgtgtctatattgagaacctggattccctgcagttcggaatttaacacacccacacagtcagctaattgcaatcatcagatgaagatcaaacgatcatattttatctcaaatcaaatttaaaatatg

SEQ ID NO: 75015 - DNA, 407 bp, Glycine max
  unsure (1)..(407): unsure at all n locations
gtttacataagggggttctagtgtgtgattgtttgttgttgtaactcgttcttcttcttttgttgttctgtgtttgtgtttgttttttctctcacctgaaaatgtcttgctgcggtggtaactgtggttgcggaagctcctgcaagtgcggcaacggctgcggaggctgcaagatgtacccagacttgagctacactgagtcaaccaccaccgagaccttggtcatgggagtggcacctgttaaagctcaatttgagggtgctgaaatgggtgtgcccgctgagaacgatggctgcaaatgtggaccaaactgctcctgcaacccctgcacttgcaagtgangtgttgggagagcaagcttcaagcagagatagccctttattaggaataatgataaactattaatg

SEQ ID NO: 75016 - DNA, 262 bp, Glycine max
  unsure (1)..(262): unsure at all n locations
tatggtgtgacangacacagaaggaggaacatggactcactggggtgatgggcaatgttctggcccggcgcgcctccctgtttggggccggagggcatgcgcctgcgcggcgtctgcactggtaaccgtctcttgcttcttacctgccgggaattggcatctcttggcttgtgatgtcaacgcgtttgaaaggatacatcccttttctactgtgacaaggcgacggagactgacctgggctctcattgatatgatgcatcct

SEQ ID NO: 75017 - DNA, 103 bp, Glycine max
ttgaaataagaactaagcgcggccactctgccggtacaacgactgtcttcagagaagaaactttcgaacccaatgagggggataaaggtgcaatagctagaaa

SEQ ID NO: 75018 - DNA, 195 bp, Glycine max
tctgatagaaaggatagtcgcaaccgacctaccagcaagcgcacgttgaaatcccagaagaccaagaccaagcagaggagggtggaaactgatgtcaaaatcccttctggcaagactgagaatgatgaaaatattgatgagtctttcacgcacaatgttgggctttctaacaaggtagatagtatgaaaccccct

SEQ ID NO: 75019 - DNA, 228 bp, Glycine max
tttggttcttccaaaggaacgaaaaactggtctctttcctagaggtagaagagttgcaaatatgagactacgacatgtggagccggatgaagaagccctacaaaaggaactgttgggtactctacctgagtttcagatccaaaaggcagaaggctggaactgactgaggggactacagcagatcctgtgtctgggaactgaaaaggatgtgctagataatataactgg

SEQ ID NO: 75020 - DNA, 314 bp, Glycine max
  unsure (1)..(314): unsure at all n locations
atgttttattaatntcttattgtgaactctttaatgagtttatttggtgttggtacttgattattgtatgaacttatgaaacctttttagtttatttgaatgcaatcttttgtttttttcaatttcaatgagtttatatatatgtttttttttttttgtgtccgccatgacatccgccattttccgctacgccatccgccatatttttatggcggatttttgactttccgccatgaaccgccatccgccattaacaacattgcttaaaagtccatccctcttggaaagtgtcctcaatatgtataacccacata

SEQ ID NO: 75021 - DNA, 337 bp, Glycine max
  unsure (1)..(337): unsure at all n locations
tttttnnnnnnngnccaattctattaattctttctaaaaataaaaaatattctaataactaataataaaaaggaaaataaagattcattagaatattataaaataacaaataatagaacaaaacaagattctttagttatatatgtaaaaaaaaaaaatggtttatttataagaatacatattccattctatatcaaaacaaaatataaaaatttggaatagattctatgaaatctcaaaaaatcccgctattcaattattcattaaacatatgaatattagtgcatattattttatcgattagattaaatagattatctatatatatagatagata

SEQ ID NO: 75022 - DNA, 351 bp, Glycine max
ccagacgacaacagacgggttcttgcttcaccaacacatccatggattgctatactggtaaccttcttctacaatcatctcatactagaattggtactttgattaatagcccgttttttacattgcagtggaatcatacctcaagattcgaaggaaggaatagatcaatatcatcttgggagatacaattctcacggcactgggcattgctatataaaactccaactgtgtgagttctaaaatacaagaaaatgccctaggtgatttttgaggcttaagctaaatgtataaccgatgaactaaatatgacgccacttatttttggcaatataagattaacgaatcattatt

SEQ ID NO: 75023 - DNA, 178 bp, Glycine max
  unsure (1)..(178): unsure at all n locations
accggnccggaattcccggtcgacccacgccgtcggccacgccttcggaccggtgggaaaagatcaccgaagggggggggccttgtaattaccatttccggttccaggaggaaaagcccgccccaaccggtgtgaagtaattgtgtgcggaaaatcgaggaatcaaaataggggttcg

SEQ ID NO: 75024 - DNA, 380 bp, Glycine max
tgtgctcgggttaccgtgttttcttttccttcagtttcttccctcgccaaggagaaataaaacttcaagagctcaattttgtaatttgggaaacacataatacaagcgtcatttgactgtatgaccttgagtgggacttttcttttccccaggttctgatatgagaattctgattattcatcacttgcaaggttgacgcagatatagacttgtaaattctgattactcatgaagctatccttttgattactcaggaagctatccttagaatcctaacagaaaagtatttgcaattttttccgctgatttcatcatcatctttatttgctttgagtcaatagaaacaaggtgtctggtccttttatggatcaatgaatgat

SEQ ID NO: 75025 - DNA, 387 bp, Glycine max
tttagatgtctacagaagggatacagaggatgttaatggttaaaagagtgtggaataaagaaaattgtaaacttcctcaaaagagggtatctgctgacctgctctatgactagtactgataaatacttcataatctgagcaagctcgttcacagattctcacaacctataaaagcaaacgaggaagttctaagtccatctataacaccacatagggtcaaacaagtcattaataacagggcataaatccaacttttgctaacctgctggattactttttctctttctattgagaatgcttcactttttttcagctgggccatttgttgctcattaaatacctacatataattaatgtgatagcatcagcattcaactgacttatatc

SEQ ID NO: 75026 - DNA, 372 bp, Glycine max
cttgtgtaagctttgctaattttttttatattctttattcagttagatagggagaaggaagggtctttgtgacaaacaattcacatggatagcatatatagcattattgggttcccttcaagtggctttcaattcccattgaaggacaattttttccacttaaaatcaacaaaaataacatagcatgaggttccttatttgtttttgcatacttgtatttcataataacattggctaccttggctcctacctgtcacatgaaggcatagatgcacatcactttcaccaataaattacccaacaatgcaaacccttttggaaaactgctctcaagtctattaccaaatatggacaaaactgactagactatgc

SEQ ID NO: 75027 - DNA, 415 bp, Glycine max
ggcgagaaagacgaacgaaagggtaaccggtttacaattaaataaacctaataatcaaaggtgaattttcaaatgctagctagacagcaataatcactacaacaattgtatgaaattgcaacactaatattgttacttctgacttcatatgtgcgcattagatgacagaggcaagaatttgtcattaaagaattcacagttaacgattctgtgagaaccttacttccctcacctctcaacgcaatcaattcgaattgaagataatagctagtaaactaagcttaaactatattgctgacatcgacattttttttcttttccttggagacaattatgtgttgaaatgagttagaccaaattacattaaaactccaaccttaatttttttcttgatccaattataatcattttttaa

SEQ ID NO: 75028 - DNA, 276 bp, Glycine max
aaaaatgcaaatgtaggttcttttttgacacaaatattttacttcatttttgactgaagaataaaaatgattggtcacctaaactcattgatgtactgataatacggacacgcgaactgatggtttcgaatctagagctgtatcgacgattgcttatttgggacattgtgtgtgaatcaacaagcagaccaatcgacttaaaagatcaaaggacagactgtattgacgtacttgtaagactaaacgtacacggatataatcatatgatgatatgct

SEQ ID NO: 75029 - DNA, 257 bp, Glycine max
gaaaaaaaccacaaagggggatcattcaccatcacacacaactactacaggtatttccttacaatcaaaaccaacaacaactatggcaagttatcaaaagcactacgatgatcagggtcgcaaggttgacgagtatggcaacgttgagaagcaaaccgacgaatacggcaaccctgttcatgctgctagtgtcacctatgtagccaccagaactgctgctggtggttacagtgatgacattaataagcaacatgata

SEQ ID NO: 75030 - DNA, 370 bp, Glycine max
ctgtattgttttttaagaataaatacaaagcttgaaggaaataggaaaataaaagctaatgtttcaatataaacaaattttaaggtgaaacataaaaggcagaggtagcagtaatgcaagaatccccttcaaacttattaacaaaggatgtcactacatctggaacttgcttggaccaaaaccattcatatgctttcggctgcttatttgatagttttttgctaattaaactctccagaggagcagatagctgaagtaaactagatcaataaaatatttaacaattttaaggcaactagggagtagaataaaatatcaaaactaaataaagaaagaaagaaataactagtaatgaaataaccatgaaaca

SEQ ID NO: 75031 - DNA, 142 bp, Glycine max
  unsure (1)..(142): unsure at all n locations
ggttctagtgtatgtgattgttgtgactcgttcttcttcgtcgntatcttcttcttttgttgattgtgtgtttgttttttctctcacctgaaaatgtcttgctgcggtggtaactgtggttgcggaaacgcctgcaagtgcg

SEQ ID NO: 75032 - DNA, 124 bp, Glycine max
tggagagacgaataggtttgcgttgatcagcactgatcttttacacactgccgtgcacactggcttcagagaagaactatcgaacccatgagggggataaaagtgcaaactcgaactgaatatc

SEQ ID NO: 75033 - DNA, 394 bp, Glycine max
  unsure (1)..(394): unsure at all n locations
ggttgcgagtagtgtttccatcacactgtgatgattaagcaattggcttgtttagtttagtgaggaggaacaacctattggcaaatctatgtatgcagattcaaaccgcgtcatcttcccatgtatatatttattactatgtctctaagtttaatttcatagttcctgctgggacctcaacgcactcactcaccacacccccactttattcttctctctacgcgttcgaatatgttcttcttcactttccacttttcaactccctccactcctttccttcctagacacaaaactcaaaacaaataaacaaaagggtcttctcttcttgtttgaatttgacttaaagccacttacttgncttctgtattctctatttttggtttcaacatgatca

SEQ ID NO: 75034 - DNA, 82 bp, Glycine max
tgttattccacccatctacaccatttaggccatgttctaatggcatgataatgaattcgtgtgctccatctaaagattccat

SEQ ID NO: 75035 - DNA, 396 bp, Glycine max
ttgggttgctaagatggtctctggtaatcgagtaccaaaggggtgtaatcgattaccaggcttgaaaacgaggtcaggaagttatgagggcttctggtaatcgattaccaagggggtgtaatcgattaccaggcttagaaatgaaggcaacaggttgtggaggcctctggtaatcgattaccaatctgtgtaatcgattacacagaggaatgggtcactggtaatcgattaccaggtatgtgtaatcgattacacagtgcctttttcaggttatcatgtcctgaagctgtgtgattcaagtttggcctctggtaatcgattaccaaggttgtgtaatcgattaccagggaggaaaagccttgagatacccctttttacttgcatgtagtgggtatg

SEQ ID NO: 75036 - DNA, 345 bp, Glycine max
gataccaaaaacaaaacacaagccaagtgaaagtgagaaaaaataaaaatcaaagagcataatgtcagggatcattcacaagattggggagacccttcatgtgggagggcacaagaaggaggaggagcataagggtgagcaccatgctggagaatacaaaggggagcaccatggtgaacacagtagtgagtacaaaggagagcatcatggtgaacacaaagctggagagtaccatggtgagcacaagccagagcacaaagaggggttcctagacaaagtcaaggacaagatccatggtgagggcggcgccgccgagggcgagaagaagaagaaggagaagaagaa

SEQ ID NO: 75037 - DNA, 314 bp, Glycine max
  unsure (1)..(314): unsure at all n locations
tttttccttatggtacaagttggagatcaaaagcgactttccacaacacaagagctttcaaggggtcaacggaccatcgacttttaagccattccttcacgaacccttctttagntggacgtaagtggtggaaagagacttccttactccaccctactcttcctccaccatgacttanggagtttttcttttcctatctccttctttgcttttattacacttgtccgattctctttgatgatttaattcgttttaatcttttacatgtgctacattgangacaatgtgtngttaaaatatgggggggggagtgt

SEQ ID NO: 75038 - DNA, 120 bp, Glycine max
aggtgtgaggacaagctaaggggtctgtatgcgagactgctcgtgaaggacacaacatttttttggtagatgaagctgcaatgatcaaagtggattatccaaataacaacgttttgacct

SEQ ID NO: 75039 - DNA, 259 bp, Glycine max
gacccggtccggaattccggggcggaccacagccttcgcgccggtgtgaagacaacaacagaggtgtcatatggctgatgtaccttgatgaatcagaggcttattctttgtttgattaggccactactgtttgatagctggaggacacaaagaatctgcgttttgtttgctagatgacacgcaacactgagaatgtgtgcgagtttcaacgctgctcagaacaagctcttcgagcttaagaactcaggtcagcatctac

SEQ ID NO: 75040 - DNA, 320 bp, Glycine max
tttgttctagtgtgtgattgtttgttgttgtaactcgttcttcttcttttgttgttctgtgtttgtgtttgttttttctctcacctgaaaatgtcttgctgcggtggtaactgtggttgcggaagctcctgcaagtgcggcaacggctgcggaggctgcaagatgtacccagacttgagctacactgagtcaaccaccaccgagaccttggtcatgggagtggcacctgttaaggctcaatttgagggtgctgaaatgggtgtgcccgctgagaacgatggctgcaaatgtggaccaaactgctcctgcaacccctgcac

SEQ ID NO: 75041 - DNA, 314 bp, Glycine max
gtagcaatcttcaacccagacaggccgcgcgggagtgagtcatccaccatcatagacacgttgttcgtttcctttcctttctgcaatttctaccctaacacgccttcatttctgggcacatttttttacacgttccacatgcgttacgacacacatcttgtttgcttgctatcagacaacgcttatggattcaaccaaggacttagctctctgtacctctggctagacctagcctctctcatgacccaacattccagcgactgatttctgacttttcagcaacttggtttgattcactttaatggattgagtca

SEQ ID NO: 75042 - DNA, 176 bp, Glycine max
tgcgcattcctctcccaagacagaacaagcgggagacatgcatgaaccatcgaacacaccacggtctgttccatacctttttacatcattctaccgaaacacaccatcattattggacacactatagtacacgtagaacatgccgtaacacacacatttcgattgaatgctttcag

SEQ ID NO: 75043 - DNA, 194 bp, Glycine max
aggtgatcatccatgaccccacacatgccacgcgagcttgtttcagcttccagcggccacacccattacgataccaatactaaaacaaatttttacactaacacacctttatagatgggcacaatttacaacatgtcccaaatgcctcttttactcatatatagtcttatctcttttatacaactctttcgtat

SEQ ID NO: 75044 - DNA, 143 bp, Glycine max
gattccgggcccgaccacacccgtccggcagaatacgacaaatacgacacagcggatagtcacataggctattaacggtgagagcgggagagaaacatacgacatcagatacaaatggataagtttccagccgttgacatggg

SEQ ID NO: 75045 - DNA, 107 bp, Glycine max
tttgtgttcatatgcaatgatagcagtcccgtatttatgaaaggcccatcaactattgcacatttgtactctgatggcaaggcaagcggttctcctctttgggttct

SEQ ID NO: 75046 - DNA, 276 bp, Glycine max
  unsure (1)..(276): unsure at all n locations
gttgntgttgtaggaaatttaagtgaagagagaatgatgatgaagtctgctatgtgtgcattggtgcttgtggcactggttgtggttgaagtggggcccatggctgaggctgcggtgacttgcaacccaacacagttgactccttgtcttccggcaattaattcaggttctgcaccttcgagtgcttgttgccagaagctgaaggagcaaaagccatgcttctgtggctacctcaaaaaccctagcttgaagcagtatgttaactctcctaatgcc

SEQ ID NO: 75047 - DNA, 349 bp, Glycine max
  unsure (1)..(349): unsure at all n locations
acacgnnncaggggaaaggttatgcctaagattagctcaagcacacattttaatcacattcaagagttaaaaaaacaattctatgaaaattgaaaacaaaacacatatatactaagtcaaaaaagtagtattaataaataatacataattgctaagaaaatatagatttttaattgatatatgaattgaaacattgcatattaagttgaaataactcaatctaaccagttgattaatttctaaaatccaaacctcttaaaattaaactagttagatagaatgatcttaaacacattgatcccattcatggtgtctatcttaattggttcaatatgacatggtaactact

SEQ ID NO: 75048 - DNA, 343 bp, Glycine max
cggacgcgtgggcgagaagacaacagatgggctttaaacatggcaagccagtggaggtacaaaatccaagtggaaacacgtttcattatcaacagacgccgagagtttcctatcgacagaatattaatactgctatacacttgtcactgaggagagaagaacgtatctggagcgagcaacgttcaaacatgggaactagtatgacggagacacattctctcaaatgaacactgtattggctagcatccagaggggcttctgttcaaaaatatattgcatcaagaatctatgcgaaggaaatgatcttcagggcaccctcaaactctattgatgttagcatgtg

SEQ ID NO: 75049 - DNA, 343 bp, Glycine max
gcccactcataatctaagaatatcaatcactacgactcctgttggtcgacctatcgagtcacaactcccacccaccctctttgacttcactatcagaagagctcgttggagcggacaactgacaataaaacatgcacacacaacggccgggggtagtagcatcacttctaatttgctgtttcaacacacatcgctatgggaaggaccacttctcttccttgaaaagaaccctagaagacactgcttaccccaagcaggaacatgtactggaagctggattagacaaaatcacagctacaagggcattgaacaagaccttacccgcggtgacagactctgtcta

SEQ ID NO: 75050 - DNA, 175 bp, Glycine max
gggggagacaatattagaattttagaggatccttataaaatatcaatataatcatcaggaacacattatgttagattatcaagaagagttttaggaatgtctggatccataatgtctaatcaaacaaatgcagcagaatctgaatcccgggtgatttttgatctatgtactcttc

SEQ ID NO: 75051 - DNA, 113 bp, Glycine max
gggttacttcataatgacatgattggtgggctttatacctgataaactggaaaaaagtcatctatgtattggacctatatgtgacttaccaccataaaaaaatatattggggt

SEQ ID NO: 75052 - DNA, 380 bp, Glycine max
ctattccctttgtcccacaatcctctatactttttatttttaaaaccaagtatttctagacagaaagtaaaaaattaatcccttagaatattaaaattcattagggtatgaggacattgctacgtgcacctagcaaaattgctggcacacccaacaattgcatgattttcccgtgttgcccttctataaaaggaacacggattgactaatttgaagtgtttttttttcttcaaaaatatattttatgaattaatttaaaattaatggtccaagcaagagttaactttcgtgttattaacacgacactctaaccaattaagcaaataagttaattatgttataaaataaataatgttactatatataacactaaaatttct

SEQ ID NO: 75053 - DNA, 270 bp, Glycine max
gcgtccgtccggattcccggtcgacccacctcgtcgtgcaagcgacgatggtgaggaagcttccgagatatttcgcttgtcagaagggaaaagttatgggaggatgttgcttgattgccacaggaggatcgtgcgacgcaaaaaggttgtgtacgaccccgaccccctttgaccgtgtcatgatcctgctggagatgtggttctgcaaatgtggcaacgccaattaaattgaggtcaaaatagaagttctggacccagaccacacactga

SEQ ID NO: 75054 - DNA, 303 bp, Glycine max
ttagtctgagggggatttcttaatgagtgattagcacaacgtctcagtcccttcgatttcccaaattctgtatcattactcatcaccaccaagaatcgaatcagaatttggaacaatcagtgaattgagttttcatccctctcatctgcacctttctccgttgagtttagcaaaaagaaaaaaaaaaggcaggcacaaaaagcaacacgagcattattacacagtacttgcttgggtgcttcacactatcacagtctctctacttttctgttggctatatattataaaaacaaaagcaccctc

SEQ ID NO: 75055 - DNA, 393 bp, Glycine max
ttgtgactgacaaacaaacaatttaccagctatacttgttccttttgaaggttagaagtgctacaatacaaacaatggcagctactcaggaagatgtgaagcttttgggtattgtgggaagcccatttgtgtgcagggtccagattgcccttaagttgaagggagttgagtacaaatttttggaagaaaatttgggcaacaagagtgatttgcttctcaaatacaaccctgttcacaagaaggttccagtgtttgttcacaatgagcagcccatagcagagtctcttgtgattgttgaatacattgatgagacatggaagaacaaccccatcttaccttctgatccttaccaaagagccttggctcgtttctggtccaaattcattgatgata

SEQ ID NO: 75056 - DNA, 338 bp, Glycine max
accacagaggggcaaagtttccatacaaacacactaacgaggatccattcttgggcctgtctgatgccagaagccctactaatcacacgctgcctggcgcttatgtaaatgggtgccgtttaaaagctggtagttgcaccttggggtgcgtcgatcggaccgccttcagtgtgcaccgagcggatcacacattctggcaacaatacgctcctgtcacttaactggccgcttctagcctccggcgctgtcactttgaagaaattagagtgctcaacgctagcctacgctctgcatacattagcatgggatgacaccacatgatattgacactattgagc

SEQ ID NO: 75057 - DNA, 317 bp, Glycine max
ggtgagagagcgagcgagcgagcagtttcaaagagaggatttgggattgggaaggcgagggattgcgctgcgtctcttcctcttctctttcgattcatccctcattcataatcttccaatccaacaacctcagcctcacactcacacatacacacatctgaacgcgtatcgtccctcccatggcttcaaagcgcatcctcaaggagctcaaggacttgcagaaagacccaccaacttcttgcagcgctggtccagtagctgaggacatgttccattggcaagcaacgattatgggtcctgctgatagtccttatgct

SEQ ID NO: 75058 - DNA, 110 bp, Glycine max
tcgccttgaactggacgagaattataggagcttgaaggggtcgctcactttgaacacgcacgtagtcctccttactgctattaatgtatccatatcgttttgtgtccatc

SEQ ID NO: 75059 - DNA, 316 bp, Glycine max
tgcctactttgttaggtattattgatcttttcccattttgctctatccaaatgagtgaagaatctatttttggtacttcccttgttaagcttgttggaagcagtatgatgaccctattctgatagcagagggatattatgagtccgtgactaaggaggtggaggtgactcttctctggtcgtggtgcaaactcccatccaaactagggatgctcatctcatctgaatattaaagataattataattcatatctaataaagtaatttatctagaatcataagtgaatattataattattacttacttttaaaatatg

SEQ ID NO: 75060 - DNA, 370 bp, Glycine max
atattgagaaaatttatctatgacttacattagaacaaactaatgaaataaaatatataacaaattacgttgcaggcaagatgtaaatgctttaaactttaaaaaggaataattaaaataaaaaattaaaataatttaaagacggggtactcttatttaataaagaattaatgaatctcacaagaatatttttaatgaattaaaaataaaattaattttataaattataatatttaatgctttaaaaaacatttacttaatatttaattttttaattattgatttttaacaaataccatttatactgaaataacatttatataatagcttttaagatttatttattttaaagctagtgagtttttttaat

SEQ ID NO: 75061 - DNA, 226 bp, Glycine max
ttttcactcagcattaatcgagaatataatcttgtttgtaatggaaacaaaatacatatatatttaattcattctgaggttaacatcatatgatgcacatgttttcactccttaccatcatcatattcattatgaaaagttcatctacatacatcaggcatgggcgagcggcatatatcaagtgctgcttctactttaattttgagtgccttgaggcgaatgaaaa

SEQ ID NO: 75062 - DNA, 250 bp, Glycine max
tgtgcttttaccgggtttctagaaatgcagaacaaggatgtatttgaacgagttaatcaattaaattaatttaatatggttaaaattataaatacgcttacttgttctttctcattagtgacatttgattcattcttatcttttaaaaaacactttctgaaagtcatctaaaagaaccactctacattttaacaagatatttaaactcatcaagatttgtcataccctaatttcttccgggaatatttac

SEQ ID NO: 75063 - DNA, 388 bp, Glycine max
tgttctagtgtgtgattgtttgttgttgtaactcgttcttcttcttttgttgttctgtgtttgtgtttgttttttctctcacctgaaaatgtcttgctgcggtggtaactgtggttgcggaagctcctgcaagtgcggcaacggctgcggaggctgcaagatgtacccagacttgagctacactgagtcaaccaccaccgagaccttggtcatgggagtggcacctgttaaggctcaatttgagggtgctgaaatgggtgtgcccgctgagaacgatggctgcaaatgtggaccaaactgctcctgcaacccctgcacttgcaagtgaggtgttgggagagcaagcttcaagcagagatagcccttaattaggaataatgattaacta

SEQ ID NO: 75064 - DNA, 316 bp, Glycine max
  unsure (1)..(316): unsure at all n locations
ttcctcatgaaaggagcatgagaagccacacatgaatcgtcgttgaaattcaagttattgctattggtgatgaagaaaggcttgctatcactttgccttctctatttgcagaatagctgagattgagtttgatgtccttctgtgtatgcatgcgacaacagtggtcattttatctggaactctggatatatttagtcctaaactggcatatgtaggttttagtgtcgctttgcttttttttaaagaaaacattgctgcagtatctcagtttataatttagtatgatggaattcttcacttcacaaaananaaaann

SEQ ID NO: 75065 - DNA, 392 bp, Glycine max
ttggggtcatgtacaacacatatcaacatgagatgccaaaaatacaagcacacacggatagaaaatagccgaattggtttgtagtaactctggtagcttataagttatttgataaatttatgagctactttaactaggaattcatatacttattatgatacaaatttatcccgtgctttgcactatgtacaaacaaaatcaagtaaatattccaatacaaataacaataaatgaacagaaaaaagagagttgtaagcgggaaaataaattagactattagagacacctttcttattgttgaacaattcacaaacatcatgttttagaggccgtctttttctgttggcaaagacgctaaatcaaacgaaattatgtttgaagaactagcaatg

SEQ ID NO: 75066 - DNA, 351 bp, Glycine max
tggatcattatatattatatttttattttctggatgtaattttttaatattagaggcaatccatacttatcagtattgctttatctgtaatacatcaacttcgaagttgataaggtgattaatcggcatttaatttcacgtacaatgatacatgataggtttgtaaacattactaatgtatctttcaccttctatatattagagtaccttatttttttttatttctatttttgaagcaaatttattttttattacatgagatttaaaattctagcattaattcatgggcaataaagaaatcctaacattagctattacgttttcaattatctaccatctactcttgtatta

SEQ ID NO: 75067 - DNA, 271 bp, Glycine max
ttatttcatgtctgttactcatttcttctcatcttctttttcttccctttaaaattattattccgtgcaaacacaacaacaacttcatcaccaacacgaagaacaagattagcgttatgggtctcttcctttctaggaatttggcttgcaaattcatatacccttttcttttttccaataaggtttcaaaggatttgttccccaagcagttggagaacatgatgtctctggtctctcctcgtactggcaggcatttgcagcgctatgacaa

SEQ ID NO: 75068 - DNA, 391 bp, Glycine max
aaaaaaacaccgtatggggtgttaataggcaacatggctgggtgaaattggcacagggaagtgagagtcactcatcggattgctgtgtgctcgtgctccatagaagcgctctcgagacaatccagttgacttgctgatagttggattcacctaagtcttagacatgtctctttattcaaactgcaggcagtatagaataagtcagaatcttcagaataaagaagatatgctgatgattgaaagagaaacatatatatagtttattaaaactgtaacacaaatacaaggcaaaaaacttgtgagaatgtgagctatcaaggttccactacttttcatgccaatgatttttaatcaggcatcgtggtgtacacgttgcttagacattaatatc

SEQ ID NO: 75069 - DNA, 311 bp, Glycine max
acagaaagggtaccttcacttgttgcgtacattgccttgcctttggaattattgattctcagtggagtaaaaatatgacacctttgaagcatccaaatcacaactaccgtcatgctcaaacttgatttcctattatctatgatgaatatatacgatacatgtatggaatacaatacgtatctatatgacgatatgattatttcaaaaatatatcaaattcgataatttagaaatattttaaacatcataccagttgcattctatctataattgcaaatcctttaagataccacaaaaaagattgaaacttt

SEQ ID NO: 75070 - DNA, 396 bp, Glycine max
tttctgtataactgatgtcaacattcatcatgcatacacattttttgctgttgttcattgtgtttaacatcgggtatttagagaaccgatgttgtcatatatatgttaacatcggttttacaaaaccgatattaatattgatacattcaacatcggcactttcaacatcggttttagaaccgatgtagaatgttctaaataaccgatgttgaaagtgtattttctaatagtgaataccctatagtaaatcccctttattaattttaataaggttaaattactcatttgttcctatagtttcacgattcttacctttttggtctctatagtttgaaagtggtttttttagtccatatagtttacattttaattcttttttaatccatataattttaa

SEQ ID NO: 75071 - DNA, 277 bp, Glycine max
gtcctggttgcctacaggtccaattcataacccctcaatataacgtgcacgtgacgaacctaatatacttcggaggatcgaacaccaaatgcagtgaaaggagcgaaacctttcaggctacgtatgcggggaagatattgaacaagttggaagttgagaagttacactcggtggtgacaaagtatgggggcatggtggcttacaatttggtcaagatgttgggtgaagacaggatgcaaaaagaggatattgctagctccagtgtgaacatgatcaa

SEQ ID NO: 75072 - DNA, 364 bp, Glycine max
aaagattccggaagacggagggcggaatccacagggactttgttaatcctaaaatggaggcaaaccaaaataatgaccaggagataagacatttaaaatagaaaatatagacagatcaaagataagataaaaatttaaattaaaagatgatgaagataaaaaaaaaggagaagataaaacatataagaaatttcaaaatagacgagaagaaaaataaaggataaggatgattgtcataccctaatttcgtccggagattattacttgatgacatgcaacctttggttagccactttgagatacatggcatcctttgttgcacaataaatgaagtcccgacacatgtcagaaatcaaaagaaagc

SEQ ID NO: 75073 - DNA, 285 bp, Glycine max
acgtgggttaaagaacatgttaacaaccattcctcgtgggggtcattctaacttgtgtggctttaaacacgtgcgacgccctgcggaagtgagaatgacttcgcggacaacgtgggcggcgacgcatctgaggaatccttcttggaggtggagagagaacaaccggagagagagaggataaggagcacctcgtacccaatatatactccggtcttagggcgcaggcactactattgcccacacactgtacaacaatgtgtcttgaagctctctggcctaactggt

SEQ ID NO: 75074 - DNA, 371 bp, Glycine max
attgacatccaagttatataatgcatgtttgatgtcttggtcttattttcaataagaacgactatttttctcttatgcgtatatagaataacttaggaacaagaaattagtattgaattagccgatcctagattaaaaaaaaaaactaacaaaattcgtcagaaattgacacggtatttaaaaattaagaagtttttttaaacaaaattggatcaataaattaaagttggctaagtcgactgaatttcaataactgaaattgtaattgtgacaatgatgacataatattgtatatgttacatcattacttaccagataaatattactggtgggtaactaggtatgaaaaaaaatattatatgtaccaacac

SEQ ID NO: 75075 - DNA, 422 bp, Glycine max
tcgcccacgcgtccgcccacgcgtccttctgtttataagacgacagaagggtatccgcgacccttttgtcatccagaggcggcgggcccgatgacaagcagagaccaagtttggtcattctgcacccttgtatcatccagaggcggcgggcccgatgatacgcggagataccttacggttatccgcacccttttgtcatccagaggcggcgggcccgatgacaagcagagaccaagtttggtcattctgcacccttgtatcatccagaggcggcgggcccgatgatacgcggaaatacccgagtggttatccgtataaacattcttttgctatctgtaagacagaacgcttgatagcatgcagaggctgatacagtcttctgcaccttttgttcctccgggaacaacaagtcatttacatgc

SEQ ID NO: 75076 - DNA, 342 bp, Glycine max
tatgcttattagggtaggagggttcttagaaacattatgtgctatttgtccaaagaaagtttatgtacgccaattgaggagaaattgcattgaagtggtgtactaacaaactacgaggcctaatctccataagtaagttgaattttggaaattagtaggatttagcaaaggagatagaatgaactgagttctattactttttaactaatgtttaacctttcattaggtgaggttaatgtaaaattgtccttgccaacatcttttacattccccacttcataatcaaagtggaattgttgggtttatgcccaaggaaaaagaagcgttccaaattttaaaatt

SEQ ID NO: 75077 - DNA, 346 bp, Glycine max
tcccttcccatcaacagtagaaggtgtcttccatggagacttgggagcaccaatctccttctgatcctcaccaatctcattatcagcagtcaacataactgcttttttttctctctctctctctctctctcacacaaatccacccaactcccaagattttccccctctaaaccccacttgccaataaacacaacactctaaactatcaaccaaatgggtactcagagattcaccaaaaactttaagataccacaaaaagattgaaactttgtacttgccagctgaatcaacgatattgagcacaaaaaccctgagctgaacaggcgataatttcatgtgggggtgc

SEQ ID NO: 75078 - DNA, 360 bp, Glycine max
tttatagtctacagaagggttcctgtcttttcgaatgtgaaattattttttattgctaaaggaatatgttcaacattagcatttttattagccttttaaatgtgaccttccaacctaccaaactaaaactataaaagtcatataaaatatattttctatgattaaaagataattaattaaaaaatatcactaaatccttcgttagagtagatattatgtcaaaatataaatttagtgcacaaaattaatttttaacgctaaatcgtttataattttaaataataaaaagaaaatgggtaaaataaacttattctactctattagtaactaaacaatcataaattatttttctctatattc

SEQ ID NO: 75079 - DNA, 225 bp, Glycine max
gtgggatgacaaaactattaggaaacagtggtttattaaatagcggggtgagaaaacaagcaagatacatacagcgaggattggattggttatcttcttcctttactctaaagagacatctaatctcaatcctcattacacatttcttcattcctctctcaagctttactcttttcccccttccacatcctcgatccctccactacaaaaacaactaatattttt

SEQ ID NO: 75080 - DNA, 405 bp, Glycine max
  unsure (1)..(405): unsure at all n locations
ggggggaaaaaaaaccacaaagggggaaaaaaagggttaaaaatttaaaatttcggtgggaggtgtgagtgttctgcgcgcaccgattcaccattattttttcaaccagggttgtaaaagaaccacattagattaggcaattacctatggctggccattctgattcggttcattccgagaagaaatcaaccattggagtgaatgagttgctgatttttaatgctgagaacattgcaagcaacatgtaaaattatctattacagccgaacatttntatctataattggtggagttggtgctggtattttgggatttacaggcttgaaaggatttgtgttttacttacttctcatggcatttacttcacttgngctcgttgccaaagcaagttttcaccacacatac

SEQ ID NO: 75081 - DNA, 188 bp, Glycine max
  unsure (1)..(188): unsure at all n locations
accggtctcggaattcccgggtcgacccactcgtacggactgcaaaaaaccaccanaaggggccgttcaagggtttcgtttcggttttaacggggtgcacattcattttttgcgcttgactcactcccttcgngcggtttactttctttgtcgaactcgagcgaaaatgcgtgagattcttcacatac

SEQ ID NO: 75082 - DNA, 372 bp, Glycine max
  unsure (1)..(372): unsure at all n locations
gcnacacacaaataccatctgcggttttttaaaaaaactaggtcactacacaacatatcatcattctcacactaatacctcctttattcttactactcaccctaatatcaaattcctcaatatatcttatctaccatttcctttgcaaaaaccccaatacaccttattctccaaactattccttatcatctaaattcattaccacacccccatttttcctctccaatctccctcaccacctacacttattttaagtgaacctttctcttctttttcaccctttttaccaacctcctcattttatttaatctatacaacacaacctctcttattaaaatacctcttctctacaaaattatttcatttttcctt

SEQ ID NO: 75083 - DNA, 78 bp, Glycine max
ggacccgtggacggtcaaggcactgatgggggggatgctgtaaaagggatggcacgacaaccggcggccgatgtaaaa

SEQ ID NO: 75084 - DNA, 330 bp, Glycine max
ggaggagaggaagaggggtgagttgttcattatcatcatttcattgtttcttttcttttccagacatcaaaccaaacactagctacgcttctctctctttccttcccagagcttcctgtggctgtggaatcatcgtatcttcttacgtccgaagcaagcctttgtcttgcgtgtgttcttcccccttccgtcaggttcgcttttcttcatttacatttccacaatatcaaaatacccttacctctgtttcttttattatttgatctatttgttgtcaagaaatactttcgatgcatatgtctctgtgatttaattcgaaatagtggacag

SEQ ID NO: 75085 - DNA, 372 bp, Glycine max
agccgtccgaacacctccgaaaggacttctcaaagctctttacagacacatggccgggtttaataatataaacacctgatattatttccaactatacacacatcacacccttcactatctacatatctttataccaccattccatacctatctgtatctcttttatcaccttactttcgtacatacctttgcaacctcacttttgacattgatctttgctctgctaacacattcgcattcatataatcacatatgtatcatgacaactcacccttacctctgattctttaatgacttattctatggatactccacaactacttaccacacatatttctctgacatctaattgaaaatgttcaacttacaaac

SEQ ID NO: 75086 - DNA, 344 bp, Glycine max
ttttaacgaagcgaaatttccacctacatcgtgggcttatctaagctggtggtggaccgatttgtactgatttgttagtgaagcacatctagtgcaaactgtctaacaggcatggtaagcctgttgacaacatcagccattacctattctcctctcaacaatggttccaaggatttcagaaagtcaggtaattcttctaaaggaaggtgttgcataaaatcaatggtgatagagaaatccttggaggaattgtacaatgtgaatgtggaaagaaatgttttttctgagaaactagctgatcttggagttttaaaatggtctgtttttaagactggtaaaagcaa

SEQ ID NO: 75087 - DNA, 311 bp, Glycine max
gggcgcctccgagaaggctacaaacgctgatgctggggatgttttacattggagcgctctacttcacttttcggtaaatgtatcacttcgttcactttcatccaactcaacatatatggaattttttcaccgataactactgtcttgatcatgtgtgcaaagactacttcatattatcttattctcagtaaaactatgtggttcacattcttaggcatgtccaccaccatgaatgtaacatcacccatgaaatgactcactactactaactggctcatatttttttttattctaaatcacgcaaattcatt

SEQ ID NO: 75088 - DNA, 126 bp, Glycine max
  unsure (1)..(126): unsure at all n locations
cttccgaccggttgcaaaagacacccaaangggcccctaagccaggtttatttaccttttaattggggggcgttttttaaggttgggggggcttaccttcatatccttttaaacattgggggtttt

SEQ ID NO: 75089 - DNA, 287 bp, Glycine max
  unsure (1)..(287): unsure at all n locations
aaaaaccgggncgaacgacaggcttcctgaccgacgggcttgaaagaagctctacggaggggctttaacgaagcgataatttccacctgcatgagggtcaaacctgcgcttcgtttgaaccgatttgtgctgttttgtaagtgaagcacatcgagtgcaaactgtcgaacaggcatggtaagcctgttgacaacatcagccataacctattctcctctaacaatggttccaaggttttcaaaaagtcagggaattcttcttaaggaaggtgtttcataaaaacaatg

SEQ ID NO: 75090 - DNA, 389 bp, Glycine max
ggttctagtgtgtgattgtttgttgttgtaactcggtcttcttcttttgttgggctgtgtttgtgtttgttttttctctcacctgaaaatgtcttgctgcggtggtaactgtggttgcggaagctcctgcaagtgcggcaacggctgcggaggctgcaagatgtacccagacttgagctacactgagtcaaccaccaccgagaccttggtcatgggagtggcacctgttaaggctcaatttgagggtgctgaaatgggtgtgcccgctgagaacgatggctgcaaatgtggaccaaactgctcctgcaacccctgcacttgcaagtgaggtgttgggagagcaagcttcaagcagagatagcccttaattaggaataatgattaactat

SEQ ID NO: 75091 - DNA, 324 bp, Glycine max
ctaaaaactattctaaccctaatcgctggggtttttaaaaaaaatggggtcatccaaattaaaccaccattctcacattctacttcccttctaagaacctcaacacacctctatccctaccttatcacactcttatttttcatactttatgtcacaatccaatatccctaacacttcatatacatcttttctcaacatttacaaatctactcttattaccctcacaaactcttatccactcccatctaaatcataatccactcactcttattcattcaaattactcatactcacttaccattattaattcatattattattatc

SEQ ID NO: 75092 - DNA, 118 bp, Glycine max
acgcgtccgaatactaccgaactattttccaaaggggcttcacaaaaacataaagccgcttttctcacatgtgagataatactcatcactcccacttattcaaaaaccccaccaacta

SEQ ID NO: 75093 - DNA, 100 bp, Glycine max
cgaaatacccggccgaccacacccttccttccggttgcaaaaaaacaccaaagggggctttaaaacaagtccaaaaaccctaacaatggggggcattctt

SEQ ID NO: 75094 - DNA, 359 bp, Glycine max
accggttgtaaaaaaacaccggagggggctgaataaagagagtgagagatggatcagtgggtgtggaaggagttgcctttgcttacaatccttgtttcctttggagcgttcttatacttgcatgattattacacaacacagatatttactatcataaagttactgcatgataagtgcattcttctttcccatcgacacttatggatatatcagcaaacgtattgtgaccccacaagggatcatttctggttcagttcgagactaaatgatgggacaatcatatctgtcgttgaaggacatgctattcagtggatgcctaagcatgaaaaacttattgattatggagatgctggtatcat

SEQ ID NO: 75095 - DNA, 347 bp, Glycine max
ggagataaagagggaggagagaatcacaaagggtgggctaacacgaatacgcgggcggatcaaaccctctatttctctccaaaactgcgtataatatcttactcgccttacataggtcttatatttcattatactgtgctctttcccatttgagggaacagcacaagagtgcgaggatcggataacccaactgcacaagttgtcactaaaattatggatcctcacgactagactggatgccaggctcctgaacgccccattctttgcattaataattgctgcttctttggaagagcagctaccatgaacatgtgttccaagtgctacaaggacatgctgctttagca

SEQ ID NO: 75096 - DNA, 114 bp, Glycine max
gtgggggaattccattgccatgccactgtctgctgcactatggctattgttcgacagctttccagcaggcctatacaaactatgacactatgggaaatgcagatggatgtcctc

SEQ ID NO: 75097 - DNA, 145 bp, Glycine max
tcaaatatataacatacactcacttacaacatttgattttctagaaataatcactatactcctacattgtaattatgacaaactctaccctacatcacaaatttcttcgatctttctttaaatctcatcagaactattttaaata

SEQ ID NO: 75098 - DNA, 199 bp, Glycine max
ggcaaaaatattctactaattattattttacaatgcaccatttgttatctaaagaatgctaataagcaatctacgctattctatacatatataactaaaaataatttatacaatactcctaatctatttcaatttagaaacttttaactcatttataacaaacatacattctactcaaacatatataaatctatcaaat

SEQ ID NO: 75099 - DNA, 338 bp, Glycine max
gtttaatctttttggctgtgttatgcttctcagcactgtcactgagtcgttgtcttgcggaggataatggacttgttatgaacttctacaaggaatcatgccctcaggctgaagacatcatcaaagaacaagtcaagcttctctacaagcgccacaagaacactgctttctcctggctcagaaacatcttccatgactgtgctgttcagagttgtgatgcttcacttgtgctggactccacaagaaggagcttgtctgagaaggaaacagatagaagctttgggttgagaaatttcaggtacattgagacccatcaaagaagctttggaaagggaatg

SEQ ID NO: 75100 - DNA, 296 bp, Glycine max
  unsure (1)..(296): unsure at all n locations
tgaccagcacnntggataagttggaacctgtttaatctcataatcaaagttgtgcctagattgggctggctttcttcatntttgcaatcattcacttntgaaagaagatactccggcagagcttctcaacttgacagcttcggaattttgtgtgaaatgggtattatttgaagggttcaaatcgcattcccttaatatttgaaccgagactttcagtgtatggggccataggcttgggactcaagacttcttgcttggtgttactcttgngtgatttgttcttggatggcatacta

SEQ ID NO: 75101 - DNA, 328 bp, Glycine max
tctataacaccacatattgggatactaaacaagttaaaaaaacaacgtcactgttctatctaaacagcgcctacgtcaaaattaattttaatcacctaaaccatcttctccatcatatcatacctagtactactcctcctccatcttttttacacctttcataccaccttccaacatatcatctattaaaattaaactaatcactttgatctaatataatgatcatacatttatcttcatttttttcaaatgtatcttctttacatctactatatttccacttccataaaagtttattccttcctaattcaccattcatatcctaaca

SEQ ID NO: 75102 - DNA, 162 bp, Glycine max
gcttcacgttgggtgcaaatatctcaataatgggactgggtatttctgtaagtggggttgagctactcacactctttcaatacaattgtcccaaatttagaatctgttacttttaaataaatcgtctgctcatatttctccactttttacaaattaaatgct

SEQ ID NO: 75103 - DNA, 435 bp, Glycine max
  unsure (1)..(435): unsure at all n locations
ggttctattgtgggatggttggtggttgaaactcgtggttcttctttggtggttctgggtttgcgtttgttttttctctcacctgaaaatgtcttgctgcggtggtaactgtggttgcggaagctcctgcaagtgcggcaacggctgcggaggctgcaagatgtacccagacttgagctacactgagtcaaccaccaccgagaccttggtcatgggagtggcacctgttaaggctcaatttgagggtgctgaaatgggtgtgcccgctgagaacgatggctgcaaatgtggaccaaactgctcctgcaacccctgcacttgcaagtgaggtgttgggagagcaagcttctagcagagatagcccttaattaggaataatgattaactattaatgtgtagctaanaacttatgtattatgtctgtgatggttttcg

SEQ ID NO: 75104 - DNA, 373 bp, Glycine max
gccgccagaaaatattaaaatcctaggggctgggttggatttggtgaatggtttaatgcaaatgaaaccaccattctcacattctacttcccttctaagaggcaaagcacgcctctctccctacctttttaccctcatagatttcatcctctttgtcgctatcctctatggcgaagacttcatgtgcatcttcggtcaacagatccaaaactactataattaccctcacaaactcttctccacaaccggtgagttcatagttcactcactttttttcatttgaattactcagactcagttacatttctagttcatatgattatcatcatgcgattatgtatgctaattcaattcgtcaagcttttgtctcatt

SEQ ID NO: 75105 - DNA, 355 bp, Glycine max
ccgggcgaccacgcgtcgtacggtgtaagaaagcttcgaaggggcctccaaatgggggaacctgtaaaaaagggtcggtgttttagaaacgtgggtgttacaaaagaaaggaggaaaagacccatggtcatgagcatgctactcactattgctgcagctgctattgttgctcatacatccaaccatcatctgcacccttacctgtatgctgacgcattgattttgaatacagcagctatcgaacattcttaccaaccccggagccggagcctgagccggaaccgcaaccacaagagattgccagcctaaactcatcgtatcagcaatatatcgtatcagttatcgaacctgttta

SEQ ID NO: 75106 - DNA, 171 bp, Glycine max
aaaattcataccaatttatatttttattatattttttcctttaatttcttttaaagttattatcacataatctcatctttttctacacataacttcacctttaacaattaacaattttttcttatacattttttaattctcttttacacattctttttaattttcaattct

SEQ ID NO: 75107 - DNA, 175 bp, Glycine max
gcaccagatggggtatgggttaacgtagcaaaggatgggttcttttccttgaagccaccggatcggtatcatgcctcttacatggatattcaaatgcattaagtgtatggattacaggctacacagtgaatcgcgtagatggtagatagtgtgaacagacacttttctatgaatg

SEQ ID NO: 75108 - DNA, 214 bp, Glycine max
  unsure (1)..(214): unsure at all n locations
tgtggaccaagaaggacctgcatctatacttacnacttgattctgtatggaatattggcatctgatcttagctaaaggtgctttccttgagcatgatattgaactctctgcaacttgcaaacgaggatgtataggataaagggttcaatggaaccgattgacacagtttgcttgagtcgtggacttccgttactttaaggtgtttgcttagaca

SEQ ID NO: 75109 - DNA, 217 bp, Glycine max
gcacgcgtcgacgtggaagcacaagggagatgggtagcacattatacagaggacatggtgaaatgcatttttttgacccaaagctaatgtgcctgttttaccgtaggctttttctatactaactacatcaagccacacacaaaagaaagataatatggagtatggcatgcactacatggccctctgtacttctcgcgagcaccgcatgaccaatggg

SEQ ID NO: 75110 - DNA, 378 bp, Glycine max
gtagtgtgcaagagtgaagagcgaagagaatggctcggaagggtttaatctttgtggctgtgttatgcttctcagcactgtcactgagtcgttgtcttgcggaggataatggacttgttatgaacttctacaaggaatcatgccctcaggctgaagacatcatcaaagaacaagtcaagcttctctacaagcgccacaagaacactgctttctcctggctcagaaacatcttccatgactgtgctgttcagagttgtgatgcttcactgttgctggactccacaagaaggagcttgtctgagaaggaaacagatagaagctttgggtgagaaatttcaggtacattgagaccatcaaagaagctttggaaaaggaatg

SEQ ID NO: 75111 - DNA, 119 bp, Glycine max
actacagaaggggtagataatgcaataggatcggacataagagagtcatgtgctatagatctgaatgtatacatatgtgatgcataatatgtgagtatatagagtgggatccttaactg

SEQ ID NO: 75112 - DNA, 311 bp, Glycine max
gttacttaaccaggttaaagaagaacattaatggacttaccaagcaaccctatggcgaaagtgggttgtgtcaccggagacagctgggccctatgatcatgggtgggcctactctacttctaaagcgggtacacactgtatgcgaccgtacaagatatctagggttaaaatgagacgaaacattttgaggaaatggtaggagcatcaagtaatcttcattattttgtaaaggagcttcttgacatcgactacattatcgctgatataatagggtgttctctcgtaatacaccatgcttgttataacatcat

SEQ ID NO: 75113 - DNA, 131 bp, Glycine max
gcttcttgaggggtgcaaatatctcagtaatgggtgggattatttctgtatctgggggccaggtactcacactctctcaatcaaatgtaccaaattaagaatctgatactcttaacgaaatcgtctgcaca

SEQ ID NO: 75114 - DNA, 424 bp, Glycine max
  unsure (1)..(424): unsure at all n locations
ggttctagtgtgtgattgtttgttgttgtaactcgtgcttcttcttttgttgttctgtgtttgtgtttgttttttctctcacctgaaaatgtcttgctgcggtggtaactgtggttgcggaagctcctgcaagtgcggcaacggctgcggaggctgcaagatgtacccagacttgagctacactgagtcaaccaccaccgagaccttggtcatgggagtggcacctgttaaggctcaatttgagggtgctgaaatgggtgtgcccgctgagaacgatggctgcaaatgtggaccaaactgctcctgcaacccctgcacttgcaagtgaggtgttgggagagcaagctttcaagcagagatagccctttnttaggaataatgattaactattaatgtgtagctaataacttatgtattatgtctg

SEQ ID NO: 75115 - DNA, 55 bp, Glycine max
gcttcataagcagttcttgcatcctatcaattggtgggattacttctgtctctgg

SEQ ID NO: 75116 - DNA, 110 bp, Glycine max
gaattcccggctcgacccactcgtccgcccacgcgttcgaatactaccgaatgatgttcactagttacttcacttaaacataggtcgtgttttcacacaagggagttaaa

SEQ ID NO: 75117 - DNA, 324 bp, Glycine max
  unsure (1)..(324): unsure at all n locations
aaaaaaaaaaaaaaaaaaaaaaaaaaaaaaaaaaaaaanaaagaaaaaaaaaaaaaanaaaaaaaaaaaaaaaaaaaaaaaaaaaaaaaaaaaaaaaaaaaanaaaaaaaanaaaaaaaaaaaaaanaaaaaaaaaaaaaaaaaaaaaaaaaaaaaaaaaaaaaaaaaaaaaaaaaaaaaaaaaaaaaaaaaaaaaagggaaaaaaaaaaaaaaaaaaaaaaaaaaaaaaaagaaaaaaaaaaaaaaggaagaanaagaaaaaagaaaaaaaaaaaaaaaaaaaaaaaaaagaaaaaaaaaaaagaaaaaaaaaaaaaaataaa

SEQ ID NO: 75118 - DNA, 250 bp, Glycine max
acgcgtccgaagactaccgagtggattacagaaggggaagaaagagaagtaaaggagactgctttaccagtggggatgttgtttctgtcgtcggtttcggcagaattgggttcgactaccatagtcccgatacattccccctgacctctagattaaatgaaaaaaccgactataaacagtttgattgttaaaggtaccattatttcattagtaatgtaatcattattgtcacgggcttcgatcctattta

SEQ ID NO: 75119 - DNA, 217 bp, Glycine max
cgagagggcagcagatgtgggaaggggtaacattgcaacagatgcgatattttccttgaagacagcccatcaggaacatgcctcatagatggatactcagatgccttatatagacggatgagcagctacacaatgaatcacgtagattgtagattgcgggacacgaaattattcatggacagactatgaaaatattacacactgacatgtacccatt

SEQ ID NO: 75120 - DNA, 304 bp, Glycine max
gaggacaacaagaagagattctagtgtgtaatggcaagatggagggaccatgtcgaatggttgtggtcactagtatatgtgttggctcttacgctcagcatgagactgtcttgctgctctgatatccgtgatatatgaagcatctgctagtgcatattcaattgaagagactactagcagcaccgagcctagagcggcactgaatcatccaacgacgaaaccttggtcatgagagaatcccctgcaagagctaactccgagggagctgatcagagcgcacacactgagaactaaagatggctat

SEQ ID NO: 75121 - DNA, 112 bp, Glycine max
acgcgtccgaagactacagaacgggcttactaacatactaatgccattcaattgaaggtttaattaccccgtttccatgtctatcataataaacattcccacactttacatc

SEQ ID NO: 75122 - DNA, 350 bp, Glycine max
gggttctagtgtgtgattgtttgttgttggaactcgttcttcttcttttgttgttctgtgtttgtgtttgttttttctctcacctgaaaatgtcttgctgcggtggtaactgtggttgcggaagctcctgcaagtgcggcaacggctgcggaggctgcaagatgtacccagacttgagctacactgagtcaaccaccaccgagaccttggtcatgggagtggcacctgttaaggctcaatttgagggtgctgaaatgggtgtgcccgctgagaacgatggctgcaaatgtggaccaaactgcttcttgcacctctgcacttgcaagtgatgtgttgggagggcaagcttc

SEQ ID NO: 75123 - DNA, 88 bp, Glycine max
gtcaatccaatccattattaaagggataggccggggccttacaacgcagctcagccaaaattcgctacttgtaaagggctgcactata

SEQ ID NO: 75124 - DNA, 288 bp, Glycine max
  unsure (1)..(288): unsure at all n locations
tgaaagaaagtgtatttcgccacttgtcataacattttatgtcgtcgtgaggcttttcaacctgcaagtccttgagtgaggagtgcccccatcatntgatgatgnttgatgacggtgattgcttcatgaggttagtaagccaagttactggagaaacatnaagcacattgccattgcccattgatgagaaggtttttaccttggcatacatctcctgcaacaaagggaactgtatgtcactcacagtcacacaatggcaccacatgcaacggttgtagtangtgatga

SEQ ID NO: 75125 - DNA, 358 bp, Glycine max
cggacgcgagatcggacgcgactgtgcgagaggaccacagaacgttgcgcgttgggcgaatattaacgtttgaagtgtagctggaagctgcaggactggctcctaatataacacgtacagctatcagactccctaagtagatacggagaatctgaaagctctcaaggtcccagatggactacgagagagcgcatagatctagcactgcctaatagccgtgcatgctacgattgcgcagaccttgacgatcacctgcagctacggcatacaaaccgctgatcactcaccctactgatgctacttagaggccgcaatcgaactgacactgaccgatgccagcttaacccatggctagcat

SEQ ID NO: 75126 - DNA, 353 bp, Glycine max
cgcttttgttttacgcgacttcaacacccatatccagttgggttatccaacactctacgtcaacacattgacaagccacttccgtcaccatcatatcacaatcatcattactctcactatcctatcacctccattctctctgttcatcatgatcatctctacaactctttcacacaactgttatcaccatagctcatagaaattatccttcatatcatactatatatataacatcgctttcagaagccaataacatgattcatgtcctggactatattcatctttgcacatagtattactacatcaacaatacattgttagaatacactacatgacatcctgcactacatata

SEQ ID NO: 75127 - DNA, 282 bp, Glycine max
gggtccacccacgcgtccgcccactcgtacgaaccgtttcgagagcactctataatggcgagcatgagtgaataacgcaggggctaattcacaacgatttaatgtcagcgactaacatatgctattcagcactgcaactcattcagtctaatgctgaggacaatcttcttcgcatgaacacgtacatggactcactccctaataccgaatccatcataaaagtatatatcactctatctcacacattctacacgaactcttttctttcctttataaaaatca

SEQ ID NO: 75128 - DNA, 373 bp, Glycine max
gatgatattcattgttatcgtaagcatagggcctatgtaaatgtcaaatatgtgttcacatgccacatgtgctatcaacaacgtctattaaaactgggttctccatttgaagcacttgtatactgaccaagggctatgcaccaaactctgaactggatacattgcatgatggttatatatatctatacactatgcattctgaaagtatgtgatgctaagcacaacatgatgaaaagagttaagtatggatgaaaagtcgctttccatgcgatcttattcaatacaaaacccaatctgatgtatatacgcgttatatctctctatgtatgatggattatgctacaggcattgataactcaaaatcataacacaa

SEQ ID NO: 75129 - DNA, 113 bp, Glycine max
atcggtcgttagatcactacacatcgtcgaccgttctacctaatcacatgattgggacctgtgactaagtacactatctagagtcataccatatcttctaccatacaacctct

SEQ ID NO: 75130 - DNA, 340 bp, Glycine max
gtgagaagcatatgaaggtcacgataagtgagtcggctattgtcttcaatgaagctaaggggacatttcatgttcaggacaatccattgtatgctgcttcctttgcagctaatggcaatgttgaatatgtggtactctatcatgaatatggatacgtctaaatcctttattcacacttcttaacactttatacagagatggatgctgctgttcttcacaaattcatatatcacatccttaagaaccttgctgttgcaaaggacgacatgccagatgcattaacagcagctagtaacaccgtctgtttagatttagacgctctgaacgggttttactgtac

SEQ ID NO: 75131 - DNA, 118 bp, Glycine max
cccactcgtacgatccgatactaaggtgacttcttatgggagtgtctccgcattcgggagggctcttcactctgttgtggacatcctattctatttgcttttctaataaggcctttgc

SEQ ID NO: 75132 - DNA, 452 bp, Glycine max
  unsure (1)..(452): unsure at all n locations
gggttctagtgtgtgattgtttgttgttgtaactcgttctgcttcttttgttgttctgtgtttgtgtttgttttttctctcacctgaaaatgtcttgctgcggtggtaactgtggttgcggaagctcctgcaagtgcggcaacggctgcggaggctgcaagatgtacccagacttgagctacactgagtcaaccaccaccgagaccttggtcatgggagtggcacctgttaaggctcaatttgagggtgctgaaatgggtgtgcccgctgagaacgatggctgcaaatgtggaccaaactgctcctgcaacccctgcacttgcaagtgaggtgttgggagggcaagcttcaagcagagatagcccttaattaggaataatgataaactattaatgtgtagctaanaacttatgtattatgtctgtgatggttttcgtgcactcttgtgtttt

SEQ ID NO: 75133 - DNA, 118 bp, Glycine max
actcttcaaataccactttaggattcaactactccaccatctcaacatgcgatagtactttcatttgtcttaatcccagctcccaaatcaatctccactaccactcctcatatcttat

SEQ ID NO: 75134 - DNA, 169 bp, Glycine max
tactactcacagtctggttaaaaattggattaaatcggaggggtttacaatatatctgcagatactaatgaactatggaattgaggctactgttctcacatatcttatattctataaatcgatcgatgaaatcctgaacgcctcgattgatatcgaattttttacatct

SEQ ID NO: 75135 - DNA, 153 bp, Glycine max
agataagacttccgactgttggttctgaatatatatttctgttttcggcaaggagtgtgtgttatcgagatagctcctttgactcatctatcagaatctgatggcccaaaatctagggtattctgttcctctttgtggatctgaattacattc

SEQ ID NO: 75136 - DNA, 218 bp, Glycine max
ggtacctaatcgaaacaggtactcccaatattcaggacgctgagactggttcaatgggaattttattatagactgtgacggcgttcattctatcaacaaccgaagacatctaagatcgtaagggatacacaatacacagtagatttaaagccttggtgctaaaacaatgtggatctgatacataccgctgcataattcccgatgatgaagataggtgc

SEQ ID NO: 75137 - DNA, 281 bp, Glycine max
gctgcgtgagtgagtagtgtgacggacgaacgaactgctgctgcatcgagtgccgttgcaggctatagcgccgtggtcagatgctcctgggttttgtcaaaacgatagccttaagagtgtcattgcgatccagtacacggtaaactcgactcaattgatggtttactttaacgcttgttagctcaacgatctacgctcgattagtgccgtcactctaaccgactaaactatcaaattgaactacagcagctatcactagatgtcaagttaggattatatgc

SEQ ID NO: 75138 - DNA, 286 bp, Glycine max
gtcgaccacgctccgacacgcgttcgaacacatcgaaggactacacattttacacttacaatttaaaagggagctgtatttttaacggagcaaccgtatgtctaaagtagtttggtcaccctaccatgacactatccatcatgtatagtactactctcctcatcgtgcttacactttccatgcctcctttcaagatatcacttatgataacgagacataacatttctaataaattgaatgctcatatactcatctacattttttttaaatgtatcattattgacat

SEQ ID NO: 75139 - DNA, 423 bp, Glycine max
  unsure (1)..(423): unsure at all n locations
gggttctagtgtgtgattgtttgttgttgtaactcgttcttcttcttttgttgttctgtgtttgtgtttgttttttctctcacctgaaaatgtcttgctgcggtggtaactgtggttgcggaagctcctgcaagtgcggcaacggctgcggaggctgcaagatgtacccagacttgagctacactgagtcaaccaccaccgagaccttggtcatgggagtggcacctgttaaggctcaatttgagggtgctgaaatgggtgtgcccgctgagaacgatggctgcaaatgtggaccaaactgctcctgcaacccctgcacttgcaagtgaggtgttgggagggcaagcttcaagcagagatagcccttaattaggaataatgataaactattaatgtgtagctaanaacttatgtattatgtct

SEQ ID NO: 75140 - DNA, 339 bp, Glycine max
acgggttccaaaaaacccccaaagggggtttctagcgtgcgatagactgtagttctagcgcctacttattcttaggtcaaccatctctttatatcacctattaatctcacctgaaaatgcctctctactctaataacttaattctctcaagctcctgcacttccatcaacaaatgcgacagcttcacaatgtacccaaacttgatctacactaagacaaacaccacctagaccttcctcatgttatatcaacctcttaaaactcaatctgattgaacacaattaccaattccccctaataacaacagctgcacatatgaaccaaactactcctgcaacc

SEQ ID NO: 75141 - DNA, 397 bp, Glycine max
tagtaacggcgagccactctgctggactgctgccttaagaccacagaaggggacaaccacttgcatcattaaagggataagccgtaatctggcaaccaaacacaaccaaaatacgctactcgttaagggctgcactataccagaatgtctcacggaagaggctgcgcatatatgcctaatgtggtcactggggtgtcacaactgtgcctaacgtaacgcgcttacgcaacatcttacttctctggacgacctgtaggatggaccattaacactaatgcttgacccaatggaaaaagactttgagctggtgatatcctaatcataaactatgactaaacgacctacaatgatgcagctgaagacagaaattgaaacaacagctagaagacaacaacat

SEQ ID NO: 75142 - DNA, 272 bp, Glycine max
ctagtaacggcgcgccagtctgctggaattcgcccttccgagcggccgaccggccaggtacgcgtgcaggcattcatactcaatgtctagggggtatcacaactggtaatctagccaactaaaaacgggcacaactcaaagctaatgatggagctcatggtattgctcaaacatgagagcctgaacaagagtcatatggacagcatctgtccttatcctatcatctgtgtcggctgccatatgtcctgtaccatatcatccgttgctgcctg

SEQ ID NO: 75143 - DNA, 281 bp, Glycine max
ggtttcacgattcagtatgtgagacaagagagggtatatggctagagcacataaaggaatcacatattagtacatcgaacatgatcttacctactacagaactttgcttcaagaaatgaactgaattcacaataagactccagttcatatacatcatgtaacacctatctgatactccctcataaatgtcgcgtatattgatataattttgatacaaccaaagtactttgcttctctatcattcctaccaaaaagctcaaatcaaccatatgaactcattc

SEQ ID NO: 75144 - DNA, 423 bp, Glycine max
gggttctagtgtgtgattgtttgttgtggggactcgttcttcttcttttgttgttctgtgtttgtgtttgttttttctctcacctgaaaatgtcttgctgcggtggtaactgtggttgcggaagctcctgcaagtgcggcaacggctgcggaggctgcaagatgtacccagacttgagctacactgagtcaaccaccaccgagaccttggtcatgggagtggcacctgttaaggctcaatttgagggtgctgaaatgggtgtgcccgctgagaacgatggctgcaaatgtggaccaaactgctcctgcaacccctgcacttgcaagtgaggtgttgggagggcaagcttcaagcagagatagcccttaattaggaataatgataaactattaatgtgtagctaaaaacttatgtattatgtct

SEQ ID NO: 75145 - DNA, 329 bp, Glycine max
tttgggtactagtgtgtgattgtttgttgttgcagcgttttattcttcttttgtccctctctctttctctttgttttttctctcacctgaaaatgtcttgctgccgtggtaactgtggatgcggaagctcctgcaagtgcggcaaccgctgcggaggctgcaagatgtacccagacttgagctacactgagtcaaccaccaccgagaccttggtcatgggagtggcacctgttaaggctcaatttgagggtgctgaaatgcgtgtgcccgcttaaaaccatggctgcaaatgtggaccaaactgctcctgcaacccctgcactttcaag

SEQ ID NO: 75146 - DNA, 275 bp, Glycine max
ttctatctccaccgtccacaatttcctccgaaataaatgcaccaccaacaatatatttcattcctcttccacaagcattccctctttcttgcatgatcatcactaccactctttcttattatatttgccaatcattctcatccaaattaattgtcatctaatactcccatcaaaacatcatattcacaagccgaaaagatctctcatcatatccacttttgtgagctattcaattaatttaaatacatcagcattccctttttataaaccacttc

SEQ ID NO: 75147 - DNA, 410 bp, Glycine max
ggcacaagtgagtttggtgatcgagataactagaaacagtgtgatgaaaatgaaggtccttgttttcttcgttgctacaattttggtagcatggcaatgccatgcgtacgatatgttccctctccgaatgaacactggctatggtgcccgtactccggaggtgaaatgcgcaagttggaggcttgctgtggaagcacacaacatctttggctttgagaccattcctgaagagtgcgttgaagcaacaaaggaatacatccatggcgaacaatatagatcagactccaaaacagttaaccaacaagcttacttttatgccagagacctcgaagtccatcccaaggacacatttgtgttcagtatagatggcaccgtactctctaatattccatactacaaaaaacatggat

SEQ ID NO: 75148 - DNA, 398 bp, Glycine max
gggttctagtgtgtgattgtttgttgttgtgactcgttcttcttcttttgttgttctgtgtttgtgtttgttttttctctcacctgaaaatgtcttgctgcggtggtaactgtggttgcggaagctcctgcaagtgcggcaacggctgcggaggctgcaagatgtacccagacttgagctacactgagtcaaccaccaccgagaccttggtcatgggagtggcacctgttaaggctcaatttgagggtgctgaaatgggtgtgcccgctgagaacgatggctgcaaatgtggaccaaactgctcctgcaacccctgcacttgcaagtgaggtgttgggagggcaagcttcaagcaaagatagcccttaattaggaataatgataaactattaatgtgt

SEQ ID NO: 75149 - DNA, 56 bp, Glycine max
ggcggaggctgttccacgcttgtttttaccacgaccctggttgataacattaaaat

SEQ ID NO: 75150 - DNA, 194 bp, Glycine max
ggtacctaatagaaacaggaactactgcgagggcagacgcaaagacgggatcattggccattctattataaactgtgatggccttcattctatcaacaaccgaagacatggaaaatcgtaaggtttaaacaatacacagtagatttaaagccttggtgctaaaacaaagtcgagcgtatacataccgctgcata

SEQ ID NO: 75151 - DNA, 79 bp, Glycine max
attatagatttataatggtacatgtccaaatttacatatgtaaatctattcatattctatcttactatcacttatactt

SEQ ID NO: 75152 - DNA, 427 bp, Glycine max
cagacatgaggttgtcaaacctgaagctactatctgcatctcatcaccaagatggaaagaatagaggggctgatatgaagaagacaatgaaaaaatcaaggtcaataaagctttccgatcttgaggctcttcaaccatcatcatcatcatgaccttaaaggagaagcttgccttttaacactccaacaactgcaacatcagcatcaccacagatgcaacaacctttgttcagaacggtagatggttcaccaaattacaggaagccaacaagcatttcacatgcaaaaaaggaccttttcctggtaagccaaaggaacactgaacctggttcagattataagaatcttcctagaaaaatttccagtgattccaaagctgcatgtgttaagaaacctgcaaaagccttgacaagaccatctaatagttt

SEQ ID NO: 75153 - DNA, 309 bp, Glycine max
gctgcatatgacgacagagggcggcagcgtctttgctgatatcgctcttagcgaaggataatgatttcatcattaagtgtaatgcggtcggacagaagatccttgataacgtacgcttatatgctatcgaatagaacggctttagcattgccagtgatttggtccactaggcttatattgacaaggttgcatatgaaaatacgctctgatgaccccatgaactgcatcttgcagaggattgaacgagcgaagtgagcacaatcctgcctgaatgagtctgaacccgctgacctgattgaaacgagtctg

SEQ ID NO: 75154 - DNA, 293 bp, Glycine max
ggcacaagtgagtttgttgatcgagataactagaaacagtgtgatgaaaatgaaggtccttgttttcttcgttgctacaattttggtagcatggcaatgccatgcgtacgatatgttccctctccgaatgaacactggctatggtgcccgtactccggaggtgaaatgcgcaagttggaggcttgctgtggaagcacacaacatctttggctttgagaccattcccgaagagtgcgttgaagcaacaaaggaatacatccatggcgaacaatatagatcagactccaaaacag

SEQ ID NO: 75155 - DNA, 358 bp, Glycine max
ccacgcgtccgtgcgctcgaattacgactttcaagcagacgcccgaacgcgtactacaagctggatttgcttgtgactggatagttaacgaagcaatttcataacatgcatactacaagttctttgtgcacatttcatgtacaatgcatctacatttgccatttacagttgacactttgtagtatgaagcgacaactgtccttacatcctcaaaacttaataggctatcagccactcaaatttagcatgaaacgcctcagatccctgccttgcactgtaccgaaatctgaatcaacggctcagctgtcctgagatatgaactggacttaatacactactaccttcactacttggaaaa

SEQ ID NO: 75156 - DNA, 293 bp, Glycine max
ttgggaatcgaatagaggttatagttcttaaggtctgggtcctccttcgtgggtggcgatgatattcttctccttagcggatactcagatccattgagcaaactcatattattaatccaaaacctctcagatcctcggaggcggcgttacttaaatgaagtcctcaagccgtctctttacgatcggactgttgacgtcgttgtactcctgcaacattgatgtactgatgctcaacaaggaccttctcagcaactatggcttcaagtatcctatcttactcaccatgtgccaca

SEQ ID NO: 75157 - DNA, 311 bp, Glycine max
  unsure (1)..(311): unsure at all n locations
ggtatccccattcagttggccaatcctcttcacttgttctctctctctctcctcagtgtctcttctctctggttgcaacttggtctgtgtgtgtgaaagcaccaaaaataagaattttctgcaaaagaaatcaatcccctctctcccaaaagaaatgctaaagtgtgggagaaaagggtattaaaaaagataagtgccaaacctcanagttgtgctttttacctncctcagntaaagaaaaaaccaggaccaaaaggaataaaaaataaggtagagagagaaggcattaaggtaagagttaagactagtta

SEQ ID NO: 75158 - DNA, 412 bp, Glycine max
gcttcttcaaaagtacgttgcattccacgaatttcttctctctcgaagagggtaaactcgtaatgttggttccgattttttcggaaaaacgccttcgtttctttcccagcgaatttttcttttgttcgacgaaccttggattcatttcagtagcatagttcaggttcgtagatctcgaatttcactcaatcgcgtgttgttttccacttttccttttttgaagagccgtgagcatgttgaattaagtgccgttttctgttgttaaaaactccgatggttttattgtaattttgacaccaatatttagggctttgattcttgctttatactgattctgaagttaatctcctcttaatttaaccctgagcttagttcagatgctgagaatttgtcaatagatcaagattgcagt

SEQ ID NO: 75159 - DNA, 318 bp, Glycine max
gctggaatagaagaaaaggtgcttgctagaagtgacagtatgctgaagtgtgtcagatggtaggggactcaactacttcttcgtaactactccctttcatcttatcgagcttatgtatcacgagactaactacatttagtaactaattgcgtgcatatacaatggctgtacatacaggatatggctggaagttgtatagcatattaagctaaccatatagcagcatccgggtcatgactagttacatgactagcactagtagtacttagctgatgtcagtgtatagggattgtagcatgatacttgattgttaagtga

SEQ ID NO: 75160 - DNA, 377 bp, Glycine max
aggcgtgcgaacacctcagacaggacagcagtagaagaatgggagcatgctgctagcgccagtaagctgtcaaccatcaaatggtaagtgcctcaaccacaggctacctactccactagttcatctgagtggagccatgtatccacacactatctacctctatatcatgatctggatctgatacactggcattacacacaggtgacggacatacgtccaaggacatattcgaatcatcgtattacagcgttctgagaattacttgactaatcactcgcattcactaaacacagtttatgtcagcgtaaatgtatcgtcgctagatactagaggattagttcgaaccttatgtattgagtggatagatcatacctgca

SEQ ID NO: 75161 - DNA, 422 bp, Glycine max
  unsure (1)..(422): unsure at all n locations
ggttctagtgtgtgattgtttgttgttgtaactcgttcttcttcttttgttgttctgtgtttgtgtttgttttttctctcacctgaaaatgtcttgctgcggtggtaactgtggttgcggaagctcctgcaagtgcggcaactgctgcggaggctgcaagatgtacccagacttgagctacactgagtcaaccaccaccgagaccttggtcatgggagtggcacctgttaaggctcaatttgagggtgctgaaatgggtgtgcccgctgagaacgatggctgcaaatgtggaccaaactgctnctgcaacccctgcacttgcaaagtaagtgtttggagagcaagctttaagcagagatagcccttaattaaggataattgataactattaatgtgtagctaaaaacttatgtattatgtct

SEQ ID NO: 75162 - DNA, 386 bp, Glycine max
gcttctgaaggagacactgaacttgctggaagaggatctttactgaactgactaagctaccatatgtcgaaggtagtttgtgttaactgcgccagcgcagccatcggatcatatgtggcactactcctactacatcgtggttacacattaccatgccaaggccacggatatacatgacgaatatgagacgaaccatttttacgtaatggtatgagcatatagtaatatccatttaattgctagggaccttactggcatctgctgcattgacgttatcataaaggattggtactgcgtcatgaatcttgaatgttctgacatcagtggtctactgatagattaggtgatacagattttggtgctcactatgaattgatcggatgctg

SEQ ID NO: 75163 - DNA, 421 bp, Glycine max
ggcgaggcaaggcaatagcctcatcctgttcaactcagagagagcgaaacgaagcgtctaaggttaaaaaaaactaaaaagggaaccacaaatactaccaccaggtttctctctatctattcctcactctagtctcttcattgctaattgtctgtaacgcttacatattttgattctttcactcactttgttgttgcgtgggctagatttcagcgttctcgtttctactctttattttaatgcactttgttcttgtgtttggaattaattttatttcttatgccatgtgattttcggtgtttttttggtttctggtgtacgaaacttgaatagtttgcaattcattcctaagttcacttggcaattcgatagttttttttttgctggtctggtattttcttatatatatttttaatatctt

SEQ ID NO: 75164 - DNA, 432 bp, Glycine max
ggcacaagtgagtttgttgatcgagataactagaaacagtgtgatgaaaatgaacgtccttggtttcttcgttgctacaattttggtagcatggcaatgccatgcgtacgatatgttccctctccgaatgaacactggctatggtgcccgtactccggaggtgaaatgcgcaagttggaggctatgctgtggaagcacacaacatctttggctttgagaccattcctgaagagtgcgttgaagcatcagaggaatacatccatggcgaacaatatagatcagactccaaaacagttaaccaacaagcttacttttatgccagagacctcgaagtccatcccaaggacacatttgtgttcagtatagatggcaccgtactctctaatattccatactacaaaaaacatggatatggggtggagaaatttaact

SEQ ID NO: 75165 - DNA, 190 bp, Glycine max
cggggcgcggcaacgcaatagtcatcaatctgtgtaggtgccgcttaaccaaaatgaacgtctcatgtttattaaaagttacaatgatcgaatcatgctagcatcaggcagtctttatttaagctctcactatcctcactttatttatcgctgacagtctcgataacatattctcatgctttaattcact

SEQ ID NO: 75166 - DNA, 416 bp, Glycine max
attacaaagagaaataatcgaaatgtagatgaatccagttctgctctcaatcatgctgatgagagtttgtttcaagtatgatctgattccaatggtgaaattggatgtgaaaatgagaaggatttacgtttgaacccaggagttgcttcaaataaaatgtatttttgatgaaagtggcataaatgcttccggtgattgttccgagactgttctggtctaacagaatgactaagttctgtactgcccgtgatactctccttaagttttttttttccagagcttcattgccttgtaagcaagtcaattttcaaggcatttgaagcttctgcgatgtgctttgatctgggtattatgaataagttttattgatgttgggggaaatattgtttggtcccttgtcatttgagtggattttt

SEQ ID NO: 75167 - DNA, 450 bp, Glycine max
ccagatgaccacagactgcggatatgggaaacagtgagagataatgatgatagagatcagtgactcactcttaagggccgaagcagatccagatcaattgcttatgtaagatgtatcttctggaacttttcactctcctcctttgtatcaatcagaagatactttgaactccaacaacataatataatgctaagactcacacatcacaccacaacacatcacaacacagaaacacctacttcctctttccttatttgctcaaacacatagcaccataactagttctaatttaatatacacatcacaatacaacttttcctctgtatcttttattatcattttcatagtaattataatcgaagaagatttaagaagcgtatattcaacattattccaagagactttacctctctccatcgatatgtttaagtgttaaatgcattaaatggg

SEQ ID NO: 75168 - DNA, 446 bp, Glycine max
ggcacaagtgagtttgttgatcgagatggctagaaagagtgtgatgaaaatgaaggtccttgttttcttcgttgctacaattttggtagcatggcaatgccatgcgtacgatatgttccctctccgaatgaacactggctatggtgcccgtactccggaggtgaaatgcgcaagttggaggcttgctgtggaagcacacaacatctttggctttgagaccattcctgaagagtgcgttgaagcaacaaaggaatacatccatggcgaacaatatagatcagactccaaaacagttaaccaacaagcttacttttatgccagagacctcgaagtccattccaaggacacatttgtggtcagtataaatggcaccgtactctctaatattccatactacaaaaaacatggatatggggtggagaaatttaactcgaccctggatgatg

SEQ ID NO: 75169 - DNA, 396 bp, Glycine max
  unsure (1)..(396): unsure at all n locations
tgcaccgtactcggtccgtgaatnntcccgggtcgagcccacgtcgtctcgtcggcttggtcgagaagaaacgtacagaaggggggccccgcagaagttgaagttcgaacggaaaaaagagagcctcttggagaaagtcctaannaaatcccaacccggcagaagggtaagggaaggaccttgcnttaaatctgatnaccagaaagaagagaaccaaagaagggcttaatannaacctgaaagaaatctgttttctccaatgtgaataagtgactcaatgcannaagaacataaaannnacctaactttaacatcnnagataataccaaggggatgtnnctgatcatnnntgtttgaaagaagcccagcaannagtagaaattctagnnntagtag

SEQ ID NO: 75170 - DNA, 338 bp, Glycine max
gagagcagaggagagagagagagatacacagtcacacacacaacgcaaaacacaaagggtctgtgtttgttcttctgaaaagtccagctttctccaccacctctctagggttcctttgctttcaatttttgcttaaaaatattatttttatagtttttctgaaaaaagcaacagaccccttttccttaccgatcttgtcctctctctgtatttcttgccgtatgctgaatttgcagaactgaactaaagcttccttcatcatattgtccaacagcttattcaagagcaaaagtagaagcagtttaaagatgggttacttatgtgatttttgtggagac

SEQ ID NO: 75171 - DNA, 248 bp, Glycine max
gaggttgaaaattttaaaggtgtggaataagactactcagtcacctggaatttcaatgccaatccttattttgaggatcctaaacttgcaaagacctataccttacttgaatatggaacacctaaagtgactgctacacccatatgctggaaagagggcttgggcatacccaatggagtctctcatgagaaaacaaggtacacgcgtacttctactgatgtcagcttctttagactgcttactgacac

SEQ ID NO: 75172 - DNA, 201 bp, Glycine max
gacgacaaactttacggtgtgaacattgttatagttgtaggtacataagagtttattagatgccttatttacaattttttagatgtttttggtattgttcttcaatcaaagtcatagagtttttgtgtttttatttaccagtccaatgttaatcattagtttttgttagaatattaatgggaatttttccttttaactctc

SEQ ID NO: 75173 - DNA, 315 bp, Glycine max
tatggggaggttgaattaggtttttaggtattgagacctaggggacacactattacgcatcattcatatttctcaaaactgaactatgctcatcaagtgatgccaagatcttcccagctaaggacatcacttttgctagtattgattctcatgctctgatgtaatcagtatctttacgcactttgtaaagcttcatactcttgttgtcataactgctctcgttgccatcaatctactgcgatgttctgaattgggacattggctaatgatttcactgtgttcacattcggtcttaagaactatcctacaacatat

SEQ ID NO: 75174 - DNA, 399 bp, Glycine max
  unsure (1)..(399): unsure at all n locations
gaaaataattggaaaaaagcacaaccaaaatgaacatatatataaaaaacgactcaggtttgaacgcatctgaatgagaacggagaataacataccaaatagtagagcaattttcgattttgcaagctattgcacgacactaaaggaggaatcacggtgcgtacaaacgggtggaggcgctctctctcacacacacgtttggcaagcacgagcagtctgaactcaatgattgggtgctctaagtagaactcaacatggccattgatttctggcccaataagaagacatttggatatgcacctnctaactttgtatcttgcaactcccattttatttgtgtggataaaaatatctctttcagtaggaatctccattccgaaaggtattttttaccttttg

SEQ ID NO: 75175 - DNA, 196 bp, Glycine max
gtagatagttgggaaatagcgcgattaattggtacatatatgtcagaagacggctcaggtaatgatctgcatgcgagtgagagcaagtggtagcatagcaaatagcacatcatttcttagacgctcaagctatagcacgatacttatagaggaatcaaggtccgtacaaatcagaggtggcgctctctctcacaca

SEQ ID NO: 75176 - DNA, 402 bp, Glycine max
ggcacaagtgagtttgttgatcgagataactagaaacagtgtgatgaaaatgaaagtccctgttttcttcgttgctacaattttggtagcatggcaatgccatgcgtacgatatgttccctctccgaatgaacactggctatggtgcccgtactccggaggtgaaatgcgcaagttggaggcttgctgtggaagcacacaacatctttggctttgagaccattcctgaagagtgcgttgaagcaacaaaggaatacatccatggcgaacaatatagatcagactccaaaacagttaaccaacaagcttacttttatgccagagacctcgaagtccatcccaaggacacatttgtgttcagtatagatggcaccgtactctctaatattccatactacaaaaa

SEQ ID NO: 75177 - DNA, 398 bp, Glycine max
aggcgtccgaacaggtgagtattgacctcttataatgagatacgtactaacgagggtgaatgtgctgtgtcaccagtactacgacattcattatctagaagactcgcatttttgcaagcacattagctataacgtctattgcaacatttatatggattcactcaggttgaacttaattgacgctgcgcagtttcatacgcttctatagttgaaacaactaagttttaccaacaaggtttatccacgtgctgtgcatttcatattggagcattttctttgaacatattgtcttgccaaaccatgtgtgtaaaaccctttaacttattaaggcttgaagctttgtataaattgatttgatattcaaactatgaaactttgaagactttatggattatttg

SEQ ID NO: 75178 - DNA, 314 bp, Glycine max
gacacaccgaatggggacttgagacaatgccagcagtgctggtgcttctgagtataatccttcggctcgcagcgctacggtcaaatccatataatcaaaagatgcagcttacaacatgacacttaactttaagaatcctgtgaatgactatcatgctgccaaagacagcacagattgccatgaattatacgcagacattgttctagctctttgcaaacttgttgatcgtaagaattataccactgactgacgaccagttagactattgtacagctaaaatactaggcattcagctgcatttatatgacgcttgc

SEQ ID NO: 75179 - DNA, 288 bp, Glycine max
ggatgtagcgatctcttatagcgctgaaaatcgcgtgagaggagtaaatcgactaatcatacattaataacaggttctgtatgcattactgacagacaatatagatctaaccccattattgaacatcgtagtgagagttaggacttcacatatagagaatatactactcatgctgttctcactgattgttgagctctacctgcaaaaggacctagtccagattaagatgctgatgaagaatgtctaatcgcacatgtcaagtttttgacaaactgatattgactgtat

SEQ ID NO: 75180 - DNA, 291 bp, Glycine max
gacccgaaggaatgaggaccacatggagcagataacagcgtatcccattcctataatgaggagccacaagaatgccagcatggactaccaactcaaccagaatccaccactatattattgagtctcggacttggattgcatcccttctcgtgattggaaccaaaaggaagacgtaaattaaattatgcatccatataacacgacaaacaagtgccctgatatgtagaacagcacatgggtatggcagtgcaagccaaggtacgggcatgcaacccaattcgaataccacaa

SEQ ID NO: 75181 - DNA, 225 bp, Glycine max
taatgggagatacggagttgcggggcgaatgcaccgacttctgtcatcgtgacaatcgagctcaatggtacacggctatgggataggccatcacctgtaatggcatcatttttagcaagatggccactctcagagtccccagagattttgaagcctggtgatatagctacaatattgaacattcatacagcttgtactgatcatgtccgacactgtcccataccc

SEQ ID NO: 75182 - DNA, 200 bp, Glycine max
ggacaacataacatacaggaggtgaacaacgagcgagtgagtgatttataacccccggagtggcgaacgagaaccgcttatcaggcttaagaatattaagaggggcttgtacttgtgcatattgaacaacaacgatttcaaatggtgtatagagcatttacatcgaaacggagacaaactctacattgggcacatgatgc

SEQ ID NO: 75183 - DNA, 209 bp, Glycine max
  unsure (1)..(209): unsure at all n locations
gggcttacgtagcanattcttatgttgggtcgattctggactttcactctctcatctctcggttatgtcttggtaaactataaactcttatctctttccaacctaaaatcaagaatctaattctctatattttctccatgaaaaaatccgcctaccatcatcatctttttattcccagaggaagaaaccttgctttttatatataaaac

SEQ ID NO: 75184 - DNA, 109 bp, Glycine max
gatccccaatcagagagaaaagttagggttcacaacttttccttttccttttgcttgccaatcttaatcaaataatcaatcatccattcattattcatatgtcgtccgc

SEQ ID NO: 75185 - DNA, 276 bp, Glycine max
gggaggaaagtggtaaaggaacatggaagcacgctgctttccatgttgcccccactattgccacccctgctgcttatgcccctttgcccttcgctcttgcttctctcggttggcctcttggtgtgactagtctggtgagtgcaacactagtcacctggtactctagctttttgatcgcttcgcttgggaaatggaacggggagaagcaccttacctatagacatcttgcacataatattttcggattctgggggtactggtctattgccttttttc

SEQ ID NO: 75186 - DNA, 430 bp, Glycine max
gatatagatgatgtgtcttctaaatgagtttgctattggtttgtgtacaaggataaattactgcatggtcattgtctaggacaatctctacgtgacacataatcacatttatgaaagaaaaaaaaaagttaatattgtgttacatgaagaagagtcaaaatcatatgattccagaccatgtaataatttctccaaacacatgaatgttggctttgtcaagagccccatcatttgcttcctaaatcctgtggttatgttttattttgtttttaagcttgggccataatttgcttcagcacccaactctgaattttccttcaatctcaattgtactggttcacatttttttcttctgtatcaataccttgagggagtggatatctactccattagttattgccgggtggatcttgttgatgtaattattact

SEQ ID NO: 75187 - DNA, 440 bp, Glycine max
  unsure (1)..(440): unsure at all n locations
ggtccggaattacccggggtcggacccaaacgcgtccgtaccggctntgtcgagaagaacgaacagaaggggggtgttgatgtgatgaagnntaatcggaatgggacaaatgggtgtacggtgtgggcggaaactgcggataannagtcgggaaactcttttttgaatgcaaagtagacgcctgagtaccttcgacttacagggnnggagggaagcttcgtagaccagcctcgcttccccgcatagcatggagggtctaaggtaagatcggaggactgaaaggaaggcataatatgagtactcgctcgctgaagaggtaatcatataaaaggcaaaggaagaagatcatgttctcgcttcccttatctgtttggcctggaagcgtatctcccgatggtcgactgaaggcttattaccgattaacctttttgctactaaag

SEQ ID NO: 75188 - DNA, 403 bp, Glycine max
ggtgcacaagtgagtttgttgatcgagataactagaaacagtgtgatgaaaatgaaggtccttgttttcttcgttgctacaattttggtagcatggcaatgccatgcgtacgatatgttccctctccgaatgaacactggctatggtgcccgtactccggaagtgaaatgcgcaagttggaggcttgctgtggaagcacacaacatctttggctttgagaccattcctgaagagtgcgttgaagcaacaaaggaatacatccatggcgaacaatatagatcagactccaaaacagttaaccaacaagcttacttttatgccagagacctcgaagtccatcccaaagacacatttgtgttcagtataaatggcaccgtactctctaataatccatactacaaaa

SEQ ID NO: 75189 - DNA, 409 bp, Glycine max
ggcacaagtgagtttgttgatggagataactagaaacagggtgatgaaaatgaaggtccttgttttcttcgttgctacaattttggtagcatggcaatgccatgcgtacgatatgttccctctccgaatgaacactggctatggtgcccgcactccagaggtgaaatgcgcaagttggaggcttgctgtggaagcacacaacatcttttgctttgagaccattcctgaaaagtgcgttgaagcaacataggaatacattcatggcgaacaatatagatcagactccaaaacagttaaccaacaagcttacttttatgccagagaccttgaagtccataccaaggacacatttgtgttcagtataaattgcacccgactctctaatattcatactacaaaaacatggata

SEQ ID NO: 75190 - DNA, 316 bp, Glycine max
tttaatggcctttggatataccaatgctaacacctatgccagataagttttattttctggctctgttatgcttcaatgactacaaatactaacagtttgaaactttgaatatactatttcatatgggatttgggctggtgaaaagaattctatattttggttggtttttagaaatgttaaagcagccaaattcacaattaatcttaaattatgtgttctgtttgttttcttataatgagactttgtgctggtgtgagaattttgtcacagccttaagcccctaatttttaagcagatagccatgcgtatttatttt

SEQ ID NO: 75191 - DNA, 307 bp, Glycine max
  unsure (1)..(307): unsure at all n locations
aaaagtggaaaagcctgtaatgcttataggaaattaacagactcctggatactggaagtatcgcaacattatggatatgaatgctggatgngtagtttgctgctgatattcatcatcaagttgggcatgaatgtggcctactatgctgaaaaagtcattgggtgtcattatgacgaggcttatgcatctatcatgattgggtgaaccttcttcatacccaagacatatgacctattcatagtgatagctctttagtctttataggataatgtgatacaaagacatttttggagatgaccgaatttac

SEQ ID NO: 75192 - DNA, 110 bp, Glycine max
gctccgaaaaagacaaaaaaaggggattggttattggaaaaaccaaaaaaaagggaaatatcaggaggtgcaagtcccggacccaaacccggtttttttttttgttaagg

SEQ ID NO: 75193 - DNA, 322 bp, Glycine max
tggggaaaaaaaagatgaataaaaaagagaggttgcggatttaacgcactataattgcaacttcatcaattgcttatactctcatcctacactctgcctcatgaaactacatattcattctctatcattataacttcgagatcgtaatcattctcgacaaaggacctctaaataagttctatgctatttattctaaacactgaaactatctttctctaaacattcaaacattcattatcaactatcataaagccaaatctcttttaatttgcaaggaccactgtgatactcattacagtaaatgcagctacattggacattc

SEQ ID NO: 75194 - DNA, 291 bp, Glycine max
ggagaagaagaagaagaagaagatggagaagtatcagatctggagcaggagaatagcgttggcagcgtttgcgtttgctctgctgttccaatcggcctcagcagacgacgtcgttgtgctctctgaagataacttcgagaaggaagttggtcaggacagaggagctctcgttgagttctatgctccttggtgtggacactgcaaaaagcttgctccagaatatgaaaagcttggtagcagcttcaagaaagccaaatctgttttaattggcaaggttgactgtgatgagca

SEQ ID NO: 75195 - DNA, 161 bp, Glycine max
ggtgtgagttcattaacatatacaaattctctgtgttgtgttgtgtacttgtgttaattgtgttgttgttgtaggaaatttaagtgaagagagaatgatgatgaagtctgctatgtgtgcattggtgcttgtgggacttgttgggggtgaaatgggggcca

SEQ ID NO: 75196 - DNA, 393 bp, Glycine max
ggggtagagataattaaattgttgtaaatggggcgtgcattacagatgattgcaatctagttttgatccttgctgagaaaagagtgagaatatggtaggaactgaaaattaggatataaaataggaagaccaagcaccttacaaacagaagtagccctctgttaatactaaaatatggaagaaaacaggaagataactatggagattgtgcagcagaacagaatacttcatcagtttagcccacccgagcctttcaacctcactcaattcttacttttacacttttccttccccctctttaccctcatgcccacagttcaggtaccaccactcaacatgtgacaactatctgtgtgtgtacagcctttccacagttcaggtaaaattttaaat

SEQ ID NO: 75197 - DNA, 316 bp, Glycine max
gagacctcaggccaagcggcgcttcccgttgaatctaaacatatcaatgagcggataaaagaaagcaaacatacttgatcaggtccgccgccgttctagaagatacaagcttacttgcgcgcgcaagcgacagaatagtttttctgtagtgtgagcgtaattgaagagactgggcggacgtttacaacggcgggactggcaaaacccggacgttctccaacgttgattggcagcatcacatgccgctttcatgagctggtgttatagagaagagggctgcagcgatagctctttccaacagatgcgcaggctgtat

SEQ ID NO: 75198 - DNA, 420 bp, Glycine max
ggtgcaagagtttgttgtgagctataagctggtggatcgtgaggagaatatgaagttgtttgttttctttgttgctgcagtagttttggtagcatggccatgccatggcgcaggctaccaaaggttccctctccgaatgaaaactggctatggtgagcgttcttcggaggtagaatgcgcaagttttaggcttgctgtggaagcacacaacatccgagcctttaaaaccattcctgaagagtgcgttgaaccaacaaaggactacattaatggcgaacaatttagatcagactctaaaacagttaaccaacaagctttcttttatgctagtgaacgcgaagtccatcacaacgacatatttatattcggcatagataacaccgtactctctaatatcccatactatgaaaaacatggata

SEQ ID NO: 75199 - DNA, 209 bp, Glycine max
ctttaacactttattactaatacaaacagcggtaggacttgaaatcctgctcatgcacccaatggaacatactatgctataacattgcctaatacataaacatcaatgccctaatctcaaagacgaacggtgacggaagaaaaaccaacgtttgtcgattatagtgggaaattgtagaccaatggtgctggtgtcgttacaacacattt

SEQ ID NO: 75200 - DNA, 205 bp, Glycine max
ccaggccgggtgatcgattctatgcctgagcgcaaatgccgtagtattgtgacactttcattgctgctactgctgctgctgatgatgccgagccctgagcttgtccctaaccaagccttagatgaccaaaacgactgggttctccagaggagcaaatgccaaggtacttgcggttaatcgaactcactgataccatttgcaaaat

SEQ ID NO: 75201 - DNA, 324 bp, Glycine max
atctgatcttgtacaaacctgagaaaaacaagcaatggggaaaggattccctatttaataaatggcgctgtgtaactggctagccatatatagaaagctgaaactggatcccttccttacaccttatacaaaaatcaattcaagatggattaaagacttacatgttagacctgaaaccataaaaaccctagaagaaaacctaggcattaccattcaggacatacgcatgggcaaggacttcatgtctaaaacaccaaaagcaatggcaacaaaagccaaaattgacaaatgggatctaattaaactaaagagcttctgcacagc

SEQ ID NO: 75202 - DNA, 215 bp, Glycine max
gttatacataggatggctccagatactctgcgcatgatgatacggaccgacacaattaagcttcgctgtagactagacacagtttatggagacaagcaaaatggtgctagggctgtgctgactgtgtaatggaatttggttctgatcacagatagtgaattccacagctgaactggatacaacctgcgcccttacataatgacttgtctaactta

SEQ ID NO: 75203 - DNA, 417 bp, Glycine max
  unsure (1)..(417): unsure at all n locations
gaaggtgcaagagtttgttgtgagctataagctagtttatcgtgaggagaatatgaagttgtttgttttctttgttgctgcagtagttttggtagcatggccatgccatggcgcangctaccaaaggttccctctccgaatgaaaactggctatggtgagcgttcttcggaggtaaaatgcgcaagttttaggcttgctgtggaagcacacaacatccgagcctttaaaaccattcctgaagagtgcgttgaaccaacaaaggactacattaatggcgaacaatttagatcagactctaaaacagttaaccaacaagctttcttttatgctagtgaacgcgaagtccatcacaacgacatatgtatattcggcatagataacaccgaactctctaatatcccatactatgaaaaaca

SEQ ID NO: 75204 - DNA, 188 bp, Glycine max
  unsure (1)..(188): unsure at all n locations
ggagcaagagtgaagagcgaagagggtggctcccaagggtttaatctttttggctgtgttatgcttctcagcactgtcactgagtcgttgtcttgcggaggataatggacttgttatgaacttctacaaggaatcatgccctcangctgaagacatcatcaaagaacaagtcaagcttgtctacaagc

SEQ ID NO: 75205 - DNA, 422 bp, Glycine max
ggttctagtgtgtgattgtttgttgttgtaactcgttcttcttcttttgttgttctgtgtttgtgtttgttttttctctcacctgaaaatgtcttgctgcggtggtaactgtggttgcggaagctcctgcaagtgcggcaacggctgcggaggctgcaagatgtacccagacttgagctacactgagtcaaccaccaccgagaccttggtcatgggagtggcacctgttaaggctcaatttgagggtgctgaaatgggtgtgcccgctgagaacgatggctgcaaatgtggaccaaactgctcctgcaacccctgcacttgcaagtgaagtgttgggagagcaagcttcgagcagagatagcccttaattaagaataatgataaactattaatgtgtagctaaaaacttatgtattatgtct

SEQ ID NO: 75206 - DNA, 385 bp, Glycine max
  unsure (1)..(385): unsure at all n locations
ggggtacaaaaaatatctgcctttacttgttttggttaggatgaaatgtgaaaatgcatgtgttgatattatttgcttcattgctttagcacttatccaatgggttatggttctggtgaaaagctctgtgattgttcaatgggtttctagaatgaatgttctatggaattatcattcaacccaatgaccagtttagttagtgattctcatttttatggctcttgccctgaagtcaagttgcttcttgcaattgaagaaacctgaagctggtttcaatgtttgtttttcatctaagaaagctataatctccgtgaaacgacacactcccgtggctgctatcangaccatggaaacagtgggactctctgcaacattcaccacgttg

SEQ ID NO: 75207 - DNA, 93 bp, Glycine max
gcgacgaaggagtaagtggtgggatctcaccgtgggtccgattagccttttctctgccttgcttgcttgagcttcagcggaattcgaaatggc

SEQ ID NO: 75208 - DNA, 321 bp, Glycine max
ggatcaagaacgagaacagcaaagtggcgtcaaagagagagagatggaggttattgtgcctagggtggatttgcaaaagctttcatatgaagatgaacgcaagattgtgatacaaacatttgagtaacgattgtgttatagagacatacactacgaaagttcactaacactcttggatgacatgtagatagtggttaaattcttgcatgatgttcacacggtaatgagaatgcatatcataccgttctgtccctaaagtggatatagtgcgtcatcttcaacaaatcctatatacgagggcatggtaatatatgatatgca

SEQ ID NO: 75209 - DNA, 238 bp, Glycine max
ttttacccattcattacgaccacaaaaaaatggcacactccgctctttttttaaaaaaaattgtaataacacacattattatttttatttataacaaaaatgctcttttaaatttaacaaaatggccacttatttaatctaatatataaaaaaaaccgtattttctcccccataataattacactttgtctggtaaccccccacaaaaaaacacccaatactcctcctatttggttta

SEQ ID NO: 75210 - DNA, 87 bp, Glycine max
gtgacagtcagcgtctggcgagaactgcaggtttctcttacagatccacatttccatgccggttcaatgcagccactgcaagtgcta

SEQ ID NO: 75211 - DNA, 422 bp, Glycine max
ggttctagtgtgtgattgtttgttgttgtaactcgctcttcttcttttgttgttctgtgtttgtgtttgttttttctctcacctgaaaatgtcttgctgcggtggtaactgtggttgcggaagctcctgcaagtgcggcaacggctgcggaggctgcaagatgtacccagacttgagctacactgagtcaaccaccaccgagaccttggtcatgggagtggcacctgttaaggctcaatttgagggtgctgaaatgggtgtgcccgctgagaacgatggctgcaaatgtggaccaaactgctcctgcaacccctgcacttgcaagtgaggtgttgggagagcaagcttcaagcagagatagcccttaattaggaataatgataaactattaatgtgtagctaaaaacttatgtattatgtct

SEQ ID NO: 75212 - DNA, 433 bp, Glycine max
gaacgaaacaaagtggacgaatcacaaccaaaaaacaaagaaacagaggcagagatatatgattatgaatttctcaacagaaccctctgcctcacgcttaccattctgatctccacttcttcgctgtgcgacgaagtgaaatttcgttgctgcaaatagtgagaatttgctgtctttggtcagagttgctccgagtgatcgcttcccctggtgcgacgaagtgaaatttcgttgctgcaaatagtgagaatttgctgtctttggtcagagtggctccgagtgatcgcttcccctggtgcgacgaagtgaaatttcgttgctgcaaatagtgagaatttgctgtctttggtcagagtggctcacagtgatcgcttcccctggttccccgtcttctcatatgagttcgtctgtcttaacatctcaaggaatattt

SEQ ID NO: 75213 - DNA, 431 bp, Glycine max
ggaagaatgaggttgtcaatggcagggtttcgaagctcattgcccttttctgcactaatgagacaggttgagcaagagatggaaactgtgatcaaggtgctgcagcctggacccttgggaattatagaacacaagttttccgctgacgaaattcgcaaggctaatgctacggtttctaaagcagtggccaattggcgaaccaatgcaatcctccaagatagcaatcacgttttaaaagattatattcacaacaagtgaagcaaattttagtttcaccccccgaattttgacccaaggttacttcaattttcctttggtttgtgtgtgtgcgcgcctatttgtttaaatgtattatcgttattgagatgtttcagtgttgtaaatgctggttacttgattataaagttgtatagaatgattcaataatatct

SEQ ID NO: 75214 - DNA, 433 bp, Glycine max
ggtgacaaatggagggtccttagttctgtttctctgtcttctctctgttctctcaaccaagttctcaattcaatcttcttcacccttttgatctgctaattctcaaggcacagaaacgattctatgacagatgttgttacttgttattgtttgataaggtattcaaaattgggaggttttcgtttgaattgtgatgtccaagccactgctaggcataggggaggaggaaggtcaaagcaatgtcactttgttggtttcttcctcagtcatcatggaaagtgtgtgcctgaatagctcaaaattgaaagagcgcaactacatggggttatctgattgttcatctgtggacagctccgcgccgtccttctcagatgagactaaaagcaatctgaaccttaaagctactgagctgagactggggcttccgggattg

SEQ ID NO: 75215 - DNA, 257 bp, Glycine max
atttcattattcattaaggggttgcaagcaccaactggaataacactggcttaagtaatggcagtataaatcacatgttggtaaaatgaaagatgcctttctaccaacacgttataatggccacttcatgccaacatggcaatgggttacttaaaccatatatcaatcaacacagaagcgacttaaccaaaatgtttttaccatcatttatagaaaattatgaatttcatgccacccggattaattgcattgctttt

SEQ ID NO: 75216 - DNA, 93 bp, Glycine max
tttcttacctgctacaattctaggaacatgaaaatgccattcgcacgatatgttccctcttctaatgaacactggctatcaaacccgtactcc

SEQ ID NO: 75217 - DNA, 298 bp, Glycine max
ggttctagtgtgtgattgtttgttgttgtaactcgttcttcttcttttgttgttctgtgtttgtgtttgttttttctctcacctgaaaatgtcttgctgcggtggtaactgtggttgcggaagctcctgcaagtgcggcaacggctgcggaggctgcaagatgtacccagacttgagctacactgagtcaaccaccaccgagaccttggtcatgggagtggcacctgttaaggctcaatttgagggtgctgaaatgggtgtgcccgctgagaacgatggctgcaaatgtggaccaaac

SEQ ID NO: 75218 - DNA, 208 bp, Glycine max
  unsure (1)..(208): unsure at all n locations
ggagggtggagagagagagaagtgagagtgtgagagggagcacagtgaagaagagaacgaaggaacgaagatggagactcctncttcgcacaaggcgtggtgaagaagaaggagacagggggccgaaaacccaagccgaaagacaaacacgccaaggcgttgaaggaaggaggaaaaccacagcaacaacaacatgatcaggaacaac

SEQ ID NO: 75219 - DNA, 298 bp, Glycine max
ggttctagtgtgtgattgtttgttgttgtaactcgttcttcttcttttgttgttctgtgtttgtgtttgttttttctctcacctgaaaatgtcttgctgcggtggtaactgtggttgcggaagctcctgcaagtgcggcaacggctgcagaggctgcaagatgtacccagacttgagctacactgagtcaaccaccaccgagaccttggtcatgggagtggtacctgttaaggctcaatttgagggtgctgaaatgggtgtgcccgctgagaacgatggctgcaaatgtggaccaaac

SEQ ID NO: 75220 - DNA, 323 bp, Glycine max
gagcgaaacagagagtgatttcagtgagtgatcggtgttcacttgatctcatcataatcgtcagcgtcaattgaagaagatgccgatcagaaacatcgccgtcggaaggcctgaagaggcgactcaccccgacacgttgaaggcggctttggctgagttcatctcaaccttcatcttcgtgttcgccggctcaggctccggcatcgcctacaacaagctcaccgacaacggcgctgccacccctgccggcctcatctccgcctgcatcgcccatgcattcgccctcttcgtcgccgtctccgtcggcgccaacatctccggcg

SEQ ID NO: 75221 - DNA, 338 bp, Glycine max
gaagaaaacaagggaagccacatggtgtttgaggttgatcagggtttggatagaaaagatgaggaggcagagaagagttgtgattgttctgtgtgtgatgctagtgtggagatactgcgtgatgaaatttgcaagttggatttgggtgtggagaaaggaaaagaaacaattgacgaggaaagtttgaatgtccctaatcctaaggttgatgatggtgatgatgatgttggtggtgctgatgatgatgatcaagcttgcgagaaattcagtgctcaagttgattgcactagagagataactgtggagactttcaccatacatgttgaatttttcattca

SEQ ID NO: 75222 - DNA, 369 bp, Glycine max
  unsure (1)..(369): unsure at all n locations
ggacacaactgcgacttagttcatcccttctcaagccaccgaagcctcactttttgaaattacttgcatagatagataatcatggctatgatgaaacgtgctgcttcctctgcgcttcgctctcttattgcctcatcctccaccttcaccagaaaccttcatgtaagcccaatcaaatgttacaaattaattgcatgtttttttttaaaaacattattattttctcaaactcatgatttttgtgtcaattatattaatttaacttaacatttcttctgggatttggtcctgtgaagtttttggtgtactttctctctcttgcatgctngatccatcatgatcacgggatgccaaagnttctctctcttt

SEQ ID NO: 75223 - DNA, 376 bp, Glycine max
gatggtggtaataataaaggtgaaggtgaagtcagttcaggaaagcctgcggagcaaagcgctaagccagcttcggagcctccgaagcaagactacattcacgttcgagccaggaggggtcaagccactgatagtcacagtcttgcagaacgagtaattttttgtttttattgtacttgagagggttgtgtttggaaaaatgaagtgaaaatgtgatgttattgtgagtttaccttttctgagttaaaggggtaattttgaggttattgatttgtttggattaaagttgttgactgtgattgatttctgattgggatgtttgtggatgctggacaggctcgaaaggaaaagattagtgaaaggatgaaaattcttc

SEQ ID NO: 75224 - DNA, 329 bp, Glycine max
cgggtgacagagggcgagaagttgtcagcgtcaggaagatagcattagcgctatccgcgggtcggatcggtgagactgttgatagcatcatatatgttcagatccgacaggtcctcacacaagctgtgcgcctaggcatgattgttacgactgcactgatactatgtatggcattgatgtgcgtatctggcactggatcttacggtgttggcgatctttctagaagcatctagcccatattcaagctgcgagacatgatggtcttgcacatgagtaaagatcctattatgccactagagattgtcgagcataatgtacatcgacgttag

SEQ ID NO: 75225 - DNA, 398 bp, Glycine max
ggagaacaaaacaagtgtttcgaatagattatcctaagtctttgggaatagtgctgcaatggcttcaagtcaggaggaggtgacccttttgggagctactggaagcccatttgtgtgcagggttcatattgccctcaagttgaagggagttcaatacaaatatgtcgaagaaaatttgaggaacaagagtgaactgcttctcaaatccaacccagttcacaagaaggttccagtgtttattcacaatgagaagcccatagcagagtctcttgtgattgttgaatacattgatgagacatggaagaacaaccccatcttgccttctgatccttaccaaagagccttggctcgttctggtccaaaatcattgatgataagggttttggtgctgcatggaa

SEQ ID NO: 75226 - DNA, 473 bp, Glycine max
acccgtacggaattccgagtcgacctacgcgtacgcgcacgtgcgggtacgcgaggacgacacattggggataagaaaggcacaattatacacattgcctgtgcatattgacacaccaaactgatccacacttaataatctcatagtaaggaatagcgcaccagaagtcactaacctatttactcatacagctcaataaccgtattggagcagggtgaaagtcaaatcatatgcaaccaatgccgatgaacatacatctagacatagatggattgacgcggattatattgactgagccatagggttcatcaactgaggtgcttctttatggaaggccgattattacttggtacaatcatccaatggaagaacacctttttatgagcacttatgcttacaagaaacagcatagatcaatcacaggaagaatatcaccttgcctagcacggttaggcgatctcaaatcacttgaa

SEQ ID NO: 75227 - DNA, 398 bp, Glycine max
  unsure (1)..(398): unsure at all n locations
gatactaaataataataatagatttatgactagacccatgagactcttgctagctatataaatactttcatcttgacatttctaaaaccatagcccactcatatccataaacacaaataagcactggtgaccttggagagaaaaaaaattaagatcaaaatgcctgtgttcatccctaggattgagtacaagactctgggtccgaatacaatcgtcaccgaagatcaaataagggaaatattgagaaaagcagatagtaatggagacggtcgtttgagcaaagaagaacttaagaaagctttcaaagaatttggatccaagatngcccgatggagagcatgtcgtcttctaaagaaagctgacaccaaccacgacggagtactcaccatggaaagaac

SEQ ID NO: 75228 - DNA, 203 bp, Glycine max
gttcctaaaattaaagaaacctttaccccattttaaggagggtccaatttttatttagattaaagattttgaatatctatccggatatatatatattttggttttaattaattattattagaaccttcctttttcttaaaaaaaaaaaaagttaattaaaagatttgatataatcgcgatttccattccaatatatatattcc

SEQ ID NO: 75229 - DNA, 159 bp, Glycine max
gtattgatgaattgctagatacattctctacctgggcgaatttgggctttagtgacataaactgcaatctaagataatctgtctgataatcggtactgtgagtctgcatattcactagatgcaatcatggtatgctggtcatattctctcttatgcata

SEQ ID NO: 75230 - DNA, 414 bp, Glycine max
gattgagtaatagagaatatgataaaatattatgagttttatgttatctcagagacttagacagttagacataatgcatatggtttaatctggttatataatagtatgaatgataatactagtattagtaatatgtataattgaggatactttcctatcctaatatgattatgagattcagttatagtgtaagagaatattcttctctttatattgtcttttactgtattcttctcttgtcagttataactgtcactgtcagacagttacaactgactcctcctatgttagctggtcctgatagtatatatagggttgtaactcagtgacttttgtactttccatataagatcaatgtaagttttgtttctattttctctgtaaatctaatatatagcaatttaaattttattt

SEQ ID NO: 75231 - DNA, 161 bp, Glycine max
tataacacaggatacgctcgctggttcattttgccactctgatataaagctggatcagactctgtagaacagattgttcgtacaaacctgggacaatggcggcacatactaaaacgactattgactagtcaaagcacgggtacagaggaagctgctagtgc

SEQ ID NO: 75232 - DNA, 254 bp, Glycine max
tggggccgacgcggtgcacgttagccgagctgcacgaatccctacatatataacacaccgtttccctgtactgattatttttgccactctgctgcacagctgcttcatactttgtctcgcctattaaatgtccgtcactgcttcactctgcgccactttcagaacaactttcttatcatcgaaacccgtctcgagaagaagctgcttcgtcacggataccaaaattgcgtttaacaagcttcgattcaaacccg

SEQ ID NO: 75233 - DNA, 378 bp, Glycine max
gtagaagaagaagggaagcaataatggagaaatacaagaagcagcatcagcaagtagaagcagtggttggaaatgaaggaaatgacaaggatgcagacattcctaatgacatctctgaagcatgtgatggtaagactgatgatgctgattatgtggagccatcatttgctgttgggaaatctcctgaaaatgtgaatgttgcttctaagaagatatctcctgctggaggcctgggtgagggtactccaaagagtgaaaggtcagaggacaagttttgtgatgatatatttggtgagacgccaacgggagttcggaaatcaggaaaaggagatggtttgctgattgagagggttggcctacatgacaattgggacgatg

SEQ ID NO: 75234 - DNA, 336 bp, Glycine max
gcgagaagacgacggcgagggaggattgcttttcaccatgatgagacaagcaccgtattgtgtggcgcctgtactataatggcccttacagagcttctatatgaagaactggcagatgctggttgaagagctatacgtggctcataaactacatttagaaccggaggcgcctatccgggacttacgaactcgtatttcatgtaccgacattgagtcgcttatgccgatagttaccagtacggactacatccacgcctgtcatctgtgctcgcagctgactctgaaagctatgctttccgttcaatgccataacctggatatccggatgattgccct

SEQ ID NO: 75235 - DNA, 406 bp, Glycine max
ggcacaagtgagtttgttgatcgagataactagaaacagtgtgatgaaaatgaaggtccttgttttcttcgttgctacaattttggtagcatggcaatgccatgcgtacgatatgttccctctccgaatgaacactggctatggtgcccgtactccggaggtgaaatgcgcaagttggaggcttgctgtggaagcacacaacatctttggctttgagaccattcctgaagagtgcgttgaagcaacaaaggaatacattcatggcgaacaatatagatcagactccaaaacagttaaccaacaagcttacttttatgccagagacctcgaagtccattccaaggacacatttgtgttcagtatagatggcaccgtactctctaatattccatactacaaaaaacat

SEQ ID NO: 75236 - DNA, 264 bp, Glycine max
gacgacggatcgcggatacagagaatggtgaagcatgtcgacctggggagtctgacttgtgcacatatggtgcccatgattacttccttgtcgcatatttcttaagatctgatcaagtcatcatggcgccttcttgtacagttgagatgactacctcgttcttgattcatagatagccagcgatcttatcatgaggatctcgtcctggctgctatctgtctgtacaaagtctagcctatccgatctgttcatatttgaaactca

SEQ ID NO: 75237 - DNA, 199 bp, Glycine max
aagacgacagaagggggagaaagcaatgggcattgatagcgaatacgtgatatctgacaaggcctatgcgaaggtgggaatgcttgggaacccgagccatgtctactccggaaaaccaatagcgtaaacggtggccaattctttggcaacggtaaccttgggtccttcgacccagttattcttcaaacccaaccccttc

SEQ ID NO: 75238 - DNA, 411 bp, Glycine max
gagcaagagtgaagagcgaagagaatggctcccaagggtttaatctttttggctgtgttatgcttctcagcactgtcactgagtcgttgtcttgcggaggataatggacttgttatgaacttctacaaggaatcatgccctcaggctgaagacatcatcaaagaacaagtcaagcttctctacaagcgccacaagaacactgctttctcctggctcagaaacatcttccatgactgtgctgttcagagttgtgatgcttcactgttgctggactccacaagaaggagcttgtctgagaaggaaacagatagaagctttgggttgagaaatttcaggtacattgagaccatcaaagaagctttggaaagggaatgcccaggagttgtttcctgtgctgatatcctccgtctc

SEQ ID NO: 75239 - DNA, 370 bp, Glycine max
aatctaagaacaaaaaaattataaaatttgataactttaaccaaaccttttgttcatcttgtacaaaatggatcataaatgcaatttttataattgatactttggaggatgtagtatatcttatttattgttttaaattgcacgttgcaattagcaacatcatgggaaattgcttacgaatatggccacaatgctttgtggagacctcaaaatattgtggtcgcaattgtgattgtggactatagtttaaaaccgctaacaacctgatgttgcttgaaacctataatttccgctaagtgattaatataagagcaacttctataaaatgggtgttgaattggatttgatcattattataacattgaaaaag

SEQ ID NO: 75240 - DNA, 375 bp, Glycine max
tgtcttcagcgcgaagggaagaaaactaaaggtccacttaattcaagtgacaagctttttaaggagatacgcaatctgaactttgaagttgttgtccagattttgttccaaaaagctacttccatggagcaagactactcataaatgacaactactacgcaaacagttggcaaggtgatggactttatgaaacagctgaactcattgccagagatgacctggcacataaatcttgctcccgatgatcaacattcacatggtaggcttcatttcttgcgcaacttgatatgtgacatacgggaggattggcccagagttatgatatatgctgcgagtatattgaataactgatccatgttcacgatcttttgacaa

SEQ ID NO: 75241 - DNA, 303 bp, Glycine max
gcgcgagttggtgtctagatctacatatctagaagcagtgtcaggaaactgaaagtactggctctgtctgttgctcaatgctgtagcatggcaatgccatgcgttactatatatgcgctctccattgaacactgctatactgccagataggccttgaaatgctcaagttgtgcgcttgatgcgtacgaacacaatatcttggggtacgataccatagctgaataatgcattgaagcaactccggagtacattgatgccgaacaatgtctatcagactacggaacacctaagcaacacgcttac

SEQ ID NO: 75242 - DNA, 164 bp, Glycine max
accttttaaaattccttcccacgcgttcgttccacccaattaggacaaatccacaatgcggtcttgtgtcctctttaccaaacattttcctcattttactccttcttcccttcccggctaccctgaactcctcctaccactccttcacaaataatctctacatc

SEQ ID NO: 75243 - DNA, 357 bp, Glycine max
ggagagaaaattgtgagaggagttttcacgtctttgagaaatgggtgcttcgctatcggtctcggaaaaatccatccatgaattcatggtcaaggtatacttgaatctcaacaacagaaaacctcaatttttttattatttcattttttgaagaatgattatagaaatctcttattatattggtcatggttgacacaggatgctaagggcagagacgtgaacctcagcatctacaaagggaaggttcttcttgtagtaaatgtcgcttcaaaatggtatttttacacacaccctttttttctaacccaactttttccatatgcttgctgtaaaaatccaaatcttctttctttttat

SEQ ID NO: 75244 - DNA, 272 bp, Glycine max
tgagagaagattgtgatgaggagagttcacgtggctgagaaatgcgtgcttcgctatcgttctcgcaaacatccatgcatgaattcatggtcaaggcataccctaatctcaacatcagaaagcctcacttagattattatcacaaatggtcaagaatctttgtagaaagctcttaccatatggttcaacaatgactcatcaagcttatggcatagtcaccaacctcatcatctacaacggcctcgggaattttttaattgaacatggtttta

SEQ ID NO: 75245 - DNA, 217 bp, Glycine max
ggggtgggtcgcgagcatcgaatttcaagggttaccggaaggccggattgatagtatactctctcgcactaacccgagcgacgtgcttatgctttgcgtaccatcaaagatcttacgataaggcgtttaatctgacactttgtggaaaccgtttctcacttgtgattaccactgcatcatttgggagagtccttggtctctcaactattcttccaag

SEQ ID NO: 75246 - DNA, 369 bp, Glycine max
ggaagagtgaagagaatggctcccaagggtttaacctttctggctgtgttaatatgcgtttcaacactgtcactgagtccttctgttgcgggggaagggcaaaataatggccttgttatgaacttctacaaggaatcatgccctcaagcttgagacatcatcacagaacaagtcaagcttctctacaagcgccacaagaacactgctttctcctggctcaggaacatcttccatgactgtgctgttcagagttgtgatgcttcactgttgctggactccacaagaaggagcttgtctgagaaggaaacagatagaagcttgggttgagaaatttaggtacattgagaccatcaaagaagctttggaaag

SEQ ID NO: 75247 - DNA, 225 bp, Glycine max
gggacacagagaggggaactctgtatttcacctctttccgcgctttttgacagtgctcttccttttaccacattagggggagcacgggttgaaaattaaagggcttgttatattttttgagacacggaaagaaattgtttcttgtcaagatgctttcacaaatgggtgctttcattccaagaaaaactttatcgccgggtcttcatactcggagagtatcttctg

SEQ ID NO: 75248 - DNA, 286 bp, Glycine max
agaagacgacagaagggggaggtaggagtaatttaagagagagaaagagagagtgggagagggagacccatccacttttttcattttcacacctttacacaacacaacataacacaaaagcgctctctctaatatctaaagacaggattttcaacacactcaccttttaaagcgcgtgcccctcaaacatgaacatcatcgtcttctttctaagacccggttcaaaatcttcggagaagagtactaaggctgatcactggatccttcaaaattggaatgatttgat

SEQ ID NO: 75249 - DNA, 179 bp, Glycine max
ggagttgaaacatataactgtgggggggtcattgggtgttgccactcttctctcttgttgtacacttgttccttttggttttgagaaagggacatggaagctgggtgtgctttttctgttggctcacttctcataccaacagcgcatgaaacatcaaactcctttaggaaatccatatt

SEQ ID NO: 75250 - DNA, 115 bp, Glycine max
cttccaacatattcctcaccaaagacaacaacgttcggcttggtgacttacgtcttgcaaagctacttaatgcattagaccttgctttctcgcatggtgtaacccaaaattacat

SEQ ID NO: 75251 - DNA, 388 bp, Glycine max
ggaagagagtgatgtagtgagtagtgagtgtaaacaaggtttggtctttgctgctgatgttcatcactgcaaggtttccgcatttgggtttctctccgattgaaaaaagtaggtggctttacactaaatttgtctgctttcacttctcaccaatctgatgcattcttggattttttttttctattttaagtttgcttctcctaatgtgtatgagtggtttcggagttcactgtataggaatgtgtaatgggtttttatgaaagaaatcttttctttttttgggtaaataatcagagacccttttcaagcttttgctagattgctcgatcagattttgttctgggtaataaccagatcatgtgtaagttgatctcactggtgaattttg

SEQ ID NO: 75252 - DNA, 406 bp, Glycine max
ggaggaagatgggtttcaattggtgacggggaagaagaagaaaggggggaaagggaatgtgactccggcagcgacgggttctgaggtggcggcagtggcgccaccgggagttacggtggcaactaaggataagaagacgatggggccgaagtcgaaggttccgtttcatataccaacgattaggaggccgcaggatgagtataatatagtggttaataatgcaaacatgccgtttgagcatgtttggttgcagaggagtgatgatgggttgagcttcattcatccactggaaaagctatctgttttgaattttgctgatacaaatcttggggatgttgtgcctgtgaagcctccctcgatagaaagcaccccttttaagctcgttgaggaagtcaaagatttaaag

SEQ ID NO: 75253 - DNA, 380 bp, Glycine max
ggagtgagcaagagtgaagagcgaagagaatggctcccaagggtttaatctttttggctgtgttatgcttctcagcactgtcactgagtcgttgtcttgcggaggataatggacttgttatgaacttctacaaggaatcatgccctcaggctgaagacatcatcaaagaacaagtcaagcttctctacaagcgccacaagaacactgctttctcctggctcagaaacatcttccatgactgtgctgttcagagttgtgatgcttcactgttgctggactccacaagaaggagcttgtctgagaaggaaacagatagaagctttgggttgagaaatttcaggtacattgagaccatcaaagaagctttggaaagggaatgc

SEQ ID NO: 75254 - DNA, 53 bp, Glycine max
  unsure (1)..(53): unsure at all n locations
gagacctcaagtcaggcggggctacccgctgagtgtgagcnaaaaaaaagaaa

SEQ ID NO: 75255 - DNA, 261 bp, Glycine max
ttccacgcttgacccacgcttgccagaagacgacaagaagacttcagatagagagcatgaactcgcacatatgggggactcatgagaaactaccaggtgttcttacatacaatcactaaaactctctcaagagtgaccaaagtataaccacacatactaacattaacactaagtaacaaggatcagtcaacgattctacctttactcttgcctgctactcatactctctaacctaattcttgattccaatggagcccattc

SEQ ID NO: 75256 - DNA, 415 bp, Glycine max
ggagaacaaaacaagtgtttcgaatagattatcctaagtctttgggaatagtgctgcaatggcttcaagtcaggaggaggtgacccttttgggagctactggaagcccatttgtgtgcagggttcatattgccctcaagttgaagggagttcaatacaaatatgtcgaagaaaatttgaggaacaagagtgaactgcttctcaaatccaacccagttcacaagaaggttccagtgtttattcacaatgagaagcccatagcagagtctcttgtgattgttgaatacattgatgagacatggaagaacaaccccatcttgccttctgatccttaccaaagagccttggctcgtttctggtccaaattcattgatgataaggtttttggtgctgcatggaaatcccgtttcacagct

SEQ ID NO: 75257 - DNA, 285 bp, Glycine max
gaaggaataatgattcaacaaggagtaggaagggagccggccatgatgcaacatgcacatttcacacatgccaaacagaactctatgatgtctttaaattcctttacttcaggagcagaaagttgttatgcgaatagcattccacgtgctgacaatgggagatcaaatgggaagttactacatactcatagcatactaagtgcgagccacaatgatctggatcatttctgtcaagctacgtatatggaatattctcatttccttggaccagttgactactcatct

SEQ ID NO: 75258 - DNA, 326 bp, Glycine max
gtccttagaggtgactgaaacagctcaagactgaggaggtaattcagagaaacgactcttctgctttgatctcaacgaagatggtgctgatgatatggctgtttatgtaaaagctacgtctaccccaataccagttgtctctgcttcaaggcctgagccaacttctgggttgcctgtggcccctttgcaggttgagggaacacttgcatggtacgggtcagacggcaccagtgccttccgacctgcatagtcttgtcacaatcgagataacgacaagaatctttctgctgacacgaactctgatgcttccaagcagaggcaggatt

SEQ ID NO: 75259 - DNA, 120 bp, Glycine max
gaagcgaaaagtgaagagaatggctcccaagggtttaacctttctggcttgggtaatatggcgttcagcactggcactgagtcctttctgtgcggggaaagggcaaaataatggccttgt

SEQ ID NO: 75260 - DNA, 419 bp, Glycine max
agaagggcattgaaagatgtgttaaggaatcccaacgagaggtcgacctaggagtttatttgaatcggttagtaatatttattatatccctgtaaacaatgtttgtgttattgatacctaattattgtcgaattcagggcccgttggcaactggttgttttgtgtcctacaaacaatgttgtcgtgtggttttgttcgttgtgtaagaagcctgatgttcatatcaaacctgcaattaataagttaagttttatattataagtcatttaatgtattttaaatatggatacatgaatagttttgtcctcatttatacgtccaaatctttctattcagtgcgttgaagacattaaagactacttctaacggtaagattgatcaacctacaccttagtggattgaagtaatgggtagtcata

SEQ ID NO: 75261 - DNA, 134 bp, Glycine max
gactgaaaatttgaagaaaacactaatctaaatcctgatactgaatcaataacacactggttcaatactaccattctctaacgctatcattatcaacacatctgctcaatacactacttgcatatgatgattac

SEQ ID NO: 75262 - DNA, 102 bp, Glycine max
aaccacacaaacggaataaagacaacttaatgagacagaaatgccgggtagggtccaaatattgcatgcgattctgccaaaaatccattcaactctcatatt

SEQ ID NO: 75263 - DNA, 350 bp, Glycine max
tgcatgcgacacaccacacacattccactttacagggggagtgtaccaaaatcacactggctccctctgtcaacgggttcactattcttcctctctctatatctctctctggacacacacatacttgctggcaaaccattcttcttgtgaaggagtagtgatagcggactaatcttttactgaataacgatacaacagcatgccatgctgactgactaactctactcacgcatacccgacacataaatccctgaatctgtattgcatacgcacactgtgactcttaaactcgtcatgatcataaaaccttctacaatcattttactcatttctttcctggcttgaatcaa

SEQ ID NO: 75264 - DNA, 391 bp, Glycine max
ggtcatgtgggtaatgaaatctatgggaagtttgtgtcagatgtgcttcgtgatgagggcattggtttggttgggatgattactaatgacgatatcgtcaacagctctagtggtagtgcctcttgtgaaacgcttttatgttgggttcttgttgatcctttacaaagacatggtttttgcagtcgggctgatttttgcgaggagcctatattgcattggatgagtaaattgtccagtgaagttaaaatggctattaaaaattcaaaggtcttgttctgtaatggatatggatttgatgagctctctcctggtgcactactctcagcaatggaatatgctgttgaagttggcacatcaatcttctttgatcctggaccacgtggaaagagtc

SEQ ID NO: 75265 - DNA, 135 bp, Glycine max
gaatttccagttcgacccacgcgtacgcccactcacacgttccactacacgacgacttctgaactatgtcaagagatgtgaaaacctgggtcgggtatattgcctacctgtgataacacatggcctattctaggc

SEQ ID NO: 75266 - DNA, 278 bp, Glycine max
aaactgcatactgtgaataatccaacctgggaaggcatattgacccacaatatgtcaaaactacaaagtctttactgtggaccaatcatatcttacatgatgaatgtaaaagtacaggccctataccttaaggtgaacgatgaactgttgctggtccagcatataatggatcgctaggtgcaacagatttatagacagacggatcgatctcaagacatcttaccattctcagctgtagaagtcatctcaacatattgttccttgttaggataactcat

SEQ ID NO: 75267 - DNA, 320 bp, Glycine max
cgccaacggagggggaataccggacgatcatctcatgactatgctgatgggtacactacgtacggtaccgctggacactacactactcttgcaacgacttatttggatatggatgctacacatatgtcacataaggcgaagcattcactgatgctctccggtctacagtgacaagcatcccatgttcctatcattgcagcttgaaaacacgtcattactactatagcgggcccatgaatgcacttgactctgcactcgtcagatatatcgctaccagctgcgatcgagctgttaatgccaactagacgttttatgatgaa

SEQ ID NO: 75268 - DNA, 368 bp, Glycine max
agacgtacgcgcgggtgcggcagcacgacgacaacagatggggtctcacggacgtggcattccatgaaggggcatgtgcttcactgggacttcacggcagactctgaagccatggttgcatctgacgcattgcacgccttacgtctcgccatgaccccgtcagtgccggaaagaaatccggcgatgtctgacggaccgatgtccatgtacttgccggcgcccagacttatagtgagaccgtcggccacaattgttcactcaatgcaacgtttgatgaagctgatgctgcaagctatgatgggttgtgggtgccaggtggcagggctccacagtatcttgctcatgttcctggtgttgtggaactggtg

SEQ ID NO: 75269 - DNA, 388 bp, Glycine max
ggagaaagcaatgggcattgatagtgaatgcgtgagtatctcacaaggcctatgctagggtgggatcgcttgggaacccgagctatttctactaccgcatagctatctgctacaagcgtaaccctacttcttaagccaccgtcacgcttttttcctccgaccagctaagtctcttacaccacttaattctctatcctcatcatctctaatatctccttcatttgttatacattcctagcttggacaactactttagcttctatcgttactatataggcattcgatatgcttatggctattttcaatgtattttactcctttttgcacatataacgccatctatcttttcgacgacaatttcactctcttcttactagcctattttcct

SEQ ID NO: 75270 - DNA, 243 bp, Glycine max
ccgctccggaattcccgtctcgacccacgcgtgcactgctacaagacgacagcaggggactgtaaaccatttattacaatgcacatcaatttcattgtcttgttatatgagcaaaaatccatcttcaggtggatcaccaggaagcatttacctatatgtgcgatcaaatgctatatctgcatattgatcagaatgatctggatccctatcttctagttcatataggatctggtgatctcatga

SEQ ID NO: 75271 - DNA, 310 bp, Glycine max
ggtcctgtcagaagattgagatcttagtgagtgagggaggaagcattgacagtaggtggaacttaaggaccagaatcctactgatcatcgagtattcacgatatcatggactagcctggaatctcaagcaatgcaccatagaacacgacaaaccttactgtatacgcattctatacagatgcacatacatgctttcatgatagcttccatagctaaagatatacttgtgattgcatctccatctacactgactgcagctgctgacccaattgcttctcttatagacacagcattcatacgtcatttgcat

SEQ ID NO: 75272 - DNA, 441 bp, Glycine max
gatgttattcaattggaaaatcatgttagcaatgggtttgggttcttatcaaacaaaaagccagaaaattgtgaaagaggagttatatcagcaaatcttaagaatttcacagaaaatgcacacaaagatgtgtcagagaagttcaaagctgaggagttaatagaacaacctgtggaaccagttgtttgcaattttctttccgatgatgattttatttgttcaagttctgactcagattctattagcagttctttggaggaggggtttttgtcagacacagactttggaaccactactgagtatgacacattgggaagaaatgcagcataagaggatttggactttggggatgagaaaagctatgagaatttggatgttggatatgagcctgatgattttactgaaggggatgaagatataatggatgagtttggaaaattg

SEQ ID NO: 75273 - DNA, 255 bp, Glycine max
ggcacaagtgagtttgttgatcgagatagctaggggcagtgagatgaaaatgaaggtccttgttgtcttcgatgctacaattttggtagcatggcaatgccatgcgtacgatctgtcccctatgcgaatgaacactggctatggtgcccgtactccggaggcgaaatgcgcaagttggaggcttgctgtggaagcacacagcatctatggctttgagaccatacctgaagagtgcgttgaagcaactgaggaata

SEQ ID NO: 75274 - DNA, 372 bp, Glycine max
accggacttgaatttcggggtagacgtacgcgcgcgtgcaagcgtacgaccggatgcgagaagacaacggactgatcaccacagttaatgggggctgatagcctctgcgtggcgttggatgctaacagagcaggagcctaaaacctttgtgacgagaatcttagccatgggtagcaacggaatactggtacgaattatcacaaaccggtcacatcaaattcattcttgacttcgatagacacccatccttcgacgcctacggattatagaccggtcgcatctgcattctatacgacgtcattccgatcagcgaccgccgtacctatcgtacagtctcacatccctgatcttccccagttactgatagctgtc

SEQ ID NO: 75275 - DNA, 328 bp, Glycine max
tcttaagggggaatacagattgtatatcagaagtaaaattatccacctttttgagagtattcgtctctaatctaaatcgacttgctatcgaatatgtggattcaaaaacaagtcgagtttttgttactttcttttttgtataaaaattgatttaatgtaatcatttcattatatatatctattataattatataattgattcaattttttatttttctttttttctaatatttttaaattcccatttttctactttacaaattctaaatacagagtttaaaatacattgataaaataccgagttaattttcattgacgtctttacttt

SEQ ID NO: 75276 - DNA, 186 bp, Glycine max
aactgaagaccttcaggtttgttttttaaacatcgatggttttctcacaatcacaaatctagtctccaaatttggttatttcataggtgtgtactgttaactttcctgtttctttcatattcaatctcaattctagtttatctttaatctcttactcgtatacatacttttatgtatacttcttat

SEQ ID NO: 75277 - DNA, 371 bp, Glycine max
gggaccctaaggcaacatgattttcgggaaggggcctctcgtcctccagctggatcgtccgcaccaggagtgtctaaatattcttcttgacttacgaagtggatctaaaaggtcactaagctgatcctactaaacatgtccttgctctaaaatcatgggatattacttcaactagaccacatttgcttctagccgatgggagtgatccctgctcacgcttatacgatagaatgatgctgccgactgttacctcatgttggacaagtatgtctccacctccttgtgtcaattattactgacgaatgcatatctctgatcatggacatacaagcttgcacttaactcatgtgacatacagtactgatggacac

SEQ ID NO: 75278 - DNA, 441 bp, Glycine max
gcaagtgatgaagtgatatctcgtagcatcaccggccttaagctttatatggtggccccatttctggcatcattgaaatcgtggatttcaatacaccaccctgcaatggctccaaggcccgatttgcctcttaaaggtaactcctatttccccccaaacactggtcggttttaaatgcctgaggtcatagggtgtagtttagttactcgatgcttggctgtgttgggatgagttaatctccagcagctagttcaatctgttgcactacattatgtgcatcgcagccttgcaggacctaatctcgaccactgaggtaccgttgacttgagaggctgaggcattagaattgagatgtgttagtattgaattgtaagctacgatattgtgcagatttctttgcttggaaagcttttcaatgcaccatttgtcaagggattcaaa

SEQ ID NO: 75279 - DNA, 235 bp, Glycine max
ctggaggggctggcgtttgcacacccggtggctcgtctctaatacgcgatctctccatatcatgcacttattacgtttgaccgccttttgttcccagtacacggacaggagagactcaatgtcgctgatcatctacttctgcttgtacgctaatacagacattgaactacaggatatacctctacgatcgttggcattggcacttcggaggaccattgactccaaaggactgtag

SEQ ID NO: 75280 - DNA, 279 bp, Glycine max
agcagggactggctattcagcactatcagcctcatcaataatatgtgatattcgcatatcatgcacaacttacgattgagccactattattccaaggacacgctacaggtgcgacttcacgtgcatgttcaactactactgaatggcctatgctacagacacttatctgcatggaatacctaccacattgcatgcgatacgcacttgggaggagaattgacttctaatgcatgtcgtatatgctgattcacaaggactaatgaacgaacttcctcaaaa

SEQ ID NO: 75281 - DNA, 332 bp, Glycine max
  unsure (1)..(332): unsure at all n locations
acgcgcgggtgcacgcggacgaccggctgcgatacgacatcagcatggaggagttctaatcanagtntggtctgcaatcggacctcgctatacttcgcacctgactgactgctacggcaccggaaaaccggagatcaactgcttaagcatcatcgttatgggcaccgatttcatgctcactcagctatctcacgaactcaacgaccaacatttgcaactcacgcagagcatgccactgtccaagccacatgaccggagcttatgagagtaggctagagcgattttcacggttgaatggccagggcagactgtaaacaggcctgtgagaattt

SEQ ID NO: 75282 - DNA, 158 bp, Glycine max
tgttccaaagcgaaacagagatccaaactcagtggttcatctctatgagctcaacttgcacttcagcttcacgagcctattacatcgacaattgctgctccactcaactcatcgactgcgacagctaattcaaactctgcaccctctacaactttttc

SEQ ID NO: 75283 - DNA, 346 bp, Glycine max
tgggacacagatgaacgagtacagaaagaaggagaaggacacgcatcgcacaggtgtgaaccttctcaaactctctttcgtcaaaacgcgtccatgggatccatcaacgcacgcccaacatttactctttgagagttcacgttggtggatcttatgtcagtcctcagaggaccttcagggattatcacatgggtctgtcaaaagctcgccgctctgtttactaagcaactgcattgacgaactgtgtgatggtgatagcggcgattgagaacaagggttgctacatacgactatggctaaggctcgcgatggcatatctgcgcatggtagctgtcatggtcatgta

SEQ ID NO: 75284 - DNA, 430 bp, Glycine max
ggcacaagttagtttgttgatcgagataactagagacagggtgatgaaaatgaaggtccttgttttcttcgttgctacaattttggtagcatggcaatgccatgcgtacgatatgttccctctccgaatgaacactggctatggtgcccgtactccggaggtgaaatgcgcaagttggaggcttgctgtggaagcacacaacatctttggctttgagaccattcctgaagagtgcgttgaagcaacaaaggaatacatccatggcgaacaatatagatcagactccaaaacagttaaccaacaagcttacttttatgccagagacctcgaagtccattccaaggacacatttgtgttcaatatagatggcaccgtactctctaatattccatactacaaaaaacatggttattgggtggagaaatttaac

SEQ ID NO: 75285 - DNA, 252 bp, Glycine max
gggtaagtataaactcctatttggctctacttataaaggtctaagggataattaatctgcttagtctgatacatgttttgacacccaaactctgtttagatcatatacattaggagaataaattaatgtcgtctacagagaaaaaataattttggaatcaactcccattatgagagtgtagagccccatttccagatattacttacattgtgtggtctttcaaagcattacaaagttgttgcaccacacttt

SEQ ID NO: 75286 - DNA, 235 bp, Glycine max
attacttgctttatcaggagaactctatatcctaacagaagcagaagcttaaactaatatgtgtggttccattttcactcacttcctcattctcccctcctctactactccttctctttccactctctttccatccaaatttcccaccaaacccatcaatgaatcttttccctttacccttaccttgcaaccaaatttccttccaaactcactatttcacgatcttcccaattct

SEQ ID NO: 75287 - DNA, 369 bp, Glycine max
gagcgaccatggtggcccgggtgtggtcgctgatgaggttcctcatcaagggaagtgtggctgggggcgccgtctacctggtgtacgaccaggagctgctggggcccagcgacaagagccaggcagccctacagaaggctggggaggtggtcccccccgccatgtaccagttcagccagtacgtgtgtcagcagacaggcctgcagataccccagctcccagcccctccaaagatttactttcccatccgtgactcctggaatgcaggcatcatgacggtgatgtcagctctgtcggtggccccctccaaggcccgcgagtactccaaggaaggctgggagtatgtgaaggcgcgcaccaagtagcgag

SEQ ID NO: 75288 - DNA, 483 bp, Glycine max
  unsure (1)..(483): unsure at all n locations
cggttctcggaattcccgggtgcgactccacgtcgtctccgtacggcttttgcgagaagtacgtacagtaaggtgtggcaccaagnttgagtttgttggggatcgagataacgtgagaaacccagtgtgatngtaaaatgaagggtccttgggttttcttcgttggctaccaannntttggtagcatnnggcaatgccanntgcgtacgaatatgttcccttcttcctgaatgaaccactggcttanntggtgcccgtacttccggnnaggtgaaattgcgcaagttggagtgctttgctgttnggaagcacacatacatctttaggctttttgagaccnnnattcctgaagaaagtgcgtnntgaagcaaccaaagggaataccatttccatggcnngaacaatatnnagatcagacttccataaacatgtnntaaccaacctaagcttaaacttttatgctcagaagaacctttcgaagtc

SEQ ID NO: 75289 - DNA, 128 bp, Glycine max
acgggatccgggggacgtgcttcatgctaaatgcaaagaccatgatccgctgcccttgaaatagatccaggctcattcgcacatgaaaaaaaactgctaggcagaagctaatgtaacgacacctaaag

SEQ ID NO: 75290 - DNA, 154 bp, Glycine max
agagtatcggggttcaacgattcctgctgcatggtctccgcgtacttggcttgcgtaaaaattggttcaacctttctatcacatgaaaagatctcagtctacaacttccaatcttacggctcacaaaggtgattctacgaacccatgaaccgtc

SEQ ID NO: 75291 - DNA, 221 bp, Glycine max
aagcttcagaatccaccgaagggtcatcataaggctaataatcatgtttttcagggtggtgctctgtgctttaattctttcttcttctttcgattgtaccattttctatattgctttctgttcttctctatttttggcttttatctttcttcccctaactatggatgcatgatcctttagttcttccggaacccttaaaacacgatcactggaccctcttt

SEQ ID NO: 75292 - DNA, 370 bp, Glycine max
aggcgttcgaagacgactgcaggcggagtcaatatggcatctgagaagtcagatcaaactttagtgacacagatgccatgcggaacgctagaagttggtctgatcagggctaaaggaatgaatgtcatggatatgatgtgtaagcactatactctatatgcatagctgacgtgaatgtcagatgctgcgtatgtcactgatcctgtttcatcaactttgagacgcatcgaaagtgctctgacttcacgatggactgatctagactagatctttcgcgattgaaatctgaggcaattagctcctgtatatgcagattggacatcataaagtacacctgatgctggtttgatctcgttatgtgctgaaagga

SEQ ID NO: 75293 - DNA, 307 bp, Glycine max
ttatgggggatagtgagagtgagtgattggcgaaaccggctcacaattttggcatgaaattttgaaaagcacacagcacacagcacactttcaagtttcacccttaagcgcgccctctcatcaaactccaatttacattcatttcgagattccctcctttctttctctctatattctaattctaattccaatcacacccagattctattccctcccttacaattctagggtttctctctccgatagggttcccaatttctctcccttttaccaccaaaaacatggccaccgacactctagacgacac

SEQ ID NO: 75294 - DNA, 289 bp, Glycine max
acgcgttcgtttacaattttacttacatagcaagagtgaattagtagcgaatcgcgtaccaaaattggcatagggtatactaaaagcacacatcacacaatacactttcaaattatacccttaagcgcgccctcttattaaactacaattatcactcatttccagaatcccttattactttatatctctattctaattctaattccaatcacaaccataatctatttccttcctttcaaatctacagtttcatatacccaatagggttccaaatttttttttccttttc

SEQ ID NO: 75295 - DNA, 118 bp, Glycine max
ctaggaaaggggtccctatgtactggcgccagaacctcgttttggtaaaggaccagatgtcccttaagatccggaatctgctatacctacacacaagccgtcacatttagatgatacg

SEQ ID NO: 75296 - DNA, 213 bp, Glycine max
gatttcattttgtctaataatctgttttttcagggttttgctttgtgctttaattttttcttcttctttcgtttgtaccattttctatattgctttctgttcttctctatttttggttttttctttcttcctctaactatggatgcaggatctttgagttcttccttaaccctcacttcacgattcactgtctcctttcaagagctatttatt

SEQ ID NO: 75297 - DNA, 237 bp, Glycine max
ccacgcgtccgatgacgcgttattacgggtgggaggagacaacttcatgcggaggcgggacggacccttggtagaatgtagtataggtcgaacatggaccgtagcagcaatggcgggctttcatgatgcttaatcatttgtgaacctggagatgatgatcaagatgtcctaagcgaccagttagcttcgctaactatctacaacccaatgagctagatgttggataataggaatgct

SEQ ID NO: 75298 - DNA, 145 bp, Glycine max
ggtggcacataaatacaatacaaaacaaaacagagcaaaaagagaatgggggaaaaggggaaccaaaaaccgaacaacaatggcgacacttaaggttcctcagcctcttccccccggtgcaaaatgattggggcagcttcgaaaa

SEQ ID NO: 75299 - DNA, 72 bp, Glycine max
gccgaagcaggcacgcaggttgtccccgtttccccttccccttcccttctccggttgccttcccgggcccct

SEQ ID NO: 75300 - DNA, 348 bp, Glycine max
gggcgcgagttgaaaaccctagtgagttccaatgatctccactcccttaaccccatgcaacacaccatgtgcgtctcgcaatctcctccaattcaattggtttgtgtgttcgttaattgattgaaatgtgtttcagattgggaaggttgcaggatagcaatgcggtgttgtcgcatttcaacgacttctctcagcactgctttgctgagatttccggcgacatcgctagaaacacgcgtgttttgaggtctgtcaagtccgaccttgattatatctttcagaagctcaggtattcttttttaggagggtagtttgtcctgaaaactgcatatttgttgagatgttttt

SEQ ID NO: 75301 - DNA, 351 bp, Glycine max
accgaaccaaggacccaacttctctgtactcttatccctttatcctctgtcactgcttatcacctatcttgcgtatatctggatctccattcctacattctcgtccaaatcatgaaatgtttggccttaatcatgtctatccgaacataactccgagcacccatgtccacagggaagcagctgggatcttgcaaacctggtctctagaatttcaaacctggcttcttacacgtggttgcctgacactaatgtagtggcgacaggatagagctgaaggactattcaaattacgaaataagtcaaggcgggctttgaaaatgggacccatatactacaagcaaaaagcatgct

SEQ ID NO: 75302 - DNA, 90 bp, Glycine max
atgggaaatgtctaaaaactagacgcgttacttatcaccagtcaaatcccaaaactatccaacctattacaatcaaactcacggcctcaa

SEQ ID NO: 75303 - DNA, 387 bp, Glycine max
  unsure (1)..(387): unsure at all n locations
gaaggtgcaagagtttgttgtgagctataagctagtttatcgtgaggagaatatgaagttgtttgttttctttgttgctgcagtagttttggtagcatggccatgccatggcgcaggctaccaaaggttccctctccgaatgaaaactggctatggtgagcgttcttcggaggtaaaatgcgcaagttttaggcttgctgtggaagcacacaacatccgagcctttaaaaccattcctgaagagtgcgttgaaccaacaaaggactacattaatggcgaacaatttagatcagactctaaaacagttaaccaacaagctntcttttatgttagtgaacgcgaagtccatcacaacgacatatttatattcggcatagataacaccgt

SEQ ID NO: 75304 - DNA, 419 bp, Glycine max
  unsure (1)..(419): unsure at all n locations
ttgagcgaagagtgaagagaatggctcccaagggtttaacctttctggctgtgttaatatgcgtttcagcactgtcactgagtccttctgttgcgggggaagggcaaaataatggccttgttatgaacttctacaaggaatcatgccctcaggctgaagacatcatcacagaacaagtcaagcttctctacaagcgccacaagaacactgctttctcctggctcaggaacatcttccatgactgtgctgttcagagttgtgatgcttcactgttgctggactccacaagaaggagcttgtctgagaaggaaacagatagaagctttgggttgagaaatttcaggtacattgagaccatcaaagaagctttggaaagagaatgctctggagttgnttcatgtgctgatatcctcgttctc

SEQ ID NO: 75305 - DNA, 67 bp, Glycine max
accacagaagtccccgcctacgttgcggacccccaggagaccctttcgtcaagccggatcaaggcct

SEQ ID NO: 75306 - DNA, 400 bp, Glycine max
  unsure (1)..(400): unsure at all n locations
gaagcaagcaacgtgaagaaaacagcaaacatggcaaataacatggttacgatggtattcctcatattgatgttgatttcatcaatcactccaacagaaattgatgcaaggaatcaagacctcgttgcagccactaaggagatgcaaaaggcaaattactttacatttgtaatgctcatcaacatgtctccacttgacacaattgagggaaatgtgacattcttgatgcccaatgatcgaatgctggctaacatggtcttacaagaagggtccatttcaagcttcttacttaggcattcaatcccatcaccaatgctctntgatgtcttggaacaattccncacagggacaaccattcccacatcactgccaaattgcatgctaagagtctncaacaatg

SEQ ID NO: 75307 - DNA, 106 bp, Glycine max
ctcacacgttcgaacaccacagtattgacaccataccgcggatatgatacagggaccgggtccaatactctggctgcgatcctcatccttacaccgacgctgattt

SEQ ID NO: 75308 - DNA, 193 bp, Glycine max
cacaaatccccgctacgttgcgacccccttgaccctccgataaacccatcattctccatttccaacttccaccccatttcagtgacttggtaattcattaaggggttttaatcagcaactctaataacacttgcttatataatagcaacataaatcacattttggtaaaatgaaaaatgcctttctaccaaca

SEQ ID NO: 75309 - DNA, 315 bp, Glycine max
  unsure (1)..(315): unsure at all n locations
gaaaggatgcgagaataagaatagctttatagttagacacacttcgtcttgttgctgagacaagagtcataatcttggctgtaacaggttgaacactgcatagcaaattctgaatggaaatgtgtggagccacagctctgacatggtctcacaccatctgtccatcgcttcaccttcctcgatccgtctctccattcattccattttactagaccagggaggctaggangagcttcaggtgttggtgtgtctctgatcaagactccagggganattaaatgatcatatctgtaacttgaacaacaaggtttaatg

SEQ ID NO: 75310 - DNA, 338 bp, Glycine max
gtatggagaaattaaagagttcccattaccatcaggaggagttgtgataagcggaacaacactgttgactggctaaactatgatggtataattgtgagctctcttgaagccaagagtgccttttcttgctttttgcagggacctttcaagtctatccctcttatatggattgggcatgaaaatgctcttgcttatcgatcaagacaatatactactaatgggcagattgaacttttgaatgaaaagggaatagttttcaatcggtcaacagctgttgtctttccaaactatgccttgccgatgatttactccacatttgatgcttgaaattttaatgt

SEQ ID NO: 75311 - DNA, 369 bp, Glycine max
ggtacgcaagcactctactgatgccctgcactcgtcacttctcattctctctcttaatatcttcctttctctttctctttctagtttttctctttcactctctttctttcggttttctctgcctttgaaatttgccagcgacgaaccttcggaaccttggaagaattaaacgagtcaaacatgtcgcccaacaacgtggaatctgggacaacggatgatacagaagtagtaggacaacaacaacgtcatagtccaatacatgatattgccttgcagataccgacacaggctccggtggaaacccatgggctataccaaacaaatgatgttcatacgcgttcgatgggcatggccgcgatatgacgcgat

SEQ ID NO: 75312 - DNA, 104 bp, Glycine max
ggaggagaaagcaatgggcattgatagtgaatacgtgatatctcacaaggcctatgcgaaggtgggattgcttgggaacccgagcgatgtctactacggcaaaa

SEQ ID NO: 75313 - DNA, 336 bp, Glycine max
  unsure (1)..(336): unsure at all n locations
gggcaaggaagagttttaagaactttgaatacctgtgctacctttccccctgccaacgaattntgttactgttcaccagaacttgttggacataaacttgtaccgaattccaagttatggttcatcatcatgttgagctctgatcattcccatccagcttccacaaagaacagaaagaaacactttgtcccttccaccatagtccaacacttctattgtcatcttccactttcatctcccagttactttcatacttcctcagcaaagctctacctccatctattgcatcttctccaaatacttcctccacaaaccctgcttctttcattctctcac

SEQ ID NO: 75314 - DNA, 475 bp, Glycine max
  unsure (1)..(475): unsure at all n locations
gtactcgcgtccggaattctccgggatcgatcccacgccgtgccgtacctggcgagtaagaccgacagtaaggtggataccttaacatggtgtgagcgtcaagaaaagggcgtctaggggaaaagagcaccaccatcagttcagttggttaccatgttccgtaagtattgagtagttacctcgcagttagtaatcctatggctttaatagcnnatttccctcttctcttcaaacgccaaaactctcggttttaaaattatcgtcactttgtttgnngcggttcagctatctgaaaccgggccgaaagggggtgggcccattcccagaaaagcgaagnnccggatanntggatcccnnncagcagcngtcccgtgtagatgtcaggactccgggtcaaaccgttaaacgngctccnnngtcacgccgctttggcttcttctttcgcnncgacggccccgtctaattttgtggtctg

SEQ ID NO: 75315 - DNA, 326 bp, Glycine max
ggaggaggagcaagagatgtttcgttaaggtcatgggatggtggtagctgcaagttgaacttttctgtggcttctgcgtccactagctagaaccatgagaagagcaccttacaaaataataataacgcttctactggtactagaggggaaggtaccgtggattcatggatttgctcttctgaatagactaaaccgggtacagaaacttgttatcattacatggtagaatatgatgctgcaatgaattaagatcgtgatcatgatgatgctgatgatagtgggtggttgctggttagaatttgcagctaacatctttcttcttttct

SEQ ID NO: 75316 - DNA, 145 bp, Glycine max
atatatatcaacatacaaaataagaactttataacaactaaataaaaacaccattatgatgctatacatcacacaattacatttcctatcataatctctacaatactatctctcacccgattcacttaaaaccccaacaacaata

SEQ ID NO: 75317 - DNA, 124 bp, Glycine max
gtttatggatgtggtcacagaaactatatgacatgttttctggttttctatgctgtcctatgactttgttataaaggaggagtcaaatgtgggaaggttttttttggtatgaaaaaaaaaacaa

SEQ ID NO: 75318 - DNA, 315 bp, Glycine max
ggaagagtgaagagaatggctcccaagggtttaaggtttctggctgtgttaatatgcgtttcagcactgtcactgagtccttctgttgcgggggaagggcaaaataatggccttgttatgaacttctacaaggaatcatgccctcaggctgaagacatcatcacagaacaagtcaagcttctctacaagcgccacaagaacactgctttctcctggctcaggaacatcttccatgactgtgctgttcagagttgtgatgcttcactgttgctggactccacaagaaggagcttgtctgagaaggaaacagataga

SEQ ID NO: 75319 - DNA, 110 bp, Glycine max
gatgtgcgataatgatagaaaagtgcagggggcggatcagatcatcccgcgaacgaaccaggcttggtcacttgcgcttctgactacttgcgagcggaatcaactgcatt

SEQ ID NO: 75320 - DNA, 343 bp, Glycine max
aatgtaaatgatatgatgcgctgcatctagatttagtgggtatagaccttatacaactatgactgtacatgtatcatattatacatgcttatcataagtatggagactcagatggatagtcatcatgggcaaaatgaattctagaactgaattgagcaattggatcggattatcaagttaattaggtcaatcatccaatgaatattcctactacatattgctcatattgctaatccctgccagttgctctgttctgtctctaaataaagtaatgcatacaaagaatactctgcaccttcatactaggagttagagtttttaagctaggtttgacacaccaaac

SEQ ID NO: 75321 - DNA, 362 bp, Glycine max
ggacattgggagatgggaaaactgccaaagtttgggagtacccatcgccacgatctactgatggttcattcgtcaccaaccccattattgatggtctggaggacttatcagttgaggctttggtagacccttttcaacaaagtcctggaacaaaattattctaaatgaccttttcacagcagaggatgtcactagaattctttcaatgccaacctatttcagggatgaactagacaagcttacatggatgtttagtagagatggattttacacagtcaaatccgcatactttcatgctacacagagtatggtagacaactcaagtctgcctgaaaaatgaccgtagatggatatattgcaac

SEQ ID NO: 75322 - DNA, 333 bp, Glycine max
gacacacttttctttcattcttggtgtctgaattcttggattcatctgacaaacatcttcaaccttcaaaaacatcatcctgtttacatctagaaccaggttttaactagtctctggtattactcattcaactaggttagaaaactctgttcaagttctagttaaccctttacatgctttctttctttccaactatccactgatttgaagcttgttattcaaatgaaatcaggggtctgaatttttgtagctgatatatccagaagagaaataggaaattggagaattaagtattctcgttgcatgatcaatgatgaactaaaatatctatat

SEQ ID NO: 75323 - DNA, 318 bp, Glycine max
ggagttggttaatactgtaaactcgatttctgaatcttaagcttttctctctctttcatttttgaaatccttttaaatgctaaagtaaccctatatatgcttcctattttttttccacttctatgaatatcttctattgttgaactcaattatccatttaaattctttctctctttttccttcttcttatctctttttttgttgctcagatctccaatatatcattctatttcgtccattcttttgtgttggatagttaaacctctaagagaactacttgaatttgatctttagtatctgcatttcagtgttaccatt

SEQ ID NO: 75324 - DNA, 73 bp, Glycine max
cccacgcgtccgcccacgcgtccgcccacgcgtccgcccacgcgtccgcccacgcgtccgccgaggcgtccgt

SEQ ID NO: 75325 - DNA, 327 bp, Glycine max
cgggaagcgaagaaggaccagcacaaccagagcccaggccatagccaccgaaaggctcaacggagcgcaagacaagagcaaaccagactcgaggcacagctccaaacggccgcaaccagcacacccagacgccattacaaaagggtgagcagccacaaggtaacaagcacaggagagagacagaaaaaactccactcccaaaggcagcacgtcagcatcatcaacagcagcacctaagcctgcttcaggaacaaggggcatccagcacaagacggacgcatactggaactacaggaagctccccattgtggacgaccacatcataaa

SEQ ID NO: 75326 - DNA, 251 bp, Glycine max
agttgtaagaacacgtccgagggggcatgagatgaatgctacaagctacatcaggtagggaatggtccttgtaacttatggatcataaaaaggcttcaattgcaacctcatgatccttcgacgtctgaagttaagatatacctgtgaagctctatgtatcattcacgtgaatatcaagctaatcgtatagtgtggacgttaatgattctacaactagttgtcaggatatgaatcttatgacactcaattgc

SEQ ID NO: 75327 - DNA, 312 bp, Glycine max
ggttctagtgtgtgattgtttgttgtcgtaactggttcttcttcttttgttggtctgtgtttgtgtttgttttttctctcacctgaaaatgtcttgctgcggtggtaactgtggttgcggaagctcctgcaagtgcggcaacggctgcggaggctgcaagatgtacccagacttgagctacactgagtcaaccaccaccgagaccttggtcatgggagtggcacctgttaaggctcaatttgagggtgctgaaatgggtgtgcccgctgagaacgatggctgcaaatgtggaccaaactgctcctgcaaccc

SEQ ID NO: 75328 - DNA, 291 bp, Glycine max
cccacacatgcgtaaaggtgcgaaaagaccacacaaggggagaatacaatgaaacgccgtggtatcttcaaaatgaacagggcaaatacgtgaaaatagattgagtgctatacagggcctgactttctagaaccccctttcaatccacggggagggaccaaccctatgcataaactccagtcacacatacacggttacacccttaaattaacgatcgacggtatggcaaatccctataccatttaacactcaaagagctcaaccgaaacgattaaggtcaaaaaaaattca

SEQ ID NO: 75329 - DNA, 294 bp, Glycine max
aattccgggcgacccacgcgtacggcacgcgtgcgcacagactgtttcggatccgagaatacttcaaaagcgggggccatgttcaattgcactcatgatcatccctaacatgacgagaatatacaccctgatcactagcattgctgaacacatgccttactaggcaaatcaccaaatcacgtatcagaagactttggccagatcacaattcaccatttatcatatatgtcatcatctgaggctccggcatccctctaacactggctcccctgcctcttgacgtgcacctctggc

SEQ ID NO: 75330 - DNA, 76 bp, Glycine max
ccacgcatgcgtgcgggaggaccacaaactggggcgcactgcttgttagcgcaactagcgcctcgacccagctggc

SEQ ID NO: 75331 - DNA, 77 bp, Glycine max
gatggaaagagccgggtcttcattaatgggaaagccatttattatttcatgggaacattcacttttaatcaatacac

SEQ ID NO: 75332 - DNA, 54 bp, Glycine max
tgggtgtttaaaattgacgaaaaaaataaaaaggatgcttaaaaaagtattccc

SEQ ID NO: 75333 - DNA, 203 bp, Glycine max
ggacaaagggagcgtgttgtacaaagggcaattttttcaaaacctttttctttttcgcaacctcacctttttcttcttcaatctctttcggaatttcccaaaatccttaatgggaagaaaaaatggttctgactcaaaagcttcacgaaaccttcaaaagcaccggcgaaaagattactggccccccgacccgttccgccttt

SEQ ID NO: 75334 - DNA, 344 bp, Glycine max
ggggggaagctttgataaatttaagtttggcgttgcggtgctgagttctgatctgctttaaactgaagaactttaaggggttttctcgcaaatggaggtgctgtgggtcacaaggcatggacgaatgtttgaggggagggtgttagtgctcttggctttgttcttgtggattcccgcacaggtggtggtgggaaggacaagaactaccatcacaaactctactgcttcttcagcaccaagagttttaagaagtggagcactgtttactcttaattctataattggaagatcggcgaaacctgcacttatggctgctttcgaagatgttaatgctgattcgagtg

SEQ ID NO: 75335 - DNA, 422 bp, Glycine max
ggttctagtgtgtgattgtttgttgttgtaactcgttcttcttcttttgttggtctgtgtttgtgtttgttttttctctcacctgaaaatgtcttgctgcggtggtaactgtggttgcggaagctcctgcaagtgcggcaacggctgcggaggctgcaagatgtacccagacttgagctacactgagtcaaccaccaccgagaccttggtcatgggagtggcacctgttaaggctcaatttgagggtgctgaaatgggtgtgcccgctgagaacgatggctgcaaatgtggaccaaactgctcctgcaacccctgcacttgcaagtgaggtgttgggagagcaagcttcaagcaaagatagcccttaattaggaataatgataaactattaatgtgtagctaaaaacttatgtattatgtct

SEQ ID NO: 75336 - DNA, 63 bp, Glycine max
aggggtgttgagaaatggatgaagtaatggaataagaggatcgctatgactatagctcttggg

SEQ ID NO: 75337 - DNA, 102 bp, Glycine max
ggatcaatgaatgttgggaacaatagtcaagctggcctagcgggaaatggctttggttgtttttcgaatattgggagtgaggctctagttactatctaatca

SEQ ID NO: 75338 - DNA, 327 bp, Glycine max
ggagcaagagtgaagagcgaagagaatggctcccaagggtttaatctttttggctgtgttatgcttctcagcactgtcactgagtcgttgtcttgcggaggataatggacttgttatgaacttctacaaggaatcatgccctcaggctgaagacatcatcaaagaacaagtcaagcttctctacaagcgccacaagaacactgctttctcctggctcagaaacatcttccatgactgtgctgttcagagttgtgatgcttcactgttgctggactccacaagaaggagcttgtctgagaaggaaacagatagaagctttgggttgag

SEQ ID NO: 75339 - DNA, 293 bp, Glycine max
tggggagagagagagagatatttaaggatctggtgccccttcttaattcttgtgatgggaccaattctttaatgagcctgagagagatggcgcaatactaaccatcaccataatttattggtattatttatggatgagtgtaatgtatgtatgaaaacaaaaatacttgcatctctcttgtgtctcaccgaagactatgctgatcttaatctgtgcgacatatgcgatcagttccatgtaactgaacacatcaacctcgatctttttctgagaatatttaaggcccacaatct

SEQ ID NO: 75340 - DNA, 333 bp, Glycine max
aggccgtgtacgagataaacaaacatttggcgcgcctaacactacggctctgctaactccaagcggtgtcgattcaccacttccttcattgctctatatctctgagtctgctagatgaagttaacgacacctgcgcttctcagccttgtcattctctgccatctgcttctctgtcttccctcattcactatctctctcatagccaatgacgctgaccccgatacggagcttctactttccggagactacgcgaccggactacttaatgcctcgcttgcgagatccgacgatggtagcttgaccaacatgattgatcgggctctcgaaagagag

SEQ ID NO: 75341 - DNA, 312 bp, Glycine max
ggcataacaaagattggaaaggattgatgaggggagaagctgaatcaccttccattcgaagctctgtggttgacaatgctcatttggagcttgaagccaatcaggggccaaggtccctatctcctaagcctccagttcagaagaaaaggggccgagctgatgaacaaccgaggatgaagagggatgttgtctcacaagtaaatattgctgctccacggaggctgcttcaatttgcagtgcgagatgcagtagcgacttcaaggacagccacaggcatgtcagtggagccttccctaaaaacgtctttcggtc

SEQ ID NO: 75342 - DNA, 93 bp, Glycine max
aggcgacagagggattggaattaaaacctaaacggggccgggtcattgggtggcggccggcttctctgatgctggccacgagctacttttgga

SEQ ID NO: 75343 - DNA, 61 bp, Glycine max
gagggccaccaccaccaaaaaaaggtaaggatttggtttggcaaggaagaaagtagaaatt

SEQ ID NO: 75344 - DNA, 209 bp, Glycine max
attaggaaggagttgtagggcactgctctaccaaaagggtagaggtaagtttgtggcactcacttactatgctctgaaaatgtgagcactctgatgtcaaacttatctactacactataatccttgaaatgccaaaagtgactgcctatcccggtctactacaattgggatatatagctaccggagagcttgtacttctgactgctgtc

SEQ ID NO: 75345 - DNA, 239 bp, Glycine max
ggcgacccgcaccgaccctcacacattcgtatcatttctaaaaaaccttctatatagacaaccagttaaccttaattgaagcgctttttaaatattccacttcaactaccaaaccctatatttttaaccttcccataatttcaataaactattaatcgttcaactttggaaaatttcaaactccttttcaccacattcaaaaaactaaatattttttctcatacccctttttaaaaatc

SEQ ID NO: 75346 - DNA, 278 bp, Glycine max
tggtgatggagctggggtgacatgcttcgcttgcagttataggaatgaatgtttgttttattattgtgcagactgtcaacttcaattcttaacaaccctaatcatatcaacatgacattctcttcataatttctgaaccctacaggctttactttactgctgattctcctgtctatgcttctaccaatgccataagcttgctactgcaccactcttcatcctgtttaagccatcaaacaacctgttctgaacccgctattgagcttttctagctcctt

SEQ ID NO: 75347 - DNA, 327 bp, Glycine max
ggaatttccgtggcgacccatcggacgctcgtccgacgcatcaacactacggccgactggaggcgacttgaatgaaagggaggtaatcttaagtggaaccgtttgcaaaattacccgttcctcgtacctcgaatgcagtctaaacttggggtcgctgaagtcacagccatatacgacactagacatatttgtgtgtctcccattgcaggcaatggactcctttaagttgttcttcgattcaacaaaccgctggacttactagactcttcaaaacttgccgcaaatttctccggtcgttcagaattacctcaagcgggtgtattttac

SEQ ID NO: 75348 - DNA, 318 bp, Glycine max
ggaggataatggactggttatgaacttctacaaggaatcatgccctcaggctgaagacatcatcaaagaacaagtcaagcttctctacaagcgccacaagaacactgctttctcctggctcagaaacatcttccatgactgtgctgttcagagttgtgatgcttcactgttgctggactccacaagaaggagcttgtctgagaaggaaacagatagaagctttgggttgagaaagttcaggtacattgagaccatcaaagaagctttggaaagggaatgcccaggagttgtttcctgtgctgatatcctcgttctctc

SEQ ID NO: 75349 - DNA, 304 bp, Glycine max
tcggtgacagctcgtcgtggaagacagaaggatcagttaccattggaagagagacaacagagtgggactttgtactgataagccgtttaaggtctattactgtgtgccatttttgttgaccgttaatatactgggagaggtggaagcactgaacattatcttgatactcgctttgttgacatctgctaaaactacaacattaaaccggtgcggggtatgccatgatatttttaattatatgaacacatagaggtgttataaatactagcactctgatcaggcttggtggagtggctgagaatta

SEQ ID NO: 75350 - DNA, 340 bp, Glycine max
cagataatgaagttataatggtccaacatcgccattgtttggaaacagccttccaatgcatagaagatcatcttgtaggttagaatacttacatgttataagctataatctttttttggattgaagtatattttagtccttagagtttccccttatttggtttttggtccttacatatatatttttttggtttttgttcttatttgtccctgtcattaagtatcagttcttatatttttcagtaatttaagttttagtccctttagcttttattcttcaaaattaaatggtccttatattccatgatgaacaggtctctatagtttattattaagatatc

SEQ ID NO: 75351 - DNA, 406 bp, Glycine max
ggcacaagtgagtttgttgatcgagataactagaaacagtgtgatgaaaatgaaggtccttgttttcttcgttgctacaattttggtagcatggcaatgccatgcgtacgatatgttccctctccgaatgaacactggctatggtgcccgtactccggaggtgaaatgcgcaagttggaggcttgctgtggaagcacacaacatctttggctttgagaccattcctgaagagtgcgttgaagcaacaaaggaatacatccatggcgaacaatatagatcagactccaaaacagttaaccaacaagcttacttttatgccagagacctcgaagtccatcccaaggacacatttgtgttcagtatagatggcaccgtactctctatttttcatactacaaaaaacatg

SEQ ID NO: 75352 - DNA, 337 bp, Glycine max
tggggagccagagtgaagagcgaagagaatggctcccaagggtttaatctttttggctgtgttatgcttctcagcactgtcactgagtcgttgtcttgcggaggataatggacttggtatgaacttctacaaggaatcatgccctcaggctgaagacatcatcaaagaacaagtcaagcttctctacaagcgccacaagaacactgctttctcctggctcaaaaacatcttccatgactgtgctgttcaaagttgtgatgcttcactggtgctggactccacaagaaggagcttgtctgagaaggaaacagattgaagccttgggttgagaaatttc

SEQ ID NO: 75353 - DNA, 352 bp, Glycine max
caacggggcgacagagggtgatacagggagcaaaagggtgactcgtgagtccttagtatcgggtggtgacaaagaaagagctcaaaaacccgatgatgtaatgtcgactctcgcatggaataagccatgattctcttgcgtctgaatgcattaggttttcgagtcaaaccttcgtatattgctttttgagggaaaatctttatgtattgatacatggcgaatgaattcacattgtctttactagaaaatgaatgttaaggagatatatattgggcttttcacgagaccaatggtctataattaactgttctacatttataacttggataaaatatttgatgcatgcctaggc

SEQ ID NO: 75354 - DNA, 273 bp, Glycine max
  unsure (1)..(273): unsure at all n locations
cggactcatgttcggcttttataagacaattttaggggtttcatcttcaacttatattctggatatccggatgatactatgagcaatntagcaccttctactactttgtaatcaatcaagagctgtgaactgtgaagaacgagttcaacatgccgtgcttggacttggagcgtgatagcaagttgaagagtggttgaggccttgaaggaccatcgtttatgcagatggaacattgtgatgagatcatcacaacaacatgcttaacataatatg

SEQ ID NO: 75355 - DNA, 183 bp, Glycine max
gctacacgaaggtgggatcattcgtcaatggagccagtgtggtgattatcttccatcccaacacggttaactcatgtggtggtgatcttgcgatcccattatgaccaaggcttctattagctcgaaacacactacatctttggccacagcactgtctcatcatcatgagatctgaattgactg

SEQ ID NO: 75356 - DNA, 397 bp, Glycine max
ggagcaagagtgaagagcgaagagaatggctcccaagggtttaatctttttggctgtgttatgcttctcagcactgtcactgagtcgttgtcttgcggaggataatggacttgttatgaacttctacaaggaatcatgccctcaggctgaagacatcatcaaagaacaagtcaagcttctctacaagcgccacaagaacactgctttctcctggctcagaaacatcttccatgactgtgctgttcagagttgtgatgcttcactgttgctggactccacaagaaggagcttgtctgagaaggaaacagatagaagctttgggttgagaaatttcaggtacattgagaccatcaaagaagctttggaaaggggatgcccaggagttgtttcctgtgct

SEQ ID NO: 75357 - DNA, 316 bp, Glycine max
  unsure (1)..(316): unsure at all n locations
gatgatatgaagtggaaaacgctgcctccaatgccaaaagcaaactcacatattgaatttgcttgggcgcttgtaaataactccattgtcattgttggaggcacaacagagaagcaccctataaccaagaagatggttttaaacggagaagtagtccagtttaacttgaatactttgaagtggtcagtgattggaaaattaccataccgggtgaaaaccactctagttggattttggaatggatggttgtatttcacttcangacagagagacatgggacctgatgatccatcaccaaaaaaggtcattggggaga

SEQ ID NO: 75358 - DNA, 324 bp, Glycine max
tcgctggagagacacgagggggagcgagagaagggggaacgaagaactcagctcagctgaacagagctcttcgactacattatgcgataacttattttctgagaggtcttttttctctctcttcttcacggattcaccatttccatatgattttgtccaaactaaatcgtgatttttacaggaaaatccggagattgactgagcgtgtataggagccggtatcatagggcgcttggctatgatgttttattggaaggactagtagtattgctgtagcacctcacattgtattgtgacaagagtctgagggactattacgatcga

SEQ ID NO: 75359 - DNA, 325 bp, Glycine max
gggggaagaggagttggttcaagcagctgagtatttttgtaggtttggtgcgaagaaggaggatgtggcacgattgattgtagacggaccggagttgttggagcttgatttggaggcatgggtggttgatgtggtgaagctgttgaagtactttggaatgagatcggatgatgtcgaggatgttaggagggattatgctcatgtattggggacagttaagatgggtaatctgcccaatgtgatgagagcgttaggtttacgtgagtggttctttgataagatcaaggatgggaatcatcaattggtagttagttttgcacgagct

SEQ ID NO: 75360 - DNA, 268 bp, Glycine max
gacggaccaactggctagcacattctgtggagagcattcgattttcgagagcgttctgacttcccctagcgcattctatccaagcattacgaacaatgcagttattgatttgccttttgggggactgatggccctaatggccgttctgaacaacatgtgactgctaatatgttgctgatgacatctaacattgacccgcccgacaccatgaaaaccatgcttgaatatgacaacctaatgttctattgtatggtcttacctcacaact

SEQ ID NO: 75361 - DNA, 96 bp, Glycine max
taccgtccggttcccgtcgaccacgcgtcgtacggtgaaagacacgaggggagggacaaaaaaaggggagatggggcgttaaatcaagctacgtac

SEQ ID NO: 75362 - DNA, 276 bp, Glycine max
ccactcgtacataacctccgagaggactacagaggggagtcatggagccagtcattatgacaagtgaagtgctgcctgctctggaggatgctctatctaatgatcgacccgatctctatcaccaggatcaaagttactgtgtaaatgacctttagcactggcggcatgcataccgagcagaggtgctgcttttatgaacgacgtgacccgattgacaactattaactcataggtgactattaaattcatgccccatatatactgtgtgaatgacca

SEQ ID NO: 75363 - DNA, 108 bp, Glycine max
tatagggattgaacaactgtctgtaataaacggtcttgagcaaaggtatctggccaaacgtatacctaacactaggcataggttgctgataatttccgctatcaccgt

SEQ ID NO: 75364 - DNA, 204 bp, Glycine max
ggcccgaggggattagtgactctctctcctctgtgttctacgcgtttagagagagagaggggggctcatttttcaatcttgcccgcatctttttgcgacttcttatttttcttccgctcctttccttttcttttttttgccactacttccaactccttccattcttatctttctttcactctctatggatgaattggccgctca

SEQ ID NO: 75365 - DNA, 361 bp, Glycine max
gagagaaagagggtctctttcgttttggagtattgggtcacagcctcttttaggaatgccaaagttactcaacaacacctcacgctctctgaaaatgctgcaggcatgaaaccgctcattccaaccttcacctccttcttccaaacctctccttcacttgttagatttgttcacattgcaaagggaactttgttgctatggggttgatcgatctgaacaccacggaggatgatgaagctgctccattatctgcttcttcttctcactcggggataagcacttctgcttcaaccttggttggttctcctcctccttctgtgtgcttggaactgtggcacgcgtgtgcgggccctttgatctc

SEQ ID NO: 75366 - DNA, 153 bp, Glycine max
gaatgagcggacgtctaaactaaacggactagagcaatttggtttggacaaacttatacctaccactaaggtaaggtatctcaaaaatacaaataacgctaattgtcgaatatcatatcggcgatcggaggacgtatctaaagttgtgacaaa

SEQ ID NO: 75367 - DNA, 313 bp, Glycine max
gatacagactagaccgagctcggttactggttcggactcctctcccgccggcgatcaggatggaggttcgtgttggtgtgggggattcacagtatggggtatgggtagcggaagagatagggcttgaagtcgggtcggcccggaatagaactgcgctgtctgaagggtggtcggaggagatcctttcggaggatgtcggagatgctgacgacgccatcaatgacggcgacactcagccttcctgcttgccggaaccgccccatgggaaacggacaccgtccgatatccaaggggtagagggggagactaacgg

SEQ ID NO: 75368 - DNA, 275 bp, Glycine max
ggtgtgtgggatgagaagatgatgaggaaacattggtagaagaaattgaagagagagagagagagagagagagagagagagagggttggattggttttcttcttccttttctctaaagagaatctaatctcaatcctcattacagatttcttcattcctctctcagtcttttctgttttccccctttgacattctcgttttcgccgaaacaaaaacaactaagattttttgtttgttttgtttttcttctccttgttgttatttgactcggttgt

SEQ ID NO: 75369 - DNA, 340 bp, Glycine max
ggtgcacaagtgagtttgttgatcgagataactagaaacagtgtgatgaaaatgaaggtccttgttttcttcgttgctacaattttggtagcatggcaatgccatgcgtacgatatgttccctctccgaatgaacactggctatggtgcccgtactccggaggtgaaatgcgcaagttggaggcttgctgtggaagcacacaacatctttggctttgagaccattcctgaagagtgcgttgaagcaacaaaggaatacattcatggcgaacaatatagatcagacttcaaaacagttaaccaacaagcttacttttatgccagagacctcgaagtccatt

SEQ ID NO: 75370 - DNA, 366 bp, Glycine max
gaattgacccatcgacccacccagacgaccacacacgcgtacggtcacttgtacgtttcttggtttctcttcctccatttgatcgagcgatccttctctgtcttgtggttatgccatcaatgacaccgtatcagtggcactgcactaaacgagattgagagctttcattgtgcaagtaaaagcctatgttcgtaccattgcctcacattaacccttgtcccccttatctcgttctataccactaactcatcggattctcaatgcgccccgcgtacgttctgctgtgaactctcactcactattgtcaccgtgtaaccactagaatcatacttagtggcatggcaagaattaatttatgattaacct

SEQ ID NO: 75371 - DNA, 418 bp, Glycine max
  unsure (1)..(418): unsure at all n locations
ggagcgaagagtgaagagaatggctcccaagggtgtaacctttctggctgtgttaatatgcgtttcagcactgtcactgagtccttctgttgcgggggaagggcaaaataatggccttgttatgaacttctacaaggaatcatgccctcaggctgaagacatcatcacagaacaagtcaagcttctctacaagcgccacaagaacactgctttctcctggctcaggaacatcttccatgactgtgctgttcagagttgtgatgcttcactgttgctggactccacaagaaggagcttgtctgagaaggaaacagatagaagctttgggttgagaaatttcaggtacattgagaccatcaaagaagctttggaaagagaatgccctnggagttgttcatgtgctgatatcctcggtctc

SEQ ID NO: 75372 - DNA, 283 bp, Glycine max
gactcagcaggagtatgtgatcaactgtacgagagactatcttgaggagaatatgacgctatttgcattggctgatacagcaatagtaacaccatgatgacgcgcccacgatacactctaccaagaaatccacactgtcatgagaaccggttctatatacatgatcttcgccgtaaaaatggcatcaactatgatcagctgatgttctctcttcgacacatcgtctagaatggtcactgtagcgtgcaacgaatcaacctaggactacatctatggcaaacac

SEQ ID NO: 75373 - DNA, 162 bp, Glycine max
gactgaagtatcagctaggagctagctcatgaggggggggtacttggccttgtgatgcaggagatcgctctcataaatgctgcgcttgtgtgcgtcaatatgttgaatccgaatgattgtgagcactctggagctgaacactttgttcaatggccatccata

SEQ ID NO: 75374 - DNA, 281 bp, Glycine max
gacctgaaaatctagtttcttacaaggctctactctactgcttcaccttctgctctagaaaattcagtggtgatacatggcttcggctactctctctgtagccaaaccagcccttcaggcaaatgggaaaggcttctctgaattctctggcctccgcagctcatcaggcttccttcccttttctagaaaatcttcagaggatttccattctgtcgttgccttccagacctatgcagttggaagcagtggaggatacaagaaaggtgtgacagaagcaaaac

SEQ ID NO: 75375 - DNA, 373 bp, Glycine max
ggaacaaaacaagtgtttcgaatagattatcctgagtctttgggaatagagctgcaatggcttcaagtcaggaggaggtgacccttttgggagctactggaagcccatttgtgtgcagggctcatattgccctcaagttgaagggagttcaatacaaatatgtcgaacaaaatttgaggaacaagagtgaactgcttctcaaattcaacccagtttacaagaaggttccagtgtttattcacaatgagaagcccatagcagagtctcttgcgattgatgaatacattgatgagacatggaagaacaaccccatcttgccttctgatccttaccaaagagccttggctcgtttctggtgcaaattcaatgatga

SEQ ID NO: 75376 - DNA, 341 bp, Glycine max
gggaacaccaattgtattgttaaagaggatgtgaatgatgattcgatatccattggatcagtatcagaagattcaatgaactctgtgtgttcatcttcttcatcagaattggctgaggatgcatcatcctcttcagcatcttatttgtcaacctcatcatcgcattcaaacggccctttgtttgaactatcagagctaatgagtcaactccctatcaagagaggcttgtctatgttttatcaagggaaggctcagtctttcagttctctagcaagcgtggagagcataggggatcttcctaagaagaaagagagattttacaggaagaaaatgaaatcatg

SEQ ID NO: 75377 - DNA, 399 bp, Glycine max
ggagagaaagaatggggataggaatacagagcattttgcaacacgattacacgaccgaattaaaccctgtttttctttccgaaagctggcgttaataatttaactcgcttaaaatgggtcttctcttcaataatactggtcattttttcgattggggggaacagtacaagagtgtgagggatcgggtaaaccaaactgcacaggtagtcacttaaaataatggaagtctcacgatgagactggatgccaggctcctgaacgccccattctttggattaataaatagggcttcttttgaaaaagcactccaatgaacatgtgttccaagggtacaaggacatgctgttgaagcaagagcaggacaattttgcagcatcgtcggttgaaaacattgtgaat

SEQ ID NO: 75378 - DNA, 73 bp, Glycine max
gggtttggatatgaagatatatatgttctacttgcattcagaaaatcagataattgtataatgttttcttttc

SEQ ID NO: 75379 - DNA, 294 bp, Glycine max
gaagtctatgttcttgaaccaggccacagatcgaccttgcaatgcaaaatgattgattattccataccagacagtgttttagttatccgaaatgtctcacatgtggagtttgaatgtgaagtaggccttgttgctgatccagctaaattgaaaggtgatcttgtatcattcttgaaggctgtgaacgaatagttggagtcataactgagctaggtgaaacagcatgctcttaaactaaagcgagatctggtaggagctgagtttcgtaactctgacctttacaaggagctctaa

SEQ ID NO: 75380 - DNA, 412 bp, Glycine max
gagtgcacaagtgagtttgttgatcgagataactagaaacagtgtgatgaaaatgaaggtccttgttttcttcgttgctacaattttggtagcatggcaatgccatgcgtacgatatgttccctctccgaatgaacactggctatggtgcccgtactccggaggtgaaatgcgcaagttggaggcttgctgtggaagcacacaacatctttggctttgagaccattcctgaagagtgcgttgaagcaacaaaggaatacatccatggcgaacaatatagatcagactccaaaacagttaaccaacaagcttacttttatgccagagacctcgaagtccatcccaaggacacatttgtgttcagtatagatggcaccgtactctctaatattccatactacaaaaaacatgga

SEQ ID NO: 75381 - DNA, 310 bp, Glycine max
ggggtaatcgattcactgatgtgtgaaaagcatgcacggctcattgaaaggccttctgaactggttttcagacgttgtgctataattgccagagaatcttctgtaagtggcttaaccatcatatcttagaatgattggtaatgctactgcgaataatggagtggtattgagaccaaaggaatatctgcaagaattgagaatgttaatgattcagacaatgctttgactggatcctgcagatagatgccaacttgcgaggactaacttaacacttgggataaagctaattatgattgtggtattggacaca

SEQ ID NO: 75382 - DNA, 334 bp, Glycine max
ggagcaagagtgaagagcgaagagaatggctcccaagggtttaatctttttggctgtgttatgcttctcagcactgtcactgagtcgttgtcttgcggaggataatggacttgttatgaacttctacaaggaatcatgccctcaggctgaagacatcatcaaagaacaagtcaagcttctctacaagcgccacaagaacactgctttctcctggctcagaaacatcttccatgactgtgctgttcagagttgtgatgcttcactgttgctggactccacaagaaggagcttgtctgagaaggaaacagatagaagctttgggttgagaaatttc

SEQ ID NO: 75383 - DNA, 53 bp, Glycine max
gacacacaacattttcagtgaaactgaaaaggggaagaagagagtgaaatggg

SEQ ID NO: 75384 - DNA, 299 bp, Glycine max
ggttctagtgtgtgattgtttgttgttgtaactcgttcttcttcttttgttgttctgtgtttgtgtttgttttttctctcacctgaaaatgtcttgctgcggtggtaactgtggttgcggaagctcctgcaagtgcggcaacggctgcggaggctgcaagatgtacccagacttgagctacactgagtcaaccaccaccgagaccttggtcatgggagtggcacctgttaaggctcaatttgagggtgctgaaatgggtgtgcccgctgagaacgatggctgcaaatgtggaccaaact

SEQ ID NO: 75385 - DNA, 277 bp, Glycine max
aaaaacgaaaaaaaataaaaaaataaacaaaaacaaaaaaaaaaaaaaataaaaaaagaaaaaaagaagaagaaaaaaaaaaaaaaaaacaaagaaaagagaaaaaaaaaaaaaaaaagaaaaataaaaaaaagaaaaaaaaaaaagagaaataaaaaaaaaaaaaaaaaaacaaaaaaaaaaaaagaaaaagaagaaaataaagaaacaaaaaagaaaaaaaaaacaaacacaaaagaaaacaaggaaaaaaaaaataaaaaatgaaaaaaaaaaa

SEQ ID NO: 75386 - DNA, 345 bp, Glycine max
aaaaaaaaaataaaaaaaaataaaagaaagaaaaaaaaaaaaaaatataaaaaaaaaaaaataaaaataaaaaagaaaaaaaaagaacaaaaaaaaaaaaaaaaaaaaaaaaaataaaaaaaaaaaagaaaaaaaaaaaaaaaaaaaagaaaaaataaaaaaaaaaaataaaaataaaaaaaaaaaaaaaaaaaaaaaaaaaaaccacaaagaaaaatacaaacaaaaaataaaaaaaaaaaaaaaaaaaaaaaaaaaataaaataaaaaagaaagaaaaaaaaaaaaaaaaaaaataaaaataaaaataaagaaataaaaaataaatataaaaaaaaaaaaaaa

SEQ ID NO: 75387 - DNA, 345 bp, Glycine max
aaaaaataaaaaaataaaaaataaataaaaaaaaaaaaaaataaaaaaaaaaaaaaaaaaataaaaaaaataaaaatcaacacaaaaaaaataaaaaaataataagaaaaaaaataaaaaaaaataaaaaaataaaacataaaagaataaaaataaaaaaaaaaaaaataaaaaaaaaaaataagaataaaaaaaaaaatacccacccaaccaaaaatagaattaaaacagaaataaaaaaataaaaaaaaataaagaaaaaaaaaataaaaaaaataaataaaaaaaacattaaaaataaaaaaaaaaaaaaaatataaaaaaaaaatataaataaaaaaataa

SEQ ID NO: 75388 - DNA, 197 bp, Glycine max
aaaaaaaaaaaaaaaaaaaaaaaaaaaaaaaaaaaaaaaaaaaaaaaaaaaagaaaaaaaaaaaaaaggaaaaaaaaaaaaaaaaaaaaaaaaaaaacccaaaaaaaaaaacaaaaaaaaaaaaaaaaaaaaaaaaaaaaaaaaaaaaaaaaagaagaagaaaaaaaaaaaaaaaaagaaaaaaaaaaaaaaaaaaa

SEQ ID NO: 75389 - DNA, 428 bp, Glycine max
  unsure (1)..(428): unsure at all n locations
ccgacccacgcgtacgnacaggcagttttaagacgacgagaggaagattgaaaccacggggaaganacaaggaagaagggaggcggccaagaagaagcggaagcccaccgaggaagcagacgaaaaacaccaccaagaaacgaagggagaagaggcgacgaagaagagacgacgacangcagccacaaaacaaaaagcagaaggcaccagcagccagacgaacacaacaacgaggcaaaccggacaaaacaaacacagaacgggggaccaaaggacagaaacaacaaaaagggaccaacagacaaagcgaaacaaacagagaacaaccagcggaaaacaaaaaggcaggcgccgacgaggaaaaagaaaaagccaccaaaggagaacaaaaaaaaaacaaaagaacaggaaggaagaaagggccaaag

SEQ ID NO: 75390 - DNA, 349 bp, Glycine max
aaaaaacaaaaaaaaaaaaaaaaaaataaaaaaaaaaaaaaaaaaaaaaaaaaaaagaaagaaaaataaaaaaaaaaaaaaaaaaaaaaaaaaaaaaaaaaaaaaaaaaaaaaaagaaaaaaaaaaaaaaaaaaaataaaagaaaaaaaaaaaaaaaaaaaaaaaaaaaaaaaaaaaaagaaaaaaaaaaataaaaaaaaagaaaaaaaaaaaaaaaaaaaaaaaaaaaaaaataaaaaaaaaaaaaaaaaaaataaatataaaaaaaaaaaaataaaaaaaagaaaataaaaaaaaaaaataataaataaaaaaaaaaaaaaaaaaataaaaaaaaaaaaaaaaaaaa

SEQ ID NO: 75391 - DNA, 395 bp, Glycine max
aaaaaaaaaaaaaaaaaaaaaataaaaaaaaaaaaaaaaaaaaaaaaaaaaaaaaaaaaaaaaaaaaaaaagaaaaaaaaaataataaagaaataaaaaaaaaaaaaaaaaaaaaaaaaaagaaaaaaaaaaaaaaaaaaaaaaaaaaaaaaaaaaaaaaataataataaaaaaaaaataaaaaaaaaaaaaaaagaaaaaaagaaaaaaaataaaaaaaaaaaaaaataagaaaaaagaaaaaaaaaaaaaaaagaaaaaaaaaaaaaaaaagaaaataaaaaaaaaaaaaaaaaataaaaagaaaagaaaaaaaaaaaaaagaaaataaaaaaaaaataaaaaaaaagaaaaatataaaaaaaaagaaaaaaaaaaaaaaaaataaaaaaaaa

SEQ ID NO: 75392 - DNA, 293 bp, Glycine max
agcagaagaattaaaaaagagagtaaattaaaaaaaaaaacgagcggtcccacaaaaccaagggaacccacaaaaacatgcaacgacataccaaaaaaataggaaaacacaaaagaaaaatacagaccagagaaaaacaaacaaaacgaaaagaaaaaaaacataacaaaaaaaaagaaaaaaacacacaaagaaaaaaatacacaaaaaaacacagaaagaaaacaaaaacaaaaaaagacaaaaaccaaaaaaaaaatacaaaaaaaaaaaaacaacacaaaaaaagaaaa

SEQ ID NO: 75393 - DNA, 440 bp, Glycine max
aattcgagctttcgcttgatggtggcgtcttttatttgtagggttgacttgaggacatagatgtgcttccaggattcaaatcctaagcatataccaaacatttggtacatcattagagattgcctttgctttcaagaaacagtgatacaattaatacgatctgataaaaactaacctaccagaaagtttattacatcttatactaaacaactatacctgattagggttacgcatggacatgctctaaccataatcatttaccccattttgataactccctaagtttactatctaatcttagtgcgaacaatttttgattgacgttttatactaggactttgcattctcaagaaccatggtacaacactggattgtggcttaccaaacgtcaagggaaattcatcatcatgttcaaagaaacctcgatctttggatatgct

SEQ ID NO: 75394 - DNA, 227 bp, Glycine max
ggaatccgagaagaagaagatggttatgtatcagggctggagcacgagaatagcgttgggagccttcgcgtttggtctgcttttcctatcggcctcagcagacgacgtcgttgtgctctctgaagataacttcgagaaggaagttggtcaggacacaggagctctcgttgagatctatgctccttggggtggacactgtaaaaagcttgctccagaatatgaaaagc

SEQ ID NO: 75395 - DNA, 149 bp, Glycine max
cgggggttttggatatgaagatatatattttctacttggattcataaaatcaaataggagggtaatccctactttacggagtaacctgatctagctctcaaaaaaagcagtcgatctagatgatccaatctaacttacacattcaaact

SEQ ID NO: 75396 - DNA, 184 bp, Glycine max
gtgcttatgaagacgacacgaacggggagtttctacaagtgagtgttgttcgatcgatgataacgtgagagaacagtgtcgatcgaacaatgagacggtcccttgttttctttcgttgcgtacaagttttcggtagcaatggcaactgcgcatgccgtaccgtatatgtttccctctccgaatg

SEQ ID NO: 75397 - DNA, 336 bp, Glycine max
ggttaaaatgttgaggaaggaggagtggaggggagcggatctgctgggtgggacgggataaagtgaaccaagctgacaagactaagggaagattggatggtggaaatggaatcggcagctgaaaaccctatttacccggcggtggactacaagcaaccttcaatttggtaatttcttcgggggcctgccttaaaagttccatcccatttcatatgttaagcccaattttttttcattagaatttcctgaaagtgtttgacaagctttgcaaattaaaagttttgtttaaacaacagtggtaagggcggtacaattttctaaacttaatttaagttt

SEQ ID NO: 75398 - DNA, 282 bp, Glycine max
ccacgcgtccgtagcgagaagacgacagattgtggtagtggaagtagtaacaggtacgtcgcatatctagttcatctttagcggctatacagttttggcccttccaattatcagatctgaatcaccggtctcactctgcacactcactcacactgaatggctgctgaatgcaaccatcaccaccaccaccaccaccatcaatatcacgaccatcatcattatcatcatgatcaccatcatcatcacgatcgagagggacagaccaactcatggctaggtaat

SEQ ID NO: 75399 - DNA, 154 bp, Glycine max
  unsure (1)..(154): unsure at all n locations
gatgataattctgttcatggttcacctgtgaatgcanatgggaagcangataatgctgctaatggtgattatacagttgatgatgaatcctatgcacacagtgaagatgacctggcaagaatcccccatagtctagctgggaggagtccggtgg

SEQ ID NO: 75400 - DNA, 258 bp, Glycine max
  unsure (1)..(258): unsure at all n locations
gacacacagatcgngaaagcgcctttctactctcttctcttctttgttagagctgtgtcacagtcacacagatcttggctgtgcctgcgcctacggtgatagaggaaactgaagcctttgtacatgccacggtggcaatagcagcattattactcctaaatttttcatgcttatcttgtgctacacactctctctctctctgctagagcgcgcgcttaaacttgtaataggtttaaaaagagcaggcaaaaagtgaat

SEQ ID NO: 75401 - DNA, 197 bp, Glycine max
ggcttcaaatgtggaccaaactgctcctgcaacggctgcacttgcaagtgaggtgttgggagagcaagcttcaagcagagatagcccttaattaggaataatgataaactattaatgtgtagctaaaaacttatgtattatgtctgtgatggttttcgtgcactctggtgttttgtgttaaacaaacatccttagaa

SEQ ID NO: 75402 - DNA, 399 bp, Glycine max
ggagctagagtgaagagcgaagagaatggctcccaagggtttaatctttttggctgtgttatgcttctcagcactgtcactgagtcgttgtcttgcggaggataatggacttgttatgaacttctacaaggaatcatgccctcaggctgaagacatcatcaaagaacaagtcaagcttctctacaagcgccacaagaacactgctttctcctggctcagaaacatcttccatgactgtgctgttcagagttgtgatgcttcactgttgctggactccacaagaaggagcttgtctgagaaggaaacagatagaagctttgggttgagaaatttcaggtacattgagaccatcaaagaagctttggaaagggaatgcccaggagttgcttcctgtgctga

SEQ ID NO: 75403 - DNA, 288 bp, Glycine max
ggtgcacaagtgagtttgttgatcgagataactagaaacagtgtgatgaaaatgaaggtccttgttttcttcgttgctacaattttggtagcatggcaatgccatgcgtacgatatgttccctctgcgaatgaacactggctatggtgcccgtactccggaggtgaaatgcgcaagttggaggcttgctgtggaagcacacaacatctttggctttgagaccattcctggagagtgcgttgaagcaacaaaggaatacattcatggcgaacaatatagatcagacttc

SEQ ID NO: 75404 - DNA, 208 bp, Glycine max
gatggtcagtattagagaacttgttttctcttcctggattggatcgatcgtgcgttctctctctcgtgttgatgcgatgattgactgcgtatcagtgcctgtgcttgaaacgagagggagtgtttccattgggaaggtataagcctttgtttgtagcattgccttacatgatcccttgtcctacttatctcggtctcttccactaact

SEQ ID NO: 75405 - DNA, 73 bp, Glycine max
gggtttggatatgaagatatatatgttctacttgcattcataaaatcagataattgtataatgttttcttttc

SEQ ID NO: 75406 - DNA, 313 bp, Glycine max
ggttctagtgtgcgattgcatgtcggtgtatctcgctcttcttcttttgttgatctgtgtctgggtttgatctttctctcacctgaaaatgtcttgctgcggtggtaactgtggttgcggaagctcctgcaagtgcggcaacggctgcggaggctgcaagatgtacccagacttgagctacactgagtcaaccaccaccgagaccttggtcatgggagtggcacctgttaaggctcaatttgagggtgctgaaatgggtgtgcccgctgagaacgatggcttgaaatgtggaccaaactgctcctgcaacccc

SEQ ID NO: 75407 - DNA, 104 bp, Glycine max
gaacacaatgttcttgttgatttctataaggtagaaagaaaggtgggaacaggcccaagccagaaggaacgaattaaattgaaaatgggtcctttggtccgaaa

SEQ ID NO: 75408 - DNA, 315 bp, Glycine max
gggttgaacacaatgttcttgttgattgctatgaggtagaaggaagggtgggagcagcggcaagcctgaggtagcgaatcatattgagatggggtcgataggtcggataagcatgtccactgtggtgaaagcggtgtatgaaatcaccggcactggcaacacctagatccgcgaatctttcagagagctctgcaccttactacgcatccctcgccaatctcaatccgaaagcgctctaattctcttcaagctcatgatactctataatttaaagagttacggcattatcaaggacacgatttgggagcataaatt

SEQ ID NO: 75409 - DNA, 56 bp, Glycine max
aaaaaccccacaaaggggataccgagaagctcttgacagtctaattcctgggaacc

SEQ ID NO: 75410 - DNA, 234 bp, Glycine max
aagtttcaatggcgttgctctgaaatcgaagcgtacggtattgtaaacgcaggttatacatagatagatcatgatagagatagggttaaggccatggagcgcatcatcgactccaagttcaagctacgacgcacgatcgcaagcgtatccttcggcgaattctacctacacattcatattggttccttcaagatcgtcggcagtaagagtgtaaacggtctaacgaagcattcg

SEQ ID NO: 75411 - DNA, 418 bp, Glycine max
gaaggtgcaagagtttgttgtgagctataagctagtttatcgtgaggagaatatgaagttgtttgttttctttgttgctgcagtagttttggtagcatggccatgccatggcgcaggctaccaaaggttccctctccgaatgaaaactggctgtggtgagcgttcttcggaggtaaaatgcgcaagttttaggcttgctgtggaagcacacaacatccgagcctttaaaaccattcctgaagagtgcgttgaaccaacaaaggactacattaatggcgaacaatttagatcagactctaaaacagttaaccaacaagctttcttttatgctagtgaacgcgaagtccatcacaacgacatatttatattcggcatagataacaccgtactctctaatatcccatactatgaaaaacat

SEQ ID NO: 75412 - DNA, 261 bp, Glycine max
ggcacaagtgagtttggtgatcgagataactagaaacagtgtgatgaaaatgaaggtccttggtttcttcgttgctacaattttggtagcatggcaatgccatgcgtacgatatgttccctcttcgaatgaacactggctatggtgcccgtactccggaagtgaaatgcgcaagttggaagcttgctgtggaagcacacaacatctttggctttgaaaacatttcttgaaaagtgcgttaaaccaccaaaggattccttcc

SEQ ID NO: 75413 - DNA, 178 bp, Glycine max
tatagggatcaacactacaagcgaagcatccgggaagaacctcatgaatgactgcgtattcataatttactccaacgcctttcatgaatgcctgctacttactttatgcctatgcctttatactagacgatcacctttcgacactctcctgtgaccacactttgcctataaacttgct

SEQ ID NO: 75414 - DNA, 236 bp, Glycine max
ggtgagagagagagcgagcaggttcagacacagagagaggggtttgggattggagggattgacgctgcgtctcttcctcttctctttcgatccatccctcattcctaatcctccaatccaaccacctcagcctcacactcacatatacacatatctgaacgcgtatcgtccctcctatggcttcaaagcgcatcctcaaggagctcaaggacttgcagaaagacccaccaacttct

SEQ ID NO: 75415 - DNA, 264 bp, Glycine max
acgcgtacgaacacctccgatattacgttagaatgagttcagagagagaacgggcagggtgttacacagagagaggatgttgcaaatcaaggccttgacattctttctcactctcaaccatttctatccatacataatttctaattcatctatcctatcacttcacactgacactaatatatacacatatactatactcgtatcgtgcatgctaatcctaactatccatccatttcgaactcatccatttgcttactgaccctt

SEQ ID NO: 75416 - DNA, 334 bp, Glycine max
acccagcgtccacccagcgtccgacggatagacaaagacgtaagggaggggtggaatgaaagggacaagcaacagttcatagaggattggggcactgacataaaaactggagataaattgccttggactcaccgaacctcgctcttgtaggcatattctgattgatatccccgtactcgtctacacgggcatcgtccgtgaattccatatgcaagatttggataatggtcggtcgtacaggaagttcacgtgagagagtctggagagccttgggtaataattcgttaagttagacctggatattatgaggctacaaaccatgttattttttcct

SEQ ID NO: 75417 - DNA, 371 bp, Glycine max
gaaggtgcaagagtttgttgtgagctataagctagtttatcgtgaggagaatatgaagttgtttgttttctttgttgctgcagtagttttggtagcatggccatgccatggcgcaggctaccaaaggttccctctccgaatgaaaactggctatggtgagcgttcttcggaggtaaaatgcgcaagttttaggcttgctgtggaagcacacaacatccgagcctttaaaaccattcctgaagagtgcgttgaaccaacaaaggactacattaatggcgaacaatttagatcagactctaaaacagttaaccaacaagctttcttttatgctagtgaacgcgaagtccatcacaacgacatatttatattcg

SEQ ID NO: 75418 - DNA, 356 bp, Glycine max
tccggaattgacggatgcatccacgcatgcgtacggatgggtgagacaacagacagaatgggtggggaggaatggagacgaacaagcgcaggttcatagaggataggagcactggcataaagaatctggagatagatttgcgttgaactcaccgcaaccttgctcttgttggcatcttcggcatcgatattccagtactcgtctacaaggtcatcgctcgtgaattccatatgcaagacgaggataatggtcggccgtacaggacgttcatgtgagagagtatggagagtctttggtaataattcgtcaagttagaccttgatattatgaggctacaaaccatgttcatttttcct

SEQ ID NO: 75419 - DNA, 393 bp, Glycine max
ggttctagtgtgtgattgtttgttgttgtaactcgttcttcttcttttgttgttctgtgtttgtgtttgttttttctctcacctgaaaatgtcttgctgcggtggtaactgtggttgcggaagctcctgcaagtgcggcaacggctgcggaggctgcaagatgtacccagacttgagctacactgagtcaaccaccaccgagaccttggtcatgggagtggcacctgttaaggctcaatttgagggtgctgaaatgggtgtgcccgctgagaacgatggctgcaaatgtggaccaaactgctcctgcaacccctgcacttgcaagtgaagtgttgggagagcaagcttcaagcagagatagcccttaattaggaataatgataaactattaat

SEQ ID NO: 75420 - DNA, 387 bp, Glycine max
gaaggtgcaagagtttgttgtgagctataagctagtttatcgtgaggagaatatgaagttgtttgttttctttgttgctgcagtagttttggtagcatggccatgccatggcgcaggctaccaaaggttccctctccgaatgaaaactggctatggtgagcgttcttcggaggtaaaatgcgcaagttttaggcttgctgtggaagcacacaacatccgagcctttaaaaccattcctgaagagtgcgttgaaccaacaaaggactacattaatggcgaacaatttagatcagactctaaaacagttaaccaacaagctttcttttatgctagtgaacgcgaagtccatcacaacgacatatttatattcggcatagataacaccgt

SEQ ID NO: 75421 - DNA, 270 bp, Glycine max
tgtgatacaacagttatagtgcgaacggaactagaaataatattacggaaagaagaaaaagaagcggcacaatggagctaactcctgcgagtgttgattggtgacagctgaagtcgaacaaaataccgctagaaacgcagcatggcgttgcctaagcttgtctcgactaatccagatctgccactaaaccctagtccttctatatcacccctttcttctctactatccgatctgtaccacatacacaacctgcttaattacattaccccc

SEQ ID NO: 75422 - DNA, 271 bp, Glycine max
tatgttaaactatttattgtaatgaattattgtattgttaatttttttatttatatgtaaatatttggtccctaaaaaagttaataagaaaaccaagattatatgaaaaaaaaacaaattttctttgttgtttaaaaagaatattcttaaataaaatatttaaatattaaaaaaattaaaaaatataagcttatttaatttaattataatctataaaaaatgaacattttatttaaaatcatattagttgataaaaatacttaaatatgta

SEQ ID NO: 75423 - DNA, 120 bp, Glycine max
atcatcttagcgctcatatgatacccgacatgcacaatgaggccgttgatatcgccgttcacccgtttgagaagtacaatgtgcagaaagacgtttcggagcagataaagaagctcccct

SEQ ID NO: 75424 - DNA, 196 bp, Glycine max
ggagaacaaaaaaaaaacaactttgcggctgcgctgctgctaatagcgcgttgcatctgctacctatcatacatattttcgccaaaccgccgattccggtgagcgtttctaccgtagcgctcaagaaggaagcagtggctggtggtgttggttgtggtggaggtgggtttgctgatcatttgtggtagaaggtagg

SEQ ID NO: 75425 - DNA, 401 bp, Glycine max
ggataatgtaaaggatagaacccaatctgaaatatctagctctacctcggaaaccaagcatttgtgtgtattccttttcagggagttaagtggaagatggggttgtcaacagcacggacaagcataggatcagtttgtgtttgtgccatctcaaagcctccccgccgtcactgccatttcctcccaacctctgtttctcctgtcttctatgttttcaggtttgaggattctttcaccagagattttgcatatcgagtagcttgcaatggttacaacattctagttccagacttatttcgtggaaatccatggacaaaggaccagcacgatccagatgtgttcgaaaaatggattgctagacaaaacccagagaggatcgcacaagacattaccagatggac

SEQ ID NO: 75426 - DNA, 179 bp, Glycine max
aggtgctcctttactgggatgacagatataaaaaggatgatgggctcaacactatgggttcaaaccttgctcacatgaacaacgataataatttgtatctcaagtccagctgctacgatcgcgacatttacctacttgcgacgaaaatttgtagccatatagcgctgatctattccata

SEQ ID NO: 75427 - DNA, 354 bp, Glycine max
  unsure (1)..(354): unsure at all n locations
tcctgaagagtgcgttgaaccaacaaaggactacatggatggcgaacaatttagatcagactctaaaacagttaaccaacaagctttcttttatgctagtgaacgcgaagtccatcacaacgacatatttatattcggcatagataacaccgtactctctaatatcccatactatgaaaaacatggatatggggtggaggaatttaatgaaaccttatatgatgaatgggttaacaagggcgacgcaccggcattgccagagactcttaaaaattacaacaagctgttgtctcttggctttaagattgtattcttgtcaggaagatatcttgacanaatggccgtaacagaagc

SEQ ID NO: 75428 - DNA, 111 bp, Glycine max
aatattgatgagtcttttcaagtgtgggaaattctgtgctaacttaaagcattctgagaggttgaattcgggagtcatggtggtggagccatctgctactctttttaatga

SEQ ID NO: 75429 - DNA, 232 bp, Glycine max
ggagcgaagagtgaagagaatggctggccaaggtttaacctttctggctgtgttaaatgcgtttcaccactggcacttgattcctttggttgcggggaaaggccaaataatgggcctggtattaacctctaccagggatcatgcccttaagcttaagaccttattaccgaaccaggcaagcttctttaccagcgccaccagaacactgtgttcttctggcttaagaaccttt

SEQ ID NO: 75430 - DNA, 244 bp, Glycine max
gggaatgggaccaggtaacgagcaaggggtatacaacatggagttcttgtaaatggtatgacatggcttttaaacccaccagaacatgatctgacgttgattttagctgataatggacttgacgtaaggattgcgaacacgatacgaacctggtattgtccgcggcccattttaatggaaccgtcttagccaggcttatgggaatggcctttggaatgaactggcctccaatgatttccttgcg

SEQ ID NO: 75431 - DNA, 402 bp, Glycine max
ggcacaagtgagtttgttgatcgagataactggaaacagtgtgatgaaaatgaaagtccttgttttcttcggtgctacaattttggtagcatggcaatgccatgcgtacgatatgttccctctccgaatgaacactggctatggtgcccgtactccggaagtgaaatgcgcaagttggaggcttgctgtggaagcacacaacatctttggctttgagaccattcctgaagagtgcgttgaagcaacaaaggaatacatccatggcgaacaatatagatcagacttccaaacagttaaccaacaagcttacttttatgccagagacctcgaagtccatcccaaggacacatttgtgttcagtatagatggcaccgtactctctaatattccatactacaaaaa

SEQ ID NO: 75432 - DNA, 383 bp, Glycine max
ggcaccacaatgttcttctagatatatatctgggggcaggaagaataaaagcagcctccttcattacttagctaatcaaattgagatagcatcgcaatgccatacaaacattttcattgctctgaaaacgaacactgaaattaccgcccctgctaacaccaagatccgcacatcttgcacgctctctgcaccttcactcagcattctttgccaatctcactctgaaatcactctgattctctccaacttcatcatactctattatttaacaagttccagcattactaaagacaatatttcagcgcactttcttcaaacactgatacctgccagaaccaaccttggacctactgagattgcgaatatactgtctccacaattct

SEQ ID NO: 75433 - DNA, 219 bp, Glycine max
ggtgtgtgggatgagaagatgatgaggaaacattggtagaagaaattgaagagagagagagagagagagagagagagagagagggttggattgcatttcttcttgctttgctctaaagagaatctaatctcaatcctcattacaaattgattgattcctatctcagtcttttgtgctttctccctttgacatactcgttttcgccgaaacataaacaac

SEQ ID NO: 75434 - DNA, 416 bp, Glycine max
  unsure (1)..(416): unsure at all n locations
gaaggtgcaagagtttgttgtgagctataagctagtttatcgtgaggagaatatgaagttgtttgttttctttgttgctgcagtagttttggtagcatggccatgccatggcgcangctaccaaaggttccctctccgaatgaaaactggctatggtgagcgttcttcggaggtaaaatgcgcaagttttaggcttgctgtggaagcacacaacatccgagcctttaaaaccattcctgaagagtgcgttgaaccaacaaaggactacattaatggcgaacaatttagatcagactctaaaacagttaaccaacaagctttcttttatgctagtgaacgcgaagtccatcacaacgacatatttatattcggcatagataacaccgtactctctaatatcccatactatgaaaaac

SEQ ID NO: 75435 - DNA, 106 bp, Glycine max
  unsure (1)..(106): unsure at all n locations
aggggttctagtgggtgattgtttggtgttggaactcgntcttcttcttttgttgatctgagtttgcgattggtttttctctcacctgaaaatgtcttgctgcggt

SEQ ID NO: 75436 - DNA, 414 bp, Glycine max
  unsure (1)..(414): unsure at all n locations
gaaggtgcaagagtttgttgtgagctataagctagtttatcgtgaggagaatatgaagttgtttgttttctttgttgctgcagtagttttggtagcatggccatgccatggcgcangctaccaaaggttccctctccgaatgaaaactggctatggtgagcgttcttcggaggtaaaatgcgcaagttttaggcttgctgtggaagcacacaacatccgagcctttaaaaccattcctgaagagtgcgttgaaccaacaaaggactacattaatggcgaacaatttagatcagactctaaaacagttaaccaacaagctttcttttatgctagtgaacgcgaagtccatcacaacgacatatttatattcggcatagataacaccgtactctctaatatcccatactatgaaaa

SEQ ID NO: 75437 - DNA, 251 bp, Glycine max
tcgacgtgaaaacacagggggcggggtacaggagtgggtgactgcgcgcatggataaagagagaaaaaaggcatgccgaagtcctgtatgtttggatggcaaagacatgtcttaattttgatcccttctcctcaccaggaatcacgttttattgcccatgcgtggaatgaccagctatcgctgtttgctctaagtggaacatttcgcgtatgtattgtctgaaataacatgtcttctactccagaagtgat

SEQ ID NO: 75438 - DNA, 84 bp, Glycine max
gggctcaaggaatttcgcttaattctttgcagaaaaatcagtgcagatgagagcaaattgaatttttaagccgagaacaagatc

SEQ ID NO: 75439 - DNA, 172 bp, Glycine max
gagaataccactgaggggtgggttaaactacttatttcaaacacaaactttattgttaattcttttattaatatgaaactattccgggcctggttccttaataagaaaaccacgattatctgaaaaaaaaacaaattttctttgtactagggttttttgtgcttaaataaaa

SEQ ID NO: 75440 - DNA, 57 bp, Glycine max
ggaggggagaagcccaaaagaactttggcggagctgttacggcgaagcccaacttcg

SEQ ID NO: 75441 - DNA, 184 bp, Glycine max
ctacatgcgaacacactacataaggaaaaatacgacactaaaaaaaaaacatacaatgggcggaaattcatactgtgttgactttcccataataacttcactttcaaaaaacctggtggtttttaacttccacaacatgaacatgatctaaacttcttctacagaagatgatcacaatcatatt

SEQ ID NO: 75442 - DNA, 406 bp, Glycine max
  unsure (1)..(406): unsure at all n locations
ggcacaagtgagtttgttgatcgagataactagaaacagtgtgatgaaaatgaaagtccttgttttcttcgttgctacaattttggtagcatggcaatgccatgcgtacgatatgttccctctccgaatgaacactggctatggtgcccgtactccggaagtgaaatgcgcaagttggaggcttgctgtggaagcacacaacatctttggctttgagaccattcctgaagagtgcgttgaagcaacaaaggaatacatgcatggcgaacaatatagatcagactccaaaacagttaaccaacaagcttacttttatgccagagacctcgaagtccatcccaaagacacatttgtgttcagtatagatggcaccgnactctctaatattccatactacaaaaaacat

SEQ ID NO: 75443 - DNA, 140 bp, Glycine max
gggggatattttttttttggtttaacaggcattttttaaattaaaaagaattgatttttcaatccataaaaaaaatttgaagcttccaatccccaggggtaaaaaaggcccatggaaatttatatacaaaatttgggggg

SEQ ID NO: 75444 - DNA, 107 bp, Glycine max
ggggtttctgaagatcaaatcctcatcttctaccatgtcaagtgctcactttcttcggccatttttatttgtttgttggtttaacaaaacccataatcagaacccat

SEQ ID NO: 75445 - DNA, 159 bp, Glycine max
aggggttttaaaaaaccaaccagccaacccgttccaagggggggatttggaattggaaaggcaaggaattcccctcgtgttcttccctttacttttgaattaaaccctaattaataactttccaatccaccaccttaagcttacaattacaccttcccc

SEQ ID NO: 75446 - DNA, 398 bp, Glycine max
gactctaggtgggtggaggtactttatgatctatggtaaatctctaatagtagctgcgcatttctggaattgcatacttgcggactgtggaggatgacaaatctcgattatgttgtagcttgccgcacagatagagacagattcaaaatctgtcttgcacaggtgtggaagatgtgcttatagatggaccctttctctgtcccatttactacagttactcctaatgttggaatgagttagacagaagtaacatgcagatttgtattcttctggcaaaatggatactccgcttttgcttcatgttctctgattagttggggttgatcttctggactacagtgtgaatctgatatgcgagaaccctattactaccaggattggcgttatcgacgatgcaa

SEQ ID NO: 75447 - DNA, 116 bp, Glycine max
  unsure (1)..(116): unsure at all n locations
tgaacaaaacaagtgtttcgaatagattatcctaagtgtttgggaatagtgctgcaatggcttcaagtcacgaggaggtgacccttttgngagctactggaagcccatttgtgtgc

SEQ ID NO: 75448 - DNA, 53 bp, Glycine max
ctgcggattgtgaaattagaaacatttcacaggtacaaaggccctctatggaa

SEQ ID NO: 75449 - DNA, 112 bp, Glycine max
gggcaacctggatttggactgaatggaaattttaagaaagagaagagagaaataattttcccggaaaattcaaagtccaatcgggacccggaatgaataagggttgggttct

SEQ ID NO: 75450 - DNA, 280 bp, Glycine max
  unsure (1)..(280): unsure at all n locations
ggttctagtgtgtgattgtttgttgttgtaactcgttcttcttcttttgttgttctgtgtttgtgtttgttttttctctcacctgaaaatgtcttgctgcggtggtaaccgtggttgcggaagctcctgcaagtgcggcaacggctgcngaggctgcaagatgtacccagacttgagctacactgagtcaaccaccaccgagaccttggtcatgggagtggcacctgttaaggctcaatttgagggtgctgaaatgggtgtgcccgctgagaacgatggc

SEQ ID NO: 75451 - DNA, 85 bp, Glycine max
agggccccagttagggtggtgatccaaataacttggaaccatgggatgaaaaataaagggcctggtttctttggtacttccattt

SEQ ID NO: 75452 - DNA, 396 bp, Glycine max
acaccgaaggggaggctaaaggagattacagggaaagtgggaaacaggagcttatcccaatgggaatgggccaaattggataccattcaccatagatatcaaaggctgaaattaaaccaattgattgtacatctgacgcgaaaacacattaggcttacctagaaaagctaatgacgtatcgattcaatgtacaaatatgtagaactgagtaacattttagaccttgatactcacacaaatgacgtaacatccatcttaagtgatacaattcaattgctaaaggaccttacttctgaagtcattcaacttatacatgaatatgctactctaaattaagaatcttaggagttggcttactagaaacattaactcagagaatactaggcttgtattaaa

SEQ ID NO: 75453 - DNA, 244 bp, Glycine max
ggaacctttgggtttctggtttcccttttttggggggccaaccggtccttcctcgcttcaattggtgggtgccttgtccaacttgttgtgaaagaaattgccaatggggaccagccagttaaagctgatgccattccaaaaggaaacttttagggttgcctggattcttcagaccggcgaaaatttggttaaccaatattccataccggggttaatggaatctgaaaccagttccaaattgcca

SEQ ID NO: 75454 - DNA, 115 bp, Glycine max
gacggctgaaaactcacaatcatggcagtactagaattatgatgattgtaaggcagcatatctgaatatgatcatgatgagttaaggaggggttacaagcaagtgaatgaactta

SEQ ID NO: 75455 - DNA, 224 bp, Glycine max
ggttctagtgtgtgattgtttgttgttgtaactcgttcttcttcttttgttgttctgtgtttgtgtttgttttttctctcacctgaaaatgtcttgctgcggtggtaactgtggttgcggaagctcctgcaagtgcggcaacggctgctgaggctgcaagatgtacccagacttgagctacactgagtcaaccaccaccgagaccttggtcatgggagtggcac

SEQ ID NO: 75456 - DNA, 158 bp, Glycine max
aggcgtgagaacacctccgataggacgacataatattgtcacatgtataatcgctcccgcggctttgttcctaaaattatcactagctgcgataaatactagacatatgaacatggatttcacacactatcatttacctctaatcatgaatgttttac

SEQ ID NO: 75457 - DNA, 162 bp, Glycine max
tattggacttttaagccataactcttcaattcggggagtggatatctaaattgtgaaacacgattacttgaactatgctaagaaccacattttatcacttcatggtttcaaacataaacttgactctataccctaattacccacttcattcctactacgaac

SEQ ID NO: 75458 - DNA, 385 bp, Glycine max
ttattttttttttttatgagcaaccacaagcgaactgtaaattcacaattcatagtaaatgaaagacacttttagatttttatttatttatttggtatcatcctaattggggccataacatttggtcccaagtatctcgaacaagatttagtcgcacttaaaacatttcactcctccttaagagtgtattatgtgggattgaacccagatccttttccacagattgtagtcacgcagagtcaaaccatacgtaatgttaattaaataaataaaatatcttcatctataagaaaagctcctaaattacaaaagatcaaaataacttcaaattacataaataactcctattaattagcatcaattcttttctccccttctttttttg

SEQ ID NO: 75459 - DNA, 371 bp, Glycine max
  unsure (1)..(371): unsure at all n locations
gatggtaaacatgttgctcacaatgctcatatgtcaccactcactgcaggatgagacttcaagcccgattagtgctcgaatattcgaactttgcgagcctgatttcttgccagacacacttgacaattcagatgttactttcagctccaattgatgtcatgactagacgtcctcatatgccacaaccatattttcacctgtagatatagtagacgccangatcaatatcaataacactagcaccatagtcactactacctcatgtagcactaccacaaccagcaccccatccatcaacagcaacaacagcacatcgaacagcaataacctgtccatcctctttgacactcangatgaaattgacaatgaca

SEQ ID NO: 75460 - DNA, 407 bp, Glycine max
ggcacaagtgagtttgttgatcgagataactagaaagagtgtgatgaaaatgaaggtgcttgttttcttcgttgctacaattttggtagcatggcaatgccatgcgtacgatatgttccctttccgaatgaacactggctatggtgcccgtactcccgaggtgaaatgcgcaagttggaagcttgctgtggaagcacacaacatctttggctttgagaccattcctgaagaatgcgttgaagcaaccaaagaatacatccatggcgaacaatatagatcagactccgaaacagtttaccaacaagcttacttttatgccagagacctcgaagtgcattccaaggacacatttgtgttcaagatagatggcaccgtactctctaatattccatactacaaaaaacatg

SEQ ID NO: 75461 - DNA, 327 bp, Glycine max
gcggccacgcgtccacacacgcgtgcatacacgtgttagacgactgcaaaaagtcatcggggaagggatagattagaaaaggatcgagttatactgtgctacaattctgattgattatctctgacatagcctcgacaaccttttatgttcaaatgaacactcgcttatcaggcccgtactaccgaggataaatgctcacgttttaccctttctctggaatcgcccgacatcctttgactttagatcacttatggtaaatgcgattcaacttcagttgaacacatgtataggcaaccatctataattgaatcttacacatttcttaca

SEQ ID NO: 75462 - DNA, 96 bp, Glycine max
gatgctggttttgttaagatgattccaaccaaacccatggctgttgaaactttcttcgagtattctgcacttggtagggttgctgttagggacatg

SEQ ID NO: 75463 - DNA, 210 bp, Glycine max
ggagcgaataatatgtgaaggggtttgagtgcagtgcggcgatgctagcactctcttttgcagctttcgccgacagcttcattcaccatggctgagtaaaccgagaaagcttttttgaaacaaccaaaagtgtttttcagctcgaagaaaactggcaagggaaagagacccccaaagggtgtggaaccgcttttggaaatccattgggct

SEQ ID NO: 75464 - DNA, 174 bp, Glycine max
gaaggcagagatcacatagacccatctaattttggactcaaatagttggtggtatggatgaccaatttttgaccggtcataggcatagtcgtgagcccatggctaagggcttaattcatgagaaggctttaaaagcccaaattttttgccacaatgggtgccacgaatttttta

SEQ ID NO: 75465 - DNA, 414 bp, Glycine max
accaggagatttacaacactcgtacaccctactcaaccaactgagctaaacccccttgttattaatattgtattacattatatatctattggtataaaccaattatcctaaaaaggcttaagtcattaggtaaaagattttgtattaacatctgtagtagacatcatcatgatcagtataaagcttacttttgctggacatgataaatgctctgttgatgaattatgttttttaatccctaaggattcactagaagaataaatgcaagcaagctaaagtactaaaagttctttagaattcccttttacttttaatgcaggatcgtgatgagaactacattatgttggtatcaagttgctctagaccatgcccatcaaatagaaaatactttcttttctttatatcttttacatg

SEQ ID NO: 75466 - DNA, 415 bp, Glycine max
gcacctaacggcatttgtgaaacttgaaaccttagcggaggtaacttggttggagcgagttcacattccgtagatgaatggatggtccttagtgctaatttggcaccatcaaattactatgataattctagtgttagcatgtgtgaatccagatctgaggttcattgtgcagattagcgtggaagagaactatggagtcagcaacggtatcatcatctgagtcggagactgcgcttgctcttgctctggcgtcgtagtcacagcatccctacgtctacgaacttgtctgcttcacgctctatcgcctgcacatggaacgcgaactcctccgcgtggacgccaaccgcattcggcgtcaaatgcatgaggtcgtactcggcaactaccgatctttcattgccgtcgtcgacgcctt

SEQ ID NO: 75467 - DNA, 170 bp, Glycine max
gtggcactagggtcaatcatccaataaattgatgcacctaagagtactatatgagaccccatacctgttactcaagatgcattctcagtaccacccacaccttgtagagaaagagagaatttatcaattaagtcatagggaaaattgaagaaaaccaatgtgacttcagt

SEQ ID NO: 75468 - DNA, 405 bp, Glycine max
gggatcgaatttcgcagcacgatttggggctttccggaaatccaattagggatttcaacggttcttctctccgttccgttctcgtttcgtcgcggaatcacaaaactgaaaacaatcaaacctggggagtgaaggttcaggcttcgatcctcgctccttgtgctgatgcctccttcggctctggcgctacgtcatggccgataacatggaaatcgatattccctccgattcccagccgctcaagcctcgcgatcgagttgttcggaggcttgcccagtttggtgttcctgaggagcagctcgaccaacctggtttggttgcttttgctaaggataagagggcgttgatacctgagctggtgtctgtgatattgcctactgatgcggaagtggcagatgcatggga

SEQ ID NO: 75469 - DNA, 396 bp, Glycine max
  unsure (1)..(396): unsure at all n locations
gaccatctaaggtagctgtaaattagtgactttaatatttgaagtttgagatgttgcagcatgttttgcttgctggttgctgatggcaaagaccatgacttgaaggatgatggtgaagagaatggttgtaaagaagagtatttggtgcttgtgggtgtgaagctggatttttctcttttaggaaacatctctgttggacattaaaaacatgttaacagagagcacattgcaccgcagcccatcattgtcttcgctgtgcatactcgaggagacatangctgtctgtgttaatggctaagaaagatggaagttgtgagtgatgttgatgggttgaccaggtcaagggtgatgtaatgcatgcaagtacttgtgcactctgatacttgcatgtgtgca

SEQ ID NO: 75470 - DNA, 399 bp, Glycine max
ggccacttttcgctgagatgctgcgactttctaacgaaactggctaactgaataaatgattaatgcgattacatgggtgcataaaagggtttcgaaatcggaactagtggtggctgaaccttctaccgacaaggaaaatgatcacacgatagtcaaccatgcattcactaggatagacaaggaccatgaagacgctatcgacgatgaccttgtggcacatgcattaaccgtatcagacgcagatgacaatgcctttactggaacctgcgacgataaaaccctcgcggtgaatgaccttgacatggacctttatgatgactaaaattaaggaattgatgtgttcagttctggaattggctatcgttattatgctagtaacgacatggatccctatatcaa

SEQ ID NO: 75471 - DNA, 180 bp, Glycine max
ggcccatggacgtcgcagacaccgggtatgaggaccacgccgaccacaaagcacgaggtaacaaacacatcactggcgacgaacgagaggggcacggagaagaggtaaacgggaagggaacaacggaaaagaggaaggacgacgggctaaaggagaagaaacggaacaaggaatggggag

SEQ ID NO: 75472 - DNA, 428 bp, Glycine max
ggcatataacgattagaaaatctagtctgactcactctcacgaggttatgcaacaagacaacgcgacaggggtcccacttccagatctacttactacgcttctctgatctgacactcatcattctgatagtataactcctttttgggaaagcttaaaacttgaatgcaaaaccacaccaccccattagccatttggtgatcaaaatcgatcaatggagtttactgcatcttacaagcaaacgggatcctgttgtgtgtcttccaacgctcgattcattgccattggcgttgattatcgtgtcgtgattcaggagaccgtatctttcaaggtcgtgcagttgctttcatgcttagacaagattacctatattgaatggccccttgattctgaatatattctttgcggtctctacttaacgacgatgata

SEQ ID NO: 75473 - DNA, 428 bp, Glycine max
ggacctgaggttgtttttgcaggcagaggaagagacaatggaacgattaaggtcacacgagactggcatattcaagaagaaaccagccgatctaatgcagatttttaaggatgtgcaatctaaagtcagcgatgttgtccttgggaaagagaagccagtagaagaatcagatcctgagtatgaaaagatgaaacattacatctttgagcttgaaaaccacttggctgaagctcaaaagcatgcataccgtcttgtgaagaggcacagagagttggggcaatcactgtctgattttggaaaagcagtaaaacttctatgtgcttctgaaggaaatgctcttgggaaagcgttctctgaacttgggatgaagtcagagattttatcagccaagttgcaaaaggaggctcatcagctcttgatgaattttg

SEQ ID NO: 75474 - DNA, 424 bp, Glycine max
  unsure (1)..(424): unsure at all n locations
ggtgagagagagagcgagcagtttcagacacagagagaggggtttgggattggagggattgacgctgcgtctcttcctcttctctttcgatccatccctcattcctaatcctccaatccaaccacctcagcctcacactcacatatacacatatctgaacgcgtatcgtccctcctatggcttcaaagcgcatcctcaaggagctcaaggacttgcagaaagacccaccaacttcttgcagcgctggtccagtagctgaggacatgttccattggcaagcaacaataatgggtcctgctgatagtccttatgctggaggtgtattcctagtcactattcacttccctccggattatcctttcaagcctcctaaagttgcctttaggactaangtgtttcacccgaacatcaatagcaatggtag

SEQ ID NO: 75475 - DNA, 68 bp, Glycine max
gaacttaattagaaattaaattgcacaaaaagcttcagaattgtcctatttattttgtgtaccttttg

SEQ ID NO: 75476 - DNA, 317 bp, Glycine max
gagagagaggtagagtgttgatactggagcggaggcactcgaattaggagagtgaagcaagaagaagatgaagatgaggcagaagaagatgcattgagaagacggtgtctgaggaaactgatctgatgctgtgactgggactatgtctgcctggaaatggaacgacggtatcaactgaagctgctgatgtggtatcatgaatcaggactagaggtgtctctgagactgcgactgatgaaacatgcacgcgtaatttaatgcttaagctctgacgcacagaagctactgctgctgatggtgcagatccacgtgagaag

SEQ ID NO: 75477 - DNA, 433 bp, Glycine max
ggcacaagtgagtttgttgatcgagataactagaaacagtgtgatgaaaatgaaggtccttgttttcttcgttgctacaattttggtagcatggcaatgccatgcgtacgatatgttccctctccgaatgaacactggctatggtgcccgtactccggaggtgaaatgcgcaagttggaggcttgctgtggaagcacacaacatctttggctttgagaccattcctgaagagtgcgttgaagcaacaaaggaatacatccatggcgaacaatatagatcagactccaaaacagttaaccaacaagcttacttttatgccagagacctcgaagtccatcccaaggacacatttgtgttcagtatagatggcaccgtactctctaatattccatactacaaaaaacatggatatggggtggagaaatttaactcg

SEQ ID NO: 75478 - DNA, 268 bp, Glycine max
ggttctagtgtgtgattgtttgttgttgtaactcgttcttcttcttttgttgttctgtgtttgtgtttgttttttctctcacctgaaaatgtcttgctgcggtggtaactgtggttgcggaagctcctgcaagtgcggcaacggctgcggaggctgcaagatgtacccagacttgagctacactgagtcaaccaccaccgagaccttggtcatgggagtggcacctgttaaggctcaatttgagggtgctgaaaatgggtgtgcccgc

SEQ ID NO: 75479 - DNA, 420 bp, Glycine max
  unsure (1)..(420): unsure at all n locations
agaataccaaaaaaccaatatttcctgggcccttgcctagataagacgggatcatttaactcncccaaaatttaacaacactatgtgaccctgaaaatgatcacaacttatttcactcttttcattatgagcaacctactcttttacccatcccaaccactaaaagttaaccatttttcgaaatccctatcaaaatttgcacctacagcacgaacccatttaaaattcttaccaacgccgcaattccactaccaaaaaagatactttcaacaacgcacttaacacttgaacttctcaaagctacccacgtttgctaaacgctaccttatcattaccgaacacttggagagtccacatcaacttggccccattttttttttatatggaaactaaagctacatcgaatggttctgccaaaac

SEQ ID NO: 75480 - DNA, 173 bp, Glycine max
ggagcgaagaagatattaaggtttttgagtgcggtgcggcgatcctagcactctcttctgcagctttcgccgacagcttcattcaccatggctgagtaaaccgagaaagcttttttgaaacaaccaaaagtgtttctcagctcgaagaaaactgggaagggaaagagaccccg

SEQ ID NO: 75481 - DNA, 297 bp, Glycine max
ggctataaaacgtataaaagaaaaaacaaaaatggcaccacggagaatataaagtagcaatcacttaaatacatatacaaacacaacctgttaaaaattcttacctcactaccacacatatgcccctcacgcccagacgaacagaactttgaacctaccacctacaataaagacttataaaccatctcttccagcaaacgaaccttgacacaaaccaaaaccactacatattctgattatgaagacaccaataaataaccaacttctactgtcaccaaacctatacttataaactat

SEQ ID NO: 75482 - DNA, 415 bp, Glycine max
ggatagagagaggtgaaaagaaacgttgcataaaaaatcaaataatgcgtgtggctctcactcaacccacctgggacctggctcggaagtgctaagaaagttacaaagctcttttctcctttcttctctgtggtgtgtgtggtgatggtggttgtggtggtggaggggaatcccatttgctgctccaaccgcaaagtgcagatatttatttgtattgtaccctcttttgtatttattggtttctgtttttgtgctaataatgggagaggaagcacaggtaaagcacttcagatcataggtacttttttttttttttaactttaacacaactttgtgattatttccagaggggaaggggcatgtacatatggttcattttggattgtaaacagtgacctagaatcagttgaataaa

SEQ ID NO: 75483 - DNA, 278 bp, Glycine max
aaccaccgtttggggatttatagaggtgaaacgaaacggggataaaggatcaaataatacgagtggctgtcactcaacccaccacagacactcttaggatgtgctaagaaagtaacaaagctatgctatcccttcccctattaacagagtgaggaaacaacccttgacaacaaagactgaaaaaccatctgtttcttctaccgctccttgcttagatgcaaacgactcaccccctgattcggacgaccccaaatactcacttactctcatcttcacta

SEQ ID NO: 75484 - DNA, 181 bp, Glycine max
acgcgatcgggctcatacatgaagacctccgacaccgggcatcttggagtcagctgcttttacggctatggtacccacacactgtcagttggtctgaattctcgttctgagttagagcgtttcgatgagtattcatgatatgagacgaggagcatggtaccgtattccatgacaccaagaa

SEQ ID NO: 75485 - DNA, 285 bp, Glycine max
gggatctaatgaacgaatgcatctttgatgttgacaccaacgttttgcaaagtctagattagaaacttgtgtaactggaacagatatgctcattcttatcttgaatcaagaccctaatcttctgcgatcctattttgttcgacaggaaagattcgctatttttggacttttgggtaaaggaatgttcacagattttggagaagacatgcactgtcagtatctttgaaaccttcgtaattcatttgactcatgcacatcttctggaccacagagggacactattat

SEQ ID NO: 75486 - DNA, 368 bp, Glycine max
gcttatgttgagaagaagaagatatgtactcttgaagatctatgggatgatgagaagaagaaggcgcaacttcattggacattcatattctgaaaccttattgtgcaatgggctcagcggatagcaaatttcgtgttaggatctggatctatgcacgggcgtctaatatcatgtccttatgctgcactaaatatgcgcaacaataggatgtttgctccatctctaagccatctgactgaagcacgactgagagatctacgacggccgctagaagttgcatatgatggtgctaaagcttagcaccaagacgcacttgaacaatcgtggaaattggcttacccggacagtgagcttgcttgacttaaatc

SEQ ID NO: 75487 - DNA, 421 bp, Glycine max
gacaacttcatttgttgacaatcatcagatgaatggtagtcagagaaaaaggcgaacaaacccaaatgaagcactggtcttgtccactgcacctgaggaccctcctacacattggcagcaggtgcagtatttattttttcaatttccagtttaaatatctggttctagttttttgttcaatgaatgtatatacaagtctgttctcaatgcttttcttaagcatacatgaaaataaaaatgtataagatgtctttgatctggttgcttatttgtattcaattcttaataactccatagttggatcccagctatatgcttgcgccacacttgcagcaaggatgttatcacctcaccaagtagcttgtggtgcaagattacattgaagcacagccacacacaccgaaaaaactaaatatgcttt

SEQ ID NO: 75488 - DNA, 334 bp, Glycine max
gcttggaaaagaccaccgaaggggggagagtgatggatcttttgtgtatcaataatgagggggtatcatatgaatgtactgtacccaacaattatgtccactggggtggtgcataaagcattgatattagatattactgagactacaatgatctaatggcatatcctcgcaattgcatattataactacagatatgatgctacagatgggtacttttttccaccacctgtcattagagattcatatactgtatatcattatcatgatggcaactcatacgtgggactctttcctaatgatgatgatcatcggatgtcttacctattggctttga

SEQ ID NO: 75489 - DNA, 434 bp, Glycine max
gaaggtgcaagagtttgttgtgagctataagctaggttatcgtgaggagaatatgaagttgtttgttttctttgttgctgcagtagttttggtagcatggccatgccatggcgcaggctaccaaaggttccctctccgaatgaaaactggctatggtgagcgttcttcggaggtaaaatgcgcaagttttaggcttgctgtggaagcacacaacatccgagcctttaaaaccattcctgaagagtgcgttgaaccaacaaaggactacattaatggcgaacaatttagatcagactctaaaacagttaaccaacaagctttcttttatgctagtgaacgcgaagtccatcacaacgacatatttatattcggcatagataacaccgtactctctaatatcccatactatgaaaaacatggatatggggtggagg

SEQ ID NO: 75490 - DNA, 433 bp, Glycine max
ggcacaagtgagtttgttgatcgagataactagagacagtgtgatgaaaatgaaggtccttgttttcttcgttgctacaattttggtagcatggcaatgccatgcgtacgatatgttccctctccgaatgaacactggctatggtgcccgtactccggaggtgaaatgcgcaagttggaggcttgctgtggaagcacacaacatctttggctttgagaccattcctgaagagtgcgttgaagcaacaaaggaatacatccatggcgaacaatatagatcagactccaaaacagttaaccaacaagcttacttttatgccagagacctcgaagtccatcccaaggacacatttgtgttcagtatagatggcaccgtactctctaatattccatactacaaaaaacatggatatggggtggagaaatttaactcg

SEQ ID NO: 75491 - DNA, 236 bp, Glycine max
ggagaaagaaaacaagcgatatgatcatcatcaagcacattgaggaacgttctagagagagagaaagagttgttgataaaaacataattataagtcgttgcttctctctcatggaaaacacagctgcgttgggggaacttgaagtgctccatgacgacaacgccatcataccctaagccctcggagattccgtggcagaaagagctctgcaactccgtcaacctcatcggcaatgt

SEQ ID NO: 75492 - DNA, 414 bp, Glycine max
ggtcctccgttggttataataataacaataaaaaattcattagattgaaggtttctttgtttctcaaaaccctcttgattctactcctcttcatcctcaaattcataacccttttacagtttcacctttccctgcttctctcaattgtgcttggcctttaactggctatccacgttgccggtcgatgatcaccgtttctctgtttgcttcgtatcccataattcacctcaattcggttgtggccatatatattcttctttgatcacgacccatataccggtttccattgaaaactgatcacggcttttctggctttatctagaactgaaatgccattttcaagaacctgaggattcaaagctctagtcttggcacagtgttacaagttcataatggatttgaagattcaacata

SEQ ID NO: 75493 - DNA, 416 bp, Glycine max
cgacgataggggcattcgcgaatgtggaaccagctgtggctttgacacttataaatgttctcgagcacacattacagcgactaccaactgtcatctcagagaatattctctatacatgaaggcgtcgtcttgatgtatggacttaactacatattgatagcacagaccatgtaactgagcaacgcgcataatgtatggaactatattcatcatatcgctcaggagaaatgtattgttcgtgaagtccgttttacaattcggagagtcaatatacctgtcttgatgcccttgatatatctcgtcatcacatacatgggcatagctgacatgcttttccatagcaatctaggacggagtgctaaatcatactatcatttacgttagtttataggacatgataccttactggggacata

SEQ ID NO: 75494 - DNA, 413 bp, Glycine max
  unsure (1)..(413): unsure at all n locations
gaaggaaacgaatttattcttctcttgcactcgtctggagtcaagactctggaggagccttatcccgatccgcaagaacacgcaaacaccgatcaattaattttctttatgctagatggggagtgcatcagagttcgacccagcgcttgcgctttcccacaaattccctgatgtaatattctttgcgtaatctttttcttttctttttagtaggttttcctaatttacaacaaactgaattctgaatttctgttatcattttgatcgtgcgagatgctctgcagactacgtactcttataccgaaagggatgcagcactttatgccctaagcgtangggtgtgtttgtcggacgctgttgacgctgatgagcttaaatatgtttaccatgaaaatggtcaggagtctatcaag

SEQ ID NO: 75495 - DNA, 309 bp, Glycine max
gaggatgaaggggtgtggaagaggcgtttggagtgcaatgataatggctcgattcggtgtcctaatcgttgttcttgtagttcgcaaacaaaataatatacagaataaaaatttgaaaccgtggtgtgtgtacttgttttgttgttgttgcatgaaacatagatgcggatgcttacatgattctggtgttgttgtcctgtctgtgatagagtttcatagtgccgttagatcatatatctgatgataaacactgtcatcctactttcttacactttggtactgtttgactattatagtcctactctcacg

SEQ ID NO: 75496 - DNA, 410 bp, Glycine max
gtaatgttgatgatttggggcttgcattttgattgttgttagttagggattgcattagctgctatttctttatgcagttgttgtgatttgtggaagtagactagacactaggaacatgaaatttgatgtttgattttgttaaaactgatgttaattgaatgtgtttagaatgtttgaatttgaacctcggaagaagagtaataggcgtttgtttagaatgtttgaatttgaacctagggattgcgttagctgttatttctttatgcagcagttgtgatttgtggaagtagactagacactaggaagatgcaatttgatgtttgattttgttaaaactgatgttaattgaatgtgtttagaatgtttgaatttgaacctagaagagtaataggcatttgtttagtttgttt

SEQ ID NO: 75497 - DNA, 428 bp, Glycine max
ttcatcacaagttttgaaaatgtgttttaaattgctgtggttcatctttttagctgtcaatatggagaaaggtgtagatatttacatgttcagcaacagcggaaacctaatgttaatgggtttggaggacagagcagttctcatcaacagcaaaatacaaatccctttggatttgggtctggctctggctcacaacaacagcagaagggtaatccttttggttttggcaagcataacagctcccagttgaatggggggcctcattctgagaacaaacccaaccaatacaaggttctcactctttcctatgcatatacatgacgtgaaggtttattttaattatatcgttttaattgttaggtattataatagatgaatacaccattatttatggtctatttttgaagggttttcattgctatgtctgc

SEQ ID NO: 75498 - DNA, 314 bp, Glycine max
ggcacaagtgagtttgttgatcgagataactagaaacagtgtgatgaaaatgaaggtccttgttttcttcgttgctacaattttggtagcatggcaatgccatgcgtacgatatgttccctcttcgaatgaacactggctatggtgcccgtactccggaggtgaaatgcgcaagttggaggcttgctgtggaagcacacaacatatttggctttgagaccattcctgaagagtgcgttgaagcaacaaaggaatacatccatggcgaacaatatatatcagactccaaaacagttaaccaacaagcttactttt

SEQ ID NO: 75499 - DNA, 408 bp, Glycine max
ggctgatctagcagcgtatcaatgagaaaatgtagatagggaagaacaaccatttttcaatgaccaagatctgttgaaggctgtggttgatttagctacatcaaccgaccttgatctccaggaaaaggtgattgttgatacagcacctgatactatcgttaaagcattgtcaaatgatctgttttgtttgtgactaaccttatctgtgcaatgccaatgtcataaaaacacattttgaactatgcctctttcatatgcaagactccaagccatgttccattatggtatgtctacatctgaaattgatccaatgaggttgttcaatgttatctgctttccaatctatgatctctcaatttgcccacaatgttgtgtttctggtgatgttaagcatccttctggaaatca

SEQ ID NO: 75500 - DNA, 393 bp, Glycine max
  unsure (1)..(393): unsure at all n locations
ggttctagtgtgtgattgtttgttgttgtaactcgttcttcttcttttgttgttctgtgtttgtgtttgttttttctctcacctgaaaatgtcttgctgcggtggtaactgtggttgcggaagctcctgcaagtgcggcaacggttgctgaggctgcaagatgtacccagacttgagctacactgagtcaaccaccaccgagaccttggtcatgggagtggcacctgttaaggctcaatttgaaggtgctgaaatgggtgtgcccgctgagaacgatggcttgcaatgtggaccaaactgcttctgcaacccctgcacttgcaagtgangtgttgggagagcaagcttcaagcagagatagcccttaattaggaataatgantaactattaat

SEQ ID NO: 75501 - DNA, 435 bp, Glycine max
ggagcaagagtgaagagcgaagagaatggctcccaagggtttaatctttttggctgtgttatgcttctcagcactgtcactgagtcgttgtcttgcggaggataatggacttgttatgaacttctacaaggaatcatgccctcaggctgaagacatcatcaaagaacaagtcaagcttctctacaagcgccacaagaacactgctttctcctggctcagaaacatcttccatgactgtgctgttcagagttgtgatgcttcactgttgctggactccacaagaaggagcttgtctgagaaggaaacagatagaagctttgggttgagaaatttcaggtacattgagaccatcaaagaagctttggaaagggaatgcccaggagttgtttcctgtgctgatatcctcgttctctctgccagagatggcattgtttc

SEQ ID NO: 75502 - DNA, 411 bp, Glycine max
gaatataaaaaatattactttttctcttctattattatctgaataagtgacatataaagtatttattgactttaattgattaatggttttggttgaagaaattgattaattatcagtctctttttttaataattatgcttctagctagagatttttcttaacatattatctctttacgtctatcttcattttttacttttaaatttaattttaatatattttttttaaatattaatagttaaacattttgtctcaaaatataaattatttttcataaatttaaaatatttatttattatgtataataaatatttatctcgtgtattgcataagcactataatactaataataataaatttccgttaaaaggtgtaacaaagggaaatgcatagaactactctatataagga

SEQ ID NO: 75503 - DNA, 408 bp, Glycine max
gaagagtgaagagcgaagagaatggcgcccaagggtttaatctttttggctgtgttatgcttctcagcactgtcactgagtcgttgtcttgcggaggataatggacttgttatgaacttctacaaggaatcatgccctcaggctgaagacatcatcaaagaacaagtcaagcttctctacaagcgccacaagaacactgctttctcctggctcagaaacatcttccatgactgtgctgttcagagttgtgatgcttcactgttgctggactccacaagaaggagcttgtctgagaaggaaacagatagaagctttgggttgagaaatttcaggtacattgagaccatcaaagaagctttggaaagggaatgcccaggagttgtttcctgtgctgatatcctcgttctc

SEQ ID NO: 75504 - DNA, 107 bp, Glycine max
gacacacggagcgcggaaccaagtgaaatgattgagaagagagagcgaagaaaaaaaagagagccaaaccaaacctttcccgaaacggttcgttttgcccttcttcg

SEQ ID NO: 75505 - DNA, 375 bp, Glycine max
gccacgcgtcgtacgctgcagaagacacgaggggacggcacagagaatatcaggttctagatctatccgacgtcgccagatccaccaaccgttatggctgcttcagcgggatgaaacggctcgttttcggttcttggagccgcactgcctcgtcttctctgatgggagctgctatggccacaaagaggggtgggcgtggcttcatgggtgtgatgagacctgactgggagaagctattgtcctgtgcatggtggattttgggattatggcttatatgctgtattatagaccggattaatcaaggccaatttattacctttgaggtatgcacatcttctctggcttgctgtgctggctggcttctgtgcatggtat

SEQ ID NO: 75506 - DNA, 184 bp, Glycine max
aagtgaaattattcagaagagagagcgcttaataactatatagccaatccaaacatttctctaaacggttcctttttcccttcttcaaaaccctcccttctacgcctcttctactgcttcggtcttcgtcgtcaactcttcattaacccaagaccactgtcaatccttcagaaacctcatatct

SEQ ID NO: 75507 - DNA, 147 bp, Glycine max
gtatgaataaatgcgtgtgctgttatcctacttcaggtctgtgtaggcatgcattctgaatcatttcaagttcctgtcttagttaatataacagccatggttgtggcattctatggtttattagactaaactatctgcagaataact

SEQ ID NO: 75508 - DNA, 147 bp, Glycine max
ggttatagaaagagagatagaaagaaaatgattgatggcaataacagtgtcaacatgagccaccacaagcctaatttcacaggaacaaatgaagttgttggttaagactatgaatcaccattgttggcgttgccactgctaagaaac

SEQ ID NO: 75509 - DNA, 290 bp, Glycine max
ggttctagtgtgtgattgtttgttgttgtaactcgttcttcttcttttgttgttctgtgtttgtgtttgttttttctctcacctgaaaatgtcttgctgcggtggtaactgtggttgcggaagctcctgcaagtgcggcaacggctgcggaggctgcaagatgtacccagacttgagctacactgagtcaaccaccaccgagaccttggtcatgggagtggcacctgttaaggctcaatttgagggtgctgaaatgggtgtgcccgctgagaacgatggcttgcaatgtg

SEQ ID NO: 75510 - DNA, 360 bp, Glycine max
gacggtgacggctctcgacagggacgacactctgggtcagcggtctaacttactgggcacatgccaaatccctctgatttcgactggatcgattaaggttgtcacagcggtcaaatgtgcactacacaaccacactgactttttctgctaaactaaactaaaatggtatcctccggtagaaattgctgcttcaaatatcccggcacctactttccgaaggggtatgcctcacatcctactaatgctatactctgcacaactcatttttgcccaaattagctgaccccaattaccctgttggaaaagatgcactgagtgctcattcttttcaccatgcccacaaacttgacctccttttat

SEQ ID NO: 75511 - DNA, 166 bp, Glycine max
aggggaagggaataaagtaaaatggtatgtgggttgctgaggcaacaaaaccattcactaaattccaattccacagacccactactttatttccccctgcttccgatggcaaaccaagcttcactctccttttcttctttcgggacccctggttaaccccctttta

SEQ ID NO: 75512 - DNA, 306 bp, Glycine max
gcatttgagatgtaaggacatgaaagaaaagaggggatatgtttatgcgtttgtgtgggagatagagagatagagagagagaaagagttgttgataaaaacataattattttttcttcttggtctttggagggtcatgtagatgtagtagctatagattttaggcttatttgttgataccctttttgttctttatcttatttgagatttcgaagatctaaagcgttttaaaatcgggttaggctgtgagtgaatttcttgagttgaagtttttatctttctttctatctttgcaccgatgaggatc

SEQ ID NO: 75513 - DNA, 82 bp, Glycine max
gaatgtaaaaaatagaggttgaagaagcaagcaccaacgtgaataccctaattcggagggtttcagttttcgccctcttttc

SEQ ID NO: 75514 - DNA, 413 bp, Glycine max
ggaggacacggtgggtaaagtattgaagagaaacctacatcacttgaaccgcaactgatggagctgaagaagcagaagctactaatcatttgttgtgactgtgagtagcaaagtttagtttggagatgttagaggagaaggatgtttgtgtatatgtgaaagtgtagactctgacaatgaccccgccggagctccgtcacggccacttcgtgttcctgcaaccagccttcgccggaaattaaccgtcacagcgacttgagggttggatgaggtggctgttttggttcaaggtttggttcgaggaacttgactataccttgccaagcacaagaaaatggttgatcatggaggtgtgccagtagaagttggtggtgaggcgggctatgcagtacgtaatgctcgaaaaaccgagt

SEQ ID NO: 75515 - DNA, 439 bp, Glycine max
  unsure (1)..(439): unsure at all n locations
cgtagcacgaattgatacgcgaaatacccaagaaacatagtgtcagtcacncttcgttctctcttcttgtccctcgatatctgttaggttcgcattctctgtcatatcatacccattgatgccgtcgatctcccatatttctcactgtgaatagtattgaatgaaacgaatatgatgaagtaactggccaggagccagaagcaatgggcttctgtggcatgagaaactgctagatcagttgctttgtcccaagaagatgcatgaaagaagctcccaaagttggcgttgtttgccgaatcttcaatgtgccaacatcacaaatcagtctgataccctggacctgccagtacaagcatgatgtaatcttgatcattaatacagcttaatggttaccccattattaacagggaannatcgtcaatttctaaatctatcatca

SEQ ID NO: 75516 - DNA, 309 bp, Glycine max
ggcacaagtgagtttgttgatcgagataactagaaacagtgtgatgaaaatgaaggtccttgttttcttcgttgctacaattttggtagcatggcaatgccatgcgtacgatatgttccctcttcgaatgaacactggctatggtgcccgtactccggaggtgaaatgcgcaagttggaggcttgctgtggaagcacacaacatctttggctttgagaccattcctgaagagtgcgttgaagcaacaaaggaatacatccatggcgaacaatatagatcggactccaaaacagttaaccaacaaggcta

SEQ ID NO: 75517 - DNA, 414 bp, Glycine max
gagagcgaagagcgaagagaatggctcccaagggtttaacctttctggctgtgttaatatgcgtttcagcactgtcactgagtccttctgttgcgggggaagggcaaaataatggccttgttatgaacttctacaaggaatcatgccctcaggctgaagacatcatcacagaacaagtcaagcttctctacaagcgccacaagaacactgctttctcctggctcaggaacatcttccatgactgtgctgttcagagttgtgatgcttcactgttgctggactccacaagaaggagcttgtctgagaaggaaacagatagaagctttgggttgagaaatttcaggtacattgagaccatcaaagaagctttggaaagagaatgccctggagttgtttcatgtgctgatatcctcg

SEQ ID NO: 75518 - DNA, 442 bp, Glycine max
ggagcaagagtgaagagcgaagagaatggctcccaagggtttaatctttttggctgtgttatgcttctcagcactggcactgagtcgttgtcttgcggaggataatggacttgttatgaacttctacaaggaatcatgccctcaggctgaagacatcatcaaagaacaagtcaagcttctctacaagcgccacaagaacactgctttctcctggctcagaaacatcttccatgactgtgctgttcagagttgtgatgcttcactgttgctggactccacaagaaggagcttgtctgagaaggaaacagatagaagctttgggttgagaaatttcaggtacattgagaccatcaaagaagctttggaaagggaatgcccacgagttgcttcctgtgctgatatcctcgttctctctgccagagatggcatagattcgctagga

SEQ ID NO: 75519 - DNA, 192 bp, Glycine max
atgaggaaggaagattagtttgagggcatacaatatagctaataatgttaatctgttacctcacccataaagtgagttttacatatagacatttgatgaccatttcctgcagctttatacctctcatctaaccttcgaatacaatacgtatcgccctgaatcgacctatatctatgttctttgatccttcat

SEQ ID NO: 75520 - DNA, 207 bp, Glycine max
ttgactttagaagcatgaggaaggaagatgagtttgggggcatcaaagattgctattaagtataatctgtatcctcacccagaaagtgagttttacgcggagacattctgtgactattccatacagctttcaacctctcagctatctcttgaatacaatgcgtatcgtcctgaatctacctatatctatgatctcgttctttcatcc

SEQ ID NO: 75521 - DNA, 217 bp, Glycine max
ttattctaatgacaattctacagattaaccaatcgaactgatagatcagactaccactataagagtcctttatatcaactttgactatcgccataaataatactaaattcaaattcttacatgaaataatcaatctatattgatactatgatcgaacaccatctattaataattttctgtcttatatacttcctgtcattttggcattatagcatac

SEQ ID NO: 75522 - DNA, 328 bp, Glycine max
ggatagagagaggtgaaacgaaacgtcgcataaagaatcagataatgcgtgtggctctgactcaacccacctgggacctggctcggaagtgctaagaaagttacgaagctatcttctacattcttctctgtggtgtgtgtggtgatggtggttgtggtagcggacggggataccatttgctgcttcaaccgcccagagcagagatttatatgtattgtaccccctattgtatataaaggactctgtttttgagctcatcatgggagagggagctcatgcctagcactgaatatcacaggcacgtgcatgctgaaactgatacacatcg

SEQ ID NO: 75523 - DNA, 223 bp, Glycine max
ggttctagtgtgtgattgtttgttgttgtaactcgttcttcttcttttggtgttctgggtttgggtttggtttttctctcacctgaaaatgtcttgctgcggtggtaactggggttgccgaagcttctgcaagtgccgcaacggctgccgaggctgcaagatgtacccagacttgagctacactgagtcaaccaccaccgagaccttggtcatgggagtgggg

SEQ ID NO: 75524 - DNA, 288 bp, Glycine max
gacaacagacacagaaactgctaagaccataacaagaatggtgtttgactcaaaaaagacgaggaacatgaaatgttagggctaggatgcttcaacctcactcgattctctcactatccatccactacctctctaccatcctctcactccgaattacttaaggttgccccttgcaaatccacctaatcagtgactaatacgcaccaatcttcagtcacttagccacagtccacctgcaccgctataattgaaacatataacccgaccagtgccaaaaggcaattggca

SEQ ID NO: 75525 - DNA, 91 bp, Glycine max
gggatggagaaagggaaagtgcttcggcgacttctttagacaccaagggttcaacaagggtcaacctggtttgaacctcttggttccaaac

SEQ ID NO: 75526 - DNA, 395 bp, Glycine max
ggaagagaatggctcccaagggtttaacctttctggctgtgttaatatgcgtttcagcactgtcactgagtccttctgttgcgggggaagggcaaaataatggccttgttatgaacttctacaaggaatcatgccctcaggctgaagacatcatcacagaacaagtcaagcttctctacaagcgccacaagaacactgctttctcctggctcaggaacatcttccatgactgtgctgttcagagttgtgatgcttcactgttgctggactccacaagaaggagcttgtctgagaaggaaacagatagaagctttgggttgagaaatttcaggtacattgagaccatcaaagaagctttggaaagagaatgccctggagttgtttcatgtgctgat

SEQ ID NO: 75527 - DNA, 416 bp, Glycine max
agacaccacagagggagagacagggacggatataaatcgagaacagacaacgatcaactgaaacatcgactagggtatgctgaggaagctaccaagggtgaagtcctaccactttggcaaggtggaccccatcttcaacatcttagccggcttgggtctcgttttgcaccttgtccttgtcggaggattctgtgtcagacacggaatttctggattccaagttggctacatatttggcactgtatagctttgtaaagtacggactggcgtatggcgttgggaacggtatcactcaagatgacatcatgagatactttaacgttggaaattcgatccgtgaatctagaaacatgattttcgagcactatattactaggcatctggaagacctattcacttgtactgcatagcttata

SEQ ID NO: 75528 - DNA, 239 bp, Glycine max
gggggccgtgtgtggaagagttgccagcgtcaggaagtcaggaacaacttgacttcttctccttcttcttcttcttcttctctttggacagaacaacaactcaactcatctcacgattcattcagctttttaaatgaataaaattcctttcttccttacaatcacaatgctcttctaccctttaaacccaacattacacccctcttgctttctttctttcctaatactaatatttggta

SEQ ID NO: 75529 - DNA, 417 bp, Glycine max
ggttctagtgtgtgattgtttgttgttgtaactcgttcttcttcttttgttgttctgtgtttgtgtttgttttttctctcacctgaaaatgtcttgctgcggtggtaactgtggttgcggaagctcctgcaagtgcggcaacggctgcggaggctgcaagatgtacccagacttgagctacactgagtcaaccaccaccgagaccttggtcatgggagtggcacctgttaaggctcaatttgagggtgctgaaatgggtgtgcccgctgagaacgatggctgcaaatgtggaccaaactgctcctgcaacccctgcacttgcaagtgaggtgttgggagagcaagcttcaagcagagatagcccttaattaggaataatgataaactattaatgtgtaactaaaaacttatgtatta

SEQ ID NO: 75530 - DNA, 145 bp, Glycine max
gaaggtgcaagagtttgttgtgagctataagctagtttatcgggaagagaatatgaaggtggttggtttctttggtgcttgcataattttgggaaccatggcattgcattgggcaaggttaccaagggttccttttccgatggaa

SEQ ID NO: 75531 - DNA, 201 bp, Glycine max
ggactcaaaagctcaataaatgcacgggaccaagcgaacaaatcaaatctctctctcaatctagccttctttctttttttcaatttccaaatcacgaaactcaagaagatggagaaagcgatcaacagacagaagattttgcttcatcatctcaacccttcatcattcacccaccccaacgaatcatccttccttcatggc

SEQ ID NO: 75532 - DNA, 68 bp, Glycine max
gcacaagtgacctcttgatcgggatggcgggtaacactgttatgaaaatgtaaatccttgtttccttt

SEQ ID NO: 75533 - DNA, 407 bp, Glycine max
ggcccaagtgagttggttgatggagttaactagaaccagggggatgaaaatgaaggtcctggttttcttcgttgctacaattttggtagcatggcaatgccatgcgtacgatttgttccctctccgaatgaacactggctatggtgcccgtactccggaggtgaaatgcgcaagttggaggcttgctgtggaagcacacaacatctttggctttgagaccattcctgaagagtgcgttgaagcaacataggaatacatccatggcgaacaatatagatcggactccaaaacagttaaccaacaagcttacttttatgccagagacctcgaagtccatcccaaggacacatttgtgttcagtatagatggcaccgtactctctaatattccatactacaaaaaacatg

SEQ ID NO: 75534 - DNA, 292 bp, Glycine max
ggttctagtgtgtgattgtttggtgttgtaactcgttcttcttcttttgttgttctgtgtttgtgtttgttttttctctcacctgaaaatgtcttgctgcggtggtaactgtggttgcggaagctcctgcaagtgcggcaacggctgctgaggctgcaagatgtacccagacttgagctacactgagtcaaccaccaccgagaccttggtcatgggagtggcacctgttaaggctcaatttgagggtgctgaaatgggtgtgcccgcttagaacgatggctgcaaatgtgga

SEQ ID NO: 75535 - DNA, 424 bp, Glycine max
ggtgagacgagggtaaggtcgcgttgtggcgcgtcgtgtcgcgcgctgtttctgtgtgtgtcgtttgtgtttacagaccaaactatatctgcgtatcgcaaccatgtagaccaagcaaggtggaaaagctaaccctgtgaagaaacccaagtgtgataagagggattacgacgagggtgacatgtctcacattcagaagaaaagggaagaagagaacgctctaagggagttgagagccaacgcgcaacagaggggaagctttagaggttctgctctcaagaagagtggagagatatagggtctctatatcatgagtgtacacatacaatagtgagccgtgtagtatattaccatgatcacttgtgtcatagtgtggtcttctatagcgctataatgatagctctgaactgatgtatttcgagat

SEQ ID NO: 75536 - DNA, 388 bp, Glycine max
ggaagagaatggctcccaagggtttaacctttctggctgtgttaatatgcgtttcagcactgtcactgagtccttctgttgcgggggaagggcaaaataatggccttgttatgaacttctacaaggaatcatgccctcaggctgaagacatcatcacagaacaagtcaagcttctctacaagcgccacaagaacactgctttctcctggctcaggaacatcttccatgactgtgctgttcagagttgtgatgcttcactgttgctggactccacaagaaggagcttgtctgagaaggaaacagatagaagctttgggttgagaaatttcaggtacattgagaccatcaaagaagctttggaaagagaatgccctggagtggtttcatg

SEQ ID NO: 75537 - DNA, 174 bp, Glycine max
acagggggggctatattgtaactgaagagctcccttcagggaatttctggtttctgtaatatacctactttcgctttcaaatgattcctcctctctatcttccaggccaaaggatgcatcttggagttacctctatggcaacaacaccaccttgagtgtaacaagccttaatcc

SEQ ID NO: 75538 - DNA, 306 bp, Glycine max
gggtgagacagggacggaaataaatcgaaaacggataaagatgaacgtaaacaacgacttggtattgctaatgatgctacaaagggtgaattccgaccacctatgcaaggtgggctccatcttcaacatcacaccccgctgtagtctcagtctaaacatatggccttatcggatgagtgggtgtcaggcacggaatttctggacaccaacttgactacagatttggtgctgcatgtcgtgttagtatagggattgtcgtatggagtggggaaaggaattgctcaagctgacaacattatttccttt

SEQ ID NO: 75539 - DNA, 296 bp, Glycine max
gcgccagctggggagatgatggctacataccatgtgacctgcaggcatgagttaatctacccttgaccactaagacaggatccagacgatgctgacacaagggtctaggacatgtgaccaaggtggcctatgacgcagattcgcgcactcaagctcttcacctcagtacattccagcgatccggtttagtacgagcgctacatgaccactcattactctatgccttaggcacgattgccatgactgtaatgcgaacagggggtctgctaaaaagttactggtctaagcaacaacga

SEQ ID NO: 75540 - DNA, 393 bp, Glycine max
  unsure (1)..(393): unsure at all n locations
ggttctagtgtgtgattgtttgttgttgtaactcgttcttcttcttttgttgttctgtgtttgtgtttgttttttctctcacctgaaaatgtcttgctgcggtggtaactgtggttgcggaagctcctgcaagtgcggcaacggctgcggaggctgcaagatgtacccagacttgagctacactgagtcaaccaccaccgagaccttggtcatgggagtggcacctgttaaggctcaatttgagggtgctgaaatgggtgtgcccgctgagaacgatggctgcaaatgtggaccaaactgctcctgcaacccctgcacttgcaagtgangtgttgtgagagcaagcttcaagcagagatagcccttaattaggaataatgataaactattaat

SEQ ID NO: 75541 - DNA, 408 bp, Glycine max
gaaggtgcaagagtttgttgtgagctataagctagtttatcgtgaggagaatatgaagttgtttgttttctttgttgctgcagtagttttggtagcatggccatgccatggcgcaggctaccaaaggttccctctccgaatgaaaactggctatggtgagcgttcttcggaggtaaaatgcgcaagttttaggcttgctgtggaagcacacatcatccgagcctttaaaaccattcctgaagagtgcgttgaaccaacaaaggactacattaatggcgaacaatttagatcagactctaaaacagttaaccaacaagctttcttttatgctagtgaacgcgaagtccatcacaacgacatatttatattcggcatagataacaccgtactctctaatatcccatacta

SEQ ID NO: 75542 - DNA, 240 bp, Glycine max
ggacccaaaagcgcaagacaagcacggggccaagcgaacaaagcaaaacgcgcgctcaaaggagccggcgcggcccggagcaacgggcaaagcacgaaacgcaagaagacggagaaagcgagcaacagacagaagacgaagcgggagcagcggaaccctgcagcagacgcccaccccaacgaagcagcctccctacaagctcgagcacgcggggcgggggacagcgctgcggagcaaagg

SEQ ID NO: 75543 - DNA, 324 bp, Glycine max
gcaattcccggatcgaccgacgcgctccacgcgtgcctgcgagatgacagaacaacaacggactgtggcatgactgaaccgatccacgcttttggactaggagctttcacttgataataagaataataagatgcacttgatgcttgggaccccttgcaagatcatcaacacttcatatatccctatagttttgatatgtcttttacttttacagatacgggaattgttgctgtctccaaggctatggatgtgaactagcaggctcatcctggacctggaaacacagagacagccccttatgagcctttgaaactgcttcacttt

SEQ ID NO: 75544 - DNA, 412 bp, Glycine max
ggcacaagtgagtttgttgatcgagataactagaaacagtgtgatgaaaatgaaggtccttgttttcttcgttgctacaattttggtagcatggcaatgccatgcgtacgatatgttccctctccgaatgaacactggctatggtgcccgtactccggaggtgaaatgcgcaagttggaggcttgctgtggaagcacacaacatctttggctttgagaccattcctgaagagtgcgttgtagcaacaaaggaatacatccatggcgaacaatatagatcggactccaaaacagttaaccaacaagcttacttttatgccagagacctcgaagtccattccaaggacacatttgtgttcagtatagatggcaccggactctctaatattccatactacaaaaaacatggatat

SEQ ID NO: 75545 - DNA, 409 bp, Glycine max
gagagcgaagagcgaagagaatggctcccaagggtttaacctttctggctgtgttaatatgcgtttcagcactgtcactgagtccttctgttgcgggggaagggcaaaataatggccttgttatgaacttctacaaggaatcatgccctcaggctgaagacatcatcacagaacaagtcaagcttctctacaagcgccacaagaacactgctttctcctggctcaggaacatcttccatgactgtgctgttcagagttgtgatgcttcactgttgctggactccacaagaaggagcttgtctgagaaggaaacagatagaagctttgggttgagaaatttcaggtacattgagaccatcaaagaagctttggaaagagaatgccctggagttgtttcatgtgctgatat

SEQ ID NO: 75546 - DNA, 238 bp, Glycine max
atagtttcaatcaaaaacaaatctcatctcactgtcatccaattccaagaatatatctttacaaggcattcccattctaaaagaggggaatattcaaaggaaaaaaaagagtatttttttaacaacaagagctctcctcaatcttatcttatatcacaaggaaggtacgtcataatcttaacttcctcaccgttgttactttctcactcaattcatttctgaattctattctcataaa

SEQ ID NO: 75547 - DNA, 265 bp, Glycine max
gcgtccgccactcgttcgacattcgataagacgacatattgttgaggctgcattgtttcaaacctggtggaggtgaaaagacccattttattgtaatgtataattagtgttgctcgtagttccattttcacaatagttttgtcctctattgtacttcttatgggttatttatttataaattattgttaacttattttctattctattcctgttatacatcctaatcttaagtttttcttttctattaaatagttttggtttttat

SEQ ID NO: 75548 - DNA, 346 bp, Glycine max
ggatagagagaggtgaaaagaaacgtcgcataaaaaatcagataatgcgtgcggctctgactcaacccacctgggacctggctcggaagcgctaagaaagttacaaagctatcttctactttcttctctgtggtgtgtgtggtgatggtggttgtggcgccggacgggaataaaatttgctgtttgaaccgcccagagcagagacttatttgtatggtaccccctattctatttaatggactgtgttctggagcgcatcaagggagagtgagctcatacctagcactgaataggcctggcacgtgcatgctgtatctgatgcacatcgtggggcatagttacagag

SEQ ID NO: 75549 - DNA, 364 bp, Glycine max
ggtctgtttaagtgtgaatccctttccctctctacttttttgtggactttccatttccattctcattttttctggttcactttctcgatggcctccgataaccccaccgtctacgacgccgtctacgtgcttcaagcggccggtaatgttctcggaaaacctagccgtcgccgtctacgcctacgtccgccacgtgttcctttgcttcaatagaaacctgctctggtccccgatcatcgtgaccttcgactcctatcccttttccttgtgcgttttcaccatcttcatagcccgttagatctactttgcccttatgtcgtatattacctttatctaagttcattatggaggctgtcttcctctt

SEQ ID NO: 75550 - DNA, 364 bp, Glycine max
ggtgagacgagggtaatgtcgcgttgtggtgccgcgtgtcgggctctgcctctgtgtgtggcgtttgtgtttagagaccacactctatctgcgtatcggacccatgtagaccaaacagggtggaagatctgactctttgaagacacccaagtgtgataacagggatcacgacgagggtgacatggctaacattcaaaagaaacaggaagaggagagcgctctaagagacttgagcgccagggcacaacaaaagggaatctttagaggctgtgggctcaaaaaaagtggagagatataggggctctatatcaagagtgtatacatactatattgacccctggagtatattaccatgatcacttgt

SEQ ID NO: 75551 - DNA, 289 bp, Glycine max
ggtggttggcttgctttcactctcttctctgcaaatgcttcattccaagatgcttaggactctgtatgctgatgaagacaacactcataccgtgggaaagaaagatgctgctggccatgtggcttaatttagttcgtgcttcctttgtcttcttgagttttatcagatacaggagtgcagggatcactagctctttcattgggtcagagtggtcggcagtagacattccccttgatcatgaagcatgttgctgaccaaagggttataatgcaccttattcaagtgcaca

SEQ ID NO: 75552 - DNA, 393 bp, Glycine max
ggaagagaatggctcccaagggtttaacctttctggctgtgttaatatgcgtttcagcactgtcactgagtccttctgttgcgggggaagggcaaaataatggccttgttatgaacttctacaaggaatcatgccctcaggctgaagacatcatcacagaacaagtcaagcttctctacaagcgccacaagaacactgctttctcctggctcatgaacatcttccatgactgtgctgttcagagttgtgatgcttcactgttgctggactccacaagaaggagcttgtctgataaggaaacagatagaagctttgggttgagaaatttcaggtacattgagaccatcaaagaaactttggaaagagaatgccctggagttgtttcatgtgctg

SEQ ID NO: 75553 - DNA, 52 bp, Glycine max
aaactccacttagggtgagacaggaaccgaaataaagctagatcacacaacg

SEQ ID NO: 75554 - DNA, 195 bp, Glycine max
aactcagctttcaacattttccttttcactttatgtgtgagcctactcgtttctcaatgagaagcacttatccctgcaaagcgcacttttgctctttggcgtcccttgctccttgttatcaccttctgctatgctacttctactgctgctgcaacaactcaagctttagtgaatgagaatctgccactgacaaac

SEQ ID NO: 75555 - DNA, 81 bp, Glycine max
ggtgcaattcatgagagatgcgaaacatggggctatcttcatgccagcgtgactatgccccaaacatatcactgatcacta

SEQ ID NO: 75556 - DNA, 201 bp, Glycine max
atgcgcgagtacacctgagagggggcgccacctgaggagatgatggctacataccatgtaaccttcatgcatgtgttgatctcccctagaccactgagacaggatcctgacgatgctgaccatgcgtataggaagttaccatggtggcctttgacgcagattcgctcagtcacgctcttcacctcagcacattccgcgatc

SEQ ID NO: 75557 - DNA, 288 bp, Glycine max
ccggactctgaattcccgagccgacctacccgaccgttccgagaagacaacagaaggggaggaccgattgaaagatgtgtgatcgggcctttgggatgaactatgtattctctatgtgtggtccgttcgctttaccacaatcctaattttacgatgctcgcataccacgatctatctcttacatgaagacaactactttcaaattcctacctttcttactattacgaccgaacacataaaagcttatcgaaactaaattttttagaatggcaataaatgttcgatata

SEQ ID NO: 75558 - DNA, 89 bp, Glycine max
  unsure (1)..(89): unsure at all n locations
ggagacttctcaggtcagggcgnngggctacccgcgtgagttggaagcnnatatcaaataagcgggaaggagaaannaaaaaaaagacg

SEQ ID NO: 75559 - DNA, 341 bp, Glycine max
gagagcgaagagtgaagagaatggctcccaagggttgaacctttctggctgtgttaatatgcgtttcagcactgtcactgagtccttctgttgcgggggaagggcaaaataatggccttgttatgaacttctacaaggaatcatgccctcaggctgaagacatcatcacagaacaagtcaagcttctctacaagcgccacaagaacactgctttctcctggctcaggaacatcttccatgactgtgctgttcagagttgtgatgcttcactgttgctggactccacaagaaggagcttgtctgagaaggaaacagatagaagctgtgggttgagaaatttc

SEQ ID NO: 75560 - DNA, 372 bp, Glycine max
accctttggaagaacaccacagaggggaatgtttgtttttcttctggcagatggcgccccgcgcttgatatttatcatctcccagcttatacattgacttcaacccaacactactaatacactgcgcctgactcacttggaaacctaacctatggctttttttttttgaatatataatttaaggattgttgcgcgcatccatgaagtggagttagcatatgcatatggcgacggtagacctctgcattaagattagcgttctgtgtgctgaggtaaacactgtatccatccatcatacaggaaatagagagacttcactaagattagctcgcgcatgtggttcaaaccatcacaagccttggctgcacacac

SEQ ID NO: 75561 - DNA, 207 bp, Glycine max
gactgcaaccgagtaattggaaacaccatgaacttaaagctttcgggatatgtgatcaatgtaaatgtgtgtaagatctaacgggttgtgctcaactaaagatgatcctgcaagagtgtacttactgccagttatatgaaccatctgtagatgaaaggtatccctgtttgatgcacattcacatgtgaagttgtgactatgacaaat

SEQ ID NO: 75562 - DNA, 400 bp, Glycine max
ggagcaagagtgaagagcgaagagaatggctcccaagggtttaatctttttggctgtgttatgcttctcagcactgtcactgagtcgttgtcttgcggaggataatggacttgttatgaacttctacaaggaatcatgccctcaggctgaagacatcatcaaagaacaagtcaagcttctctacaagcgccacaagaacactgctttctcctggctcagaaacatcttccatgactgtgctgttcagagttgtgatgcttcactgttgctggactccacaagaaggagcttgtctgagaaggaaacagatagaagctttgggttgagaaatttcaggtacattgagaccatcaaagaagctttggaaagggaatgcccaggagttgtttcctgtgctgat

SEQ ID NO: 75563 - DNA, 389 bp, Glycine max
aaaaaagaggttgttgataaagcaaaagagtgtgattgaaacataaattttggactttctttgcatttggcagccacccccacaacgaaataaaacaaaacaagcacacaaccagagacacacacgcatagagagagacggagagagaagcagaggaagaaggagaagaaggagatcttgagagatcaggtcgcaactcgtcatggggagagaagttacaggaatgcaagttgtggacaagaagccaaatggtgttataccaccttcaaatggtagttctaatgataaagtatgcttttctcctaaaatggaagcagctaacgttcacgcgaaggatcacaaggtaaatgaatgtaccaaaactaactcttttgaggagaaaagccatg

SEQ ID NO: 75564 - DNA, 241 bp, Glycine max
gtcttgtgcgtttgtttaacaactactcgatgacctgtgacacaggggaactaccttgaaaacccattgtagaagtacacaggtgcatggtacattaaaaaaagagaggagcctaagagttgaagcagccacaaaggagcttggagttggctagaaagggaagaatggctctttatgatgatcatcattgaccctgatataccagaactttgctatgggcttttatgttatgtgtctgact

SEQ ID NO: 75565 - DNA, 117 bp, Glycine max
tttgtgacaatgctgctttcaatgattctggggagtattttggaaactgacaatatgcgatgtactagtaccgtgatttaaccataacgtctacagaaattttacgcaaatttctgt

SEQ ID NO: 75566 - DNA, 362 bp, Glycine max
attcgtcaatattgctggaaattgcggacatatgtggccaatatggttcattggtcccaattgcggtcacagagattccgaaaaccttgacaatgtgaccaaaattgttgtcatggattgttattttaaaaccttgactagaaccctagaagacagaccccgactatgttaatgagcagctgctgcaggtattcaaaatctgaatgtgatgggaaaggaaatcagtcgtggtaggaagtaatttatcaacaattaacatttggtcaattaacacgttgtgtcagctcttgctttggaccacacgggatcaagagtgctttctggaagctatgactatatggtacgaatgtatgattttcaag

SEQ ID NO: 75567 - DNA, 409 bp, Glycine max
gcagcaacagcaggtataaattgattgatccagccagccaaaagcataattatctttttttttgttttctttaaccaaacaagactgagaaaaagacaagataaacatccattcttgttttagcaaagtggtatgtagataatctataattagcaaaatattatacagagagcatgagcgaaagattgattgtgcaaaagcttccaacattttcttatacaaagaaagacacaattccttagaaaataacaattgggggtacaaagtacaattcaggctttgtttttttctagtagataagctcgggtaagataaggcctggaaattgaaacattaaaagaaatgtgtaagggaaaggacaatgccaagtgtagcgaaggagtacccaaaatttgtaaacataaatact

SEQ ID NO: 75568 - DNA, 412 bp, Glycine max
gatccacatctcaaatcaaaagccgaatattctaatttcaccgcttcgaaatccattctttattgccaaaattttgaaaccctaatatcccaatttcgctggtgatctttccaaagcgtcatcaaaccaaacaatttttcgtcatatctgtctccgcaaggagagtcgctttgacgggaagcaaggatttccgctgcaattggaatcgtcggatcaattcgtcatgaagtttctggagtgttctgccttagatcggcttaacgatttcttgggtaatttgaatctgggagaacgtactatcaaaggatgccttgaagcctatagttgcaaacatgctggatcggataaaaaactctctatcagtttggagacagagattcttgattatcttgggaaatcatccgacactgat

SEQ ID NO: 75569 - DNA, 283 bp, Glycine max
ggcatgtgtgtgcatgaaggaaaagcgaacagaaggggatgcatgggactgatgctgtcgactctaccttcctcgtcagaagagcctctgtttcactatctcgcggaggatactgaactggggatgtactatctcaagggatcatgccctcaagctgaatacatactaaactaacacgcgaaggtgctattcctgcgccacttgatcactgagtggtcctgaacaagaaacatgacacacgaccgggccttgctgaataggcttgctctactgccgctctact

SEQ ID NO: 75570 - DNA, 306 bp, Glycine max
gcgtctcatgttgcggatgtcgaatccattgctgatgcggctaaacgggctggcggtgtacaggatccactcttacgtacctcagaatcctatgaaataacgtatatattgtgaaagcattgctgaaattattggaccaattttgacatactagctattacaaagacccgctatatcacacaacttcatacctcttgcaacacatcgcgctttccaacagtttggctgtatgtacataccaatagataacacgttcttctgaaacattatgatgactgattatataaatatactctcgctgtttct

SEQ ID NO: 75571 - DNA, 210 bp, Glycine max
cgattcccggtcgaccacgcgtccgccacgcgtcgcgacagaggggtgtgggggttgaaacggttatcattttaggggggataattggctggggaatgaaccccaactatgaagatccgtggatagtcttgtactgtacaacatgcctatttcccacaaatttggatggaagattatgaccaaaccttctaattactacttgcaaagatt

SEQ ID NO: 75572 - DNA, 173 bp, Glycine max
cagggggtttatggagaggtggcggattcgttactttatgcgatcagtggaaggagagagagtctatgaataaaccaccacgcgacgcatttaatcatggtgaaaaggagcctgcatggaggagaatatgatcagacctaacgaaagaggcgctgcatcttgccatgtgtaat

SEQ ID NO: 75573 - DNA, 294 bp, Glycine max
  unsure (1)..(294): unsure at all n locations
ccggaccggaagttcccgggtacggacccaacgcgtctcgtacctggcgagaagactgacagtaagggggtgttgtatttttactactannaggaactttgggaactgtnggatgcggtctactaggagctaaaactccatagctgtaggctagaactgcaaggaaatatgattaatggaaggttgatgccttngatggcaattggaactcaaatcgacttcctcagaaagttcctcaacttctgatgtgctcgctaagatgaaaagacactcgacttccgagtgaaggagctt

SEQ ID NO: 75574 - DNA, 326 bp, Glycine max
gccggggcaggcgcacgcacgggtgcagagagacgaccacgatggggtgtggttttacatctggcgaacgaggagaagagaagggataccgttaacgtaggccacaacttgcttggcttgtaggatattgatgttctaaatcaggttgtgttgaggacccaggcctgaaaacctaaacaattgaattgttgtgccatctcacggatgttgattctgaaggaatgtcaccaacacattccgatacgcaattgagaattgaagaacgagctctttccgcatccggtgccgcctttgtgtctgctatcatcgttaatcccctcgatgtc

SEQ ID NO: 75575 - DNA, 409 bp, Glycine max
  unsure (1)..(409): unsure at all n locations
cggaattncccgggtcggacccacgcccgtccgtaccggctnnngcgagaagaaacgacagaaggtggactatgnnagaaatttccaattattagcttttccgttcataantttctgggcttaggatgtacgagattgtagcttgcttaccatacanctgtgctaatagtatttgctttggtgacagttcattaaggggacgcgtgtcgtttaatgggcgttactctgataacttgcacgggaggcgtgtaacaaatgaatgcgtatacgtaatacattgaagcgggcgtctaacatnggatcggtccaacaatggtaaccatcacatngggtctgaagaatcagcttgtgttttataggttataatctatatgatagtttgtgcgaaatatcttttagctttttttaa

SEQ ID NO: 75576 - DNA, 421 bp, Glycine max
  unsure (1)..(421): unsure at all n locations
ggaagaaaagaaaagaaaagaagcagagtggtaaacaaagagaaacaacaaaacccagaatctagagactaataacggctcttgctttgtgaatagcataccatagcaacaacaacaacacagaacacacaaagaaaaaagtacttcccccaaaatcatatattatatattatatgtacatatagatatacatagttttgtgtatattgagattgttgttctctctttcttctatttattcatgtgaaagagagagagagagagagatcttgtgattcttgtcctcctacaatggtcactntgtagcgggactaggtaatctatgcaacaaaattcacttggactcttctcatcgaccgatatttcaactatttttttcctgtcccgttaacgtttcgaataagagcttctttttcccctt

SEQ ID NO: 75577 - DNA, 281 bp, Glycine max
ggcacaagtttgttgagatagctagaagcaataagatgaaaatgaaagtgcttgttttgtttgttgctacagttttggtagcatatgaatgccatggctcagactaccagaagttccctctccaaatgaaaactgggtttggtgggcaatacagcaatgaggtggcatgtgccagttggaggcttggcgtggaagcaaacaacgtagtcaagtggcaaactgttcctgcagcttgcggagagtacatagctgactacgttctaggagaccaatatagatca

SEQ ID NO: 75578 - DNA, 297 bp, Glycine max
gtggttgtgaagtgataacgggtatttctgggtgttctgaagtaattttctttgaatgtgtatcaatggatttgcaagatgactgatgtgcaacaagtatattagaaatttgctttactagctctttcattcttgcagctgattcagtggtttatgatcactcttatattagtgattaggacttctaccatatgttacataataagtgtgaaagttgctctgtgcattatatatcatttggtatgcactgcatgaattagatactgaaacgtatatcgaggtatctgcatattacac

SEQ ID NO: 75579 - DNA, 103 bp, Glycine max
tgtggatctaacaatattcaagaacgaatagggcggcgctcaatattaaaatagatttggctgacttatgctcttcatcactaccactgaatcaacttcttgc

SEQ ID NO: 75580 - DNA, 281 bp, Glycine max
ggcacacgtgagtttgttgatcgagagaactagaaacagtgtgatgaaaatgaaggtccttgttttcttcgttgctacaattttggtagcatggcaatgccatgcgtacgatatgttccctctccgaatgaacactggctatggtgcccgtactccggaggtgaaatgcgcaagttggaggcttgctgtggaagcacacaacatctttggctttgagaccattcctgaagagtgcgttgaagcaacaaaggaatacatgcatggcgaacaatatagatcag

SEQ ID NO: 75581 - DNA, 365 bp, Glycine max
  unsure (1)..(365): unsure at all n locations
aggacccataatgaaaatctcatagtgattctatctcgctcaaacaggattatctctatcctccgatagatgacacatgtgatttatataaaaaaagactcaaatgtaattttgattttcttattttgtttaatccgtaatcttggtcttttcattttaaaataaacatttaatcttttaaaaaattcacaattttagttcttatattttaaaataaagacatttgattcttttattttagaaaattcacaattttgattctcatattttaaaaaattaatgatttcgatgcaatcttcaattntatttaccgtntattntatttatttcttaccatatagntaataaaatcattttttgatgat

SEQ ID NO: 75582 - DNA, 406 bp, Glycine max
ggcttagattgaagagaatggctcccaagggttggaccgttctggctgtgttaatatgcgtttcaacactgtcactgagtccttctgttgcgggggaagggcaaaataatggccttgttatgaacttctacaaggaatcatgccctcaggctgaagacatcatcacagaacaagtcaagcttctctacaagcgccacaagaacactgctttctcctggctcaggaacatcttccatgactgtgctgttcagagttgtgatgcttcactgttgctggactccacaagaaggagcttgtctgagaaggaaacagatagaagctttgggttgagaaatttcaggtacattgagaccatcaaagaagctttggaagagaatgccctggaggtgtttcatgtgctgaaatt

SEQ ID NO: 75583 - DNA, 286 bp, Glycine max
  unsure (1)..(286): unsure at all n locations
gacatacatagaaataaagctgtcttgcttttgggctggctctgttttctcgtctgtctttctttccattttcatctctctgctgcatcagcttgttgtgccacctcaatccccagaaacaacactgcatacccatttcatgctnttctatattcgtcacttcttctctctcttcttttgtccacgctcatgaatatggtcgctgctggtctaaggtgatttctttacgtcatactttgatattatttattatcttggacttgggctttcatcacttttttttttt

SEQ ID NO: 75584 - DNA, 345 bp, Glycine max
gaaagaacaagttcaagaaacagtaagagccaaggagaaaagaaaaaaaaaaagaactggactccttcaattagtgcattgtttcttttcttcaaattattattatttgtttcatgttatgagaatattatctatgtataaatagatggtagcaagaagacattgttaatttgagagatggcgagttacgaggctattaagaactttgatgatgatgatgatgatgatgatgatgtggagatggcactaccccataaccagatctttgaatcaagatctgccactgtttcttcccccattggccaaactaccccgcttcacattcacaacattattgaggaacaa

SEQ ID NO: 75585 - DNA, 240 bp, Glycine max
ggagtgagcaagagtgaagagcgaagagaatggctcccaagggtttaatctttttggctgtgttatgcttctcagcactgtcactgagtcgttgtcttgcggaggataatggacttgttatgaacttctacaaggaatcatgccctcaggctgaagacatcatcaaagaacaagtcaagcttctctacaagcgccacaagaacactgctttctcctggctcagaaacatcttccatgact

SEQ ID NO: 75586 - DNA, 266 bp, Glycine max
acataatcaaacatttcttttatacaaaaaaccatttcttcactttcaactcttctactcactcttcgtaaataaccttttaaacctctcaaccactcacacttcaataccttgccctctcttctacacactttctctttttacaatcataacaacctcatctatcaattttcctaaaaccaactcctatttcaaagttataattataccccatttactctaaaatttttttaataccaaaataaccttctttttttttgaaattt

SEQ ID NO: 75587 - DNA, 385 bp, Glycine max
  unsure (1)..(385): unsure at all n locations
nngggagatggcggggttgaggtactagttgaatccatggcgcatgtgcggcttgcnnatttgcaactacaacatgctaacactgaggggctgccaaatgttggagaaagacaaaagtttgctagctccnngtaagtgtaacccttaatctccaataagcttaaggttanntgcgggggtttggcggttggttctggaagtggcagtgagtgtgaagaaattggaattggaaggggttcgggcgaagttcgaagttcttcttcttctgaggaaggaagaaaggaggcagtgagtgtgcagtcaaaaagtgacttcagaaagtataccttcgacgtgagtattggaaatccagttgggaagtttgtgggacggattgtgattggac

SEQ ID NO: 75588 - DNA, 293 bp, Glycine max
ggctgcggaggctgcaagatgtacccagacgtgagctacaccgagtcaaccaccaccgagaccttggtcatgggagtggcaccagttaaggctcaattcgagagtgctgaaatgggtgttcccgctgagaacgatggctgcaaatgtggagctaactgcacctgcaacccctgcacttgcaagtgaggtgttggagagctaaagcttcaagcagaaatggcccttagaaataatgataaaaactatatgtagtttcaaaacttcaaaattatgtaggatgtattatgttgcac

SEQ ID NO: 75589 - DNA, 331 bp, Glycine max
  unsure (1)..(331): unsure at all n locations
tatacttccgaaacgacgtcgtaacgtgacggcgacgcgtatcaacttaaataatcgcgctccanaaccactctcccacgcatttaatcttcaaccaaaacaaacaacccacatcactctctacatatccaacactatagcgtaaaccactcttcaaaaacattacctaatctccaacgaaatctctctctccccccaagaacaattcaatatctataatcttcagttggccaaatccaaccctaataatatcatacaagaatacccacactcagatccccatactccaattcgcaagaacattgatcactcaatgcaactgaatacttat

SEQ ID NO: 75590 - DNA, 384 bp, Glycine max
tgatggttatgaatatcatgtggattatgaggttcagggtgtttcaatggtactcgatgaagacgaaaatagtgaaggccacaaaactagtgaaatttgtgagattgatgagagcagtgaaaacagatatgcaagcctagagaatgatgatgataatggaattagccaggagaaccaaattcactcttctgaagtgccagatgaaagcaccatttgtgttcacgagcagaaattatcggatgaaaatcaagttaaaggtagtaaggtgccgagcacaggtggtagtgaagagcagctcacgggcaataatatgcaatgtggaactaagcggaagagacctattgaagaggatgaggaattgagaaagatcaactcacgaaagcc

SEQ ID NO: 75591 - DNA, 304 bp, Glycine max
caaaactactctcagacaaaacttttaatttctgattttctgaattcctgatggtccactctaattataagagctgcaaacggtactaaatctaaagttgaacaaaatgtacatccaacaattcagtatttcgcatcaaaagtttctctttgctccccttaatatctagcatttccgctctcgaacctccaactggagatcaaacaccgcttcgtctgtcatacaaaagtatcagatattgaatatattttctatccaactgttgcacctaaaactcctgaccacatttataaacttgttccac

SEQ ID NO: 75592 - DNA, 428 bp, Glycine max
ggaagcaaaaaatgaaaacccaaagtgcttctctcctctggctttttctctctcttgctatccttttggctagtggcactgctgcaagtgcaactccaagaagcgcagtgccaagccaccatgtttcaacattcaacagaagcctttttccttccacttttctctttggaattggttcttctgcttaccaggttctgacaaccacataactaagcacattcaattagtattttctttttcattttttttgggtactacatagaagagatttgacgtattattttgttttctacaacctattcagatctctagtctttgaatttgtggaatacatgactggtttaactgtgagcgagtgagtcaaatttaatataatttcttttaaaaaaaggaaggacttttaaaataaaaatgatcttatatttata

SEQ ID NO: 75593 - DNA, 336 bp, Glycine max
ttagattgtggtactatgaacaattaaaggggtgaggtataatgttaatgtatattggattatttatccaaacattattatatagatgttgagctaaaaatgaatcaattgccaatggacctggtgactcatatatttggcatattcaattacttcactgacttatgacaggctggtcttaatatggaagacatggagtcagaggaaactggagtatcgtttgcactgactcaatacgaactctctcaattagaacatatatgataaatgcgctgctctgatactgaaacatgccttcaacatgactatactacaaatgccgatgagatgcttaat

SEQ ID NO: 75594 - DNA, 275 bp, Glycine max
caaaacataccttatcttttaacctcaaactctcttttatctccaattttcacaaattcctttcaatattcttttctactcatactaattatacccattcaccccatacttcaattccttcacacatacattcatctacctacctacaaacatatccctttttctctaaaacatctctaaccttcccaacgctctaataccattattttatcacacatcaattcttaatatctcacacttttatactttaaaacatacccctattactctattta

SEQ ID NO: 75595 - DNA, 412 bp, Glycine max
ggctgagaaaattgcgacgcggaaacacgcgcatcttcacgatcctggaatccaccgcggcgtatccagcgattccgatctccgacgagtctgcgcaggcgaagaatcgcgaggccagccgccggtgaagaatcgcgcgatttgtctggaaatcgcgattcagccacgattcatccccgatactgagactcaaccacgattcaggaagaaaaacgagacaacctccgattcgtatcggtagcagttggaatcatatcgaatcgggcgatacatatcgtgaatcgtacggttgtgtcctaaaaatggcactggttgtaatgtgtgggcaaccatgcagtggaaagtccaaagctgcagtctgtctcgccgaagctctcaaagaatcagaatcaaaacttcaagtgagaatcat

SEQ ID NO: 75596 - DNA, 420 bp, Glycine max
gacaagtgagtttgttgatcgagataactagaaacagtgtgatgaaaatgaaggtccttgttttcttcgttgctacaattttggtagcatggcaatgccatgcgtacgatatgttccctctccgaatgaacactggctatggtgcccgtactccggaggtgaaatgcgcaagttggaggcttgctgtggaagcacacaacatctttggctttgagaccattcctgaagagtgcgttgaagcaacaaaggaatacatccatggcgaacaatatagatcagactccaaaacagttaaccaacaagcttacttttatgccagagacctcgaagtccatcccaaggacacatttgtgttcagtatagatggcaccgtactctctaatattccatactacaaaaaacatggatatggggtggaga

SEQ ID NO: 75597 - DNA, 422 bp, Glycine max
ggttctagtgtgtgattgtttgtcgttgtaactcgttcttcttcttttgttgttctgtgtttgtgtttgttttttctctcacctgaaaatgtcttgctgcggtggtaactgtggttgcggaagctcctgcaagtgcggcaacggctgcggaggctgcaagatgtacccagacttgagctacactgagtcaaccaccaccgagaccttggtcatgggagtggcacctgttaaggctcaatttgagggtgctgaaatgggtgtgcccgctgagaacgatggctgcaaatgtggaccaaactgctcctgcaacccctgcacttgcaagtgaggtgttgggagagcaagcttcaagcagagatagcccttaattaggaataatgataaactattaatgtgtagctaaaaacttatgtattatgtct

SEQ ID NO: 75598 - DNA, 248 bp, Glycine max
ttaacttattcacaactaacacccattatctctaattcccctcttcacaccaactctacttcaaatcattctctagcatccaactatcctaacatatttaataatgctactgcatctataaagattatccattctccaaacgcctccaatattataaacattcaacttagaataacatcatccatatggtatagaattgtccaaagaacaaatgttcacactcctaagagaccaaatatatctaacat

SEQ ID NO: 75599 - DNA, 411 bp, Glycine max
gacacaaagagacaattttcccaggacacctaagtctgcaagggaccaagctaggatttttaaaagcttccaattacagttaatatggagtcacattcaaaccaaaccttttgctagttcctctccaaggcatattggatggccaagatgacagcgaagagctcaacatagaggagagattggaaaccaatataggcggagaaacacccaagagatgcacccgtgtggttcctaaagatggcaccgctgctatagcctgtcccggagacccgcccctccattaaaaaattattggtatttaagatttttgcatgcacacggataattgagagcaaaaataatttagttattaagacaaatttaaaataaaaataatatcattgaaaattaaaaacatcagttgatctgatt

SEQ ID NO: 75600 - DNA, 413 bp, Glycine max
ggttctagtgtgtgattgtttgttgacgtaactcgctcgtcttcttttgttgtgctgtggttgtgtttgttttttctctcacctgaaaatgtcttgctgcggaggtaactgtggttgcggaagctcctgcaagtgccgcaacggctgcggaggctgcaagatgtacccagacttgagctacactgagtcaaccaccaccgagaccttggtcatgggagtggcacctggttaagctcaatttgagggtgctgaaatgggtgtgcccgctgagaacgatggctgcaaatgtggaccaaactggtcctgcaaccactgcacttgcaagtgaagtgttgggagagcaagcttcaagcagagatagcccttaattaagaataatgataaactattaatgcgtagctcaaaacttatgt

SEQ ID NO: 75601 - DNA, 191 bp, Glycine max
cctcaacagcaccagacattcataaaagctctccaccttccctaaaatcgatcatactctcgcaatcttatttaacaaatgacgtacataccttgccttctaactcaacaatgcataacaaactataccattactaaagtatgtactagcgctgctaaaccgaaattgaaacaaaagcctcttcactggaa

SEQ ID NO: 75602 - DNA, 427 bp, Glycine max
  unsure (1)..(427): unsure at all n locations
ggttctagtgtgtgattgtttgttgttgtaactcgttcttcttcttttgttgttctgtgtttgtgtttgttttttctctcacctgaaaatgtcttgctgcggtggtaactgtggttgcggaagctcctgcaagtgcggcaacggctgcggaggctgcaagatgtacccagacttgagctacactgagtcaaccaccaccgagaccttggtcatgggagtggcacctgttaaggctcaatttgagggtgctgaaatgggtgtgcccgctgagaacgatggctgcaaatgtggaccaaactgctcctgcaacccctgcacttgcaagtgaggtgttgggagagcaagcttcaaagcagaggnaaatagcccttaattaagaataatgantaactattaatgtgtaactaaaaacttatgtattatgtct

SEQ ID NO: 75603 - DNA, 289 bp, Glycine max
ggattttaaggttgacttagtaagcacgacctcgtggaatagactgcaaatctttcacatcgcactcatcaccactgctaccgtatataccttccaacacactccaacaacactcgtaataatcaactgttgaaccctaacctcaacgatcctgtcctttaccaacaatccaccgctccaaaatgggcaaatccgacttcaccacctccgactgcgcccatgttctcctcctctatttcaatttcccatcaaccgcatacatcaaaaccctcacaataacctcctacac

SEQ ID NO: 75604 - DNA, 395 bp, Glycine max
  unsure (1)..(395): unsure at all n locations
ggaggaaacaaagaaattctggtgcatatgctttgttcagcctttatacctggcaatacttttaggtgatcacctagaaagggtttgttgtcaattttgcttagaaagtggaagccattcctgaacctttcaatttttatcactttcccctcacttcatagtaatagcgtaatcatttatttattatttatttatttttatattgttccatccttagaatttgaagtcctttcaagtactcagttcattgcagaggatagatcattacatggatcttgtcttttagtttttggcttttcaagtacctcttgttctttgatttacatgttatgtacatattancccctggaattatttggaataagttgcaaggtatatactttaattagggaatt

SEQ ID NO: 75605 - DNA, 343 bp, Glycine max
aggcgtacgtgacgacacaagggaacgactgactttggtagatgagcttctaccctagggggtgggctcaacattcggcagttctggaacaataataatggcgtcctgcaataaggttggaaaccgttcgaggcatggtgctgctcggaaacacatgcgcctgtgcagacatgctatatacatcgatgcacgattggagcacgctttcattggaggcctcacatatggagtcgatgaccattctcatcaagatgcattttctggcttctgagatgtggcttatgcgaaagttataactcgactgaaacagtggcagatcaatgggatttggatttgtcaactt

SEQ ID NO: 75606 - DNA, 423 bp, Glycine max
  unsure (1)..(423): unsure at all n locations
ggcacaagtgagtttgttgatcgagataactagaaacagtgtgatgaaaatgaaggtccttgttttcttcgttgctacaattttggtagcatggcaatgccatgcgtacgatatgttccctctccgaatgaacactggctatggtgcccgtactccggaggtgaaatgcgcaagttggaggcttgctgtggaagcacacatcatctttggctttgagaccattcctgaagagtgcgttgaagcaacaaaggaatacatccatggcgaacaatatagatcagactccaaaacagttaaccaacaagcttacttttatgccagagacctcgaagtccatcccaaggacacattttggggntgttcagtatagatggcaccgtactctttatattccatactacaaaaacatggatatggggtgga

SEQ ID NO: 75607 - DNA, 208 bp, Glycine max
tgggactgttcatttgacaagatgggtagtgtgagttggagcaggctgaataacgccatgatagcagtcttggtccctctacccttcatcctattctacctctcattccaatcggtcattaatactccttcttcttggtcttctctgtggacatggtgctattaccaaccctctgctatttgcccattggtctttttcttcttaaatg

SEQ ID NO: 75608 - DNA, 125 bp, Glycine max
ggatcagaaatcgtacagatacacacttggctgaggaaggtcgcaaaagaaaatggagttgctcttgtacacggagtttggtggttcggccgcggatgaggcagctatggagctgatcgagaaca

SEQ ID NO: 75609 - DNA, 413 bp, Glycine max
  unsure (1)..(413): unsure at all n locations
ggttgggattgggaagtagaagtacacattcccagtaaggttaacaaaaaaatccaacaactcagaaagaagagagaagacttccaaattgcaaaggatgatgaagaagaatcagagcaagcaagttaactcgttgaccacgacacgtttgtcaccattggcgaaacccttcacgctcaaccgttctaccctccaaccctgctcaagttcccctttttcagggtacccttttcttgaatcgccaaaagaatatgactttgatgggtttggggaggatttttcgttgcctagttactcacccttgtgccatgggaagcaaggagaaggggattctcatgagagtttgtttcacaagggtaagcatgctgttgatggantgagtccctgcccagagtctgctggtactagtacaa

SEQ ID NO: 75610 - DNA, 115 bp, Glycine max
tgcaggcgcgtgtgattacggatgcgacaagccgactgacagtgggagtagcaggaaacttcagcacctgacaaagcttatatatgacccatatattgcccatgattatgactag

SEQ ID NO: 75611 - DNA, 166 bp, Glycine max
tggatttcaaatcgtacagatacacacttgggtgagggaggtctgtaaagaaaattgagttgttcttttacaccgtgtctggtggtgattgtcacggttgtggcaattattgaactgaacatgaacaacaggggtcgaattaacacctatttcgcatttaaattct

SEQ ID NO: 75612 - DNA, 139 bp, Glycine max
ggaaagaatcagtgaactgcccgaaaataaacacagaaactctcaacgacgttctttcatggggttcaggaagaaaagtcagtccaatgatgagagcatggataggtgaagtcattgaggacgagagctctgagagtga

SEQ ID NO: 75613 - DNA, 178 bp, Glycine max
  unsure (1)..(178): unsure at all n locations
gcgagaagacgacggcnggggagagcgtatatggaaatcaaacagcagatagagggtctagcatacgtgggttaaatgcatgcgcatgagtcggaagaatttgtgttagcggtgaggagatatattgagaattaacatttgatactgtatatatggggaggggaagagcggatttgaa

SEQ ID NO: 75614 - DNA, 333 bp, Glycine max
gggataaggaaatatactcccttaggacaggcaactgctcaacaagtgttgattgacaaaatatctgcaggtcctataactttgattgcgataggagtgcaaacaaatatagctatgtttctcatgaacaatccacacttgaagaacaatgtacaacatatttacataatgggcggtgctgtgaggtcaacagacccaactagttggtgccccaaaaatgcatccttttcttgcattactgggcagtgtggtgaccgtggcaatgtattcacaaattatgaagcgaacccttatgcaaaggttaatatgcttgggtacccttttgcaagattc

SEQ ID NO: 75615 - DNA, 428 bp, Glycine max
gtagatagtagataacattttttttattatatatatatatttgtcgttctgaaagtacctgaagcttattccttttgtgccttttgtttcttaccactttctgggtctgtacttcttcaggtcaaggtcaccaattcgtggaaggttggcctttttcaattttgtatatattttgtctttctgaaagtaactgaaactaattccttttgtgtcttctgtttttaccactttctgggtctttacttcttcaggtcaaggtcaccaattcatggaaggttggtctttttcaattttgtatatattcatggaaggcttacatataatctcacaagtatttctgaaagagttaacttgtggggttttttatgttgactaatggatattggataatgatgggcttattaaggtacaattttttttttcttctc

SEQ ID NO: 75616 - DNA, 379 bp, Glycine max
ctgggggtcaatagattagagagatacgagggggactcgggtaagcttacggcttacgtgcgaagcgagcgagcgaacgagaagatgtagttattgatttcaatttccaagtcccaaccattatcaaactgacatatccatttggtcaacaaagaatcacacaccaaaccgttcgaatctaaagatcgtggatccgatcccggcgccaccaagattcggcacggacctcttctaggatcctctcgacgcccacccgctgtggttcaaaccggcgtcgtatatctgcatcgacttcgactccgaatcctacatctcggagctgcgaaccttcgtacccttcgacacgctgcgtttacccggaaagctaaacagctaccta

SEQ ID NO: 75617 - DNA, 52 bp, Glycine max
tgggagagacatgagcagctagacctttgggtggtcgggatatcagctggag

SEQ ID NO: 75618 - DNA, 346 bp, Glycine max
cgtcacacatacgactgatgcgaatgacacagatagggggagtacaatgtagcatcatacgcggtcaaagcttacttctatcgcatgtattcctccataataaaacttatgtgaaaaaatatactttggacttaatatgattatagcatacccgaatcttgttttgctgcaacattggtgatcttgacactaaataagtttcaaactattcaattctctgagcttttggcttatcaattttgaacgagttcaatactttaccctattacttggttccctgaaatcagtattggtattgcatgatcagaaattcttctgaaccatctgtttaatcaaccatgttatt

SEQ ID NO: 75619 - DNA, 339 bp, Glycine max
tccagggccgactcacgcctgcgtgcagatgacagcagacgtcagaatgccacctttaaatatcagcattcccaactaagggacgcgtccaatctcaacatggatgccttatttcacaacatacaccaccactaacatgattaatatgatggcattgatgaaccaactaatgtgacggttactaacaacttcaccaccagaactctgccggtaacaaacactatagatctgtagcacataccacatctgacatctggtgcaatagcgactaagtaccaaggaaaatgccttgcatacaattttgcaacccaaataacaaataaaacctgccttgctact

SEQ ID NO: 75620 - DNA, 319 bp, Glycine max
  unsure (1)..(319): unsure at all n locations
gggacaaagtatgaaggaggaagtagtggctgcagagatatgagattggaatcagaaaaaaatgtctcatcatttttaaatgattttgttacagataatgctggcttcaatgatgtaatatgtccatcagaaaaagtcagagttgattctgcatgctttccttcagtttttcttgatacagttgtttgtgaaagtgataaattgcattatgcagatattaaccaaaaaggggcagtgaattttgcccaaccttcagaagcaaactcccagcaacatattgaaaagtcaaagtttcatactgagcnncttgtacaggata

SEQ ID NO: 75621 - DNA, 284 bp, Glycine max
  unsure (1)..(284): unsure at all n locations
gggttcaagagtgaagagcgaagagaatggctccgagagggtttaatctttttggctgcgttatgcttctcagcactgtcactgagtcgttgtcttgcggaggataatggacttgttatgaacttctacaaggaatcatgccctcaggctgaagacatcatcaaagaacaagtcaagcttctctacaagcgccacatgaacactgctttctcctggctcagaaacatcttccatgactgtgctgntcagagttgtgatgcttcactgttgctggactccacaag

SEQ ID NO: 75622 - DNA, 80 bp, Glycine max
ttaagagggagatttttaaaagagactgtgcttattataaactctagtacttccttaaatcccaaatatggcacacttct

SEQ ID NO: 75623 - DNA, 299 bp, Glycine max
  unsure (1)..(299): unsure at all n locations
ggttctagtgtgtgattgtttgttgttgtaactggttcttcttcttttgttgttctgtgtttgtgtttgttttttctctcacctgaaaatgtcttgctgcggtggtaactgtggttgcggaagctcctgcaagtgcggcaacggctgcggaggctgcaagatgtacccagacttgagctacactgagtcaaccaccaccgagaccttggtcatgggagtggcacctgttaaggctcaatttgagggtgctgaaatgggtgtgcccgctgagaacgatggctgcanatgtggaccaaact

SEQ ID NO: 75624 - DNA, 259 bp, Glycine max
ggcttaaaagcggtttattaacactcctaaaccagcctctctccgctaaatttaaaggttagtttaatttgatttatgatcccttgcgttgctagataaatgccgatgccgcgtctggatcgggattagggccctagggtttttgatcgctccatccggttctgcttcggatttcgatcggaaatgtccgaacctcattcaccgacccgtacctccgcgtatctcgacgcgctctcttaagcgatccacaagaaacttc

SEQ ID NO: 75625 - DNA, 341 bp, Glycine max
gctttaaaaatgggagggtgtctaccatccaagcggagatccagaagatagtggttcagcttccagcagcacacatcgtttcatgctgtatgcgacagcactttcaatcacatggggagacactccagaatattggacatgggtacagcagaaagaagaagcaaggtacgcatctatctccaaatatatattaaagtttactaaaacacaattcacacaatctatataaaaagtagtgttctaaaaagtagatctctcattcaatctgctcttttattgctaataaaagtttcttctgaaataggaataatgcatcttgcttcgtataaggttagatatat

SEQ ID NO: 75626 - DNA, 225 bp, Glycine max
gactacctaacactaacaatcattctaatcctcagatcttctctcttgacccaaaggctaacttctcaccctgcaccactctaatatgcgtcatgaaaagcagaaagcccaacaccgactactatacagccgaacccaaacttgctgagaacaataatggctacgccaccaaagctaccaaacccacctacaaagacaatgcaactaaacatcctaacaagccca

SEQ ID NO: 75627 - DNA, 333 bp, Glycine max
  unsure (1)..(333): unsure at all n locations
cgggccgaccgacgcgtccgaccgggggtacaaaaccaataaaaggggttttagtggagagtcttggaccctacacggggggggtgattaaaagggctgggggggtacngtacctcatactaagccgttagagaagtagagctatgatgtgaggattagtggaggacggcagttaggatgtgaggagccaaccgaacgtcataggagggcagacacgcgggaggcagttgctgctgggacctatcctgatgggaataggccggcttataccatggcacatgatgacagagagcgggtcgactgtgctgatgaagagaatcctaggacgtggtc

SEQ ID NO: 75628 - DNA, 437 bp, Glycine max
gactttcagtgtgagatcttcgtctcttctcttgcttgcttcttcaattcatctccgaaccgcgtttctatttttgactctctctctctactcagtttcgtcatactgtgggaaattttggacaaggctgatgcaaccacaattgcggtcgcagagtctaaaaaccttgatgttgtggccaaaatcatgtaagaatgtatactaatattggtgtgccaccgggggtacctcagcatcatcctcaacctccaacgagctcacaacctaatctgttcgggaatgcattcaattctgctggttctggactcattcgaggtggattgggtgcgtatggagaaaaaatattaggatcaagctccgagtatgtccaaagcaatataagccggtatttctctgatccccaatactactttcaagtgaatgaccactatgttaag

SEQ ID NO: 75629 - DNA, 431 bp, Glycine max
ggcacaagtgagtttgttgatcgagataactagaaacagtgtgatgaaaatgaaggtccttgttttcttcgttgctacaattttggtagcatggcaatgccatgcgtacgatatgttccctctccgaatgaacactggctatggtgcccgtactccggaggtgaaatgcgcaagttggaggcttgctgtggaagcacacaacatctttggctttgagaccattcctgaagagtgcgttgaagcaacaaaggaatacatccatggcgaacaatatagatcagactccaaaacagttaaccaacaagcttacttttatgccagagacctcgaagtccatcccaaggacacatttgtgttcagtatagatggcaccgtactctctaatattccatactacaaaaaacatggatatggggtggagaaatttaact

SEQ ID NO: 75630 - DNA, 399 bp, Glycine max
ggaaacagagagtgatttcagtgagtgaccggtgttcacttgatctcatcataatcgtcagcgtcaattgaagaagatgccgatcagaaacatcgccgtcggaaggcctgaagaggcgactcaccccgacacgttgaaggcggctttggctgagttcatctcaaccttcatcttcgtgttcaccggctcaggctccggcatcgcctacaacaagctcaccgacaacggcgctgccacccctgccggcctcatctccgcctccatcgcccatgcattcgccctcttcgtcgccgtctccgtcggcgccaacatctccggcggccacgtcaaccccgccgtcaccttcggcgccttcgtcggcggcaacatcaccttcctccgcggcatcgtctacgtcat

SEQ ID NO: 75631 - DNA, 434 bp, Glycine max
ttaggaaaatgggggtaacaaggatcaaatctgcgagtgcgaccacttaagctattaggtgaaaaaacacgtgaatggttttatatgtttattatcatgtcaagtgttaaaacaataattttttttatcaagacaaattttgatcgacattgaaaagcctaactgaaatttcataactaaaagactctgcgctaccagaaatccagtgcctatacatttattcacatgcaatcatggatgttgtggattttctctcgccttgagtttggtcatgtgtggttgaatccttagtttaggacacattgttttactgctctaacatcaaactgtcctatcttctttacataagaaaggatatatttgaacagaatcagcatctctaattgttgtgcaacaaagagtgtgtaccctggaactagaatctttaggtaatt

SEQ ID NO: 75632 - DNA, 382 bp, Glycine max
  unsure (1)..(382): unsure at all n locations
gaggcggtccattccatcattctgggttgaacgtgggcactgtttggtcgagtttattttataatttgattaatctcttttccgaaaagaagacatcttttcgttttcttttcttttcttttttttccccccttgaataagagcaaataaagtagcaaacttttcgttttcaaaagatagtaagctcgtgaaaaagagaaaataaaaattaattgaacaatgttaggattttcctgcgcttagtctttgccttcggtaatagcatagcgtttaaagtccgaactcatcagntttctctctctttctgcttttaantgatatcagtcgctttcttgatgaagtagtagtaatagtatgggaatatatttttgttaattatgta

SEQ ID NO: 75633 - DNA, 434 bp, Glycine max
ggttctagtgtgtgattgtttgttgttgtaactcgttcttcttcttttgttgttctgtgtttgtgtttgttttttctctcacctgaaaatgtcttgctgcggtggtaactgtggttgcggaagctcctgcaagtgcggcaacggctgcggaggctgcaagatgtacccagacttgagctacactgagtcaaccaccaccgagaccttggtcatgggagtggcacctgttaaggctcaatttgagggtgctgaaatgggtgtgcccgctgagaacgatggctgcaaatgtggaccaaactgctcctgcaacccctgcacttgcaagtgaggtgttgggagagcaagcttcaagcagagatagcccttaattaggaataatgataaactattaatgtgtagctaaaaacttatgtattatgtctgtgatggttttc

SEQ ID NO: 75634 - DNA, 428 bp, Glycine max
ggttctagtgtgtgattgtttgttgttgtaactcgttcttcttcttttgttgttctgtgtttgtgtttgttttttctctcacctgaaaatgtcttgctgcggtggtaactgtggttgcggaagctcctgcaagtgcggcaacggctgcggaggctgcaagatgtacccagacttgagctacactgagtcaaccaccaccgagaccttggtcatgggagtggcacctgttaaggctcaatttgagggtgctgaaatgggtgtgcccgctgagaacgatggctgcaaatgtggaccaaactgctcctgcaacccctgcacttgcaagtgaggtgttgggagagcaagcttcaagcagagatagcccttaattaagaataatgataaactattaatgtgtagctaaaaacttatgtattatgtctgtgatg

SEQ ID NO: 75635 - DNA, 430 bp, Glycine max
  unsure (1)..(430): unsure at all n locations
aatgtagatgtaatcaaacataaatgcattatatctgtagatagaatactcactagcttagtgagtacattgtagtttgttggcgagcattatgaagaatcaatgctattttaattaagcgcatccgtctcttctcacttcatgtggtactgttcaacattgattatgaaattcatatactgtaatttagcaatcacgtcaagggtgagttataatatatatactccctccctctcttcatttgtaaagttcatgatcttgttcaacaactcgaaaagatttacatcaataaataatcacataaataaatttaacatcacataataatttaaaatcttgaaatttaaatttgtaagtcttgtatttacttatatgacattcaaatttttcattcttatatttcttttattatgtggaactntatctcata

SEQ ID NO: 75636 - DNA, 422 bp, Glycine max
ggttctagtgtgtgattgtttgttgttgtaactcgttcttcttcttttgttgttctgtgtttgtgtttgttttttctctcacctgaaaatgtcttgctgcggtggtaactgtggttgcggaagctcctgcaagtgtggcaacggctgcggaggctgcaagatgtacccagacttgagctacactgagtcaaccaccaccgagaccttggtcatgggagtggcacctgttaaggctcaatttgagggtgctgaaatgggtgtgcccgctgagaacgatggctgcaaatgtggaccaaactgctcctgcaacccctgcacttgcaagtgaggtgttgggagagcaagcttcaagcagagatagcccttaattaggaataatgataaactattaatgtgtagctaaaaacttatgtattatgtct

SEQ ID NO: 75637 - DNA, 421 bp, Glycine max
ggttctagtgtgtgattgtttgttgttgtaactcgttcttcttcttttgttgttctgtgtttgcgtttgttttttctctcacctgaaaatgtcttgctgcggtggtaactgtggttgcggaagctcctgcaagtgcggcaaccgctgcggaggctgcaagatgtacccagacttgagctacactgagtcaaccaccaccgagaccttggtcatgggagtggcacctgttaaggctcaatttgagggcgctgaaatgggtgtgcccgctgagaacgatggctgcaaatgtggaccaaactgctcctgtaacccctgcacttgcaagtgaagtgttgggagagcaagcttcaagcatagatagcccttaattaggaataatgataaactattaatgtgtagctcagaacttatgtattatgtc

SEQ ID NO: 75638 - DNA, 364 bp, Glycine max
aagatgacattagggataattttcaatagatttttgcaaaggaaattgcttgccacaataactaataagtgaacctttttcatccagaacgcactacttgcaattgttacttaaaaggatattgagaagggatgagatactactagttattattacatactagaaaggcaaaagtaactattttatgcttgcattgttttgtaaatgcctccttgtagtctccgtgatgtcctgctgttttcttctcaataaatcttctatttcatcctggtattgttgttcaatcatctctaactctattctcaactcatccccaggttcaaagaaggaggaagtactaacgggatgacaagagaaattcatc

SEQ ID NO: 75639 - DNA, 294 bp, Glycine max
agctccgaaatccctcaagaaactaccttcacaaatgttgaacagacccagaagcctcttgaatcatgctaaagaacgactcctacacaaggtgaccaaccaaaaaccaattcaaaccatagacattgctgcccccaactccccacatatattcagtcaaaacagaaacgggctaatccacaaaaagtacatgcgccaaatgaatttaggtactactaatacaaacaactgacaacatgcatcttacaaacaatgacaacaagaacccaagcaagaatcgctgctaaccaaaca

SEQ ID NO: 75640 - DNA, 409 bp, Glycine max
gacccagaggagtatgacagaatgatgaagaaggcatgggacgagaaatattataatgcagaggatgctgaccttgacttttgtagtgacattgatgacattgagaagccagattttgaaaaggaggatgaattacttgggcttcctaaaggctgggatgcatgcggatctaatggtgggtttttagctgcaagggaaaaagcattgaaagaaaagattgagaatactagtgatgacgatctccctgaagcagaagatgaaaacgaaaggtttgagaatactagtgatgacgatctcccggaaggagaagatgaaaaagaagagaaaattcctgaggaaggtagtcggaagaggaagcgcaaaacagcacttttggagaaagcaagacaggcaatgatggatgagtact

SEQ ID NO: 75641 - DNA, 128 bp, Glycine max
aaatattataaattgggatcattaaaattataaaggcgccacatttatatacagacgcctaacacttaatactaattattacaaattgcaatgatataatcataaacatttttcttaacacctttcat

SEQ ID NO: 75642 - DNA, 431 bp, Glycine max
ggcgcggtgtgagtgtgatgagatgaactaactggacactccacacccacagtacgaacttcgctctgaagtttttatctttcataattcggcgctaatcaagggttttatcttcccccttcctctgtttccagtttcttcggtaaaaattcgttccctttcggtggtatcgcttaatttaagatacccttatcggatttattgcaaatcctgggtattactcgatttctgttgaagaacacccggagctattagtgaaccttcacaatggcagatctcaaggagaggctactagcaccaaaacctgcatcagctcttaacgtaagagaggtttccaatcgaccatctgcctctggaaggcaagctttccaaggggtggatgttttggggctaaagaagcggtgccaaggtctccgttcatggattcgggt

SEQ ID NO: 75643 - DNA, 314 bp, Glycine max
tctggccagcaagagctgctaccgtgagaagtgctccacagatgcttgtccagagcctgagtattatgtgctgaagatgtcctctagtcaaactgctgtgtgatgctgacattatgcagcaaagaagtgagtcaaccactgagaaggaatgatcagtactgaaaggggttctgtaatcatgttaaagaatctagtataggagctagcattatcatgctgagaaagctgctttaataatgcactgaagatactcaaaagtttttgcatccattggaatgcactgaagaaaagctgtccttcatgtgagggttccc

SEQ ID NO: 75644 - DNA, 422 bp, Glycine max
  unsure (1)..(422): unsure at all n locations
accggccggaattcccggnccgaccacgcgtccaggcgctggtacagntgcgaaaaaggcgacagttagggggtagacaaacagaggagcccggagtgcggatcctctcttctcttctttgatctccgataccctttttgatatctcaacagagagagagagagaggatctgttgaagctcaagggattgagaagtggggggagtcacagagagctgcgacacctgcgacggcgcgtggcgtatacgaagacgaaagaagcgcaatgttactgcgatggctggttgctcagacaccatggaaagtgtgtgcctgaatagctcaaaactgaaagagcgcaactacatggggttatctgattgttcatctgtggacagctccgcgccgtccttctcagatgagactaagagcaattgtgataca

SEQ ID NO: 75645 - DNA, 366 bp, Glycine max
cgacccacgcgtacggacaggtgcaaaaacactttagaacgtttgatatatttcaagcaaacattaatactggccgccgagcatttttataaccgcgcgccaaaaaaaatatctttttctaaaaacacattctcctaaaaataaaatacggaaatgctccaaaccacagaccagcatggtacaatatttcctattccaacgaactcgtatcaaaatcacaataatgctactcgtactatatctgattcaacaaaatcatcatatcagaactaactgcctataatatccaaatgtcattaactatcgaaatcaattatctcacatcatacaaaacaaaattaatcttgaaaacaaataactaaaaat

SEQ ID NO: 75646 - DNA, 290 bp, Glycine max
  unsure (1)..(290): unsure at all n locations
gtcgagcccacagccgtgtcgctaccggacgccgatgacagaccgacatggaagaggagagagctatacagagaggaggagaagaagctgtagaactcatagtcaggcacgaatnagctatgactagcgactcatgaagctcgatgcactgagcgtccaagacgtatgctcaacatgctggggacatgcgcaggacatgctccatcaacgtcaaatccaatccttgcaaggttgtacaggacagtacgtgaactacaggcaagcatgggcatgctctgagtgactcagat

SEQ ID NO: 75647 - DNA, 428 bp, Glycine max
ggcacaagtgagtttgttgatcgagataactagaaacagtgtgatgaaaatgaaggtccttgttttcttcgttgctacaattttggtagcatggcaatgccatgcgtacgatatgttccctctccgaatgaacactggctatggtgcccgtactccggaggtgaaatgcgcaagttggaggcttgctgtggaagcacacatcatctttggctttgagaccattcctgaagagtgcgttgaatcaacaaatgaatacatgcatggcgaacaatatagatcagactccaaaacagttaaccaacaagcttacttttatgccagagacctcgaagtccatcccaaggacacatttgtgttcagtatagatggcaccgtactctctaatattccatactacataaaacatggatatggggtggagaaattta

SEQ ID NO: 75648 - DNA, 411 bp, Glycine max
ggttctagtgtgtgattgtttgttgttggaactcgttcttcttcttttgttgttctgtgtttgtgtttgttttttctctcacctgaaaatgtcttgctgcggtggtaactgtggttgcggaagctcctgcaagtgctgcaacggctgcggaggctgcaagatgtacccagacttgagctacactgagtcaaccaccaccgagaccttggtcatgggagtggcacctgttaaggctcaatttgagggtgctgaaatgggtgtgcccgctgagaacgatggctgcaaatgtggaccaaactgctcctgcaacccctgcacttgcaagtgaggtgttgggagagcaagcttcaagcagagatagcccttaattaggaataatgataaactattaatgtgtaactaaaaacttat

SEQ ID NO: 75649 - DNA, 398 bp, Glycine max
ggtctagaattaagggaattcatcatagaagcttgtttaggaggagggtggcaccaatacatgaaaagtagcatccacatgtgggcaggaacagtgagcacttgatggtattgatccagttaaaggactaaggagattgcatttctgtgtttgcattttttttataggtaaatattaattttgtttgcatttttttatcttataaattagaggcatatattgttaaccctttaattttttgagtccacaacttcaaaagcaaatctctttcctttttatctttttaacaagtccttttcactctgttataatttaaatttagccaatatataaattgtcaatataacaattcttcacacaaaaatacacgtagactttttttaagcaaaatagtgaat

SEQ ID NO: 75650 - DNA, 308 bp, Glycine max
ggaacctgaaaatctagtttcttacaagcctctagtatactgcttcaccttctgctctagaaaattcagtgctgaaacatggcttcggctactctctctgtagccaaaccagcccttcaggcaaatgggaaaggcttctctgaattctctggcctccgaagctcatcaggcttccttcccttttctagaaaatcttcagaggatttccattctgtcattgccttccagacctatgcagttggaagcagtggaggatacaagaagggtgtgacagaagcaaaactgaaggctgccataaacgggtttgg

SEQ ID NO: 75651 - DNA, 433 bp, Glycine max
gaatacgaagatgactagcaaagggttgctgagaggagcttcgttaactgcaaacgcagtttggcatagaagcagtttcttcccaaaggtaacggttagcgtccaccccaagttggtgaaatttcagagcttctcatcaaccaccgcttgctcctctcttccacccccggatttgcctcgtttggcaaaaactgctcaaatttcacttaccccaaacgaggtttggacagctgcagggtattgatcttgaaagtgttgaaccctcgatcagagcagagactgaaaacaatttgcgtggtaatgctcctgaaacatttgaccataaggacgccttgatcgcttctgtcccgagctatgaagagccttatattaaagttccgagggtcttaagcatggactaaagttaaaattgcttagacgagttatttggtag

SEQ ID NO: 75652 - DNA, 324 bp, Glycine max
tttccgggtcgagacgaagccttcgcgcatgcgagaagacggctgagggaggcgacttaagggggacagggaagaggagaaactggggtacttggctttatgcccaagtagggactgtggtggctgtcaatgggatcacaatgatgagcatggtgacatggaactggatgatgatctattagcagctgatgtgagcatggtacttgctctactaattatggacgaagatgaagatccacttgctacttgcactcctgactctattcaggctctctctgaagcaattgatcctgctccacagaccgctttcgtctctgagcatgc

SEQ ID NO: 75653 - DNA, 331 bp, Glycine max
  unsure (1)..(331): unsure at all n locations
ggggtgtgaccattttgctagcgcaatcatcttgttccccaattaattaggttttttcagagtatcacattttgcatcgattcctctacgcacgccaccgtcaatcatctcagcacaacgttgcgattcggacaatcgcaatacggtacggtgtttcggttcctattgctttataaacgctgcttttatagttgctgtttcggaaatgatgaattaaatctggtactgtaacatggaagcttctttctctatttcctcttctgatntttggttcgatacttgntagacacttagattggtccttttttttttaaaaaaaaattcaattaac

SEQ ID NO: 75654 - DNA, 410 bp, Glycine max
gaccaatggaagggcctcgatcgctttgtcttcgatgctcgtgtaagtgtgttttttaattttgataaacttggtgttgcttactctcaaacactgttttaggtttattgaacataattggcttaattacgaatgtagtgtaaaattattttaaatgatttaatttgatttctaaatttttaaatttgaaagattttacttagatcttcaattttttaaaaataaattaatttagtttttaagtttttaaaagattcgattttatcttaaaaataaatcaatttaatttttaaaaaattcaatttgtttctttttgaattcttaaaatttgagaatcaactaaatttatttttaagaatttgagaattaattagatattttataaattaaaactaaattaaattattttt

SEQ ID NO: 75655 - DNA, 356 bp, Glycine max
ggcctctggatggccctacttcgcttagacttcggggctggtataaatgtgttctctaatttcgataatctcgatgttgcttactataagacactgttcatggtctattgaacataattgccttaattacgaatgcaccgcaaaattattgtaaatgattcaatttgatttataaatttttcaatttgatagattacacttagatcttcaataggttaacgttcaatcactttagtttttacgactataaatcatgtccttatatcttataaatcaatcaacttaatacttaaaaatttcaacttgaatcttattgaattcttaatatttgcgaatcaactcaatttattcttaag

SEQ ID NO: 75656 - DNA, 281 bp, Glycine max
aggcgtccgaacacgtctgagagggggagcaatgacgcaacgtcacgtactcgtaacggggccttccgttcattcgcgttgtttattctagacgtcacactgaccttgaccgatcatgttatacacatctctgtctctgaggtactctctctctcagctcgacatgattcaacgtggtatagatactctattgagcgactatactctgggccactgttaaatggacttgactggtcgcgctacacaaccgactgatgctgatgagacagcttcgagagatc

SEQ ID NO: 75657 - DNA, 155 bp, Glycine max
ccacgcgtacgcacacatgcgatattacgatcgatgacgcaacaaatcttatcaggaactgactctttcttacatttgccactgtcattctcagccacacacatattttgatacatcatggtatacaaacctctatcactgatgaactctatgtc

SEQ ID NO: 75658 - DNA, 199 bp, Glycine max
ctgggcattccaagtcgtctcatatggctttggttttggccttacttctgtggattctttacctatcagatcatgttatattcagttcctttcagagttctagtccatctttcctaaacctattactagaacatagaatccaacggttattcatcttttttatgcttcatacattcattatgtcatcagcaaactatac

SEQ ID NO: 75659 - DNA, 345 bp, Glycine max
  unsure (1)..(345): unsure at all n locations
ggaacctttgcattctattcattcaagattcagcaagtgcgttttggaagcagagaccgaaatacttcgagatggcccgtacaaagcaaactgctcgtaagtcaactggaggaaaagctcccaggaagcagcttgcaaccaaggctgcacgtaagtctgcaccaacaactggtggtgtgaagaagcctcatcgttatcgccctggaactgttgctcttcgtgagattaggaaataccagaagagcactgagctcctaatcaggaagcttnctttccagaggttggttcgtgaaattgcccaggatttcaagactgatctgcgtttccagagccatgctgtgcttg

SEQ ID NO: 75660 - DNA, 303 bp, Glycine max
cggtcttgaatttccgggtcgagccaagccttcgcaccggttccagaagaccaccgaaggggatatttaagacgatgctagaaggaactgttgcgggaagtacgaggcatagctgcattcacccgattgttatcaccaaaaccatctacatggctttccattttgagctattaaagattaatgcctaggtcatccaagttgatgacgacattgaattgatcgagacttcatgcttgtgatacttgacttcaactgatctctgactacaacctagcctgtcagctgtatatctacacctagttt

SEQ ID NO: 75661 - DNA, 79 bp, Glycine max
gacagcttttttgtaagaggtccacaaacccttgtgacaaattctcaagaaggctaataagttgaaaaagttatttcag

SEQ ID NO: 75662 - DNA, 252 bp, Glycine max
atgtacaagtggtgatgaccctaatcataaaacgcacaattacaaaggggaagatgggctatgtactacatgggataatccaagtagactcagcacttatgaacaacctttcgtcgtggaagatgaagaagttattatcttcaggactctagcgaggcatcattcaacaccatcgtacgcactattttcccctcatgagcagatatcataaggcatagacatggatgacatagtcttacacttatgatgatt

SEQ ID NO: 75663 - DNA, 424 bp, Glycine max
gcacaagtgagtttgttgatcgagataactagaaacagtgtgatgaaaatgaaggtccttgttttcttcgttgctacaattttggtagcatggcaatgccatgcgtacgatatgttccctctccgaatgaacactggctatggtgcccgtactccggaggtgaaatgcgcaagttggaggctagctgtggaagcacacaacatctttggctttgagaccattcctgaagagtgcgttgaagcaacaagggaatacattcatggcgaacaatatagaatagactccaaaacagttaacccaacagcttacttttatggcaaagacctcgaagttcaatccaaagacacatttttggtcaatatagattggaccgtactctctatattccattcttcaaaaacatggatattgggtggagaaattt

SEQ ID NO: 75664 - DNA, 220 bp, Glycine max
  unsure (1)..(220): unsure at all n locations
ggcattatatttgagttcaaacaaatcaaagccatggccacctncaacttctctattgttctctccgtctccctagccttctttntggtgctacttaccaaggcacactcgaccgataccgtttctttcaccttcaacaagttcaacccagtccaaccaaacattatgctccaaaagaatctaggatttcaatctctggggtggtacaactcacccaaag

SEQ ID NO: 75665 - DNA, 323 bp, Glycine max
ggaggtgtgaaggacaacataacaataaagacaaaagggacccttcacgcattgtcgacaacgtagtcatgaacaagtcgctgaaaccagaagaacaagggtccaaacattgaaactcattcccattgaagctgaacaaccaaccccattttggttctgattatctcagagctccaagcggcaagctttggaatattctgggggcttcatctggattattcttcaatttgaaaacccaccaagggatgagcgtttcctagttgcaatgactacttctggtgctgacctggttttgggtcgacttatgtaaattcttcacccct

SEQ ID NO: 75666 - DNA, 366 bp, Glycine max
ggactatgattgaccttaacttacctgttgcactggaagttgaagctgatgaaacttttgtgaatgaagtggcggagatgcagcaaaataacacaggcaaggaatcagatgatctcagtgttgtaacaaatgccaaacttagtgaacagcctgacattcacacccggaggcagagcaccagaaaccggccaccaacaacaaaagtgctagaagcttttgcctttggatatctagacagaaaggagaagtgcagaaatagagattatctccaggacagttcaacaaggcctttccgacgtgtttctcgcaaattggcaggctctagaaatggtggtactgatcttgaaaaagaggaaaaaacagatg

SEQ ID NO: 75667 - DNA, 423 bp, Glycine max
ggtaccaaagctgaatagccattcgtattgtcgcatagaatgaaaaccctagctcaccgtttcaaggtatccttctctcctattctccttctgattaagattcgtttattagggttcgtgttaatttttcaccgatcgtcgtatctgtgagtgtgaagcctttgattttgatttggggattttcgtgtctgctaattttttgttgaatctactcgtcgtacatcattgattttaccctcttgataatcatacatgctgagatatttttgaaactttttcttgtataattggctagattgtttctatttaattatgttgattgaaagcaatctcgagatctgttgtaaatatgattaatttgtcaaaccgttgggcacgtattgttgtgtattgcataatttgtaaaatcttttgttatataaa

SEQ ID NO: 75668 - DNA, 393 bp, Glycine max
ggagagatcgagttatataagaatggcatgcatagagagagcatctccagcactgaagcaaatactgctcaaactttgctggtaataagaggttatatatgaaaattaacttttaggaaacactgccatgtttgctaggtcttatctttttattatatatgttggttaaagtttttctaatatgcagcacatggttttgttgtttttgtatgtgtctgtttttgttcttttcttttctttggttagtttttgttgaagggaaagtgcaaaagataaagaatgaagcaatttcattattgaaaatagttttagtaaaggaattatataatatactaatgtttgtttgtatttggaaaaatatgcatttaaacaaaaatttggtcagcatgtgac

SEQ ID NO: 75669 - DNA, 353 bp, Glycine max
  unsure (1)..(353): unsure at all n locations
gctcccgcgcgacccaacccgaatcgccgcgcacacacacagaactaccaagcttctccaaatgcttgtcttctttagttttaatcacaccctctttcaggtaactcatattctttcacctttgaatcatttccaatccttcgcaaccttttggaaaatgtgtatctttgttgaaattgcttagaaaatgtttcgcataacaaattggtattttattaaaacggatggcattttgtatctacttattcgtggcactattgctcntgtgattgcgattatgaaccgcagaaaatgtcttgcctttttttggttgctcacttaagatattattggattctattagataaacaatg

SEQ ID NO: 75670 - DNA, 408 bp, Glycine max
  unsure (1)..(408): unsure at all n locations
ggttctagtgtgtgattgtttgttgttgtaactcgttcttcttcttttgttgttctgtgtttgtgtttgttttttctctcacctgaaaatgtcttgctgcggtggtaactgtggttgcggaagctcctgcaagtgcggcaacggctgcggaggctgcaagatgtacccagacttgagctacactgagtcaaccaccaccgagaccttggtcatgggagtggcacctgttaaggctcaatttgagggtgctgaaatgggtgtgcccgctgagaacgatggctgcaaatgtggaccatactgctcctgcaacccctgcacttgcaagtgaggtgttgngagagcaagcttcaagcagagatagcccttaattaggaataatgattaactattaatgtgtagctaaaaact

SEQ ID NO: 75671 - DNA, 434 bp, Glycine max
gtaccgttccggaatcgacggacgcatccacgcgtcctgcgagcatactaccgaagggggtacaaacaacacagatgtcactgacacatatgccaatgtctcagatgcctctggaacggatacaatactttgaataacgcgtggtattaattgttaacgctctatcaccattcctcttctcatattccatactgctacctgaacatgaagaagctaaaccctcaacgattgcctgtgttcaagtaccgaatagacgttctctacctcggcgagactcacgccaccacacatcatagtctgcgacactctcaatggataaaccactcaaattgcttagtacctgaaagaaacacgttgagcctgtggtggcagactcaatgcttggacttaacctaaaggactttacactcaggctgatgctttcatagttgcct

SEQ ID NO: 75672 - DNA, 329 bp, Glycine max
gacacacaagatgtgaaacccatgtcatggtgtctctgctaagatttcaaatttttctacatctatggttggtcatactgcttcgtgctcttggacttattctctgagtaatgtttccttaaatgctatattgtctgcttatcattgcttgtttttgtccacagaccacaatgtatgagttgggcttaatcccgtaacaagcagagataataactttcttcagaaccatcacatgggtagtgccgctaactgtcgctgaattcaacctcaaaatatctagacatactataattagaatttagaagactatgtgctgaaaatgtataggg

SEQ ID NO: 75673 - DNA, 233 bp, Glycine max
  unsure (1)..(233): unsure at all n locations
gactaacgaagcgagcgaacaacacacgcagggcggcggaggaangacgaaaaaccaacggcgagcagggccaaggagcgggccaggcccgaccacagaaggacaagacacgacagagcaagcgacggagagaacacaagaacacggcgaaggcaaacgcacaagcagcggcagaaaaggccaccggaagcacggacaagacgggcgaaccacacacgaaacgccagccacca

SEQ ID NO: 75674 - DNA, 420 bp, Glycine max
gtaagcggacatgtgatagtagttgtagaggcaagccacacatgtatgatttcgaggggaattgagacgttaggaagtagtacggctactattgcactgctaggacatttatcaaccaaccctactgcaagggcatcattcttggagagtattccacgtcctacatcatctggggagcaatgactcttgtgttagaactcactggaaataatttagcactagatcaggtcattctctgcactgtgaagtttcagtgtcagcagttgaggtacccaagcatggataagttcagaagatatcctttaatggataatctgtatgtttttcagttcctggaattgttgtttcagtacgagatttatggtcagaatttgtctgacgattgatagtcacatcattatcgttctgtcttctagagtc

SEQ ID NO: 75675 - DNA, 280 bp, Glycine max
tagggacccagaagaatgagtgagagtcggtgaccaatgggctacagctgaaagacaagctccttcgatctacaatctatatctattacgctctcaatttccgagagtgctctatctctttctctcacacatagtcagcgcgatttgcacgcatatttccatcatgatgtctgctactaaactcaaatctgtcgagttgtacaggtaaatgctgagagatacgactgaggcgtcgccatcagggacgggatcatggatagtggcagttctcggtatgatg

SEQ ID NO: 75676 - DNA, 173 bp, Glycine max
ccgggccgacccacgcgcccgcacgcgcggcggagcccgccgaagggggaaagagagcgaccgacgcagcaagagaccaggggcaccggaaagcaaagagcgacaaagcaaaccagagagccgagaaggcaccaacaacggccgcggggccaggacagacaagaagacaagcg

SEQ ID NO: 75677 - DNA, 419 bp, Glycine max
acgccaggacgacggccacagaatcaaacacgaacacttatagacaattcgatgatatcatatatccttcgataactaagatgcatgcataactttagcgcttaaacattaggatccatatcactgtcaaacagctccacatttgacaagctgataagaaatcatgacaggcgtgattgtaaaagactataacagcgaaagctaagacatcgatcatagaaattggatataatcgaatgaccgtaccaaacttgatatcgtcaaggtataaacaaccttatctagatgatatatgaaaagtgattggattctaggatagcgagattaaaagtggtcaccgaatgcatgattgatctatgacattctgacagatagacttacgtatgatagaatgtatagcatatagctgagttactgat

SEQ ID NO: 75678 - DNA, 418 bp, Glycine max
tctgagttccgtgccactctattgatccaggcgctcgggtagatctgacatcgattctcataccaacttccgaattcataatcactctcacattattctcctatcattttctccttcatctccatcaggtgaaagttcagtgaccatcaaaagccacatggacggaagcaactatatcatcggacgcaatgccgtctaactcgacgttagcatcgactccagtgtatgcaccaaccaggatttctgcaaggttattacaccttctagagttgaagttattgaaaatgatgagattctggttttggagttcccaaaagaattacctattggattaagggtctaggacattcggttagtaagaatctcgaatgatagaatgaattgcttatacccgagtacctgatagcacaatggtgag

SEQ ID NO: 75679 - DNA, 436 bp, Glycine max
ggttctagtgtgtgattgtttgttgttgtaactcgttcttcttcttttgttgttctgtgtttgtgtttgttttttctctcacctgaaaatgtcttgctgcggtggtaactgtggttgcggaagctcctgcaagtgcggcaacggctgcggaggctgcaagatgtacccagacttgagctacactgagtcaaccaccaccgagaccttggtcatgggagtggcacctgttaaggctcaatttgagggtgctgaaatgggtgtgcccgctgagaacgatggctgcaaatgtggaccaaactgctcctgcaacccctgcacttgcaagtgaggtgttgggagagcaagcttcaagcagagatagcccttaattaggaataatgataaactattaatgtgtagcttaaaacttatgtattatgtctgtgatggttttcgt

SEQ ID NO: 75680 - DNA, 228 bp, Glycine max
  unsure (1)..(228): unsure at all n locations
ggagaagagaggancgagagaggggcacaagcgggcaaggcggagagagcaaagaggaagacgagaaggngcaccgagaccangaacacaccggacggcgggagcaccaaagcncaggccacggccaaggaagangaagggccccgcggaacaaaggggcgagacgncaagcagcngaaacgagaaanncagcacaagacagacgaaaacggcaaaagaaagccgaaa

SEQ ID NO: 75681 - DNA, 414 bp, Glycine max
gattgcgcaaacatttcagtgatttttgggtagttatcctcgtgatctgtgcacaatcgtctgctacttcatataccttcttccttctcccccacctcttttcctcctttctttgttcaacaccattccccataggagcaacccttttaaaagttttgggatttggagggtgcaaaagagccaatgtgctttttaaggtttgagtccttagtgtgaaggtttatgtagtttggtgcattatgtatcagctagggcatgagttttgtgaaaataatgctttaaaagcaatggggggacaattgtgacaaacatggatcctcaggcgttcattaggttgtcaattggttctctggggttgcgatgcactggaattgaactgagcactgcaaaatctggaattcaaacactctcttt

SEQ ID NO: 75682 - DNA, 302 bp, Glycine max
aggcattgtgagatcttctaaagcctgacgctgcaggggtttaaatcgactgatcaccctatactaaatgtacatacacagttcacttaaacctatttctataaactctatcttcatcaacattcatcagatgaatgatcagtatagcaagcctgcctatttacaacaatggcgagatacaacgtgattgaaggtaatgcaacactctactgaacacggatatacttgtgacaagctttgcatcatgacagaacccatagactgagaaaataaaggttcaacagcatacttgggaccattgc

SEQ ID NO: 75683 - DNA, 299 bp, Glycine max
gttgaaaaacgacagctctagaaggtactgagagggtttgcgctgcgtgatttccggtgtcgcgagtcgctgcgcaatgaagaatggcaggtctatgaagtccatacccactatgggtgagcttgggggctaacgatagggtttgtcagaggaagctgtccgggttctggatcttagaagcgattcatggggattttgcgtcgcaaggtgtgcaggtagaatagggtactacggctgttaacactggaacatgccaggacgctggggacacagggactgtgctcacattatgaggggac

SEQ ID NO: 75684 - DNA, 137 bp, Glycine max
cccaagccgcccgaccggcggcaagaggccaccagaaggggaaggagaaaggaggaaaaaaaaaaacaaagggaaaaagaaaaacgcgcccgctcaagaggacccaagcaaacgcccccggccagccaacgccaaac

SEQ ID NO: 75685 - DNA, 347 bp, Glycine max
gaaagagggattggaaaaaatagacaaactatcggatttaagcaactgaatttccaatcctgagaccgcaagcgcatgggtagttttcacttggattcatcacaataaactcaaactgcagaaatagacttatgcttttcatttgcattgctacagtgtcgctttaccaaaacgccaagatacagtgagattggttttaaagcaactcctgcgtgaccacaacgccacttgtttcaggcatgcctactgaacagactcaacaacctctgatatcggaggagcaagaagagacagcctacgattcctcggagaaggtggtggtggtcagaatcgacgaccactacggc

SEQ ID NO: 75686 - DNA, 403 bp, Glycine max
ggcacaagtgagtttgttgatcgagataactagaaacagtgtgatgaaaatgaaggtccttgttttcttcgttgctacaattttggtagcatggcaatgccatggcgtacgatatgttccctctgcgaatgaacactggctatggtgcccgtactccggaggtgaaatgcgcaagttggaggcttgctgaggaagcacacaacatgtttggctttgagaccattcctgaagagtgcgttgaagcaacaaaggaatacattcatggcgaacaatatagatcagactccaaaacagttaaccaacaagcttacttttatgccagagacctcgaagtccatcccaaggacacatttgtgttcagtatagatggcaccgtactctctaatattccatactacaaaaa

SEQ ID NO: 75687 - DNA, 396 bp, Glycine max
cgtcgagccgcgtcggcgtggaaagacgccacaggggggcgcatggctctcaactgcggactggcggatccctccgggggtcccatgtcgaggacttctatcagcctagctttgttgatatattctttacaggttggagtgactccatgtaggcggtagggagcgacagtacaggatgaagtagaggaggctggtgcttgggagtgagacgtgctagcgctgagcgtggatggtggaagccgggtggtggggacctgcttggagcggtgaaagaggagtgggaggtaatgagttaggcatgcgcgggaagttacagtggggatcatgatgcatggagcgtggatgggtgaatacacgtgggtagcagagcctgctaaggcatgctagagactgctg

SEQ ID NO: 75688 - DNA, 85 bp, Glycine max
  unsure (1)..(85): unsure at all n locations
caggaagnggcagagacagacgccacaaaggaggaaaaggacaaaaaaaaaaaaaaaaaaagcggccgaacgagaggagccaagc

SEQ ID NO: 75689 - DNA, 162 bp, Glycine max
  unsure (1)..(162): unsure at all n locations
ggcggcagnagnggaanagcggaagagngagcgaaggagaaagcagaaagcagaaagacggggcaggaagcggagggagaaaaagcgaggaacgcgacacagaaaaaaaaaggagcccaagacagcgcgagaggggcgagcgagagcaaaaggagcagacac

SEQ ID NO: 75690 - DNA, 443 bp, Glycine max
gacacagtcctggctcagcaggaacatcaccagggacttgatccttatagaaaatcaaatccctttctttgtgctacagaaactctatgatgacgttgtcacttgtgtcaaagagaaggaagaacaacacaccagctttgttgatctcaccattgagtactttgcattctatgacagtcagatgtcttctcttaatgaaaatgaaaccaagaaacactatttctgtggcttactccgcaagtcaaagagcaaagatgagagtccaaaacccttcactgttgttcgtagaagcggttctgaggaaccttgtatatcaaagagcgaagataatggttccaaggaaacttgtaagtcagaaaacaaaaatagttgttgtaaaccagaacacttcactgatctgataaggtggttttaccttcccactgagtgcaatattggtcatg

SEQ ID NO: 75691 - DNA, 387 bp, Glycine max
ggggttgaagatgagtgaagatataggtcaatggacttcttaaaacaaatctgtgatgagtaagttcatgataaaagtgactcagtagtgggccatacatattgtccataatggatttaattttgttcccttaagggtatttgggtttgaaaatctgatattgattttagtttccaatctcattgcaagtcaaacaccacaaaattttcttggaagttggtgttaaataatattgtatgtaactgtagttcggaaatttaggactcaagatttagttgggacttaaataatcatagacttgtgtgattatggtcactactatttgtaaatgcctgaaacttttgatgattttggcttagttcctccaacaccttccaataaattcga

SEQ ID NO: 75692 - DNA, 130 bp, Glycine max
  unsure (1)..(130): unsure at all n locations
catcctgtaataatctccgtttcaacaccaaacaccaagcnaaanntgaattaagccttttcttctcatcaaaacaaaacaacccatccccgctaaagaaacacaacaacacataccgcaacaatgtaca

SEQ ID NO: 75693 - DNA, 358 bp, Glycine max
ggatgaaaagcactatagtactcttagaaatctcctctgcctcttctctctctatatgacaccctcgccttttccctttttctctaattcccatgcttgcttcctctgctctcaaaagctctaaacccattaaaataactaaaaatagaattggagcttcaagttgagaagcaagcatgcctttggaggacttctacaagatatttggtgccaccagtaagttctaaccattattgttacaagtttcatgcaccttttcctcacatcattacatgaaacacagaaaaccaaatgtatgaaaacgacagaaagagagtaattcattttacctagtattcaagttcaaacatagagaaat

SEQ ID NO: 75694 - DNA, 243 bp, Glycine max
gaaaaagggggccgaccgacgcgatcgtacatttacaattatactacagtattgatatctttaagcggaataacataaaaaccgcacgggttctattcatagtaggcttctattaatataatattattatactttaataaacatatgtaaaaattatgacccttaaacaaaggtttattttttattattttatacaaattatcttatcttcaaaatccacaagtatatcttgatttgaaatca

SEQ ID NO: 75695 - DNA, 397 bp, Glycine max
ggttgttggaagcgtggaagctagttcctgatgtttcggatgaagtttctccacctcctaaatcgcaatcttcatccaaaggtaattatttgattttggttgtttagtgtttgatcagagaatttgagatgatgggtgatgttagatttctttacagtaatggaaatactgatcgtgttatctttgatgttgtatctttaaaaataaagcatgattagttaaagtaaggataagggaaaaaaggtgatggtcaatttgccattgatcaattttagatgaattcagaatttttgtatgcctaaattttagtgcgtatttggaaagttgttgagaaataagaaatcacgtctcaaatgtgaaagctattactattagcttctcaaacgtgaaaaatcac

SEQ ID NO: 75696 - DNA, 288 bp, Glycine max
gggcagcagaagaacaagtagttgagaactaagggggagaagcaaatggcttcctcaatgatctcttccccagctgttaccactgtcaaccgtgccggtgccggcatggttgctccattcactggcctcaagtccatggctggcttccccaccaggaagaccaacaatgacattacctccattgctagcaacggtggaagagtgcaatgcatgcaggtgtggccaccagttggcaagaagaagtttgagactctttcctacctgccagaccttgatgatgcacaattg

SEQ ID NO: 75697 - DNA, 344 bp, Glycine max
gacatagaacataaatgtaacagctcaagaacaaataacaagggcacattctccatatgtttctggttgcaagattcatgcaatggtcataatcattcttctttactttttctgctttgttcttaaatagtttgttttgtctcctacactttgacattattttgttctttgacacagctttgtcttattttcgtaaagcaggtttgcaggaagacttgaagattgttttggggaaaattgaatcacagttattgggccttggttttggctgggagaatgtcctttatattcacctttacattgatgacatgaataatttctctgaggcaaatgagacatatgtg

SEQ ID NO: 75698 - DNA, 297 bp, Glycine max
gaagactaaagaagaagaagaaatgattgttgttgcaatgaaggaaaaagttgcctccgtccaagctgaagcttatgctcaagctctagactataccattgtacgtggggtcattaatgttcttactaacactagcatcatggatgaaacaccaaagacatccaatgcagccatagctgatgaagttgtccctcaagacaaggaacttgcattctagaaaagtacaaccttaaatgaagctaccttaagagaaaagggtgaacctgatgttattggtggtggttactctacaagctc

SEQ ID NO: 75699 - DNA, 312 bp, Glycine max
agagacacagagggggttgttgtgtgtcattttcggggcgaattttgggtgcagaggcagagaaggagcacccacaccgaccactctactctgcaacacccgaatctcgttacctaaacacctgtttgcgttcttttcccttttcttttctgattagttcaagagaaaaaaggacacaatggactctgcacgtataatctgcaccgcaaaggttttaggatttcaaggccgaaagctgtctataaaccctaaccacgatttgaaatttctacaaccaattgacctgaaagagaattgtgcttgatggctttc

SEQ ID NO: 75700 - DNA, 292 bp, Glycine max
tttatactttagaagggggagatggattcaaactatccgtttccttaaagtggagcccaagcaaagaattttagtacactggtcaggttgttagatatgaggataacttttactcaaccacctacttggttttcatcatcatttttactttttagatcctcactttaacatttattttttctttctttatttttaaatataatattttttttttttttatattaaagcaattttttttatttattttctatcccaatttttatttttttttttttatatatttttttttttt

SEQ ID NO: 75701 - DNA, 356 bp, Glycine max
gccacgcgtcgtctgcgagagacgacgaggggacacacagacagaccgctgcgaattattatcctttcccaagccagccagcgagtgaaattacttgcatagatagagcatatggcatgatgaacggctgcttctttcggtcgtcgtactttctatcctccacttaccagaaaccttatgcctcagtgaaaagaaaaaattggggggtgtctacaagggatgagtatgctaattgacccaatttcgggggtgtgtgaggacattggtatacgtgagtggctggatcacgggtcatcagacattgcactgatgacaagaagaccagatttgaactgaaaacacatccagatgcccat

SEQ ID NO: 75702 - DNA, 406 bp, Glycine max
ggaattgaaatagtttaacatcccaaacaccaagcttaaagaagagagacaatgagtgacacaaatagagcaacggaggagaagagcaagagaggtttaaaggaatggtttaaatcgtctcaggttctattgagcatgatattagtgcaagtgtttgttactggattgcaactactatcaagggttgtattagttcaaggctctttcatcttttctctcattgcatatcggttttattgttgctaccatttgtgttgccccctttgcactttactttgaaagaggccgcacaaaggattttactccgaaggtttggttttgggtgttcgttaacgcattgatggggatgactttggctcaaggattattctattatggtctcaaagacacttctgctacttatgct

SEQ ID NO: 75703 - DNA, 296 bp, Glycine max
ggagcaggagtgaaaagcgaagagaatggctcccaagggtttaatctttttggctgtgttatccttctcagcactgtcactgagtcgttgtcttgcggaggataatggacttgttatgaacttctacaaggaatcatgccctcaggctgaagacatcatcaaagaacaagtcaagcttctctacaagcgccacaagaacactgctttctcctggctcagaaacatcttccatgactgtgctgttcagagttgtgatgcttcactgttgctggactccacaagaaggagcttgtctg

SEQ ID NO: 75704 - DNA, 417 bp, Glycine max
ggtgcgaagagtgaagagaatggctccgaagggtttaacctttctggctgtgttaatatgcgtttcagcactgtcactgagtccttctgttgcgggggaagggcaaaataatggccttgttatgaacttctacaaggaatcatgccctcaggctgaagacatcatcacagaacaagtcaagcttctctacaagcgccacaagaacactgctttctcctggctcaggaacatttttccatgactgtgctgttcagagttgtgatgcttcactgttgctggactccacaagaaggagcttgtctgagaaggaaacagatagaagctttgggttgagaaatttcagtacattgagaccatcaaagagctttggaaagagaatgccctgaagttggtttatgtgctgatattctcgttctt

SEQ ID NO: 75705 - DNA, 372 bp, Glycine max
  unsure (1)..(372): unsure at all n locations
cgactcacgcctacaacagatccaataagactacagattttgttttatccctcgagagaaaccaatgaggtgtagctcaactggcactgggaatcaatcaattcaaaaaaaaccctaacaataacatggattctcaggttgccgtagctcttgctctttcacttgttggtggtgtcagctcttctatccgggcacttanagnaaangaaatatggctgttactcttcttcaaattgcaagaatatttgctaccaaaattcccggaaaaggtgattctgatgtgttgcaactgctctggaagacttgtcttgttggagctggtcctgatggaaaacataaagcttaaaagcagtcacaattgtacttgatcta

SEQ ID NO: 75706 - DNA, 248 bp, Glycine max
gggtttgggaaaggcacggaaggctttgctttcaggttgctcagcaggagggttagcgacttttcaccatatgtgacgccttagctaagtatttgccaacgaatgcttgtgttaaatgcttgagtgatgccaggttttttcctgtaaaatgagatttcagcttgtattacactattagatattattgtaaaagtctagaccaatcatcaggaacagattttaaccttaactggtattatacctttgtt

SEQ ID NO: 75707 - DNA, 423 bp, Glycine max
ggttctagtgtgtgattgtttgttgttgtaactcgttcttcttcttttgttgttctgtgtttgtgtttgttttttctctcacctgaaaatgtcttgctgcggtggtaactgtggttgcggaagctcctgcaagtgcggcaacggctgcagaggctgcaagatgtacccagacttgagctacactgagtcaaccaccaccgagaccttggtcatgggagtggcacctgttaaggctcaatttgagggtgcttaaatgggtgtgcccgctgagaacgatggctgcaaatgtggaccaaactgctcctgcaacccctgcacttgcaagtgaggtgttgtgagagcaagctttaagcatagattgcccttaattaggaataatgataaactattaatgtgtagctaaaaacttatgtattatgtctg

SEQ ID NO: 75708 - DNA, 123 bp, Glycine max
tgggggtttgggaaaggcacggaaggcttcggtttcagggggctcatcaggaggtttatcaacctttaaccatattgtactccttcaccaagtatttgccaactaatgctagtgttaaatgct

SEQ ID NO: 75709 - DNA, 267 bp, Glycine max
gaacacactcatccaaacaaccttctttctttttctgtgagcctttctttcaggttcttaacttgatcagtgtgcagtgtccaaatcataagggtagctgcaaattgcaatggctaagcatgatgttgagggtggttccttctctgcaaaggactaccatgatcctcctccagcaccgttgattgatgctgaggaactcacacagtggtccttctacagggctttgattgctgagttcattgccacaatgctcttcctttacatcac

SEQ ID NO: 75710 - DNA, 215 bp, Glycine max
tttatggtacttacagagttggatagttagctgggaatcaggaactgtatcttcacattgatggggcccatatttttaacgcatcatttgcacttggtgttccagtggataggcttgtccagtctgctgattcagtttccttttgcctatctaaaggtataggtgctccagttggatctgttattgttggttccaagaattttattgccattgct

SEQ ID NO: 75711 - DNA, 334 bp, Glycine max
ggttctagtgtgtgattgtttgttgttgtaactcgtgcttcttcttttgttgttctgtgtttgtgtttgttttttctctcacctgaaaatgtcttgctgcgttggtaactgtggttgcgtaagctcctgcaagtgcttcaacgtctgccgaggctgcaagatgtacccagacttgagctacactgagtcatccaccaccgagaccttggtcatgggagtggcacctgttaaggctcaatttgagtgtgctgtaatgggtgtacccgctgagaacgatggctgcaaatgcgtaccaaactgctcctgcatcccctgcacttgcaagttatgtgat

SEQ ID NO: 75712 - DNA, 237 bp, Glycine max
tggtactttaaattggttacaaactcaaccagattccataggctctcgtttatgttttctatgatgacaacattattgaaaagtccaccaacactttactggtacaaggtactatctaatcttgaacctacctaccaaataaataatcccaataagccattacacaaaccactcaagctttcattttaaaatgtctaccaattttataatcttaataccttgccaataagaattctt

SEQ ID NO: 75713 - DNA, 151 bp, Glycine max
aattcgagcggccgctgtttttttatgttgttttttttttattttgtgttttttgaatccgatcgatatgtacgcagcttcttctgggtgtgttgaaatttgggcattatatggtcggatattggcgttgggattagcttagggtttcaaa

SEQ ID NO: 75714 - DNA, 255 bp, Glycine max
ggataataataaaaacactcgtgccgcaccttcgtcttccccaatggctctttccacacgccattttggaagcccttttctttattacatagaatcctttggctattggaaccagtaaaccctaataattccaatcaaccttggcaattctttgaatccgaataatcttttcggccaaaacacaagtggggttttttggatttaatggttaaggggtgatagcagggttcaatctgggtttccaaaggcaaaata

SEQ ID NO: 75715 - DNA, 233 bp, Glycine max
gggggaattgactagtgcggcgcgctcctattatcaccgtagacggcggatgtggcggtggtggtgtagacacggcgtgactgcgatctcttgagataaatgttggttgaaagaggaagaagaagaagagttgtattggagaatgagccaaccaacggtgatacttgccactgcgagctatgatcacactattcgattttgggaggccaagagtggccggtgctaccgcacca

SEQ ID NO: 75716 - DNA, 164 bp, Glycine max
aatacgcgcggccgcttaactctattgattttgtttccttaacacgagcttgatgcatcgcgtcgatatgaacgcaccttcctcttggctcactgaaagatgggcattaaacgggcggtcttcggcgctgggatgagctcatgattccaaaaatgcactaccct

SEQ ID NO: 75717 - DNA, 270 bp, Glycine max
cacaatgcattgaactaaggatttgatatcccatttcattcttggtctagcagtattagggatgttttttgtacttggggggaatagtatataaaatttacagatcttgtgtgtcggtggttacctagtttacagcaagatctttgattccctaatacttgttctgtatattgtattagttaaccatagttctgctcctgttgatgctatgctgtatgtaaatcacgaccacttgtactgctttcactattatttataatatatatctag

SEQ ID NO: 75718 - DNA, 349 bp, Glycine max
cccacgcgtccggcgagaagacgacagatagggggggaaggaagagagagaccaaggcccttagtgcttttcattatttacgaaaaaccaacagcgagggtggtttttgtttggtccaggctggcccagggattgattaaagttgaaaggcttccggtgaagagaaccgagttaagcggcgaatccaaacgcagaatcggcggcagaaattggcaccggaagcacgttaataccggtgaaccaaacacaaaattccatccaccacttctcttttcaatccccaactcaaatctgggaagaaaatctcaatttctaaattgtaattcttagcactactgctagtagtagt

SEQ ID NO: 75719 - DNA, 288 bp, Glycine max
cccacgcgtccgctaactcgcccgctgaccttgttaaaaattcaaaataacacggggctggtttttaagggcttgagctcctcttcctaaaaccatttttccatcaaataccaattccttattcctgctataactccaaaatccctttttttacccctacccctgattttcatttctcttctactatgaacagctgtttaatttgagaacatttctttacgtttctccatcttcttgtaataaaacaatccttttgctctattataccctcaacatacctcccccttc

SEQ ID NO: 75720 - DNA, 113 bp, Glycine max
gggggggaacggaatcgcccatccaatcgaaaccctagtgggtgactgcgaggcgcactggaatcatccaccctatgaatctatgtgcactgaagaagtggactaaatgacca

SEQ ID NO: 75721 - DNA, 191 bp, Glycine max
ggtttttgcaaagtcacaaagagttggggtgtctgttatatcggaataatgtctcacgtctttgcaaaagatactcacatttgcgagctgtgttcaaggccatgcaacggtggcagagcccttggtgggcacatacaacgctcaccttgcttatcttcctgttactctaccttcaaagcttaactcttgct

SEQ ID NO: 75722 - DNA, 363 bp, Glycine max
gacactctaatttaaaagagtcttattgaacggtgagggtctccttggaaatccatccatgccatggctcccactcttacattcaattcatcttttttaagcaccagtcctcattcaagggtgagccttcggaattcaaggctgagagtctttgccaagaagtctgcatcattcccattatttggactatgcaagcccaaagatgattcttcttctgctgaagaaaaagataactcatccaattccaacctctttcgcttggactttggaaagataccctatgtaacgtctttgatcccatttccaaacaacacttctgcgccaggcttttcttttgtaatcacaatgcgcatggacccttta

SEQ ID NO: 75723 - DNA, 364 bp, Glycine max
gtataactgtcgggtactcgacatgtcttttctacttagtctctgatctcacaaggataggtctcatccccattgtagactctagtactactttctcctcgatacactctacttcttctatgcacagtgtgaatggcgtctgaatgctgcagaaacaagctatataataacatgtacatatctctacttacatgcaatcatgattgatctggatgaacactccctacattctacgttcaactaaataaggatgctgtcaaatcatcttataggatcactacagccactaattgaagataacattgactccatcactctcttaagagactccaccactgttgtgtgcctggatgattaccactct

SEQ ID NO: 75724 - DNA, 228 bp, Glycine max
tgggttctagtgtgacattgtttgatgttggatctcgatcttcttcttttgacggtctgagttcgcgttcgttttttatatcacctgaaaatgtgtttctaccttgtgaactacggttgcggaagctcctgcaagtgcggcaacggctgctgatgctgcaacgatgtacccatacttgagctacactgagtcatcctccaccgaaaccttggtcatggtgagtggcac

SEQ ID NO: 75725 - DNA, 280 bp, Glycine max
ggctcctacgtggtgaagatcgccatgctgtgggggacggtgtcggtatccttaatggtgaatacgacaatgtcgaagactggcagcgccactatcctgatacccggaagacatcctttccgacagacgctcttatctaagccgctgacagtcactcattcgaagaagaagggacaggttgaacttaaggggatacacaccctcaaatactgaagggcgggacgccatgtacgctctgtggtgatgacatcaatccatagtagtatcaaactgatgctga

SEQ ID NO: 75726 - DNA, 233 bp, Glycine max
ctcactcgtccgataattcgtccctttcgatctaaagaagaattgtttataaatcggcagggacaatacctgcgttatagtgtaaactaactatctttgccgatccctcaacctattactatctaagtatattcttttcatcaatgcttgttacagacacggctccttgatagacacaaactacgtaccattcatgagtgttgcttctccatctacaaacccattctaacaac

SEQ ID NO: 75727 - DNA, 314 bp, Glycine max
tacatacacacccatattcacacttatcgtcatataaaaacgcctcatcgtcacaacaaaatttctctcaacacaaacttaacacacactctacttcatctactaccctcttaataacaacttcactcttaaaacttacataccaaacattctctatcttttaaacaaaaaaactcactactatattcctaaattatttaagaaatttgtttttaacaatatcatttacttccaaactatcatcatccacatcatgacttacttttatcataatccacacattaaaacaccactaaaaaacatccatatacttt

SEQ ID NO: 75728 - DNA, 217 bp, Glycine max
cacatttgtacggtgtatacaaatgttggtggattactcagaaatgtagcaaacagggtgggtcaaaagacttcctgactgtggtctatcatcaatctccccatcgaactttttgtgacttttatgatatctttaactaaaataatctgtactattgtgctacttttatatacattacacttgaatatgtgaaaagcttcttccaacgggacacata

SEQ ID NO: 75729 - DNA, 309 bp, Glycine max
cttcttgaaaggatttttgtactggatcctgaaaagaggatgaccgttgctcaggcatgaagtcatccattcatcacgggcaagtgaattatgatgctgccttatgatctattctgaaatagcccatctaatccttcggcatttttctttcttttccctgctgtactgaaccatgagcattgtttccaaattcgcaacgtggataaagcgtggggcagtcgatttaaagaccttcctacatggcagttcttatcagtgggatgtgttctgttctcttggtttcgttcagggctatgatgataacaccca

SEQ ID NO: 75730 - DNA, 479 bp, Glycine max
gcccgacgtcgcatgcttcttccgattgacatgcatactctaagcttattttatgtctctgattatgttaatgtactatgagcattttatcaagcataggagatgcacattcatacttacctcatctataaccattatatcatgcacttattattgattactcttattaatttaatttcttattatacttttatatatttatttctttcatatttactctataaacttttgtgataattttatcatttatttttttatcatttcttttttcttttttatatattttttctttctatttttttttttttttttttatttctctatttttcttttaattttttttctttatttttttatatttttttttttttctctttttttttttttattatttcttattttattatttttttttttttttccatttataattttattatttatatatattatttttattttatatttatatttttttt

SEQ ID NO: 75731 - DNA, 417 bp, Glycine max
aattcgagcggccgccctccttaggggctcatcattttgtgctaggggtttgatgaaccctgccgatatcaacgcaacttcttctcggtgtgtctaaattttggcattaaacggccttaattgggcggtttgacttagcatacaggctcaaaaaaatcacacgcagatatttggttcgacgagaggcattattatgggatccaccgtacagaaattgaatacatctggtccgaggtacctgtgaggatacaaattactggtctgatagagtgactgttaatgaaagcaatctgatcgttgctagttttggggcagctgcaactgtgcaactaatgttcagttcttaagtgaccaaatctactgccgagaagttgagaggtcacatcttacaagcatttgaatctgtccttggatctt

SEQ ID NO: 75732 - DNA, 238 bp, Glycine max
gggtgggagtggtatcgccaatccgatggaaaccctagtcggtgactgcgaggcgcactggaatcatgcactctatgaatcaatgtgcactgaagaagaggaataactgaccaacatcagacgaaaacattgcctgctgctctccgaaaactgaaaagatagtgaagtacgcgaggctaatcagccataaattcctgatccatatccaaattatggacaccgtgatagcctaggaaca

SEQ ID NO: 75733 - DNA, 122 bp, Glycine max
gggtttgggaaaggcacggaaggctttgctgtctggtttctcaccacgagggtgcgcaaccatttcaccatagagacgccttcttcaagcttttgccatcgaacgctaatttgatatgcttg

SEQ ID NO: 75734 - DNA, 86 bp, Glycine max
gaagtagaggcagagaatagcactaaaaaggcggtcgtgtaagatgatcttttatggttcaccctaaatattcatggtgaacctaa

SEQ ID NO: 75735 - DNA, 363 bp, Glycine max
ggcagttcaattccaatatattccattctctctgtgtatttccctacctctcccttcaagatgcagatcttcgtcaagaccctcaccggcaagaccatcacccttgaggtggaaagctctgacaccatcgacaacgtcaaggccaagatccaggacaaggaaggaatccccccggaccagcaacgtctcattttcgccggaaagcaacttgaggacggccgtacccttgctgactacaacattcagaaggagagtactcttcacctcgtcctccgtctccgtggtggcatgcacatcttcgttaagacactcaccggcaagaccataaccctagaggttgaaagctccgacaccatcgataac

SEQ ID NO: 75736 - DNA, 177 bp, Glycine max
cggcgttctagtgtgcgcttgtttgttgttggagctagaacacattcttttgcagatcggaactacccatgcttttttttctaacctgaaaagtgtttgctctgttgtgaactgtggttccggaagctcctgcaagtccgaaaacggctgcgaaggctccaaaatttccccaaactt

SEQ ID NO: 75737 - DNA, 334 bp, Glycine max
aaaggaaactacaaaattttaactaaaatgtttttttccatcataacaaaaccttaatctgtgattttttaataaactattgtcctacccatatatactcaaaactcactaaaatttactactagctcaccaatctaaactaaaacatttcctatccctatgaaatcttatgatatatttaattatctatatttaatttttcaaaatccttttttttcatctcatttataatcatatataaatccttttaacattttatcgtaacatataccaatacatttttcttttaccataaaataaactttatcttttatacatatcaacttattttttt

SEQ ID NO: 75738 - DNA, 224 bp, Glycine max
ggccaacaatttatgtgtttcgaatatatcctcctactgcgttggaaataaatctggcatggctccaactaaagacgactaaaccctattgagaactactacaaacccatttacgtacaaacatcatattgcccttacgttgaagggagttaaatacacatatgtcgaacaaaattatatgaacaaaactgaacttcttttgaaatccaacccatttcacaaca

SEQ ID NO: 75739 - DNA, 151 bp, Glycine max
ggattcaacgaggcgtcgatttcatatcggtatgggtgatgaatcaacacgagtcatccctattactgcgtctgccatcagcactaacccttctctatcgtgagatgtccgcttactgcgctccacgtctcatcacctgctcctgtactca

SEQ ID NO: 75740 - DNA, 449 bp, Glycine max
  unsure (1)..(449): unsure at all n locations
ctgcacgtactcggtctcgtgaattcccgggttcgatcccacgtcgtctcgtatcggctgtcgagaagttcgacatgaaggggggaggtggagagagggagagaagtgagagtagtgagaggggagcatcagtgaatgaagtagaatcgaagggaactgaagaatggagatcttcctcctctcgtcaacatagggtcgtggtgatagatagaagggagacataggggtccgaaaatcccaagtccgaatagacgaacatcgccaagtgcgttgaagggaagggagaaaaacacatgcatcatacatacatgatcagtcagcatcatactacaacagcaacatcataaccttcggtggactgagaaatacatctcagttggaagtcccttggttcctgtcctctacgactgggctcgccaaccacaancctcgtctggcccctctctctc

SEQ ID NO: 75741 - DNA, 410 bp, Glycine max
ggtgattgtttgttgttgtaactcgttcttcttcttttgttgttctgtgtttgtgtttgttttttctctcacctgaaaatgtcttgctgcggtggtaactgtggttgcggaagctcctgcaagtgcggcaacggctgcggaggctgcaagatgtacccagacttgagctacactgagtcaaccaccaccgagaccttggtcatgggagtggcacctgttaaggctcaatttgagggttcctgaaatgggtgtgcccgctgagaacgatggctgcaaatgtggaccaaacttggtctgcaacccctgcacttgcaagtgaggtgttgggagagcaagcttcaagcagagatagcccttaattaggaataatgataaactattaatgtgtagctaaaaacttatgtattatg

SEQ ID NO: 75742 - DNA, 342 bp, Glycine max
ggcgtcttggggtgtgagatcaaaccctagattttagacactggaacagtagcatcagcagccatggcgagtatgaggtgcctgcgagcgttaactcaaacgagaccgtatatcttgcgaaaagcatactatgttcgctcactcgacgtgcttccatttgccaactgcaacgcttttgcacactctttcaccgcacacgcctatgtttttgcgcagtgcccgcacctgcgttgtgtctcttacgacacagaagacgaccacagcgacgaacaagatgaatgcgacgaggattaacgtgaacagacaagaatattgtgacgatgatgacgtacatgtgtcaag

SEQ ID NO: 75743 - DNA, 399 bp, Glycine max
ggttcttcgcgttaattgaacatgactgatcctcaatcaatcaccatgaacaaatcctcagatgcagcagcgtctccatattgcagaggcaggtccaagaaacccaatctccgaagctccaaatcccaacccccaagccacgttgagttcagctccaagacgccggagaagctgccgcagcgaatccgcaaccgcggcgtagcgctctccgtcgccgacatcagaaagggccgcctgcaagcgcttgcaagatcagaagcaatgcactgaaacgacgtcgtcatcgttgtcgtcgtcgtcgtcgctcagcaaaagtgtcaggaggcagatctcactggggccttcttctcccagtaaacccatggctactgaagatgaatcctctaatcttcccgaaaa

SEQ ID NO: 75744 - DNA, 414 bp, Glycine max
ggttctagtgtgtgattgtttgttgttgtaactcgttcttcttcttttgttgttctgtgtttgtgtttgttttttctctcacctgaaaatgtcttgctgcggtggtaactgtggttgcggaagctcctgcaagtgcggcaacggctgcggaggctgcaagatgtacccagacttgagctacactgagtcaaccaccaccgagaccttggtcatgggagtggcacctgttaaggctcaatttgagggtgctgaaatgggtgtgcccgctgagaacgatggctgcaaatgtggaccaaactgctcctgcaacccctgcacttgcaagtgaggtgttgggagagcaagcttcaagcagagatagcccttaattaggaataatgataaactattaatgtgtagctaaaaacttatgtt

SEQ ID NO: 75745 - DNA, 296 bp, Glycine max
tggggatctacttataacgttataaaaatacacacgtgttgctggtcacatgatacaaactccactaatactaaaagtatttctattattactccaaaaataccaaaataactcattgtgatatgcatttcatcaaatttaactgaattaaatttcattatacaagtcaccactcataactagacatacctgtcacctgattctcaaaaactccaaagtataaattctataaactccttcataaaattatcctctacatcttaacgaacttaaatatcaatgtgtccatttacact

SEQ ID NO: 75746 - DNA, 325 bp, Glycine max
ggggaccaattctttaatgagcgagagagagagggcgcgatagtcgccatagccataatttattgttattatttagggatgagtgaagtgaatgaatgaaaacaaaaacaccggcatcgctcttgtctctcacggctgactctgcggttcttaatctctacgacatctccgatctcttccatgtacctgatcacatcctcctcgacctattcctgagaatattgaaggctgggaagctgactgagaaagttctgagactttctatagcaactggtaacgatgaaggcctctcatttgatcatgcactcaatatcgcacatatttt

SEQ ID NO: 75747 - DNA, 420 bp, Glycine max
  unsure (1)..(420): unsure at all n locations
ggttctagtgtgtgattgtttgttgttgtaactcgttcttcttcttttgttgttctgtgtttgtgtttgttttttctctcacctgaaaatgtcttgctgcggtggtaactgtggttgcggaagctcctgcaagtgcggcaacggctgcggaggctgcaagatgtacccagacttgagctacactgagtcaaccaccaccgagaccttggtcatgggagtggcacctgttaaggctcaatttgagggtgctgaaatgggtgtgcccgctgagaacgatggctgcaaatgtggaccaaactgctcctgcaacccctgcacttgcaagtgaggtgttgggagagcaagcttcaagcagagatagcccttaattaagaataatgantaactattaatgtgtagcttaaaacttatgtattatgt

SEQ ID NO: 75748 - DNA, 325 bp, Glycine max
gaattccagggtcgaccgactcgtgcgtaaagtcgactaaatgcttcagaaagaattttttgaaaagcttgctaacaacaacgctcgggctatactcacagacagtgctctcagaaatgtcaagattcctactggacctacacattcgattcttgaccatataccaagagactcggatttgaaacataagctcagacacctacagagactgatatgaagagtaagctgtctcagaactttgaactccatctaacaattgatagtaagaagcttcagatccaaatgaattgtgcatatcattgatagctagctctgatcaattgtt

SEQ ID NO: 75749 - DNA, 289 bp, Glycine max
gatcttctttgtgaatgattattgaagaccatgtatgtgaatgttcatgcaggatgatttatgtcagtgcgcttggggtaagatgaagctcatggcatatgacattcattgcagctcatctggctatacaagaaatgctcctttacctggtatactaaatgcgaagtttctgctgattttaccaagattgaatgagcagttgatagcctgagcaggaagatactgaccatacactccactggtgattactagacttccaggtcacttgtgctgaaataatgagtgttga

SEQ ID NO: 75750 - DNA, 411 bp, Glycine max
ggaacctacgccgagcgaaaccccaaataccaatccaatgctctcccaactcacaaagccatgtctccaggtcccgttgtcgacgcttcccctgaggttgatgcagagcaacaacttccctccgtcgatgacgccactcagaagaagataccccaaccacaggaggacgatgctccccttgtcgaggacttgaaggatgatgacaaagacgacgacgatgaagacgacgacgacgacgacgaagatgacaaggaagacgatgctcaagatcaactaggtgagcacctcattgaatctggcacacctcaatttgaagagggatgaccctttttggaaatcttcagagtactgcttctgatcactgagctctttcttataccaacattataatttttgtgattctttttcttg

SEQ ID NO: 75751 - DNA, 134 bp, Glycine max
acgcgttagaacacgactgataccactatttagtacgaatgtcagaccacgacacagtggccagctatacttaatttcgaacctgataatcaactttaattacataaaacgtctatactttaaatctctacatt

SEQ ID NO: 75752 - DNA, 417 bp, Glycine max
ggtggtggaatgtggaatacaaatgttgctcttgatgtaataagaaaagatgatgtttctgccgcaatatttgctcctggatgggtctacgagactaagcaagcaccagattttgagactgctcagaatcgttggtggagtctcgtggaaaaatcttggggcatagtgcgaaagtatcttggaacactaccattttacacaaattttgatcagggacgcggttatcatatttcagttgatggagaccaagtatcagatgctacttggtgcaatatttcttcccaaggtgttcagccactccttgagtttgctgattctactgcaaattctattcaacctcttgtagacttgaaggaagtatcatatagtggagggggaaatattacattcaaaggatctcttgaaaaggataattac

SEQ ID NO: 75753 - DNA, 294 bp, Glycine max
tggtgcacgacgactactgattccggacttacatcagtatgacagcataagtgggatgggttaataattaagtcgcttagtgacacggatcattcaccggattttcatgacccttcatgtatgaaggcacaattaagaagacctgcatttatagtgagcactcatactatagaatacagagaggaccaccattgcaaacactattattgagttctataagagaaaatgatgtttaacacaaattttcagagaaccatggtgtgcacaagccaaaacacatagaggggcttctag

SEQ ID NO: 75754 - DNA, 332 bp, Glycine max
cggtcttgaattccgacccagacgtacgcacacgcgcgcgtacacctgccagaagacttcagattacgattgggctgaatgcaagttcgttcagcttattgatgttaatgttaaaaacctctactgtgctgatactggtgatctattgacgattgctagtgatacatcattctatatcctgaagtacaatcataataatcatacatcatatctatatagttacactgctatatatctgcaaggcgtttaatattccttttaactacatcattaaatgaatgaacgtatcatgacttatatctagaataggcattgcattatctactgcaatt

SEQ ID NO: 75755 - DNA, 429 bp, Glycine max
ggttgcagcagcaaacagcgaagagaagggctagcaaatcttcaatcacctcacatacggaacctttctacaacctgcatttgagtctctgcactgcaatgcaacaacaccaatcttatgaactggtgcctttgaacaaggcatatgcctatgtacatcttaacactgcaaatgaagctgctgttcaagtcatggtggccgcaaggatagctcttatgatcaacatgatcatgcttcatctaatgaagaggctcttcatatgacaatgcctttgcagcacatgatggatgctaagacagctggagccaaataggcatcattggataagcaaagacaaattcatgagctcgatgcacaattgaatgaaaccggagatctcataacagatctaacggcatagtttaagcttgcatatctgcagttagagat

SEQ ID NO: 75756 - DNA, 406 bp, Glycine max
gaagatgaaaaaaaactcaattaaacaaagaaatactcctacactcaattaaatactccaagtgtgtgtttggatggagcaattaaagtaagtaaagtattttaattgagatattaaaatgcttacttgtaaaatgatctgattggatagggtattttagaagtaattaaaatgtcatcattttattgaagcattttaataaagtaaattggcagaatttcaaattctcactgaaaatagaggaattaaaattcccagccactcttaggctctctctccctgtcagccacatgctctctcttcatctcagccactctcacgatgatagttctctctcagctgcacgctctctctcacgatgctagcgcgctctctctctctcagcacactatctctgtccgtacct

SEQ ID NO: 75757 - DNA, 402 bp, Glycine max
gataccaaaaacaaaacacaagccaagtgaaagtgagaaaaaataaaaatcaaagagcataatgtcagggatcattcacaggattggggagacccttcatgtgggagggcacaagaaggaggaggagcataagggtgagcaccatgctggagaatacaaaggggagcaccatggtgaacacagtagtgagtacaaaggagagcatcatggtgaacacaaagctggagagtaccatggtgagcacaagccagagcacaaagaagggttcctagacaaagtcaaggacaagatccatggtgagggcggcgccgtcgaaggcgaagaagaagaagaaagagaagaagaagaaggagcatggccatgagcatggccatgacagcagcagcagtgacagtgattaaa

SEQ ID NO: 75758 - DNA, 413 bp, Glycine max
ggaagttaagtagtactctagtgatactgagtctcaagatgaagcctatagaaaatggcaataccgttagcatcaactatcaaaatagctggttaggcttctccctctccccacaaatgaatataggtgttccttcacaccttcatcagacacagccttcatcagcagctgttgaagcagttccaccaaacttttaccatcatacacctctccataattatggcctttactatgaactggaaggtgaacacgttggaatgagttcatccttgcctatcatgccccttaagtccaatgcttctctctctggaatagaagctctgagtagatcacaagcacaaggttagttccaactcaaatttctgttatgttattttttttctgttttggtaagtatttattatgtgactact

SEQ ID NO: 75759 - DNA, 373 bp, Glycine max
gagcaagagtgaagagtcgaagagaatggctcccagggtttaatctttttggctgtgttatgcttctcagcactgcactgagtcgttgtcttgcggaggataatggacttgttatgaacttctacaaggaatcatgccctcaggctgaagacatcatcaaagaacaagtcaagcttctctacaagcgccacaagaacactgctttctcctggctcagaaacatcttccatgactgtgctgttcaaagttgtgatgcttcactgttgctggactccacaagaaggagcttgtctgagaaggaaacagatagaagctttgggttgagaaatttcaggtacattgagaccatcaaagaagctttggaaagggaatg

SEQ ID NO: 75760 - DNA, 176 bp, Glycine max
taaagggggaatttaagggagggaacaatacaataagatctgggggtagtgctcacactatagaggactacactataaggtatacattgaggactcatatgttactcaccaatcataatggacactcaaactcaagccatggaatctacttggtggacttcgaaatttacctattc

SEQ ID NO: 75761 - DNA, 431 bp, Glycine max
tgagagcaagagtgaagagcgaagagaatggctccgaagggtttaatctttttggctgtgttatgcttctcagcactgtcactgagtcgttgtcttgcggaggataatggacttgttatgaacttctacaaggaatcatgccctcaggctgaagacatcatcaaagaacaagtcaagcttctctacaagcgccacaagaacactgctttctcctggctcataaacatcttccatgactgagctgttcagagttgtgatgcttcactgttgctggactccacaagaaagagcttgtctgagaaggaaacagatagaagctttgggttgagaaatttcaggtacattgagaccatcaaagaagctttggaaagggaatgcccaggagttgtttcctgtgctgatatcctcgttctctctgccagagatggcat

SEQ ID NO: 75762 - DNA, 75 bp, Glycine max
aggtattggcaaagtacaacgaaagttggttttcagttgagaggcaaatggtaacgtaattgagtaataaggttt

SEQ ID NO: 75763 - DNA, 162 bp, Glycine max
gacgacggaaagactgtgtatcgggtattcagagacagagatgtgcccaaaacattagactgtgcgagacattgcctagcatctacaatagagtatggctacggaactgacccttctcggctggatataccatcacccgaaccatcatgaccaaactttccc

SEQ ID NO: 75764 - DNA, 257 bp, Glycine max
tatcagtggtggttgcatcatcgagtccggtttcacactgttcaaacataccggtggtggtggccatataggaggacattccttacatcaagtgtcaagcgtagtataagctctctaaagagttgcatcagcaggttcaattcaatctatctgatatcgctcccaaaaatatctcggtataccaaatcattgatatatctcataatgttttttatcatacaaaggtctattctgtttgtatattcggcatatgatat

SEQ ID NO: 75765 - DNA, 235 bp, Glycine max
ggttcagatcgcaagaaatattcaactgctttggacctccctgtaccaaactaaagcatatagcgaacaatgaccttccaaccttcttcactatctctacactgctcttttctcaaccagcaccataattactctgactctaaccatagaaatcccgttcgaatatttgatgctaatacacctaacactttgttattaatacatgcgcaatccaattcctctaattaatcaccac

SEQ ID NO: 75766 - DNA, 134 bp, Glycine max
cccactcgtccgtactgttagaaaacaccatttaggggatccactgctggctacaacatcgggtccggtcccacactattaaacataacttatattcaattctataacccaccattcttcttccatctctttac

SEQ ID NO: 75767 - DNA, 379 bp, Glycine max
cgcacaaggaaacgcttgggaggagataaagagagagagagaagtgcagaaaaaatgagactgttcgatccatgggctgaattcttcaagatagaatgtacgcggaattggtccttcttggttggattctccatcaccgtaactctcatgaccaaactttcccttgggctctctgacgaggaagccaaaacgtcgaaattcgtccaggcacacattatgtgactttacaatggaacacttgcagtggctttgcacattgcattatatgtgtgaagagagctcatggttgtaatacatgaatagagatgtagtatacactacatgtccctatttacattgtggctgattactacaatgtgattgagaaattcatactcat

SEQ ID NO: 75768 - DNA, 411 bp, Glycine max
gatgttaaattagggaagtgtgtgaaagatgtgctaaagagcatttatacagagaatgctacagattccctcctcatttctggcatttatgcagttgctggaagtcaccaattttacaagaatgcaagaaatgaagcaaatgaactttaaagtagcaaattatggggtacatgaaaccgagggagaaagtatggtcaaggaggttggactcagcagagttgaaattgataattaggcatgagaatactaaaggttaacgaacaagtggtgtctctattacactaagtggtggccctctatgagtctatggtgcaccaaaactccatttgacatgtctgaacacagccagttcctcatgtaggaacacatggtaatacaattttgattgaatccgaaggtggtatggagcac

SEQ ID NO: 75769 - DNA, 318 bp, Glycine max
gcttcactaccctgtctaacgctagcagtaggggtgattttaggggcatgctgagaattccaaataatctagataatcatgcctcctgtgatcatgcttgtatacgcctttagtgttcaagctctagtgttctacttaaatggaatattaacttccagatggcaatatctctcgaattcgatcattatactactacgcactcacactataccatagcactaaatcttggaaccactactcaacacattacccttatatacatatatcagacacagtaccattagaaactacatactaatgcagatacacatatacata

SEQ ID NO: 75770 - DNA, 300 bp, Glycine max
taccaaattcacggaggatgggggcttactttcatatgccagttctaacttaaactgatctgcctcttactatatcatatgatgttgttatttataatacatcaaaatttatcctgatccacaaatgtgatattgttcctatacaatggaatcatatctctaattttatcctaatagaacccaattactataataaatgtatgtactattctgttactcaactttactatatacacattgttattaattacttttctaatagaaattttttttcttaatttttcatctatatcatctaat

SEQ ID NO: 75771 - DNA, 254 bp, Glycine max
ggaattattgtagcgtaaatgcaatcttatcaatgaaaaaaaagaatgcgatttaagaaaatttgagtttgatctctactggtattttgcagtgacaggggtttttgtttatacaatggggatgcaatgttctctgtttatttaagacgatataaactatcgaaacaagatagtgtgacgtgcacggtttaatataatgaatgggtccactttactcttaatgatttgatatgatataaaaagggcgaaacgta

SEQ ID NO: 75772 - DNA, 350 bp, Glycine max
ggagcaagagtgaagagcgaagagaatggctcccaagggtttaatctttttggctgtgttatgcttctcagcactgtcactgagtcgttgtcttgcggaggataatggacttgttatgaacttctacaaggaatcatgccctcaggctgaagacatcatcaaagaacaagtcaagcttctctacaagcgccacaagaacactgctttctcctggctcagaaacatcttccatgactgtgctgttcagagttgtgatgcttcactgttgctggactccacaagaaggagcttgtctgagaaggaaacagatagaagctttgggttgagaaatttcaggtacattgagacca

SEQ ID NO: 75773 - DNA, 392 bp, Glycine max
ggttgattgggagtagcacgtatggttttaggggcatgctgtgaataccaaatatttagtgaatcatccagcctttgatcatttctctattgtatttagtgggcagctaatagctagctacttaaatgttatgttcacttctggttgacaatttcactaagaatttaaggtaggaatataatgtgttcactctatatcatagcactcaatcttgaaaccagtgctgaacagctgaccctaagaaacctatagcagccacaataccaaagaaagtacatagaatgcaaataatttatactacacatgtataaatgctcaaaaatataaaatacttcagcattaataatcataaatcatataaaaagccgataataattaatctaactaacaaa

SEQ ID NO: 75774 - DNA, 375 bp, Glycine max
ggcacaagtgagtttgttgatcgagataactagaaacagtgtgatgaaaatgaaggtccttgttttcttcgttgctacaattttggtagcatggcaatgccatgcgtacgatatgttccctctccgaatgaacactggctatggtgcccgtactccggaagtgaaatgcgcaagttggaagcttgctgtggaagcacacaacatctttggctttgagaccattcctgaagagtgcgttgaagcaacaaaggaatacatccatggcgaacaatatagatcagactccaaaacagttaaccaacaagcttacttttatgccagagacctcgaagtccatcccaaggacacatttgtgttcagtatagatggcaccgt

SEQ ID NO: 75775 - DNA, 377 bp, Glycine max
ggcacaagtgagtttgttgatcgacataactagaaacagtgtgatgaaaatgaaggtccttgttttcttcgttgctacaattttggtagcatggcaatgccatgcgtacgatatgttccctctccgaatgaacactggctatggtgcccgtactccggaggtgaaatgcgcaagttggaggcttgctgtggaagcacacaacatctttggctttgagaccattcctgaagagtgcgttgaagcaacaaaggaatacatccatggcgaacaatatagatcagactccaaaacagttaaccaacaagcttacttttatgccagagacctcgaagtccatcccaaggacacatttgtgttcagtatagatggcaccgtac

SEQ ID NO: 75776 - DNA, 412 bp, Glycine max
ggatcgagtatgttttctggtttctttcgtcatgctctgagtattctcttgctctttaacttgatcttggttttcttcggactagtagtacgccatccatatgcttaaatcatgtttagcttgccaacatatttcagctttcttcctaaatctgctctttttttctcacattcagcttattgcttacgatttggaatagtgacaagtaaagacaaatcacaactcacggtcatccaattccaagaatagaggtttgttcctttctttatagcttattatattgcctacttcttttgctcatttatttaagatttgaagaaatttcactcataaagatggatatataaagttctcgtttagatctttcaactctcatggctaatttgtagctctttaacaaaattttgacaaa

SEQ ID NO: 75777 - DNA, 407 bp, Glycine max
ggagccttcaaaaggaaatacacacttattttcatgtatatattttgctatcttaactgttttcaaaaatgttactacatttgtgctcctttgtaggtattacctgataaaccagaaggcagagcctcttagttgttcaaagcagctctacattctattgatggcattaccataggttccttagatgatgtctccctgctggacctgtgacttcatttttcagatctgtcaggaacacccttgattttgacttcgaagatgacaatgaaggtcgttggcaatctactgagcctccatcactctacatattcattaactgcagtacacgtgaacttgcgtatatagagaagtatgtgtgcagatttaggccttccgggcttcccagccaaagatttgcagtaccgctt

SEQ ID NO: 75778 - DNA, 142 bp, Glycine max
gaagaaagctgctagcagagggaagttctacacttttttgtttggattgatcgagtgtactttttcttttcgagattggcttggtgtgcagtggaaagagggtggaaaagagtggtaagggggagggcggcgccccttgaac

SEQ ID NO: 75779 - DNA, 260 bp, Glycine max
acgcgtccgaacacgcctgagaacgcttgcgaaccgtctacagaggaaggggaacggacaatatctgaggagggcggatattgccaaatataaaggtcagcatgcatacagataacatgctagtctgttcattctagaaaaacatataatattgcaaccactaaacatggataacctctgcatagctattaaactacctgacgaacactatattattatgcacaaacatcatgtcttagtaccaagttagaaaagtgata

SEQ ID NO: 75780 - DNA, 401 bp, Glycine max
accggtgccagagacaccacagagggaaccacgagagggctgttactggtgccgccgatggaagagacagtgtttgtcagattcacgctaagccaagacatatgggctatcctgctcgatacctgtatattcaagttttatagtagatgtctcttgcctcaagatttgcccgagtgacaactctaccactttgaggagaaaaccatagtaatggatatactaccatagacaggaggacccatatgcagactaaccttgatcaccctaagaagagcttcaatgttgaggaatatacctctgatgacagtcctgtagccttggattgttacgaatgtgataacttatcactagtatggggaaaaccagtgcagctccgtataggttctggagagtggattacc

SEQ ID NO: 75781 - DNA, 410 bp, Glycine max
ggttctagtgtgtgattgtttgttgttgtaactggttcttcttcttttgttgttctgtgtttgtgtttgttttttctctcacctgaaaatgtcttgctgcggtggtaactgtggttgcggaagctcctgcaagtgcggcaacggctgcggaggctgcaagatgtacccagacttgagctacactgagtcaaccaccaccgagaccttggtcatgggagtggcacctgttaaggctcaatttgagggtgctgaaatgggtgtgcccgctgagaacgatggctgcaaatgtggaccaaactgctcctgcaacccctgcacttgcaagtgaggtgttgggagagcaagcttcaagcagagatagcccttaattaggaataatgataaactattaatgtgtagctaaaaactta

SEQ ID NO: 75782 - DNA, 105 bp, Glycine max
ggttctagtgtgtgattgtttgttgttgtaactcgttcttcttcttttgttgttctgtgtttgtgtttgttttttctctcacctgaaaatgtcttgctgcggtgg

SEQ ID NO: 75783 - DNA, 400 bp, Glycine max
gtagcacaaacatactcccgcgaacaccagggtgaaagtgatctttttgatcatctatttgagctgttaaactcttccatccataatgacgaaagtttcccaaaggagttagcatcctgcacaggagctctgcagacgtctgttagtcaacacatggctaaggaagaggagcaggtatttccactgcttcttgagaagttctctcttgaggaacaggcatctttagtttggcagtttctctgcagtattcctgtgaatatgatgacagaatttcttccatggctttcaacatctatatcacctgatgaatcgcaggatttgcggaagtgcttaagcaagatagtgccagaggaaaagcttcttcaaaaggttgttttcacctggatggaagggggaagta

SEQ ID NO: 75784 - DNA, 383 bp, Glycine max
ggggtcgaagggcaatacctccaaacaaaatcacttttgttgaagcttctcatcttcccttcatttatctttctctttaacccaatttgattatctgtctctctctctctctctactattcagcctctattgctctttccttctcttcttagccttggagctggttgatggatattgaacccttgtgggctattggggggtggtcttttctttcaaattattgcatggcagaacctaaaacattatcatcatcatcaccaatctcagaacctttctcaaaatcaccctcttttctttacttactctcacttttcttcatcctcctccttctcatcaacctatcccaccaaccacacccttctaccatggcctattcagaaaaa

SEQ ID NO: 75785 - DNA, 410 bp, Glycine max
ggatctaaattcttcagcagacacactttccgagaagacggatgaaaattcagttaaaattcgaagagtattcaatgatgtgcgtctagctctgtatgttgtggcagctgtgatgcttcttctggctcttgttggacttgtcctgtctgtccttggatatcaacatgcaatcctcatatttgttatcaccggatggttactggttgcaaccacattcgttctttgtggagtattcataattcttaataacgcaatttctgatacctgtgtggctatgggagaatgggtagcaaatccacacactgaatctgcactaagtaatgtcctcccatgtgttgatcagagaaccacaaacaaaacactctttcagagtaaacaagtgatcaacaatattgcgaatgttgtcaata

SEQ ID NO: 75786 - DNA, 269 bp, Glycine max
ggcacacgtgagtttgttgatcgagataactagaaacagtgtgatgaaaatgaaagtccttgttgtcttcgctgctacaattttggtagcatgggaatgccatgcgtacgatatgttcactgtacgaatgaacactggctatggtgccctgactccggatgtgaaatgcgcaagttggacgcttgctgtggaagcacgcaacatctttggctatgagaccattcctgaatagtgcgttgaagcatacaaggaatacattcatggcgaac

SEQ ID NO: 75787 - DNA, 267 bp, Glycine max
atatcagaatggagctgctcgaaccgtgtctatcgaagcagtaatgaaccagtctgaggaaactgtactataatcaggcactgagtgctgggcttgctgatgacagttgacttgccacgcactaattgtgcgaatcgagctctatggctgtagacactatgatgcaacatgtggagcatctctatactagatgcagggacactgctcaagtctacatcatgagcatctggacacagactgagactgctatgagccgtgatgcgggac

SEQ ID NO: 75788 - DNA, 425 bp, Glycine max
ggcacaagtgagtttgttgatcgagataactagaaacagtgtgatgaaaatgaaggtccttgttttcttcgttgctacaattttggtagcatggcaatgccatgcgtacgatatgttccctctccgaatgaacactggctatggtgcccgtactccggaggtgaaatgcgcaagttggaggcttgctgtggaagcacacaacatctttggctttgagaccattcctgaagagtgcgttgaagcaacaaaggaatacatccatggcgaacaatatagatcagactccaaaacagttaaccaacaagcttacttttatgccagagacctcgaagtccatcccaaggacacatttgtgttcagtatagatggcaccgtactctctaatattccatactacaaaaaacatggatattgggtggagaaat

SEQ ID NO: 75789 - DNA, 56 bp, Glycine max
aggacgactgatgtgtatgaactaattcacattattggggttgatttggcctatta

SEQ ID NO: 75790 - DNA, 210 bp, Glycine max
gactgctgaaatgggactatatgaggctagaacggtgaaccactttagacttgtagagtgagcagtacataggactattcttggtgctactgatgctgttgacacgctagatgatgcctatgctactgaatgtgctatacgaaatgctggcacaggataagacctttgttgagtgctctactgcagaaatgcattggctaccatggacag

SEQ ID NO: 75791 - DNA, 293 bp, Glycine max
aggcgtgcgaacaggtgcgagaggacgtctgaatgggcgatagttaaatgatgttttaatttaaatttagcgtatgctattcattgatctttcattctaatgtgagattgaccacacacatgaactatataacgtcatctataacaagatacatgtactaatagttcattaatcaagatagggaaaacactggcgattctcaactcaatatactatttttgattaatgatttcatcagtattcgtaattacgaaacagactagtagattgagagatgcaaacagttgcacatt

SEQ ID NO: 75792 - DNA, 296 bp, Glycine max
cgacaaaacgacatattcatatatataatagcatctggtcgccacaggggaggtgactattgctacaacgacagcattaacatcatctcaggttaatttgcaactacacttactggtgtatttcaattaatttaaacggcgcacttacctccaaagatcccaaacatgttacccagttagccagatttctgtttacaccaacataagatgcaatttccacctcttaataacaacggcaccatcaccaacaactatcaatctcacagtcagaacccttactgggtgaatgaatttat

SEQ ID NO: 75793 - DNA, 340 bp, Glycine max
  unsure (1)..(340): unsure at all n locations
gatgatggtgaagaccagaatgattttgtggacattttgctttcgattcaagagactaacaccacagatttccagattgatagaacattcgtcaagactttggtcatggtaagaagatctatcttagtaatgtattctttaaaacctattttttaacatttcttattgatttaaattaatgtggatttcactaattagaggtgaaattcattcaagaagtgtaacccacttagttagtgaaatccaggtgaatttcatctaatacanaaagtatgtaaagactaaagagcattgaaaattaaagaatgtgttgataacatttttctttctaatatatctc

SEQ ID NO: 75794 - DNA, 411 bp, Glycine max
agaaggggaaaccaagaggggagaatctctctctggttgtttgggtttgaagtctcccttccttccttcctctctctctccttttctttcctctatgaacttcctcaccagaaaaacaaaaccaccacaaggtttcttttcttcctgggcttgaactccacaaagccaaggaaggaaaacaaaccaaaccaaacatattccttatttcccacttgttcaacctgtggtttatttatccttggaatatggttcaaagaaaagtgcctagcaagcttggtatccaagctgaacatgttaaatcagacaagaggttgtcaaacctgaagctactatcttcatctcatcaccaagatggaaaaaatagaggggctgatatgaagaagaaaatgaaaaaatcaaggtcaataaagc

SEQ ID NO: 75795 - DNA, 81 bp, Glycine max
gcacgtactcgtccgattcccggtcgaccacgcgtcgcccacgcgtcgccacgctcgtgaccttgcggacgcgtgcggagc

SEQ ID NO: 75796 - DNA, 425 bp, Glycine max
tccaagtcaagactctaaattaactaacctgaggcatacagtgcctagtcccatttctcctgccaaaaggaagagaagtactgacagtaagcaaaacaaaaaagccaaagtcaaagcaaaatctgaaccaagtggttcaaagcaggccacaattacaagattcttcagtaaagtaatacctgagatgcctggtggtactcaatctgataattctgaaccaaagcttgaccaaagctctaaagttgaagacttgttgccaactgatgatggacaaatgtacaaggatgaaattgatcaatttatgcaaataataaatgggactgagtcattaaaaaaatatgccatcactataattgggaagacaaaaggtgatatcaataaggcattggacatatattacggtaattctgaaaatcttggtgaaa

SEQ ID NO: 75797 - DNA, 249 bp, Glycine max
  unsure (1)..(249): unsure at all n locations
ggagtgagcaagagtgaagagcgaagagaatggctcccaagggtttaatctttttggctgtgttatgcttctcagcactgtcactgagtcgttgtcttgcggaggataatggacttgttatgaacttctacaaggaatcatgccctcangctgaagacatcatcaaagaacaagtcaagcttctctacaagcgccacangaacactgctttctcctggctcagaaacatcttccatgactngtgctgtc

SEQ ID NO: 75798 - DNA, 420 bp, Glycine max
ggttgaaacagggattattattattgtagagcggagaactgatgacaatgtctgctgaatcgtcaagttctgctcgtaaagtggttgctcatctcatagccaccggcgatgctcctattctcaagcaattcaaattcaaggtatcctctttcgaccttactctttaatgcccatcttttatttcttcatatttctcatcaaaattgttaattgaacgatccccctttacttgcgttcctttgtttaaaattcttctggtgtcagttatactttatttgttgctaatacaaagttgtgggtgagagagatggtgcttaaatctgaatggatgaaggagatgttatttcgcctgcattatgtatggcagtcaattatgtgggtattctaatttcataattggtgatattaaccctaattgat

SEQ ID NO: 75799 - DNA, 400 bp, Glycine max
ggttctagtgtgtgattgtttgttgttgtaactcgttcttcttcttttgttgttctgtgtttgtgtttgttttttctctcacctgaaaatgtcttgctgcggtggtaactgtggttgcggaagctcctgcaagtgcggcaacggctgcggaggctgcaagatgtacccagacttgagctacactgagtcaaccaccaccgagaccttggtcatgggagtggcacctgttaaggctcaatttgagggtgctgaaatgggtgtgcccgctgagaacgatggctgcaaatgtggaccaaactgctcctgcaacccctgcacttgcaagtgaagtgttgggagagcaagcttcaagcagagatagcccttaattaggaataatgataaactattaatgtgtagc

SEQ ID NO: 75800 - DNA, 396 bp, Glycine max
ggttctactgtgagatatgatagatcatgtaactcgttcttcttcttttgttgatctgtgtttgagctctgcaatgctctcacctgacaatgtatagatgctgtggtaactgcggttgcgtaatctactgcaagtgctgtaaccgctgcccacgctacttgatgtacccacacttgagctacactgagtcaaccaccaccgagaccttgtacatggaagactcacctggcaatgctcaatttgatggcactgaaatgggtacacccgctaagaactatggctgttgatgaggaccaaactgctactgctacaccttcactcgcaagtgatgaccctgcagagcaagcttcaagcacagatagcccttacttaggaataatgattaactattaatgt

SEQ ID NO: 75801 - DNA, 243 bp, Glycine max
aatgacctctgatgggggttcgtatgttctcggggacggtgatcaccgtaaagtgagcaccatcttagctgaacacctctaaaggactctgactcctgatacccatgagtagcatattgcggccgacctttttctacaaatggtccatgatcatgagcatgtatttgatgatgaagtataagatgtcgaacttgacgaagattttgaccttgataatgccttaaaacgttattctacttttat

SEQ ID NO: 75802 - DNA, 403 bp, Glycine max
gatagcattcgcaacggtgaggagaattggactatttcgtcgggaactatacaaggaagaaatagtatagaagattttcttgaagaggtgaaagagcgtttgaaatgtgaactgcaaggtaaaattgtcaaaaaaggttctgtggttcgagggagtggaattgagacaccttacaatgaaaagccatctgatcctaaactaatagcccgtcacatagtaaagcaagtcagagaaagtgtgactagagatactgacacaactttactccactcagaatcaacaggatcatacaaaagtgaaatgcagttcaatggaccaaagctcccagaatttttcagcagagataccaagaagttcttgtccaagaggcaaagaaatgttgtgagaagggaagcacatgctg

SEQ ID NO: 75803 - DNA, 420 bp, Glycine max
gccatactttttgttcttttgaaaccatcaaatgatgaaataacccaaaccttgtaggattttatctattacttgggagtatattaggttgattagtttcttcttatttaacctgcttactttttgtgtgtgaacagatgcttaatgaaagtatagagcaatgtctatttccctacaaacttcaggtaatgcatgaataacatctgcaatttgtcaataactattttatccttcctcaagtttcaataccagctgttattggctcctgctggattaaatcctattgtaaatgtatagaaacaccgatggatgagtgttattttctttctcttttccctgctgggtcttggatgaagaaagttattgggagtgtattcccagttctctttttctgtattatcttccaagaaatatatttgg

SEQ ID NO: 75804 - DNA, 209 bp, Glycine max
ggctcaagtgagtttgttgatcgagagggctagaaacagtgtgatgaaaatgaaggtgcttgatttcttcggtgctacaattttggtagcatggcaatgccatgcgtacgatatgttccctctgcgaatgaacactggctattgtgcccgtactccggaggtgaaatgcccaagtttgaagcttgctgtggaagcacacaacatttttg

SEQ ID NO: 75805 - DNA, 338 bp, Glycine max
ggcttgaagaatgcttaaaggtctggaaaggacaggtatacaacatgaaggtgtcgccaacttgcttgaccatatacgaagggctatcattcttattcatagaatttcccactaccacgctgacctaagttgcaaccttgatccctatgcttgatacgcaactaaatacttaataattccctatctcacttacccaagctttgacccttggttatcacatcgacactatgtatcatcgatggctatatactagatccaccacaagttccattacctatgcaatctggcactcattgccgaatcctgcgatggcatatccaaccagctgttgcacttca

SEQ ID NO: 75806 - DNA, 158 bp, Glycine max
gggggacccgtgaatcaatatccttggggatagaatgtggggcttggtggtgaatctggtggaccaaagtggtcggtaggtattcctttggtcaagaatggtggatagattgattcattattttaacgtactttggagcattggatgagtgaatggcc

SEQ ID NO: 75807 - DNA, 230 bp, Glycine max
tggagctgctcatacaacactgcactgtagagcaagtgctgcgataaatctaggaagagactgtaaagatttcgaatccataatcctaagaaagggcaccaccgtatcaacaagtatacgcagacgctcgatatcagtccctgtctgtaacactaatgcctattacaatgccttactagaagtaaaacgcccctgcataaaaagcagtcactctatgtactcgactattc

SEQ ID NO: 75808 - DNA, 136 bp, Glycine max
gatgaacgtggtgagcgcgttaatggtgactcggaaccaactcggagcacctgaaggcatacccttcggatcggtatggttgttcgtctacgccgggatctccttttccctcgtcatcttcgccggaatcatgtca

SEQ ID NO: 75809 - DNA, 198 bp, Glycine max
gggatatatatagccttttttagttacttactcttgttttgggttcaacatttacagcccaagtcaacttgtttgtggaatattttaatgctcaaaatgattacaaggtcataaacacggatcaatggatgggattttttccttattgcacttagattaatttttccaacccttaatgactatgaacctgaactttcc

SEQ ID NO: 75810 - DNA, 271 bp, Glycine max
ggattacagaatgcggaaatcggtacgggctatgtgagaaatactctgagcgaaaacaccacataatcctttcttgcattttacggccattgtatcttcactctctaactggtcttgaacatgtgcctgatacttgctacacctggagacagatactccttacttatgacgtgctacctatagcttcttgtcatttcggcggacgctgcccttgcacaaatgccttaccagtaaatgtctgcactggatatccacaacaatacttcacatg

SEQ ID NO: 75811 - DNA, 128 bp, Glycine max
  unsure (1)..(128): unsure at all n locations
atcttctaaaagactacttaatgaatattcaagacatcaattctaaaggggcctattggatctttctatggctctccaaaaaactaaatttncacagaaaatctaaatcatattttatcaagcttatt

SEQ ID NO: 75812 - DNA, 138 bp, Glycine max
  unsure (1)..(138): unsure at all n locations
accgggttncgaacaggcaagacgcccaccccctcctactctttctaaaagactttataaggcttataaagagacatctttatcgtcattttttgaacacatttacagcacattttacaccaccaaccattctttctt

SEQ ID NO: 75813 - DNA, 349 bp, Glycine max
  unsure (1)..(349): unsure at all n locations
acccccgtggcgacccaggcgtgcggcaggcgtnagtacgactacagaaaagacgattttaaagggtatatatatcaactgaatccatgattattcagtaatcgatctattctgaatggtgtaaataatcaatttgttattgtaggaaaaagatgccgcattatcactcaaataacaacaacgatcttgcgttcttcacgtacgatgagaancgaaatctatgttatgggacccagaaagagaggttgggcaaggactccattaagcccttcgatgcttgctctctctgtctcaaatccctaattgatcctatgagctgccagaaaggccatctcttttgcaaagagtg

SEQ ID NO: 75814 - DNA, 144 bp, Glycine max
  unsure (1)..(144): unsure at all n locations
ggttaaagagatttacagangtactcctnctctgtcttattgttaagatttcaattcancattacaacccttatnncattatcttanctgtttcatatttaagatagaatcctacttataatctgcatcttagatttctacatc

SEQ ID NO: 75815 - DNA, 199 bp, Glycine max
  unsure (1)..(199): unsure at all n locations
cccacgcgtccgaccactccttctgcgagtttaccacataaggaaatggaagggctctttggtgaatactcatcgatccacccacacataaacacaccaccacaaataactcaacttatacatgcaaccgtccttaccgtcatcttcacatgaacaacaagtggcactttttctngttaccacctcaattcttgcattg

SEQ ID NO: 75816 - DNA, 127 bp, Glycine max
  unsure (1)..(127): unsure at all n locations
tatttctcccaaccaattaccctctgtcttcccaaagattctatatttatgttccttgcataactcgtgcttgtggccttccacaaaataccatctattttnaanatactaactaaaatgttaatcc

SEQ ID NO: 75817 - DNA, 116 bp, Glycine max
  unsure (1)..(116): unsure at all n locations
tctttctattcccatcaccatttatacattataaanactgtttanagcattcatatctatcattaagtccttcaaatattttaaagttactctttatcctggaaacgngttatcac

SEQ ID NO: 75818 - DNA, 284 bp, Glycine max
ggatgtgagcaagagtgaagagcgaagagaatggctcccaagggggtaatctttttggctgtgttatgcttctcagcactgtcactgagtcgttgtcttgcggaggataatggacttgttatgaacttctacaaggaatcatgccctcaggctgaagacatcatcaaagaacaagtcaagcttctctacaagcgccacaagaacactgctttctcctggctcagaaacatcttccatgactgtgctgttcagagttgtgatgcttcactgttgctggactccac

SEQ ID NO: 75819 - DNA, 251 bp, Glycine max
gagacatagtctgaggaatctgcggcataacagaatcagcaacaaatatccataaaaaagggaaaaataaagaaggagaaggagaaggagaaggagatttctgttgaatgatgaggaacctaccctcttgtgctgattgaggagaagaagatgaatcacactcgcttggagtcttgtcatgaatctccccttaaagtatacaaattctgttttgtcccagaaaaaactggtgatatggttatactcttaat

SEQ ID NO: 75820 - DNA, 110 bp, Glycine max
tttcttttctcattatcccattcataatctccatccacaacctacctacctaccatcacacttaaccctatctcatccatcctaaagccatctcaaaactcaaacttcaa

SEQ ID NO: 75821 - DNA, 381 bp, Glycine max
ggcgttcattttgtaatatagaagcaagaaagatagagagactgacaacacctctctctctctcccctcgttgatcccaaatctattaggggtttttattcgatgctattcggcctgaagctttcgtttcgcggatttttttaattattttttttcctgcctatcaggttagattgtgtcttgtaatgttcgcagattttattttcgtttctgttgttgcgttcaaaatcatttgttcaggtttgaatttttttccaatgttttttaaggaatatgaattttggttgggtggaaaaatggatattatcagttatgcatgcagatatgagatatgtactaagggtagacaagtaggattgccatattcaatttttaatatgt

SEQ ID NO: 75822 - DNA, 304 bp, Glycine max
gacattgagagttgagaaggagggatacttgagacgttaaaaattgctaaagacaagccatcaaaatccttgacagaaataaaggtggaggttgataaacttgccaagaaggttgcactttggatgctgctgcttccacaggtggggttatagcagagttagatatagagactttgaccgagaatctgatgagaacattgattgcattggatgaaattaatgctgagggtgaactgaaattgcagagaagatagcaggttaggagagatcaaaaacacattgagactctagatatggtgaggat

SEQ ID NO: 75823 - DNA, 211 bp, Glycine max
  unsure (1)..(211): unsure at all n locations
gatggngaaagggaatatcatctataggaagctgagatggcatccaagacataaaagtcatcacaccacaacccacagattcatcatggaatagccacatagatcgactaataaacactctgtctttgacttttcataaggtcgctgacgtatcgcattcaaaaaaagttcatacattctcgattattccagaaagcacagacaggaaaac

SEQ ID NO: 75824 - DNA, 179 bp, Glycine max
gcttctcatgagtgatgaacattatagaaggcggagcttgcattcaagacataaagactatcacaccacataccacagctccaccatcatatggcctcatatatacccataacaacactcgttctctgacacctaatagggccactgacagatcgcatataaaaaaagtctatacataa

SEQ ID NO: 75825 - DNA, 320 bp, Glycine max
  unsure (1)..(320): unsure at all n locations
aacatgaacgagatccttaatataagtacctgaactgggtgaaggtgcatctcgggggagactatccaacatcattccaggaggatcattgtgttcaatcttaaatgatgatgacagggatgcctgaggtgatccactgtcttgataacaagacgtggaggatcctttaccactgacttgaagcagatcatgatcttttggattgtctgggtcctcaaaagcagaaggttgtgtgtcaaaatgtggtgaatccaaaattatctccggctgttggcttaagaaattaagacgcatgtcacactggataagctnttcaaaat

SEQ ID NO: 75826 - DNA, 415 bp, Glycine max
cggtacagaactgagtacttcaaattaggcctcgttgcagcgtcgacgaaatgaatcgccttcttcttgttcgtcatcctctgctagctctatccaagccaccattatcacccttttcccaaacctattattattcatacacgccggcacgaataaattctgaattatataagattaaggacccacctggagtctcttctgttcacacaagctctacattttgcactaccaacaaagacttatcaactgagaactgtgtaccgtgcaatacaaaggacttgcagcccatgaccgaggatgcagcacgcacaatgcttcaacaggtttatgttatccttaaaacattcaactcaaattgtttaaatccttgatagcagccagatagcagaacaacagctatttttaaattttttat

SEQ ID NO: 75827 - DNA, 233 bp, Glycine max
tagatcgattgcgatgaggcatgctctttcaaggggtaatagtaaattagttgatggcgctttctttagaaccagaaccaactcgcctagttatcaatattgctgcgtggaatatacactaccaaacatcctacacacgatgcctatgaaccacacctggctcttcgtgggatcactacatgaaccacactagagcatattagatgcgtgatgagttgctgaactacatgata

SEQ ID NO: 75828 - DNA, 193 bp, Glycine max
  unsure (1)..(193): unsure at all n locations
gttgcttacccaatttnntggtagcnnatggcannattgccattgcgtnnacgatatngnnttccctcnnntccgaattgaacannctggctatngnngtgcccgtaccttccnnngaggtgannaatgcgcaangnnttggaggcttttgctgnntggaagcacaaaacaacatnnctttggcttttttgag

SEQ ID NO: 75829 - DNA, 397 bp, Glycine max
gaaatagaagaggagataaataatgttactggagatgatgttttactacacctcaagaatggtgatgctgaagaatttgcagttgcactcttaaggctaaaaaagttcatcaggggtggaaaactggatagcggtttaattaacgtggaagctgctgtttccattctttttaaccgtctattttcatgtaagacaggcaatagattgacaatcattcaattgctaagaagtgttgctttgcaaaatgatgagatgaaggagaagatgacaaagaatgagttattatcagcagtggtgaaatctctaacaagagacactgaagagaggaaggaatcagtgggactgttgctagaactctctgaccttccttgcagtagacggaagattggaaagaatc

SEQ ID NO: 75830 - DNA, 422 bp, Glycine max
ggtcttcaaaagaaggaaaaccaccgattatggcaacaatcgcagggtcccgttttcacattttcatcaatgctgaaagtaccagaacaagaccacatttaatcatcatcaggtccatccccgagcgattaattaatattacattttcgtggtttaacaacaaaaataatgtggaaagcaaatgagaacacaataataggaagagggatagtgatggactcagaatgagaagagaagagaattcgatcaatagttagtggacaaaatcactgtaacgtgatccttgtacgaccttcattaaatctgttagttgtgtcaaggagcatggaagataagatggattttttttttttttgggtttcctaggagagcaaacaaaaagacaaagcgtgactttgaattgtagggttgagtgttttttt

SEQ ID NO: 75831 - DNA, 290 bp, Glycine max
ggaagagtgaagagaatggcgtgccaaggtttaacctttctggctgtgttaatatgcgtttcagcactgtcactgagtccttctgttgcgggggaagggcaaaataatggccttgttatgaacttctacaaggaatcatgccctcaggctgaagacatcatcacagaacaagtcaagcttctctacaagcgccacaagaacactgctttctcctggctcaggaacatcttccatgactgtgctgttcagagttgtgatgcttcacttgtgctggactccacaagaaggag

SEQ ID NO: 75832 - DNA, 273 bp, Glycine max
gggtggaggggacattgacaatgtagggctgtcacaataagctgacacttcaaagtgctatatcaagaccacatcttaagattatgagacccaaacacctgccatgcattaatgttatatattgatggagaaacaactatattgcatgtgatcagccaatgtgatcacaatattgatgctgagggaaggtgactgacatcagaatgctaagagaatagattttgtccatatgtagtgcacgaaaatagatctacatactggccagtataccta

SEQ ID NO: 75833 - DNA, 231 bp, Glycine max
  unsure (1)..(231): unsure at all n locations
tgtcataccgacaggaagaaaattaaaacacatcgcatcttttaaaagacgggagcgccaccacaccaccatnttcttaccactcccccaacatcctcatcacaacaacattatgtttactatcaaacgataacctactatatttcatttcacaaaaaccaaccaacttttaatctaaccccattctcctatctgttaacactaaacaaacctacctccacaaatttcaaa

SEQ ID NO: 75834 - DNA, 372 bp, Glycine max
  unsure (1)..(372): unsure at all n locations
gagacaaaaacagagaatatagaacagtgacaaagaggcaaaacctgagactgggaaaatcagagaaatgaacatgcagagcctaaggtgagtccagtcgccagcaagttgctgaagaaggaactgtaaattgaagagaaaaccgcaggaagatgcttggcttttagatatcccttttctgatttctcggatataacaaaaatgtcctttacaaaaagctctggaccaccatgttgatgttgtcatgacgcttgcagccaccatttgccatcacgaggaatcctcaactccaagtgtcccacacagtgatttactgggtggcgctgccctgctgccatngtggctgtttaacaaacactaattacatttttt

SEQ ID NO: 75835 - DNA, 187 bp, Glycine max
ggttgcagatgacaagataggtaaagtgagttggcgcactatgaagaacgcgatgatagcattcttggaccctgtaccctccattctatgctacctgtcataccaatctaccattagtactcattcttattgaacttctatgcggacgtagtgctatcaccaccctctgatattggacaatgtcctt

SEQ ID NO: 75836 - DNA, 186 bp, Glycine max
  unsure (1)..(186): unsure at all n locations
aaacccgggccgacgcacgcaaccgtacgtctncaaaaaaacaacataatggtgtcttaaacaaacaatctacctatttcacgtcggtatttttataaatgctggtgggccctaaaaatataaatattcacaacctcatttaatttcaatcccatctccattaattttttaaacacctacacctta

SEQ ID NO: 75837 - DNA, 168 bp, Glycine max
gaagctgactgagaaagtctgagacttttagagcaactgggtggtctgggcgcaaaccactctttagttggggagatagtctgtattctgcaccttgcaagatgtctcacgcagttatcaacgaatatgaagtgcacattgttattggcgcaccgctctgtgatctta

SEQ ID NO: 75838 - DNA, 242 bp, Glycine max
gttacaaccaggggtaatggtgtgtgactggatggtgatgtaactgggccagtgcatattaacgtacacaagttatgccagcatctgctctatccagatgcagactctctgccaactgaactcgcggttcattgagctgctgaaaatacgaaagcagacgttgacaattcccgaagtacatatactagagcatacatcaatctcaaatcacatatacctgttggcatgcaaatgatgcctac

SEQ ID NO: 75839 - DNA, 375 bp, Glycine max
ggagcaagagtgaagagcgaagagaatggctcccaagggtttaatctttttggctgcgttatgcttctcagcactgtcactgagtcgttgtcttgcggaggataatggacttgttatgaacttctacaaggaatcatgccctcaggctgaagacatcatcaaagaacaagtcaagcttctctacaagcgccacaagaacactgctttctcctggctcagaaacatcttccatgactgtgctgttcagagttgtgatgcttcactgttgctggactccacaagaaggagcttgtctgagaaagaaacagatagaagctttgggttgagaaatttcaagtacattgagaccatcaaagaagctttggaaagggaatg

SEQ ID NO: 75840 - DNA, 372 bp, Glycine max
aattcgagcgggcgcttttgttatatgactactgattgtttttttgcctacaaatgcgctcatatcactctaatattctggactccaattccattcttgctctatttgcaactgtgaatggcatcaatcctcttaacatttaaagtattacattaaatctctccttactttttgtgccattattaagcacattatccctcagtgacctttacgcgaaacatatggacttatctgactgcagcttcctaatggatgcatttctcctaactgtgtatggcccagcaaacaagggatccaattcgtgttcaatcaatactttgataaaatcatgtcaggaatagtttctacctcttggcttccatacacatcaat

SEQ ID NO: 75841 - DNA, 253 bp, Glycine max
cgaccgaggcggaagctagaggctgatgacgctagcaccctcgtgaataccctaattccgagggtttcagtcttcgacctgtcacttgagctgcaacatcttcagccataaggctgctagccagactgcaatcacacacaatgactgacggctacgaatgagacaggaaccctgagatactgcagatcatgaacacggtctaggcgttggacgccgatctaggtcatgagaccagcatgaactcactgatgat

SEQ ID NO: 75842 - DNA, 376 bp, Glycine max
ggagcaagagtgaagagcgaagagaatggctgccaagggtttaatctttttggctgtgttatgcttctcagcactgtcactgagtcgttgtcttgcggaggataatggacttgttatgaacttctacaaggaatcacgccctcaggctgaagacatcatcaaagaacaagtcaagcttctctacaagcgccacaagaacactgctttctcctggctcagaaacatcttccatgactgtgctgttcagagttgtgatgcttcactgttgctggactccacaagaaggagcttgtctgagaaggaaacagatagaagctttgggttgagaaatttcaggtgcattgagaccatcaaagaagctttggaaagggaatgc

SEQ ID NO: 75843 - DNA, 385 bp, Glycine max
ggtgggtgtggatggaggtgatggttggggtataagatctgcgactgaaagtagagaatagaatctggatgtgaataggtacagttgcacaggacaacgtactagggaggtaccattactcagactaagcgctgtcagactatcacctgcttggggatgagctcaatcatgtgtacatgggcattctacacagtgctgcatgatgggtcagatgcattgagcatgactcatccttggaaaggtgaccatcttgactattgctgggctcattatcattgctcatgcatgagcttgaagaacatgaagtacagaatttgaaatatctgacgttgatgaagaccatttcaaatgcttactatgagcaatgtactaaatttgtctgcta

SEQ ID NO: 75844 - DNA, 428 bp, Glycine max
ggacgcgtgggcagacgccttgaccggttccaaaaaaacaacgaaagggaataagaggaaggaattattaataaccatggcaaggagaatgaccaacgccagattcaagaacttaagtcgaaaccgcataatttaacgatccgtgggttactctcttcgactccgctccggcatgggcctttccagtggcaaacactatattcccgacaaaccccttcccatgaatgaggaactcctgtgggacaacagaactgcatttctctaacagagtatagatcgtattgctgacactgtcagaaagtatgatgcattggcctgcctgtgtgctggattgaagtatttcgcgtcgctgggattgatggctgtgtggaatgacaaagcctccaagacaccagttgcacccaaagtatatccatatgacaatctgg

SEQ ID NO: 75845 - DNA, 347 bp, Glycine max
tttttcactctttcatacttcttttatattacgactattggggacacattttattccctttaccaaaataactattaacatttaattaaaatcaacatccatcattttcttctattctacaattttattatcatcacaattccattcattaccatattattcctctccaaattaacactatctattctcccctactcataaataaatcccaattaatctttctattaacacaacacattttttctttaaaacattccttaaatttcttttatacaacaaaatattacatacattgctaacattatatatcatactccaaaactattaaccaacaatttttactttta

SEQ ID NO: 75846 - DNA, 407 bp, Glycine max
ggactatagtcagactatcaattccgctaactgcaacccatcttcagaggccgatctttctatagcgactctacgcatgaaccttaagctcattgttgtacatactagactatggctatgatcttacatttacgggctctcttggcttcttttactattcctgtgctgatcaatgcgactactgggcatcctctaatcactgcaactatcacatctacgaactcacttgcagatactcgcattcataaccaccaattgactatgggctagacaaactcctctcgatatacaacggactgctagaataagcttcgacctagaaggctctgcaacctataactctcgacatacttgattgctaatatgcttggaatgacctatgatcaaccaatctacctcaacttaaa

SEQ ID NO: 75847 - DNA, 277 bp, Glycine max
ggctcaagtgagtttgttgatcgagataactagagacagtgtgatgaaaatgaagggccttgttttcttcgttgctacaattttggtagcatgtcaatgccatgcgtacgatatgttccctctccgaatgaacactggctatggtgcccgtactccgtaggtgaaatgcccaagttggaggcttgctgtggaagcacacaacatcttttgcttttagaccattccttattattgcgttgactcttcccaagtattcattcattgcgaacaattttta

SEQ ID NO: 75848 - DNA, 300 bp, Glycine max
accgtttcaacaacactacataaggggacttttattgtttcagaactcaaaacaaatgaagcttctatgttaacactatatgaaatacacacacaaccttcactttacatcatcttctatccaattccaaaataacccatcaaatcaaacttgaatttatatacaccctctacccttgtctatcccacgctaaataccaacttcgatgtttattcatccacaatatctaatcattcttttccatccaatttatcctacttcatctcattctttcatcaccgaattatctaccctaatcta

SEQ ID NO: 75849 - DNA, 400 bp, Glycine max
ggaaagagaggggatagatagatagatagatataagagagagagacaatctcacacaacgcatatatacagagagagaaacaaaagacgacttgttggggtctatagtgattttgttcttacttatcagattctcatttgttcttttcaatcatcatttcatacaagagatctctcttctcctcaactccttctgtctaaaagactcaatctttaatctgaacgctgcgtttttcattccgggctcccctttttttgttgtcccaaaatataataaaaaaatttcattttttctttcattgcacaaatggcacccagttttgattgtgtttcgagccttctctgtgtggaagacaacaatatttttgacgaaaacgattatggtggttcggtggaggtgt

SEQ ID NO: 75850 - DNA, 310 bp, Glycine max
cgacagcaagcgtgtgactaacaatgggcaggcggaacaggaaatgcaggatgctgtgctgaacctaatcttatcttcagaaggaatataccaagctcacaagcatactggatcagatcgccttacatgagacaagccagaagactatgatacagaataaggccaagcaacagttactatagcacgtacgggaaggaccacctgctgatgagaacattaagataaatgggcaagtcgatgactgatacatgttaattagatccgaagtgctcaagagagctcctagctgagaaggatcgtcatcaccaca

SEQ ID NO: 75851 - DNA, 399 bp, Glycine max
ggagagagaacatataacaggtgtggacttttgggttactggtagacgttaaatttgtgagagaatagagatatttatttttctagatatccaatttctttagtacatgaaagagtgctgacaaaatggacacctctattttataaatatttcatcaatatttatctttttctcttttcctatagtgtcataatactatatgtaatgatatttgaacatcaatttattttaaatatttcattaattatttctttttattttttttctttttatcacatcataagcgcatgatcataataaggtgttttttttttttttttaaaaaaagctaaaaattcttcttatatattatacctggtaattaggttaatacttaacacatatttgtgataactcatg

SEQ ID NO: 75852 - DNA, 378 bp, Glycine max
ggagcaagagtgaagagcgaagagaatggctcccaagggtttaatctttttggctgtgttatgcttctcagcactgtcactgagtcgttgtcttgcggaggataatggacttgttatgaacttctacaaggaatcatgccctcaggctgaagacatcatcaaagaacaagtcaagcttctctacaagcgccacaagaacactgctttctcctggctcagaaacatcttccatgactgtgcttttcagagttgtgatgcttcactgttgctggacttcacaagaaggagcttgtctgagaaggaaacagatagaagctttgggttgagaaatttcaggtacattgagaccatcaaagaagctttggaaagggaatgccc

SEQ ID NO: 75853 - DNA, 377 bp, Glycine max
aggcagaagaagaagaagaagaagaaaacgggaaaaacgcacgacaaacagaggaagatcgatcgagagcgtgactaagcgggtctgagttgaagaaatcaagaagcagaactagagcaactcaacggcctgataatagccaggctatggcagcacttacaaatggtgggcttccggacttgaatgggaagaagaacaaataggctgctagtggcttcaattgttcctgggggcagggcagacttgttagatatttaaaatattgacaatgctaaaagcaaaaggacagaagggaatgaatcggcgaacacgaaagacgcatatcatgaccatacccaagtagctttaggcctggcggaagacctgctcggaaagag

SEQ ID NO: 75854 - DNA, 357 bp, Glycine max
aggcgtccttacacctcaaaaaagacgttcgaaagtttgagtgaatatttcattaaagggtcttctgtaatatataaatgatcatattctacttttgtatccataaaagacttttaccatcatactgaacacaaacttctatcgattgctgataagaatgatgaaaattcatttcaggaatcaacatctcggggaggataaagcctgtattgaaaacaacattaagttggttacttttgttgaatctaatgattctgcatttaatctttatattccttttgttatctcaactactttcttcaataataatatttacaatagtcaacttttcagatgaaataaatgcttccccattca

SEQ ID NO: 75855 - DNA, 259 bp, Glycine max
  unsure (1)..(259): unsure at all n locations
cagggggaagcgaagagtgaagagaatggctcccaaggggttaacctttctggctgtgttaatatgcgtttcagcactgtcactgagtccttctgttgcgggggaagggcaaaataatggccttgttatgaacttctacaaggaatcatgccctcaggctgaagacatcatcacagaacaggtcaagcttctctacaagcgccacaagaacactgctntctnctggctcaggaacatcttccatgactgtgctgttcag

SEQ ID NO: 75856 - DNA, 100 bp, Glycine max
ggagtgagcaagagtgaagagcgaagagaatggctcccaagggtttaatctttttggctgtgttatgcttctcagcactgtcactgagtcgttgtcttgc

SEQ ID NO: 75857 - DNA, 400 bp, Glycine max
cgacaaccgattacattattaacgggataaatgtctaccttgcaaccaaacatacacaaaatgctatacttgtcaacagctgcactgtaccagaatgtctcataggataggcagcgcatctttgtctattgcggtcacatgtggatgcaatactgcgcctttacaaacgtgataactcaggaacttactctgatggatgacctgcgagatggacctttgacactaatgcttgtcccattggatatagattcagagctggtgatatactaatcttaaactatgactcatcatccgacaatgtgtgaagctgaggacacaaatggtatacaactgtttcaagacaccacacatcgctccagtgatcatgccagggaatgacctggtcaaactagtgagatgg

SEQ ID NO: 75858 - DNA, 194 bp, Glycine max
cagacggtttcaacaagactacagaacgggaagcaggagtcccacaacatagatcgtcctaccagaggactattacgaagatattgcactaacgcgacatcgaaatggttgtcatcctctagttcttaaccatctagcagataatcaccctactaaaaggagaatcgtcatcactgatgaactcgcgcatacat

SEQ ID NO: 75859 - DNA, 171 bp, Glycine max
cccacgcttccttacacgcttaaaaacaccttatagatgtcttcctaaatctatctctggagtaaactggcgaaattatccttgactcccagcccattaacttacactccttatatcccaaaaatacaattaaacaacagacccatctaaatctactatctccctataata

SEQ ID NO: 75860 - DNA, 397 bp, Glycine max
ggttctagtgtgtgattgtttgtggttggagctcgttcttcttcttttgttgttctgtgtttgtgtttgttttttctctcacctgaaaatgtcttgctgcggtggtaactgtggttgcggaagctcctgcaagtgcggcaacggctgcggaggctgcaagatgtacccagacttgagctacactgagtcaaccaccaccgagaccttggtcatgggagtggcacctgttaaggctcaatttgagggtgctgaaatgggtgtgcccgctgagaacgatggctgcaaatgtggaccaaactgctcctgcaacccctgcacttgcaagtgaggtgttgggagagcaagcttcaagcagagatagcccttaattaggaataatgataaactattaatgtgt

SEQ ID NO: 75861 - DNA, 70 bp, Glycine max
ggaagtgagtcgcactgtggagttgaggaaatgtccaccatttgcacagcaatcaacaacgttggcaacc

SEQ ID NO: 75862 - DNA, 167 bp, Glycine max
ggttctagtgtgtgattgtttgttgttgtaactcgttcttcttcttttgttgttctgtgtttgtgtttgttttttctctcacctgaaaatgtcttgctgcggtggtaactgtggttgcggaagctcctgcaagtgcggcaacggctgctgatgctgcaagatgtacc

SEQ ID NO: 75863 - DNA, 97 bp, Glycine max
  unsure (1)..(97): unsure at all n locations
gccgcgagaggacacacgacagagggggcagcgaaaggggacgcaggcgaggggcaacagggcaaggaccggcgggangcacaaacccacaagagaa

SEQ ID NO: 75864 - DNA, 402 bp, Glycine max
gacagagatagaataaaaacagaggccccatttgcgatcttaaacaacctataccctaacgcccttatatcggttcgagcttgctgtactcgacgacttaactgtcaaacggacgccacagtatttatataaagctgcacagccctttacgctagtgcgttaattaatcagcaataccatgaccaactgccgaattatgagtccctcaattgtctcaccttatattttccaaggatataatcggattcccgaatccgcaggaaattcatggggcttttgacttttctatcgcgatcatatgttatcacgagatcagactgttgatggtgctgcataagtatctaatctcactaacataactgcagatgtaagattacatagagatgatgcgtgatatacatc

SEQ ID NO: 75865 - DNA, 452 bp, Glycine max
cgaccgacgcgttcgtaaactactacaaaacgacagatttgggagttttaagggaaaaaaaaaagagtggtgagggggaggtcttccttatcgctcgacatatccataagagcacccactccctcatcttctctcattcttactaccccaaaaccatcttcactctcttttaaccttaccctcactttctccagcgctcactcttcgttccttcatttctccttcctatcttatgcataccatctgtcttccccttcctccactttaggcttgtcacttgaattgaatttctcatataatactgggaccatattacgtataggttctgtcctatttgttagatcaagcaaggctcctctttgtctgactaacagaagcataccaagaaaatcattgtcacgcactcatgttttcctcaaaataattatcacaccacgtctaagatctaattt

SEQ ID NO: 75866 - DNA, 163 bp, Glycine max
  unsure (1)..(163): unsure at all n locations
ggggaaaggtaaggaaacgaangaaanganagggngggggaggattgagagagtgcggtgttggttaaacatgtggaagaaggaagcaagaactagaacgccagacattgcgaggcagagagagagagagaagagaatgagcaggggcccgaagagtccctcg

SEQ ID NO: 75867 - DNA, 295 bp, Glycine max
gggtggacaaagttaacagcaaaggtatgtacttttattttgtagggcgttccctccctcttttcaccgattgctttagccttagtcatcattatatgtactgtattccatcaccatccatgaactagttgtcctaaccaaataagaatgcagcgaaagcagaattcttcttctacacagcaaaagaacacacttcattgcaaaccaacccatatcaaagagaaaggtattcctggttcttgatttggggtcctaattttcaattcctggttaagtttggctttaaaaaatggaa

SEQ ID NO: 75868 - DNA, 398 bp, Glycine max
gacacagacaaggaaaaagggagaaagaacagttttttttttcttttttttgaataagtctttttctaccctcagttgctctcatagactcttgactctttcagttgtttactaattaacactcatcacattcgttgtgtttggcttcttcactcgctttctctatttttttctcactaaaaagttccatcttttttttttttttttaatttctggggttattattgctttctgtgattctgtctcagttccattttggtatctttgagggaaattcattgggtttgcagggttttatcttgttagaatttagaccaattggctaacagataatagtcttcattgaacatcaatttcaagcattctctctgatttttttgatcaagtggctcttttct

SEQ ID NO: 75869 - DNA, 413 bp, Glycine max
ggtgcacaagtgagtttgttgatcgagataactagaaacagtgtgatgaaaatgaaggtccttgttttcttcgttgctacaattttggtagcatggcaatgccatgcgtacgatatgttccctctccgaatgaacactggctatggtgcccgtactccggaggtgaaatgcgcaagttggaggcttgctgtggaagcacacaacatctttggctttgagaccattcctgaagagtgcgttgaagcaacaaaggaatacatccatggcgaacaatatagatcagactccaaaacagttaaccaacaagcttacttttatgccagagacctcgaagtccatcccaaggacacatttgtgttcagtatagatggcaccgtactctctaatattccatactacaaaaaacatggata

SEQ ID NO: 75870 - DNA, 67 bp, Glycine max
gaaccaagtatatgtaattaattatgttagctgcttttaacagcttggatatatagatggtttgatt

SEQ ID NO: 75871 - DNA, 391 bp, Glycine max
ctctcaacacttttctgagttctttctttgggggttgggaaagcaaaattttaggtcaaagttggttaacagttcacttgtatctgtaccactcactggaatcgttgcagctgtctattcttttccattttaggttccgtgaccttacagataattaacatatgccaaatcattatttggttttgaactttggtttaggtagtattttttcactcactttatatttgtgtttatctttcttttttatccatcttataattttattcatttaccttaatataaatggaatataattaaagagtaaatactagtgtatattctgaaagcaaaaaatatatatatattacactactatttgctatttagtcacaaactatatatcatttacgat

SEQ ID NO: 75872 - DNA, 157 bp, Glycine max
gggaagtgcaagtgtggcactaactgcacttgcacggactgcacctgtggccattaaggaatatgtatgaaaatgtaattgccatgtgtttggcaatacaaatatccaaataatgtaatcttcgtatgaataaatgtgtgtgctgttatcctactgc

SEQ ID NO: 75873 - DNA, 195 bp, Glycine max
aggcgtgcgaacaggtgcgagaggaccaccgacggatgatcgtgagcacgaggacaggccacgttaaagttgttctagtacagagaaaaggagacacattagctactgtgttgcaactgttgcagtggccattaagggaacctcttgctgtgagacaatggtatcgcacatggcaccttggactgctgaagaaga

SEQ ID NO: 75874 - DNA, 396 bp, Glycine max
gagcgaaacagagagtgatttcagtgagtgatcggtgttcacttgatctcatcataatcgtcagcgtcaattgaagaagatgccgatcagaaacatcgccgtcggaaggcctgaagaggcgactcaccccgacacgttgaaggcggctttggctgagttcatctcaaccttcatcttcgtgttcgccggctcaggctccggcatcgcctacaacaagctcaccgacaacggcgctgccacccctgccggcctcatctccgcctccatcgcccatgcattcgccctcttcgtcgccgtctccgtcggcgccaacatctccggcggccacgtcaaccccgccgtcaccttcggcgccttcgtcggcggcaacatcaccttccttcgcggcatcgtcta

SEQ ID NO: 75875 - DNA, 396 bp, Glycine max
ggaatgcgatttttgtgtgttgaactatcaagctacatcatcggatctatctgaatggggaaagcactatcgcgaattcaccgtgtcagtgtcagatacattcaattcacactctttattgctttcgtctccattagtttcgcattgcattgcttccttatcttttccgccacttcactctttctgttcttttccccgcttccgtttattatatttatataatatataattttttgaagtcgatgcattctgagaatgtaaaacctcgttttagtttttggaaaatcaaatcccctccattcttcttcttattaattaaacctgaaaaactgtttaactgagtggctaggaatacttgaaagtggagtgtaactcattttacacttcacaattttg

SEQ ID NO: 75876 - DNA, 398 bp, Glycine max
gaagaagcagggtaaacattaaaatcaatcggaaagtggagatgtcacggagaatcgggacaaagctcttcgtccacagagcagctcaagaagttgttctctccattcggactagttacccaagctgatctagctttggatcctataaccaaaaggcccaaagggttcggctttgtctccttcaaatctgaaattgaagcggaaaaggctttgagagccatgaatggcagggtaattttctcttatctatatccactttattaaacaaaaatgtgctaggcatcgtatattggtatgcttggattaactacattgttgttgtaagtgactatgcactgaaggtgtttgttgaaatgaccgattgattggtgattgcaatttataaagatatataatat

SEQ ID NO: 75877 - DNA, 377 bp, Glycine max
ctattatacatgtgtgaaaggcacatcagccttcaagtgagatattatgacaattaaatttacaatcataatagaaaataagattcacagtctatatatccttttgcagtctacttctagatatcttatcccagagtacacttcaaaattctaaagttttatacaaacaataatatgaatttaatcacttaaggtcctctaaaactgtaagtcacctaccaagtaacctctgaaagcagcttgtgcctttgatgctgcttcctcctgcctgattttctctggatcaggtggtgcatccgtatcaacagatccattaatgtctctttcttgattctcaagtaaaatattttctgattcttcattctccagttcaaggt

SEQ ID NO: 75878 - DNA, 372 bp, Glycine max
tagagagggatgagaaagaaattactattgcacaagatgaacgtagtggcatggctccccctctctttggtgaactggtatatgatattgcatacttttcctttaattttaatttatttgtcatcagtttttttttttaaattgttataattatattaactgtatacgtgcttgcttgcaggttgaaattccaaacttagagagcttgaatttatcctcagtcagtatccataagatatggagtgaccaaccactgtcaagtttctgctttcatagcttagtaaaattagttgtgaaaggttgtgataatttgagatatttatgttcattgtctgtggctagtggtttgaagaaactgaaaggactcttcgt

SEQ ID NO: 75879 - DNA, 329 bp, Glycine max
gatgtatgagaggtagcatgtgtgctatggtgggcacactgaaccatatttgtcttaccaaaactgtggacgagatataggatccacgcttactaacgcttgcatacgacactatagcgcatcgatggacacaccataatactattcacatgacatcttacatacaacgtccatgactgggagatactattgatgttacctaactggactgcctagcatgacattcaaggttactccatactagcgtaatagcctaagacagacagcacctagtcgcccttcccaacatgtgcaccacctgaataactaattggactcgcactgtatct

SEQ ID NO: 75880 - DNA, 405 bp, Glycine max
cagtgaaagccacctggagatggtgaaagctggtgagaaatgggcaaaagacacagctggttctttcactcttgtgggtactctcatcactaccatcatgttcgctgcggctttcactgtccccggtggaaaccatcaagaaactggagcacccatcttcttacacgatcacatattcactttgtttatcatagcagatgcaatatctctctttacttcttccacttcagttctgatcttcattgggatcctcacgtcgcgttatgctgagaaggatttcctcaagacactgccgttgaagttactttgtggccttgtgacccttttcttgtcagtggtggcaatgatggtagcattttgtgcttcgcttgctatgatgctgaagggatatcaacgactcataat

SEQ ID NO: 75881 - DNA, 350 bp, Glycine max
ggtgagtgtgtgagagagagagcgagcagtttcagacacagagagaggggtttgggattggagggattgacgctgcgtctcttcctcttctctttcgatccatccctcattcctaatcctccaatccaaccacctcagcctcacactcacatatacacatatctgaacgcgtatcgtccctcctatggcttcaaagcgcatcctcaaggagctcaaggacttgcagaaagacccaccaacttcttgcagcgctggtccagtagctgaggacatgttccattggcaagcaacaataatgggtcctgctgatagtccttatgctggaggtgtattcctagtcactattcact

SEQ ID NO: 75882 - DNA, 362 bp, Glycine max
gtcctagtcaaagtgttgatggtattctgccagtcagtgccaactttgtcagcaagaaccagaaaatgaatctcaggaccataatcatcattgctttatcttcctttgtactcttgctggttttggtgggagcattttcaattattttgaaatggaggaagactgggagaccctcaagtgctgttggccctgcattcacatcatctctaaacaagagatcaggcttggggtctatgttgtcaagtagtattacaagctcgacatcaatttcacttatgtccacaatggctacttcccttctctctgttaaaacattttcactttctgagcttgagaaagcaacagataagtttagttcaaag

SEQ ID NO: 75883 - DNA, 160 bp, Glycine max
gtcacgcctgctgccagatgacagcagattcggaaagagcgcgggccaatgatggccatgtgtttggcaaattttggctatctgggatttctcctggacccacaggtgttcctcagattacagcgtggtttgacactggtacccaaggtgtatttaatgt

SEQ ID NO: 75884 - DNA, 303 bp, Glycine max
attcccgggtcgacccacgccgtccgcctgcctgccagatgagcgaagaagagggaagggggacggtgcaactgaaagtgctattccggggtgggtgttggtcactttagctgatcataaatattagatgcaaatgttcaagaagcccatcacaaacattaccatctcaagggctgaagaaaacacttaccccgacacctttgaaggggctttggatcattacatcataagcttggtctttgggatcggaacgttcagctattgcgtttactatcgcaaggtcagccgctactgagctgacga

SEQ ID NO: 75885 - DNA, 279 bp, Glycine max
gaaagaggggtgatcatgaaggccactggtgttaggcacacttgggatgcttggtatatggcaggtacacatcggtgtagcgctgagtacagctggagttttccttggattcgaggggactttctattgatcaggcctatggagagccactggtcgaaaaaggattatatcggtcttcgactgcaaagggttatttataaagggaggatttgataataaggagtagctcctgtatgaaaccgaagttaagcaaaagctgtcaatggaatagatgcgggc

SEQ ID NO: 75886 - DNA, 157 bp, Glycine max
cgagcaagctgcattctacagataatgcctgccactggggattgagatcatctgaagatgaactcaacaggtttatatatagaactctataccgcttacctactcagatcaagcctatatcttaaggaaatctgatcctccaaccaaatgcactggt

SEQ ID NO: 75887 - DNA, 392 bp, Glycine max
acgaccgaagctgattaatacgcagagtggatgtcactagggagggaaatcatgtattgtcgcgctgagatgggttagatagagaactctaccgcacttacctactcaggtctagtgaagagacatgaagaaatacgataagcgaaccagatgcactgattcgcttgcctcttatccaaaaggtgctgaaccagcccttcttacagaactgatgtccttaacatgcttgtcaaggagtgcccggtgatgctgaggattctcttaacgaacgactggtctataattagtgaagattttgaggaacactagtgtcgctacatgtctggaagtgaatacactgagacgcttatgcacggatcatcagaacttgctgaaagtgctgacatggagaa

SEQ ID NO: 75888 - DNA, 335 bp, Glycine max
cgcctcccttcggatggtcgacgacgacggatagtggttacgagagattattattataacgtgattcgggaatgttgctgcaatagagcgggagacagaattcatagaacctcgcaaacaatgggctctgacaagtaacaccggatcgggattagtgatatccagaactgacccgattctggattccctttccgacacatcaaatgacgctactctgttctacgaacttcaacgaacatagtccgagctgctcctccaggcagagatacactacgtgccatttcaaactgtgtggatggcctctaacccatcatccaaacccgacttgacccgac

SEQ ID NO: 75889 - DNA, 418 bp, Glycine max
  unsure (1)..(418): unsure at all n locations
ggttctagtgtgtgattgtttgttgttgtaactcgttcttcttcttttgttgttctgtgtttgtgtttgttttttctctcacctgaaaatgtcttgctgcggtggtaactgtggttgcggaagctcctgcaagtgcggcaacggctgcggaggctgcaagatgtacccagacttgagctacactgagtcaaccaccaccgagaccttggtcatgggagtggcacctgttaaggctcaatttgagggtgctgaaatgggtgtgcccgctgagaacgatggctgcaaatgtggaccaaactgctcctgcaacccctgcacttgcaagtgaagtgttgggagagcaagcttcaagcagagatagcccttaattaagaataatgantaactattaatgtgtagctaaaaacttaatgattat

SEQ ID NO: 75890 - DNA, 375 bp, Glycine max
ggagcaagagtgaacagcgaagagaatggctcccaagggtttaatctttttggctgtgttatgcttctcagcactgtcactgagtcgttgtcttgcggaggataatggacttgttatgaacttctacaaggaatcatgccctcaggctgaagacatcatcacagaacaagtcaagcttctctacaagcgccacaagaacactgctttctcctggctcagaaacatcttccatgactgtgctgttcagagttgtgatgcttcactgttgctggactccacaagaaggagcttgtctgagaaggaaacagatagaagctttgggttgagaaatttcaggtacattgagaccatcaaagaagctttggaaagggaatg

SEQ ID NO: 75891 - DNA, 232 bp, Glycine max
acacagactatgaaaaagggagaatgaacagcgggtagcatcttttttctgaatcagctcttttttataccctcagttagctctcatagagctattgactctttcagcagcttactaattaacactcattacattcgacgtgtttggctgcttcactcggttgctgtatgtcattctcactaaaaagctccatctcatctcacattcacttaatttctggtaggattatcgc

SEQ ID NO: 75892 - DNA, 274 bp, Glycine max
ggagcaagagtgaagagcgaagagaatggctcccaagggtttaatctttttggctgtgttatgcttctcagcactgtcactgagtcgttgtcttgcggaggataatggacttgttatgaacttctacaaggaatcatgccctcaggctgaagacatcatcaaagaacaagtcaagcttctctacaagcgccacaagaacactgctttctcctggctcagaaacatcttccatgactgtgctgttcagagttgtgatgcttcactgtttgtggac

SEQ ID NO: 75893 - DNA, 282 bp, Glycine max
gggcggatgcaagcagacaacagacaggggagacggaagggagtaccttctctggcttcttcctgagtcataagccagagcaggccaacgccattcatatcgatgcgaggctgtctataacaacagagcacaacgtctcatatcggcggcataaatcacatacttaacaccgcactacacataaagagagggcacctatgagctggtgtagaggactagctacaaaatagaccctgttgtggtgcctgctgatatatgagatgcaagatcctgacattattg

SEQ ID NO: 75894 - DNA, 149 bp, Glycine max
ggactgggatggcggatgcgtggggaatggtgcggcggcgcgcctatggttttgcgcggttcatatgggaagacacgctctacacacaccaaggtcttccttatgctggtacgcatgtcgaccaatcgaggaccttattctatgactgg

SEQ ID NO: 75895 - DNA, 155 bp, Glycine max
gcccacgcgaacgtcctgataatacaacacaacggagttcacttctatgttccaaacttacaccaagagctcggctataatactaacatcgctttctctaaacaaacaagagctaattcaactactccataaccctcttttttttttcacatatt

SEQ ID NO: 75896 - DNA, 390 bp, Glycine max
gattgcaggcataagtcattttagtccgtgacttttcgaaacccctcatctagttcgtgactttgtaaaaagttattcattagatgattaatctagttcgtgacacaatggaaagtaagtttgactttgcaaaaacttattcaccaactaattagaaccctcatctagtttttgcgaccatgtaaaaaagttagggactaaatacctgacgcttttaataccatagactaatttgctattttctggaccactaatctccatttatttttatttggttaaaatatgtttagttctttaaaaatatcttgaaattcagttgtagtcttttgatagataccaactggtaagggaataaggactgaattttattcaaagaaacagaacagaaat

SEQ ID NO: 75897 - DNA, 260 bp, Glycine max
ggatggattgactgggcatggaaaagatgggcgggaaggggtcctctgtctgtccgccttcataccccaaaccgaccatctcagctcgttcatttctctctctactcgctatctgactgactacatgatgaactttttgacatgacgttcacacacgcatgccacaaacttctgatttctcttaatttcacaagaaagagttaatgtcccgtggattgtttatgtggacaatgacttcttgactttcaatgctcgcaaaa

SEQ ID NO: 75898 - DNA, 144 bp, Glycine max
ccggaccggaggggccggctcgacccacccgtcgcgttctagaagaccccagctgcgggacgacatcagtgttggagcatcaaacgagacccgtacggtgcgccagaaatgtttccgtcttcgaaaaaagggggcttttgtgat

SEQ ID NO: 75899 - DNA, 406 bp, Glycine max
ggtacaggtgagtttgttgatcgagataactaggaacagggtgatgaaaatgaaggtccttgtattgttcgttgctacaattttggtagcatggcaatgccatgcgtacaatatgttacctctccgaatgaacactgtctatggtgtccgtactacggaggtgaaatgcacaagttggacgcttgctgtggaaacacacaacatctttggctttgagaccattcctgaagagtgcgttgaagcaacaaacgaatacatccatggcgaacaatatagatcagactgcaaaacagttaaccaacaagcttacttttatgccacagacctcgaagtgcattccaaggacacatttgtgttcaaaataagacgcaccgtactctctaatattgcatactacaaaaaacat

SEQ ID NO: 75900 - DNA, 147 bp, Glycine max
ggggtgcatcatgggaggaggacctgccgacgctaatttttccgtcttagaaggacgcctcttcttatgatggaataattattatcttcttctcctttttttatctggtgtagttgagggccttttttgttactataacaccgtaat

SEQ ID NO: 75901 - DNA, 406 bp, Glycine max
ggcacaagtgagtttgttgatcgagataactagaaacagtgtgatgaaaatgaaggtccttgttttcttcgttgctacaattttggtagcatggcaatgccatgcgtacgatatgttccctctccgaatgaacactggctatggtgcccgtactccggaggtgaaatgcgcaagttggaggcttgctgtggaagcacacaacatctttggctttgagaccattcctgaagagtgcgttgaagcaacaaaggaatacatccatggcgaacaatatagatcagactccaaaacagttaaccaacaagcttacttttatgccatagacctcgaagtccatcctcaggacacatatgtgttcagtatagatggcaccgtactctctaatatttcatactacaaaaacatg

SEQ ID NO: 75902 - DNA, 417 bp, Glycine max
ggttctagtgtgtgattgtttgttgttggaactcgttcttcttcttttgttggtctgcgtttgtgtttgttttttctctcacctgaaaatgtcttgctgcggcggtaactgtggttgcggaagctcctgcaagtgcggcaacggctgcggaggctgcaagatgtacccagacttgagctacactgagtcaaccaccaccgagaccttggtcatgggagtggcacctgttaaggctcaatttgagggtgctgaaatgggtgtgcccgctgagaacgatggctgcaaatgtggaccaaactgctcctgcaacccctgcacttgcaagtgaggtgttgggagagcaagcttcaagcagagatagcccttaataggaataatgataaactattaatgcgtagctcaaaacttatgtattat

SEQ ID NO: 75903 - DNA, 397 bp, Glycine max
  unsure (1)..(397): unsure at all n locations
ggacataatgatgatgtttgatcaaaggacatagctttagtagcagtggcagtagagacatgtacagaggatcgtctgcttgctgtctcttctttcccctccttttcgtgtgtgagagagttcagtgttattctctgttctaacttcactttttggcaccatttatcatgcttcactccttcttcttcttcttcttcaccctccaacaggccaagaaagatagctcttttctacgggtatatatatatatatactcttggacactttttgtttgagtttggagacaatgattgtgtgttgacgctcttccttcggtttcaattcacttctccaacatctactacatatngcagggctctttaggatgggacaagaattggagtttgatctgaatgac

SEQ ID NO: 75904 - DNA, 321 bp, Glycine max
aggatgacgaagacgacacatggatgacgtatgcacgatgaagataatggacgagcggacagggggttcatgtctgagaagatagaaaggctttaggaatggttgcacacgatagcccgttgatatatgagggctgcactgcacagagagaatctcgtgatcaatatacgctggactcgctcgtaacttcgctagagcctatataacctgtatatgtatgcctgtcctcatttacaagggcgtcgtgctggcatctcgtttgcaagatgaagataatggtcggccgtacaggaggttcatgtgtaaaagattcgagagtct

SEQ ID NO: 75905 - DNA, 408 bp, Glycine max
ggttctagtgtgtgattgtttgttgttgtaactcgttcttcttcttttgttgttctgtgtttgtgtttgttttttctctcacctgaaaatgtcttgctgcggtggtaactgtggttgcggaagctcctgcaagtgcggcaacggctgcggaggctgcaagatgtacccagacttgagctacactgagtcaaccaccaccgagaccttggtcatgggagtggcacctgttaaggctcaatttgagggtgctgaaatgggtgtgcccgctgagaacgatggctgcaaatgtggaccaaactgctcctgcaacccctgcacttgcaagtgaggtgttgggagagcaagcttcaagcagagatagcccttaattaggaataatgataaactattaatgtgtagcttaaaact

SEQ ID NO: 75906 - DNA, 129 bp, Glycine max
tacgttctgtcctaagttacttgaaactttgacctggtattttgattttaatggtgagacgtgtgctactgctacatcataattcccatcaaatttaattatcgatgggttagaatttcattaatttat

SEQ ID NO: 75907 - DNA, 410 bp, Glycine max
ggagagagagatgagggaggtgtaagaaactggaaggagtaggtgttgttggcattctgacctaaagcttgtgtctttctgcttcgtttgtatcttctgctgcgtaaagaggatccctttctgattcttccgtaaatttcgtctctgaaactagggctaatacttcatctaccgatctctatattctggatgaaggtttgcttttgatccggcttgggagttttgatcgacttgattttaactccaacttttaagagttagtagtctctcttctggtccttggtgttcgcaataatagccaaaggaaaaagaaatttgaaagctttctatttctgtaccctgctaaatggccagtgaattgaatgtcattccgcagcatagttcgtgatgtaggggatagtttcggagct

SEQ ID NO: 75908 - DNA, 193 bp, Glycine max
ccaggcgtgagacgacgcctgaggggggacagacggacgggtgaggaataacaacctagggggggtcgatggtgtgggcattcaaacctaaagcttgcgtctgtcggcttgggttggagcttgtgctgcgtaaagaggaaccatgtctgactgttgcggtaactgcgtctctgaaactatggctaatactgca

SEQ ID NO: 75909 - DNA, 385 bp, Glycine max
cgcgaacaaaaactacagcgggcgcttagttttcggctgcggaatgacaacaggggggggggtggttttataaagggacaaaccacaatcgacgatctttcctccttatatggagggtgtgttttctaaaacgcaaccaaatataactttcgcgcaaacttcagatttgtataggtccctctctgacggtaagaaaatcaacgaccaacgcactatgggcaagagctattgttttgttactttcacaaatcctaggtctgcaatttgatgccattaacgacctgaatggcaaaatcattgacgggcgtgagattaaagttaatggggtgagggcctctgggggcatgtcaaattttgggagaaaacggtattatttataaaaata

SEQ ID NO: 75910 - DNA, 127 bp, Glycine max
catgaatggaactttacatggtcctgcaggtcagtgttgttatagtcttcttgacattgtacacaggctttggactccaatagatggtgaatttgatgactacatcattaattcgaagcctaatggc

SEQ ID NO: 75911 - DNA, 243 bp, Glycine max
cacacgcgtgcgaacacgccagcatgcgcttatattgacgggtgcgagaagacaacatgggggggggtgattgtgtgaggatgcagccctaaaacttgagtttctctgcttgggttggagcttgtgctgtctaaagagggaccatgtctgaatgtggcgctaacttcgtctgtgaaactagggctaatacttgatataccgagctctatatgtcaggatgaacgattgcttttgatccgtgtt

SEQ ID NO: 75912 - DNA, 423 bp, Glycine max
gtacgacaaaacgggaagatggtggatatgaaaatactgggtttctaggagctaaagacattagaacagtgttcgaagatggagaaaatgatgcgactgagaccattgttccgatcactgagttgcagatcttatcatttcgttcttcgtccttctcttctctctcgctctcccaatcctcttccttctccttcaccctcagaatgcaggtctcctctctcaatgggtttagggagtatgagattctatagtgaagatgtgacccacatgcccaatattaaggaccctgtgctttacaatgctttcaaggatttgatggcggtaagttggagtgagcttccggattctgtcatatctgatgttaagaatgcactgtctaaaaacactgatgacaaagctggcaaggaggttgtggaaaatgtg

SEQ ID NO: 75913 - DNA, 475 bp, Glycine max
ccggaacggactgggccggctcgaccgacccgcccacccgctgtaacaggacgacaaaaccggaagctgatagatatgattttactgcatttctaggacctaaagaaattctctttctgaataaatgttgaatgcaatgaacctctggctattatcattcgatgcaaattacacaggaacagacttaatttttttagtcaaaagttatgttaaacattaaagaaaggtctattcttttatgtaattaaaagaaagtttaacaaaaatcgattgaattattttcttaaaatataaagatgttagcaaaatagaatgtgccatcaaagtagccaatgctggttgatttgattatagcctatactaaattagtttgtaattagttttcatgagcttaactcaactctacaaaatcaacttgtaaggtgaggatttgttcccacttatataagttatctcgacactatctttatttgat

SEQ ID NO: 75914 - DNA, 194 bp, Glycine max
  unsure (1)..(194): unsure at all n locations
ggacttcagagagaagaagaagaatcatggtgtggggactcttccccgtcgatcctctttcatgtgtagataagtactacatttactatactggactctacaaagaatgacgaaaagggtgagattaaatactctctaaggcttgaggaacggctgtggtgctcgcataaatagnngntaatacagngaacccg

SEQ ID NO: 75915 - DNA, 263 bp, Glycine max
attggatgggggcagtagtataattggaacaagggttaggtgtgactgcgtcgtcactttctctctttgcaaaccaagcctatacatacacatggacagaaaatgcttcagcggtggcaacttgcttagcaaagggaccactgaggaggcaaagagggattgaactacagggaatgatgctaaaggctctggaaaagatgccttataaattgttgtgagccctacctgtgggagcattacagtagcaaaacggacgactagcc

SEQ ID NO: 75916 - DNA, 419 bp, Glycine max
  unsure (1)..(419): unsure at all n locations
ggcacaagtttgttgagatagctagaagcaataagatgaaaatgaaagtgcttgttttgtttgttgctacagttttggtagcatatgaatgccatggctcagactaccagaagttccctctccaaatgaaaactgggtttggtgggcaatacagcaatgaggtggcatgtgccagttggaggcttggcgtggaagcaaacaacgtagtcaagtggcaaactgttcctgcagcttgcggagagtacatagctgactacgttctaggagaccaatatagatcagattccaaaacagttaaccaacaagcttatttctatgctaaatccctcaaactcaccaacaaagatgtctntgtcttggacgttgacgacactactctctctaatctccagtattttgctaaccatggatttgtgtgg

SEQ ID NO: 75917 - DNA, 304 bp, Glycine max
gacaccaggcaagatatatggtgagcatcaccgtgctatcatggcccccctctgacagatgtggactgtgtcaactgagccagtttctccgtctgatcatgggtgatcctactcgtgctactgcgtggatacaccgaacatgccagacgatcaagatatgctcaatgaaaaggatacgctacatgtgcaggtgatatattgagcaaagagtcatcttcaggtgagtcaaatggatcttcttgacattgacttcattgcgcgactcatacatggttattacggcctaatccaacttgcatgtact

SEQ ID NO: 75918 - DNA, 325 bp, Glycine max
caaaggggattaaaggcagaggtattgccattgcctctggggcttgcaacaccaaactgatacacacttaatactattatagtaaaaattagccaccaaagtacactaaccgctattatcatacaactcaatagctagattggagcaacgtgaaagatctatcatttgcaaccaatgccattgaacatatgtaaagacatatatatattgccacggattatattgactgaaccaaaggattcattaactgatgttctgctttatacatggcatatcatttattggaagaattatctaatggaagaacttctttttatgagcagta

SEQ ID NO: 75919 - DNA, 296 bp, Glycine max
cgattacaattttgcgtggcaaggattttcattcgtatcggaatgacattcagagacgttgactccctttgactcccgaatcattggccaacctttctgccttttactccattactttcaataccgatgatgccgatggacggaattgcaagcctgaagtggctaaaactggtttgggctcttctgcagcgattgcaatggctgtagttgctgctctactgcattacctggatgctgtcaagctttcctcttcgaacgatcctcgggaaaggaatgatgttgcagatcttgatatg

SEQ ID NO: 75920 - DNA, 399 bp, Glycine max
gtagtacaaatataaaaaacatatttaggtcttcttaagttggttactaatattaatactaataatcgttgaaataaaatatgaattttaattaaaaaacaatactaataatatttatggtattgtgtttgaatttaataagagcaaattatactgacaaagcgtgaagtgtcttagattcgacgaaacctcaaattattctatgttcgagactatttggactttggctaggctctgtttgttatactcacctagttaagttatatttcctccaattttaaatattagaaaaaaaaacaccccattttttttgtctcaattataagaaaattcaactaacgttatcttatttattattatctctaaattatccttcatttaattgatggattaattata

SEQ ID NO: 75921 - DNA, 434 bp, Glycine max
gaaggcatgtagtggtactagggaagaaaagctagtaaaagttctctagtaagatcactttcaggggatattatagggaagaaattctagattaagaatagaacttgtctatagtttggaattatgcactcgatttgagattccatttgaatggatatgtcaaccataacaactatattgaattacaatatgctatctttgtgaattaaatatgcatatgacatggaaaatggaaataagtcatgacacatcctgacaaagcaagggtatagataatgatatcttctttctatgaatcctttgcaagaaaaatggaaagagcaaataatgattccttaggtaatgaaaagagcatgtagtggaatatcctgagtcccaacacgaaactattaagtaaaatacagagattccttaagtaatatttggatattgat

SEQ ID NO: 75922 - DNA, 414 bp, Glycine max
ggtagagtgaagagaatggctcccaagggtttaacctttctggctgtgttaatatgcgtttcagcactgtcactgagtccttctgttgcgggggaagggcaaaataatggccttgttatgaacttctacaaggaatcatgccctcaggctgaagacatcatcacagaacaagtcaagcttctctacaagcgccacaagaacactgctttctcctggctcaggaacatcttccatgactgtgctgttcagagttgtgatgcttcactgttgctggactccacaagaaggagcttgtctgagaaggaaacagatagaagctttgggttgagaaatttcaggtacattgagaccatcaaagaagctttggaaagagaatgccctggagttgtttcatgtgctgatattctcgttctc

SEQ ID NO: 75923 - DNA, 328 bp, Glycine max
  unsure (1)..(328): unsure at all n locations
gtacccagacttgagctacactgagtcaaccaccaccgagaccttggtcatgggagtggcacctgttaaggctcaatttgagggtgctgaaatgggtgtgcccgctgagaacggtggctgcaaatgtggaccaaactgctcctgcaacccctgcacttgcaagtgaggtgttgggagagcaagcttcaagcagagatagcccttaattaggaataatgataaactattaatgtgtagctaaaaacttatgtattatgtctgtgatggttttcgtgcactctggtgttttgtgttaaacanacatccttagaataaagtggtcatgtct

SEQ ID NO: 75924 - DNA, 381 bp, Glycine max
gaggcaacagataagaaaaaatagatcagtggcggtacgtgaaagttaacgccattaatggagtctgagaagaatttaaggctgccactctctgatgatcgcaatcagagggatgaaagacaacgaaaagtttcagccatgacaagaagaggagtcttcgctgccttatcatatatggcctattcggttctcttggtcatgttcaacaaagcagccctctactgttacaatttcccatttgcaaatgtcatcacacttgctcagatggtgtttgcatttattattctctacgtgttgagatccttgaagataatttctttcacagctggtgaatcgctgagcagttctaagaatacaataatatttgtgtcctataggaca

SEQ ID NO: 75925 - DNA, 379 bp, Glycine max
gcagcaaggagatgatcatctctctgaatctagaatttcaacacaagcttcagtggaggaatcaatcttccagcaagttagtggtgaggtggaagaaaatcaccatgtagaccctgtttatgatcttagtccacaagcttctgaaacactccaattgtttccttcaatatcttctcatgattctgctatggagttgtctgagagggcattgcctcctgcttcagtagaaatgactgctaatgcggcagaagaagagtccaaagtgcatgatcacagactggaaggtaatacttctgatcatgataaaactcaagcagcctcttccgaactacatgaggaagccaaaaatgaattgagttctgagaaatctgaagatgtg

SEQ ID NO: 75926 - DNA, 321 bp, Glycine max
gatttcaaagggatataatataaagtaagcactctacttccttacccttttgccctgaacatgtatatataatatatatatataatattgtcttaatatttttgctacctttctttgtgcttcatcgtcaaccgtacggtaaagaaactatagccacctggaattctgtctctgacatggtcgatgatgacaagagaaataataatctacgacagctgctagtgatttgtctctgaaagaattaggagcttattttatttctagtgccatgaagagagcaagtgaatgggcttattctcatgagattccaagtgatgtcac

SEQ ID NO: 75927 - DNA, 317 bp, Glycine max
ggtttcaatgggatattatattgagactggactctgctttgttaaccttgagatctgagcatctatctctacgctagtatactatgatattggcccaatagctcgtgctacctatatttgcactttattgttaaactcacgagaagagctctcttggcgaatgcaatcatgcctgtgactgccaacgagcatagcccagatcctcagtctgaatatgctgtgaaatctgatgcatgtgaagggaagcccgatcatcaaatatgtgccactgcatgaagaggacctgaccctgatctgattgccattgcagaacgaat

SEQ ID NO: 75928 - DNA, 382 bp, Glycine max
  unsure (1)..(382): unsure at all n locations
gataccaaaaacaaaacacaagccaagtgaaagtgagaaagaataaaaatcaaagagcataatgtcagggatcattcacaagattggggagacccttcatgtgggagggcgcaagaaggaggaggagcataagggtgagcaccatgctggagaatacaaaggggagcaccatggtgaacacagtagtgagtacaaaggagagcatcatggtgaacacaaagctggagagtaccatggtgagcacaagccagagcacaaagaggggttcctagacaaagtcaaggacaagatccatggtgagggcggcgccgccgagggcgagaagaagaagaaggagaagaagatgaaagagcatggncatgagcatggncatgacagcagc

SEQ ID NO: 75929 - DNA, 375 bp, Glycine max
ggagcaagagtgaagagcgaagagaatggctcccaagggtttaatctttttggctgtgttatgcttctcagcactgtcactgagtcgttgtcttgcggaggataatggacttgttatgaacttctacaaggaatcatgccctcaggctgaagacatcatcaaagaacaagtcaagcttctctacaagcgccacaagaacactgctttctcctggctcagaaacatcttccatgactgtgctgttcagagttgtgatgcttcactgttgctggactccacaagaaggagcttgtctgagaaggaaacagataggagctttgggttgagaaatttcaggtacgttgagaccatcaaagaagctttggaaagggaatg

SEQ ID NO: 75930 - DNA, 52 bp, Glycine max
ccacgcgttcgaccacgcgttcgcgcactcgtccggccacgcgtgcgccgag

SEQ ID NO: 75931 - DNA, 216 bp, Glycine max
  unsure (1)..(216): unsure at all n locations
ttggggttgttcttgataatatgtgccactcggcaggccaantgaaggatgctctacgtgtaaaccctttctatattgtgctctaacattaggctctatcattcatgctcgtcatgatatgcacaggatgagataaattacaatgtttatagtttgttgaaagatgaaagcttgattccgtttcttacagatcgtagcatcttgaagcaagtgtca

SEQ ID NO: 75932 - DNA, 318 bp, Glycine max
ggtgcacaagtgagtttgtgggatcgagatatctagaaacagtgtgatgaaaatgaaggtccttgttttcttcgttgctacaattttggtagcatggcaatgccatgcgtacgatatgttccctatccgaatgaacactggctatggtgcccgtactccggaggtgaaatgcgcaagttggaggcttgctgtgaaagcacacaacatctttggctttgagaccattcctgaagagtgcgttgaagcaacaaaggaatacatccatggcgaacaatatagatcagactccatatcagttaaccaacaggcttactttta

SEQ ID NO: 75933 - DNA, 271 bp, Glycine max
cgcacgcacccgtacacttcagatacgacttcagatttagacatacttcgagcaagaagggccacggtgtgaatctataatagttacaggcgttcccacactcaccaacatccacaccatactgaccctttattaacatcactctactatcaatgtatcacactaaatttacatggacgattactaattcacccataacgacttccctcatctaggactctctcattctatagtttccttgcatatctttaagctactccttaatcacttt

SEQ ID NO: 75934 - DNA, 382 bp, Glycine max
ggttctagtgtgtgattgtttgttgttgtaactcgttcttcttcttttgttgttctgtgtttgtgtttgttttttctctcacctgaaaatgtcttgctgcggtggtaactgtggttgcggaagctcctgcaagtgcggcaacggctgcggaggctgcaagatgtacccagacttgagctacactgagtcaaccaccaccgagaccttggtcatgggagtggcacctgttaaagctcaatttgagggtgctgaaatgggtgtgcccgctgagaacgatggctgcaaatgtggaccaaactgctcctgcaacccctgcacttgcaagtgaggtgttgggagagcaagcttcaagcagagatagcccttaattaggaataatgat

SEQ ID NO: 75935 - DNA, 442 bp, Glycine max
  unsure (1)..(442): unsure at all n locations
tcactactgacgtaatagctagctagctaatcatggaaatctttcaagccacagcagaaaagatggagattaatcccaagagatttacaacattattctttgttgtacttttcatatcatttcctgttgctttcatagtttcttcaatctatcgaaactcaagtttcgctattttttatgaggggttaacagaatcatcggctcaaaacgttacaaacaatggttttccgttgggaggaagagtccacaatactacatcggatgatgagattgagactcacttaagaacaagacacaatgataccgtgtcggtggtacgtaacagtttttctttttcgtttatataactgntgtattcttttgttctggactaaaactcactctacttccgtaataatggacttggcaaagttaaagtgttgcccggcaatattcaaaacgg

SEQ ID NO: 75936 - DNA, 425 bp, Glycine max
ggttctagtgtgtgattgtttgttgttgtaactcgttcttcttcttttgttctgtgtttgtgtttgttttttctctcacctgaaaatgtcttgctgcggtggtaactgtggttgcggaagctcctgcaagtgcggcaacggctgcggaggctgcaagatgtacccagacttgagctacactgagtcaaccaccaccgagaccttggtcatgggagtggcacctgttaaggctcaatttgagggtgctgaaatgggtgtgcccgctgagaacgatggctgcaaatgtggaccaaactgctcctgcaacccctgcacttgcaagtgaggtgttgggagagcaagcttcaagcagagatagcccttaactaggaataatgataaactattaatgtgtagctaaaaacttatgtattatgtctgtgatg

SEQ ID NO: 75937 - DNA, 381 bp, Glycine max
gaggcgaatgcaattacagaagaaccaacagaattttcatttcctcatttaacctcactgaatctgcatatgttgccacaactcagttgcttttatcctggaagatttacgctggaatgcccagccttaaatcatttagaggtgttgtcttgtgataacttggagaaatttcaaaaccaacaagaggcacaatgttctacttcagttactaagctaccccttttctccgaaggaaagactattttcattctggagtcattgaagctctattgggaaattgcaaggatgctatgcaacaaaaaatttctgaaggacatgcttcataaattagttgaacttgagctggattttaatgatgtcagagaggtaccaaatttcgtg

SEQ ID NO: 75938 - DNA, 328 bp, Glycine max
taatctgatgacactagatgcggctccgttgccataatcagcggacgtgggctaaggagactttggagatttttgcacctttgtccaatcgctagcgaatttctacttagaaggaacaattgcaaaatttatgttttaagcatatcaacccaagccaccatgatgagctatcatccaagcttgtataatcgtatgatgatccaatgattacttttgcaatagagagattacaggaagcacttaaagatgaatgcatttcttataatgtcatttcttaactgcataagatcctatataaagtttatcgcacaatgttaaagaagaaact

SEQ ID NO: 75939 - DNA, 409 bp, Glycine max
  unsure (1)..(409): unsure at all n locations
ggtctctgaagactgaagctctgacaaaaaaaaacaaaaaaggcttaccttagcgtgttatttgtttgacccggataagtgtgtgttcttatgaaggttgcagtgctatggagtctatagatttcatgctgcagcttcattagataccaattttggtgaatcatcttgatagcttgttcttggatttttgttttggggtgttgatgaagatgtttatgggtggccaaattttcggtgctggtgttattattggtagtttctttctgctgatcctctgtggcatggtttgtgggactgacagtgatatattctgcttgaaaagtgtaaagagaacacttgacgaccnctacaattatttgcaatcctggaatttcaataacaatacagaagggtatatatgcaagtttac

SEQ ID NO: 75940 - DNA, 376 bp, Glycine max
ggagcaagagtgaagagcgaagagaagggctcccaagggcttaatctttttggctgtgttatgcttctcagcactgtcactgagtcgttgtcttgcggaggataatggacttgttatgaacttctacaaggaatcatgccctcaggctgaagacatcatcaaagaacaagtcaagcttctctacaagcgccacaagaacactgctttctcctggctcagaaacatcttccatgactgtgctgttcagagttgtgatgcttcactgttgctggactccacaagaaggagcttgtctgagaaggaaacagatagaagctttgggttgagaaatttcaggtacattgagaccatcaaagaagctttggaaagggaatgc

SEQ ID NO: 75941 - DNA, 412 bp, Glycine max
ggttcaatagaagactaattgggtagtgtcaatggaagaaatggagaggatatttttccgtcttttgggactaggcattgtgggagataaacttattgttgaaaagaaaccttaattgcggtcacccctagcccgtggactagagaaatgctaggaatacactttattctattggttgaaatttattgaaaattacaaaattttgtggattttacatcatatttaatgtacctctcctgatttttgtactttccaatagattttaactaaggggagagtgtgtgttagagagtgtgttcccagcactcctcttgtggcttaagagttggttgctagtgtcttagaaaggaatacctacagaaggctgattagaaaggctgaatgaagtgtcatagtttgtctcgatacctat

SEQ ID NO: 75942 - DNA, 317 bp, Glycine max
  unsure (1)..(317): unsure at all n locations
ggcacaagtgagtttgttgatcgagataactagaaacagtgtgatgaaaatgaaggtccttgttttcttcgttgctacaattttggtagcatggcaatgccatgcgtacgatatgttccctctccgaatgaacactggctatggtgcccgtactccggaggtgaaatgcgcaagttggaggcttgctgtggaagcacacaacatctttggctttgagaccattcctgaagagtgcgttgaagcaacanaggaatacatncatggcgaacaatatagatcagactccaaaacagttaaccaacaagcttacttttatg

SEQ ID NO: 75943 - DNA, 419 bp, Glycine max
ggcatgagtttgttgtgagctataagctagtttatcgtgaggagaatatgaagttgtttgttttctttgttgctgcagtagttttggtagcatggccatgccatggcgcaggctaccaaaggttccctctccgaatgaaaactggctatggtgagcgttcttcggaggtaaaatgcgcaagttttaggcttgctgtggaagcacacaacatccgagcctttaaaaccattcctgaagagtgcgttgaaccaacaaaggactacattaatggcgaacaatttagatcagactctaaaacagttaaccaacaagctttcttttatgctagtgaacgcgaagtccatcacaacgacatatttatattcggcatagataacaccgtactctctaatatcccatactatgaaaaacatggatat

SEQ ID NO: 75944 - DNA, 366 bp, Glycine max
gatttgaaagggtcaattaaaagcaagggcttggtcactcctatctatatctggtctcacttaatcttgagttgtctaaccacacatcacacttgaacggagagataacaatggctcctgagaaggccgagactgatattgcatagaattacttataaatggaaaaggatgaggaaggtactaagtccaccagtggccaattgtctaggctatttcaccatgctggctctgtctatgatgcaatgattcagctgtgctcataattaggtagcacaagtgttactgacactaccatattccttatcacaactgcctgatgaactctgtcatcataaatactttcagatatttactcaaatttaatac

SEQ ID NO: 75945 - DNA, 405 bp, Glycine max
ggcacaagtgagtttgttgatcgagataactagagacagtgtgatgaaaatgaaggtccttgttttcttcgttgctacaatcttggtagcatggcaatgccatgcgtacgatatgttccctctccgaatgaacactggctatggtgcccgtactccggaggtgaaatgcgcaagttggaggcttgctgtggaagcacacaacatctttggctttgagaccattcctgaagagtgcgttgaagcaacaaaggaatacatccatggcgaacaatatagatcagacttcaaaacagttaaccaacaagcttacttttatgccagagaccttgaagtccattccaaggacacatttgtgttcagtatagattgcaccggactttctaatattccatacttcaaaaaaca

SEQ ID NO: 75946 - DNA, 247 bp, Glycine max
aggcgtgagaacacctcagagaggactacacaggggggatgatgaatatggagacggatatctaaacgccagtgaagtctcacatttttactatgtgtatgactccgaagctgcagcacaagacgcatcccaaagcagagcagtagagacacttaacagatcagaaagtacacattcttgagccgagttgctcatacacatgtattaagagcataaactctatgcagatgattccttgtacaagtgg

SEQ ID NO: 75947 - DNA, 291 bp, Glycine max
  unsure (1)..(291): unsure at all n locations
ggcacaagtgagtttgttgatcgagataactagggacagtgtgatgaaaatgaaggtccttgttttcttcgttgctacaattttggtagcatggcaatgccatgcgtacgatatgttccctctccgaatgaacactggctatggtgcccgtactccggaggtgaaatgcgcaagttggaggcttgctgtggaagcacacaacatctttggctttgagaccattcctgaagagtgcgttgaagcaacanaggaatacatccatggcgaacaatatagatcagactccaaaac

SEQ ID NO: 75948 - DNA, 291 bp, Glycine max
cggggaaggtatagaatcaattgacgcgagcggccattcatggattggcttcatgcccatacactcacactagcgcgccctttgaccgcatactctacatactaccgttttctaacatgctccctaaattctgaccacatgcgaagaagaagcatctccattactgcttcttggcacgagcagctagcgatagttttactattctgcgcgaatcctattactgccgtgaaagctatagctaaaagtacgctaggggagacgctctataggaaaacggctgagagaaagaca

SEQ ID NO: 75949 - DNA, 141 bp, Glycine max
gacgaatgtttcgaccacaaggatactgagtctgcttctgctaactctgcaaaagatgggattcacttttttttttgcaaattatacaatggctatgattctgatggcaggtgttaaagcaaagggagagaaaggtggagt

SEQ ID NO: 75950 - DNA, 379 bp, Glycine max
ggagtgagcaagagtgaagagcgaagagaatggctcccaagggtttaatctttttggctgcgttatgcttctcagcactgtcactgagtcgttgtcttgcggaggataatggacttgttatgaacttctacaaggaatcatgccctcaggctgaagacatcatcaaagaacaagtcaagcttctctacaagcgccacaagaacactgctttctcctggctcagaaacatcttccatgactgtgctgttcagagttgtgatgcttcactgttgctggactccacaagaaggagcttgtctgagaaggaaacagatagaagctttgggttgagaaatttcaggtacattgagaccatcaaagaagctttggaaagggaatg

SEQ ID NO: 75951 - DNA, 297 bp, Glycine max
tttttttttttttgttgagcttcgttcaggtttggattgaaagttttctcctttacttgttcattttgatttggtttttcttgctttgcattttgagcaccccttttgatctggggcgttctggtgtttgtgtggttctctgttttagtgttttctttttggggatttcggagtggaagtgggagtttgggtgatctgggttttgagttgaggtaaggggtttgttggatgcacctattggcttaaatcatttgaagggtttttatgcttagttgcaaagatgcttcctgatcagag

SEQ ID NO: 75952 - DNA, 217 bp, Glycine max
ggggagtggaagtagtagcaagtacgtcgtatatgtggttgatcttttgctggttgtttgttttgttccttccaattgtcagatctgaatcaccggactcactcttcacactcactcacactgaatggcttctgaaggcgaccatcaccaccactcaccaccaccatcaagatcacgatcatcatcatcatgatcatgatcaccatcatcattacga

SEQ ID NO: 75953 - DNA, 228 bp, Glycine max
acgcgtgagacgactcctgagggggctcgtgtattcgaccattggggatagagtataatgctaccagtctacaaatcagcttatgacctcattactcgctggtatgtggaaaacatcccttcattcacaccttgatccgctatctggtaattggtcatttgaacttctgaagctggtatatatgacatatgaccctatcacaaaccaagactttgtggcatataacta

SEQ ID NO: 75954 - DNA, 427 bp, Glycine max
ggcacaagtgagtttgttgatcgagataactagagacagtgtgatgaaaatgaaggtccttgttttcttcgttgctacaattttggtagcatggcaatgccatgcgtacgatatgttccctctccgaatgaacactggctatggtgcccgtactccggaggtgaaatgcgcaagttggaggcttgctgtggaagcacacaacatctttggctttgagaccattcctgaagagtgcgttgaagcaacaaaggaatacatccatggcgaacaatatagatcagactccaaaacagttaaccaacaagcttacttttatgccagagacctcgaagtccatcccaaggacacatttgtgttcagtatagatggcaccgtactctctaatattccatactacataaaacatggatatggggtggagaaattt

SEQ ID NO: 75955 - DNA, 430 bp, Glycine max
ggcacaagtgagtttgttgatcgagataactagagacagtgtgatgaaaatgaaggtccttgttttcttcgttgctacaattttggtagcatggcaatgccatgcgtacgatatgttccctctccgaatgaacactggctatggtgcccgtactccggaggtgaaatgcgcaagttggaggcttgctgtggaagcacacaacatctttggctttgagaccattcctgaagagtgcgttgaagcaacaaaggaatacatccatggcgaacaatatagatcagactccaaaacagttaaccaacaagcttacttttatgccagagacctcgaagtccatcccaaggacacatttgggttcagtataaatggcaccgtactctctaatattccatactacaaaaaacatggatatggggtggagaaatttaac

SEQ ID NO: 75956 - DNA, 390 bp, Glycine max
atattaatcttttattagaagtgcaatgttcaaacatcattctccttcctaggtaactactttttacacttctaccttgaaagcactggagacttggaagttcttcatcctttaaatcactgtataggcaatgcattttacgattttatgctctggttaattgatgtcggttttggacattcttcaaagtaacattagaccttgattgacattttgtattttcaaaatagaaatttatgccatctgttgcatgttcagggcggctgaagtggatatcacgagaggaaactctggagatgtttccactgcagtaaggtcaaaagatgacgtaaagatgttgatgtcacagatgcatgatctctcctttatgcttgagaataatctttcaat

SEQ ID NO: 75957 - DNA, 418 bp, Glycine max
ggctcaagtgagtttgctgatcgagataactagggacagtgtgatgaaaatgaaggtccttgctttcttcgttgctacaattttggtagcatggcaatgccatgcgtacgatatgttccctctccgaatgaacactggctatggtgcccgtactccggaagtgaaatgcgcaagttggaagcttgctgtggaagcacacaacatctttggctttgagaccattcctgaaaagtgcgttgaagcaacaaaagaatacatccatggcgaacaatatagatcagactccaaaacagtttaccaacaagcttacttttatgccagagacctcgaagtccatcccaaggacacatttgtgttcagtatagatggcaccgtactctctaatattccatactacaaaaaacatggatatggggtg

SEQ ID NO: 75958 - DNA, 292 bp, Glycine max
tactacaataccacacaatgtttttcctataatatattaacgcttaattgggcggctcttttaacctaacagggacttcttcaactttcacccacatcttcattcaccattactcatcaaaccgaaaattcttttttaaaacaaccaaaaatatttcttatttcccataaaactttcaaattacaataaacctctcaagctttataaccacttaaacaaatccattattctttcatttaacactaccaggtaagccattaaactaacctacactcacaataatatccccttc

SEQ ID NO: 75959 - DNA, 400 bp, Glycine max
gatgtgcagtgcaactactcatgataagatgaacaaatcaatcaaaattatcacagatccatatggactacaacccattattaatttttggccaaagaaaaggaagaagctgtttaccttgtagctcatacatatttcagtgtagagactagagacagacagatcctgtgtgcacttgttccgatccaacaccatatcgtatttctctgggtactgtttttcttggttattttcaaaactgaagggtgtagaggaaaaaaccatgtcaaacaacaacactactactcaaataaagtatgatatttttgttagctttaggggcaaggacatccgcaacgggtttcttagccatttggttgaggcttttgacatgaaaatatatgcttttgtagatgataag

SEQ ID NO: 75960 - DNA, 354 bp, Glycine max
  unsure (1)..(354): unsure at all n locations
gatgcatggagaaaggtggcacctattgaagagaaacctgaaactccaatcagtttctgcaacgaacaggttccaaactgtatccattttttttttatacatctattttgttgctttaatcatagtgtctactaattttttgctctttggtgatttgttgcacatgtaatatatgcaaagttctctaagcaacataatttcttaatttcgtgtctttctttaatttgattctaactggagttaaagccttctaacatgccttgtgctcttagtcaagatcctttctatatattaatagcatgttttctttataaataaataaaaaacatctaacatgcatatgncttctttttc

SEQ ID NO: 75961 - DNA, 396 bp, Glycine max
ggttctagtgtgtgattgtttgttgttgtgactggttcttcttcttttgttgttctgtgtttgtgtttgttttttctctcacctgaaaatgtcttgctgcggtggtaactgtggttgcggaagctcctgcaagtgcggcaacggctgcggaggctgcaagatgtacccagacttgagctacactgagtcaaccaccaccgagaccttggtcatgggagtggcacctgttaaggctcaatttgagggtgctgaaatgggtgtgcccgctgagaacgatggctgcaaatgtggaccaaactgctcctgcaacccctgcacttgcaagtgaggtgttgggagagcaagcttcaagcagagatagcccttaattaggaataatgattaactattaatgtg

SEQ ID NO: 75962 - DNA, 221 bp, Glycine max
ggtccttaacagcatgccaaaaaaatccgcgcggttcgtttgatccgaacataaccatggtgttccaaagccctcttctgggcctgggtaacccttttcttgacattttcggcggcggcgattaaaacctcttaaaaaaatattatatcaccttcaacaatgcgattcttgccggggaccagcaccagcctatttattaagaattggctgagaaatataat

SEQ ID NO: 75963 - DNA, 181 bp, Glycine max
ggagtccttgccttggaccatattccaaaggggcggggggaaaataatttggaatcctgattaatggcttggcccaaatccttccagcttaaaccttgccttccaagggggggttgttgtccaaaccggaaaaaacctgtcatagaaaaaccctgaggaagcctttttgggtaaagggccc

SEQ ID NO: 75964 - DNA, 221 bp, Glycine max
gggccaaaccattttattttattttgggatcaaaggtgagggccttccatggctttcgcttgtgctttcttttcaattacaagtgttgtcatctgttccccgaggttccggcggaagaatggatcaagcgggtggtttcttaatggaaggaaatttaaggtgtaaaaaggacgagcaacaattggcggacgatctatgggcactacaaagagcgctattgc

SEQ ID NO: 75965 - DNA, 407 bp, Glycine max
ggagcgaagagtgaagagaatggctcccaagggtttaacctttctggctgtgttaatatgcgtttcagcactgtcactgagtccttctgttgcgggggaagggcaaaataatggccttgttatgaacttctacaaggaatcatgccctcaggctgaagacatcatcacagaacaagtcaagcttctctacaagcgccacaagaacactgctttctcctggctcaggaacatcttccatgactgtgctgttcggagttgtgatgcttcactgttgctggactccacaagaaggagcttgtctgagaaggaaacagatagaagctttgggttgagaaatttcaggtacattgagaccatcaaagaagcttttgaaagagaatgccctggggagtgttcatgtgctgata

SEQ ID NO: 75966 - DNA, 146 bp, Glycine max
caacaaataatccttcctctcggccgatttcataaaaaactctgccctcccctacatccattctcaacaacaaaccaatctttcttataaaaaaaatctctcactttttccaacttctacaattccaacactctccatctttccca

SEQ ID NO: 75967 - DNA, 108 bp, Glycine max
gatttccacatacaatggatacccctgcctcggggcacactgcacatcctcctatcgccgctgctttattcattctcaaaatcaaaccaatttttcttagaaaatgat

SEQ ID NO: 75968 - DNA, 222 bp, Glycine max
caccgaagggggtgtcccagtcccattgattagcccttcttttgggaggaggccaaaccttcttttccccgttctttatttaattttaaccaccaacccattttttttaaaaaatggaggggggcttggggccacctgggccatccatcacttccccgcttggccaatgagataaaaaagcttgtgcttctccatggtttgccttaaaagctgaacttgaaa

SEQ ID NO: 75969 - DNA, 71 bp, Glycine max
aggcgttagaacacctccgaaggggccaccgtttaggctaacaaacgaaaaggcaaagggcggggtcccaa

SEQ ID NO: 75970 - DNA, 370 bp, Glycine max
ggcacttcaattgcaatcaaattagttcattcggtttgcgcagttccctacctctcctttcaagatgcagatcttcgtcaagaccctcaccggaaagaccatcacccttgaggtggaaagctctgacaccatcgacaacgtcaaggccaagatccaggacaaggaaggaattcccccggatcagcaacgtctcatcttcgccggaaagcagctcgaggacggccgtaccctcgccgactacaacatccagaaggagtcaacccttcaccttgtccttcgtctccgtggtggcatgcagatcttcgtcaagactctcactgggcaaaccataaccctagaggtcgaaagctctgacaccattgacaacgtc

SEQ ID NO: 75971 - DNA, 319 bp, Glycine max
agggggcacaagtgagttttgtgatcgagataactagagacggtgtgatgaaaatgaaggtccttgttttcttcgttgctacaattttggtagcatggcaatgccatgcgtacgatatgttccctctccgaatgaacactggctattgtgcccgtactccggaggtgaaatgcgcaagttggaggcttgctgtggaagcacacaacatctttggctttgagaccattcctgaagagtgcgttgaagcaacaaaggaatacatccatggcgaacaatgtagatcagactccaaaacagttaaccaacaagcttactttta

SEQ ID NO: 75972 - DNA, 166 bp, Glycine max
ttgtaaaacacctcccaagggggcaccgtataagttaaaaactgaaaagtcaaagggcgggcttccttaacatcaatctaatttttttcaccaaactctctcttcctgtttctgttatttccaaccaggtttaatttcatttccccaaaccctccattttaaattt

SEQ ID NO: 75973 - DNA, 323 bp, Glycine max
gggtgaaagagttgaattgattcattttcatattccacaaccatggcggtcccatcctcttctctcacaaacaacaacattcattcttatatataaacacaacgaacgatacgagggaaaatctcatcgcatctctcattgtatttgcctttgcacatcatcaaccacactcaatctcttgcttcattcccaaacctcttattcccctcaagtatctacaaagctaaccttttttccttttttatcatcacttccaagagttgaaagataaaagccttgactttcttagcttcaaccaaatgcgatccccttcttgaaggata

SEQ ID NO: 75974 - DNA, 76 bp, Glycine max
caaaaaaccgaccagaaaggggttccttttattgtgaacctctatttctaactggcggggttttaaaaactgttgc

SEQ ID NO: 75975 - DNA, 106 bp, Glycine max
cagttggagaaggtgaagacggtgaagaccgagggaaggaaaccggttgctgttcctgccaataaaagaactcgagcaagcaacagcaatggaggtccaatgccac

SEQ ID NO: 75976 - DNA, 435 bp, Glycine max
ggttctagtgtgtgattgtttgttgttgtaactcgttcttcttcttttgttgttctgtgtttgtgtttgttttttctctcacctgaaaatgtcttgctgcggtggtaactgtggttgcggaagctcctgcaagtgcggcaacggctgcggaggctgcaagatgtacccagacttgagctacactgagtcaaccaccaccgagaccttggtcatgggagtggcacctgttaaggctcaatttgagggtgctgaaatgggtgtgcccgctgagaacgatggctgcaaatgtggaccaaactactcctgcaacccctgcacttgcaagtgaggtgttgggagagcaagcttcaagcagagatagcccttaattaggaataatgataaactattaatgtgtagctaaaaacttatgtattatgtctgtgatggttttcg

SEQ ID NO: 75977 - DNA, 66 bp, Glycine max
gggagaagaggtgactacaacaccaaaaaaaatagttcagcttttgggtgagataatccaagctct

SEQ ID NO: 75978 - DNA, 105 bp, Glycine max
gggaggggaggttgctacaacaccaaaaaaaatggggcaactagcgggcggtctaaaggaaccaagcttacttacgcgagcatgcgaaaccatacctgttattta

SEQ ID NO: 75979 - DNA, 188 bp, Glycine max
gcaattaacgggagtgtaaaggtgcataccaaattgcaaaacctaggtgatatgctaccacgccttaatataagcgaatttgatatctaccaaccactgtacgaatagtgcacaaaaccttatgaaaacggattttttgaattatggaacgtttggtgtggaacggggtggataaaactatttatttt

SEQ ID NO: 75980 - DNA, 235 bp, Glycine max
acgtgccatcacttgcctgtctcgggtgcgggttttaatggtggagctcttgttgctagtgaaattaagactccattaaaaatgaaggttgaaggtggaagttattgaatgttgaattattcaacttgaggagttgccaagttggaacttacttttggaagtattcatcttgtgggtgtgattactgagttgacgagtgtccaaattaggttggattggaggcattcaaaattag

SEQ ID NO: 75981 - DNA, 167 bp, Glycine max
gcattttatgagtgctttaacaaatacactaaaggggaaacttggggtgtatttgaagaaattatttcccatattaaacaaatttaatttaacacacactaattatttattttgctatctcattcatcgctaacttgctgcactcacttacctacaaattagaccca

SEQ ID NO: 75982 - DNA, 371 bp, Glycine max
ggtgaacaagagagataaaatgaagttagggacaaaaaaatttgttgattatgtcttataaatagtaacaaaagtagtattgttaaaaacaatattagtagaagtgttaaaattcaaatttaaaaagagcaaatagatacataatattatctctataggctgtacaattgaatctaaatcctaagttcaagacattgattctcacatagtcacgtaaaaacaggccttgttccaaataatcaatttccaggagcatggaaaagtcatcagcatcctctccatgcaaaagcagcaagaggtatagctggcttgcaattgtacattggcaggatacttgttcctctaaatgatggcagaattgcagaattaca

SEQ ID NO: 75983 - DNA, 135 bp, Glycine max
gccgactaaggcgggtaggaacaggttctctacgggcccatccgttatataatggaacgcttcctcattgcgcctattgaccacgggaaatccgcggtggggggtacagtgattgaagttaccggcgcggtgcac

SEQ ID NO: 75984 - DNA, 125 bp, Glycine max
gaagcaagctcggaagctaaaatagccaatgaagcaagcacagctcttcttgttgggtcttctgaacaggaaactgctccttgtcctgaaactgaaatacatttttctgatacatcaggacaact

SEQ ID NO: 75985 - DNA, 132 bp, Glycine max
  unsure (1)..(132): unsure at all n locations
naaaaaacactttttaaaaaaatttttaacaaacaaactacacggaaaaaaactgctctatttcaaaaccatccctctcttaaaaacataaatattcattattctacccctaactaaaataattcataattt

SEQ ID NO: 75986 - DNA, 152 bp, Glycine max
gtatttttaagctgttttaacatatacaaattcggggaatttgggggacttcttgaagcaaatatgtctttcattgctacaattgaagcggatactacaaaactatattgacaagacatctctcattggtaattgatcactcattatgattg

SEQ ID NO: 75987 - DNA, 115 bp, Glycine max
gctgaatgaggaggatagacaaaggctcttaccgtgccaatccgttgggatgtggaatgctaatcggtgctgactataaacgacagattatccgcggtgagtgttacagtgataa

SEQ ID NO: 75988 - DNA, 143 bp, Glycine max
gctgctagaggaggatagacacttgttcttactgtgccataccgttatgatgtggaatgcttatctttgtcgactatagacacactgaatatccgctgctgcggtgataacgatagacgctccagctcctgcacatccgctaa

SEQ ID NO: 75989 - DNA, 406 bp, Glycine max
ggcacaagtgagtttgttgatcgagataactagaaacagtgtgatgaaaatgaaagtccttgttttcttcgttgctacaattttggtagcatggcaatgccatgcgtacgatatgttccctctccgaatgaacactggctatggtgcccgtactccggaagtgaaatgcgcaagttggaagcttgctgtggaagcacacaacatctttggctttgagaccattcctgaagagtgcgttgaagcaacaaaagaatacatccatggcgaacaatatagatcagactccaaaacagttaaccaacaagcttacttttatgccagagacctcgaagtccattccaaggacacatttgtgttcaatataaatggcaccggactctctaatattccatactacaaaaaacat

SEQ ID NO: 75990 - DNA, 58 bp, Glycine max
gcctcagagaggggcctcaaacacgttaataaatgggctgctggggctactttaaaaa

SEQ ID NO: 75991 - DNA, 186 bp, Glycine max
ggagcgggtgcgttcattaacatagacagattgtctgtgcagtgttgtgtgcttgcgtcaattgtgtagccgtatcatgaactttaaatgacgcacgaaggatgatgcattgtgctatggactcatatgggcttgtggcacaacactgaacctgcaaggggccaccatgtgttatgcgtgggggac

SEQ ID NO: 75992 - DNA, 249 bp, Glycine max
aggcgtccgaacacgtcagaaagggctacagaagggggcaacaaacaagttagtgaatgagctgctgggtctgattcacacagctccttgtccattcatctccacctactaatgctactcctacactatcattgtcttgagccctcttgtctcttaaatcctatacacagcgtgtggagtcatacaagactaatcctatttttttgcctctgagagtctgtcgaactgacccatgctgggagaccaaaa

SEQ ID NO: 75993 - DNA, 397 bp, Glycine max
ggcacaagtgaatttgttgatcgagataactagaaacagtgtgatgaaaatgaacgtccttgttttcttcgatgctacaattttggtagcatggcaatgtcatgcgtacgatatgttccctctacgaatgaacactggctatggtgcccgtactccggagatgaaatgcgcaagatggaggcttgctgtggaagcacacaacatctgtggctctgagaccattcctgaagagtgcgttgaagcaacaaaggaatacatgcatggcgaacaatatagatcagactccaaaacaggtaaccaacaagcttacttttatgccagagacctcgaagtccataccgaggacacatttgtgttcagtatagatggcaccgtactctgtaatattccatactac

SEQ ID NO: 75994 - DNA, 198 bp, Glycine max
cggttgtagtgtgacatcgtatggtggatgaactcggacatcatgttttgttgatacatggttgcatatcgattttactattacctaacaatacattgctgccaaacatactgagtgctccaaagctcctgcacctgctatatccggctgatatgcttgcatatgtaccgagacttgagctacactagttcatccaca

SEQ ID NO: 75995 - DNA, 242 bp, Glycine max
caattgagtgatcagtcatggggaaagccgtattcgaatactaaacgcgactcacatcggtggatgatcgtctgatcctatccgaaccttcatctgaggtggatctgttaatcggaaagatcaactacactttgtgccggaccttactatttgatctcattcccacccaacacaacaactccggcgagccctcctgctgcctgaccgagcctgacaagaataagggccccaaatctaaatcc

SEQ ID NO: 75996 - DNA, 216 bp, Glycine max
gggtcactgtggtttctgtcatgggtggtagaaaatctgaatcctcaaaaatctaaacctctctttctggggttttggtcatcacaaacccttttgctggggcataattgtgaaaagggaaaaatggaaaaagatgatgaagatgaaaaatattagtagtagcaacaataataataagacaaatggtctttcttccatcatgaatggaagaagctc

SEQ ID NO: 75997 - DNA, 287 bp, Glycine max
  unsure (1)..(287): unsure at all n locations
ggcacaagtgagtttgttgatcgagatagctagaaacagtgtgatgaatatgaaggtccttgttttcttcgttgctacaattttggtagcatggcaatgccatgcgtacgatatgtgccctctccgaatgaacactggctatggtgcccgtactccggaggtgaaatgcgcaagttggaggcttgctgtggaagcacacaacatctttggctttgagaccattccttaagagtgcgttgaagcaacataggaatacttncatggcgcacaatatagatcagactcca

SEQ ID NO: 75998 - DNA, 262 bp, Glycine max
gaagaaagagaggtaaatgagactggtatgccggtttccatctggtttttgccgggggttttgccaaaattgggttcaactccaatagtcccgcggatttccccttgacctcagattaaattgaaaaaccggccattaaccagttggatggttaagggtcccataattcatttagtaagggaattttaatggaaccggccttgaattcctttattccccaatttgccaattcaacctgttttaccaccaccagatattccaa

SEQ ID NO: 75999 - DNA, 415 bp, Glycine max
gaatgtgcaagagtttgttgtgagctataagctagtttatcgtgaggagaatatgaagttgtttgttttctttgttgctgcagtagttttggtagcatggccatgccatggcgcaggctaccaaaggttccctctccgaatgaaaactggctatggtgagcgttcttcggaggtaaaatgcgcaagttttaggcttgctgtggaagcacacaacatccgagccttttaaaaccattcctgaagagtgcgttgaaccaacaaaggactacattaatggcgaacaatttagatcagactctaaaacagttaaccaacaagctttcttttatgctagtgaacgcgaagtccatcacaacgacatatttatatgcggcatagattacaccgtactctctaatattccatactatgaaaa

SEQ ID NO: 76000 - DNA, 295 bp, Glycine max
ggagcaagagtgaagagcgaagagaatggctcccaagggtttaatctttttggctgtgttatgcttctcagcactgtcactgagtcgttgtcttgcggaggataatggacttgttatgaacttctacaaggaatcatgccctcaggctgaagacatcatcaaagaacaagtcaagcttctctacaagcgccacatgaacactgctttctcctggctcagaaacatcttccatgactgtgctagtcagagttgtgatgcttcactgttgctggactccacaagaaggagcttgtct

SEQ ID NO: 76001 - DNA, 269 bp, Glycine max
ggccaccagaggggggagagcgagagagcggagcgtattgcagaccagagagcggcacgattacacgtccgattcaaagcctctatcacgctcctaatctgcgcataatatcttactcgccttacattgctaacgtctttcattatactgttgttgatcctatttgaggttacagtacaagtgtttgaggatcggacgacccaactgcacaagctgtcactcacacgctggattctgacgatgagactgagtaccatgactatgaacag

SEQ ID NO: 76002 - DNA, 226 bp, Glycine max
gtgagagacaacttttatctgatcctgctgttcaccagaacaaatgttggttttataggaagcgtatcattcatgcaatcaattgatgcacgttcatcacagtgtatcttgatactatttatctgtatctctctggtgctcatgatttatattgggatacgtaagataaaaacactgagaactgtaagaacatattgatttattgggtgggatacccacattatta

SEQ ID NO: 76003 - DNA, 330 bp, Glycine max
gactcttcatttgtgttgtagtaacttgtgatgagcctgaaaagcagtgaaaggaaaattatgagaaggggtttcatgtgtcgctctcaggcttcaacagctgtgtgcatgagtactcgtgaccctcgatctgtagttgtgcctaagaagcttgaaagaagagtgtttcttgatgatacaaggttgatcaactatgccaagtactccaaacttgttgaacctccaaggtctaatccagttccaaagatcaagcttagagggcaagatcaggttcaagccaatgaaccaagggaacttctgaaaacacagacagataataatgtctttcaa

SEQ ID NO: 76004 - DNA, 387 bp, Glycine max
tgctgatggggggacggatgtgggcgtatacggtgattgcataaatgggagtctctgcagagctgaacacgcgctcaaacgatgatactgctaatactcatgatgagctattgcggtcgaccctgtcagcatatgaccatgttgttacctgatctgaagccggagaatgagtgttgccacttataacgacgacgaggacaacgctcaatggccattgaattgtgatgcagtctgactatgtaaagccacctgagacgttgagtgatattgcagggcgtggttaatacgtggcttgagaccttttgcatgtatcttatgggacacaggcaagaatagcagagcattgctgtaagtgcttatattaccagatgcggaaaacagcccttt

SEQ ID NO: 76005 - DNA, 399 bp, Glycine max
gtgaaaacaccacaaagggggtggggatgaaaactaatcttacaacacgtgggtgaggcggaatgtaaccaccggattaataataactttcatttgcaactatgtgattgtaattgaactgacactccatacatatatattaaattatacgcccatataccttcgattaataaatctttcattaacatcttttttgggtgatccaatagagactcttttccatggataataagctgtgaacccttcatgggcttcttataactataacaagtactatctttcttatctaacatccttctaagataggaaagatcgcatttttgcggtcagatctgatgcaacaactggaaacaatcactttctaaaaacaggatcttataaacatgaattgttcattac

SEQ ID NO: 76006 - DNA, 387 bp, Glycine max
gtgagaaaatatagggaaaagaaaggtgtttgatgtaaagctaaacaaggaagatatatggaaaagattaataggtgagaaataaagtgaaaataactagtgggtctcttgccttttttatttcccacctatttcttattggcttaatgtcacttttggtctactatatttcagagttgttttgctttggtacatcaagttttaaaagtttcattctaatcatttttgttttcgaaatatatcgttttggttcttttttcaatttttcgttagaaacgttagtgttctggtaacctttaaattttaaaaaaggaccaaaatgatacattttgaaaacataaaaggacgaaaatgaaacttttaaaacttaatgtatcaaagtgaaac

SEQ ID NO: 76007 - DNA, 291 bp, Glycine max
cacccctccgagcggatgaaactttacgacagaaagaggaatgatgcagaataaatactctccattaatatgtaattggataggaatctcatgcacaagatgacatcaactactggcaggagaaaagaatggccaaagacgcaaaagtatgagcttgaactgttcatgcacatacaccacggatattgaacaaccgacctatactgttgattatcggatcctgcaacaatggtaaacgcacgctattatcgctagagacctgtgatgactcatatgatgctgaagcatcta

SEQ ID NO: 76008 - DNA, 363 bp, Glycine max
ggttagggagcccgtggagcaattacctatggaagaggatgaaatattatccccacgggaggaggaagaatcaattgatgaggttggtagttggtacttaacagttatcggtcttgtttggtttcattttatctcttcttcgtgtcatgccaatttccttcattttctttattatgctcgctttgatttctgattttgcacatcttgaattgggttcatacatgtatacttgtcaacatttgtattcattgttaaccatgtggaataacattgtgtgatccatgtagccggtcttacctagtgggataaggttttgttgtatagaagtgtgaaagttctaaatacacaagatagagaatttga

SEQ ID NO: 76009 - DNA, 243 bp, Glycine max
cccggcatcctaatttcactttgtttgagggttccttttttccttggtcactttttaccatgatgtttaacatgggggttgctttcaattctcatagttgatccaaaaggttacttgaaagtgtgtctcttttttttttttttaaactttctatttttgagctgaggatgatggagtgtgggagaaagaaggagaatcaaaatcccaactccactttccctgatgaggtgttggagcgaattt

SEQ ID NO: 76010 - DNA, 192 bp, Glycine max
ggaggagggaatgggggtactcacaatccggagacatcttttcttactccatcgaagccggtgatttggattacacacatttttgtatttgacagctccacactaacatataatggtaacattacattcatcagaacggctgcattactgataaaagaagccatacaagccatcagtgggggccatgaatac

SEQ ID NO: 76011 - DNA, 275 bp, Glycine max
ggatctaaggataacgttagaaaaatagacaggtattgttagtcatatgatagaaattgcactatgatagttgtatttgtattatgacttcaaaaataccaaaataagtcatggtggtatttatttcatgaagttttgctgaagtaaattccagggtacaagtgttaactgttaactagagatacctgaaggctgatgctcaaaaaggcaaatatattcatttttttaattttttcataaaattatattttacagctcaacaaaattaaatatca

SEQ ID NO: 76012 - DNA, 104 bp, Glycine max
ttattttttagctgtgtgacatgtaacacccggcggactcaaacttacctttgaatctctcactttatctgagattcattatattgctcgtggacataaatgtt

SEQ ID NO: 76013 - DNA, 280 bp, Glycine max
tttggctttatacgaagatacaacatcctttcgtttcgctgaatatcaatatgtggggatcctaatccttactttagcaatactaatcttcctttttctggactctgttcaacgctacactactaatatccatacatacacatatgataatatcatgctatactagccattccttgctaataaattatatatcactgtatatttctagctttattctattaacttcaatcctatcttatttactttatattaaaattgcaacctatactaatacttatac

SEQ ID NO: 76014 - DNA, 392 bp, Glycine max
ggagcagacaaagactatatctaaattcatctggtaggagacaaggtagtgaaattgttatttttgtctacctggagtccatatagcaagaagatatttgcctggatcatcaggctctcgtgtgtcccactgtaatgcacaaataattaataaaagatgaacatacagggtaaagcatagctttgattaatagatacatcaatttactaaccccttgtagaagaggatgcgtatctgggagttcataactgtacaagagtaaacacaatcaacataaattgttagaaatttcccctacgttagcatggtggttgtgatgtctgctaaactctctggttttattacatgcaagattcttttacactcatatttgaatattggtggatttataa

SEQ ID NO: 76015 - DNA, 177 bp, Glycine max
cgggaagaggagtggggcacaatcagatcgagattgaagtctgcacttctcgcaactgcaaatactatgactctttctctcactgtgatggatccttcatcagacgaacaagcaaacatacaaacacacataagatgaatttcctgatgcgctccaccacacacgtctactccgaca

SEQ ID NO: 76016 - DNA, 164 bp, Glycine max
gggctttcatttgatttgatccaaggccaatcctctataataacaacgagaagtgatacaaacaataaatgatgagttcgatagtctcataagatttagctttcattaactgacacatatattgtattaaattaaaaagcctcaatgttgtgaagatatactta

SEQ ID NO: 76017 - DNA, 96 bp, Glycine max
gaagacaggagagagagaagctgcgcaccttgtcatactagtgctgattgctgaaactgccatcgatcgccatttgcacaaagatcccaacaacac

SEQ ID NO: 76018 - DNA, 76 bp, Glycine max
  unsure (1)..(76): unsure at all n locations
ggttcaagcagcaagcaatggagggaagagagagcaaatcttctctcacctcacaaacggaacctngcgacaaccc

SEQ ID NO: 76019 - DNA, 107 bp, Glycine max
aaacaacagaaaggggagctttattctaaaaaaacaacatcaaaatgccggaggtcttaagcaccataattgcgcaaggagcaatcacctttattctaatttttcta

SEQ ID NO: 76020 - DNA, 374 bp, Glycine max
ggagcaagagtgaagagcgaagagaatggctcccaagggtttaatctttttggctgtgttatgcttctcagcactgtcactgagtcgttgtcttgcggaggataatggacttgttatgaacttctacaaggaatcatgccctcaggctgaagacatcatcaaagaacaagtcaagcttctctacaagcgccacaagaacacttgtttctcctggctcagaaacatcttccatgactgtgctgttcagagttgtgatgcttcacttgtgctggactccacaagaaggagcttgtctgagaaggaaacagatagaagctttgggttgagaaatttcaggtacattgagaccatcaaagaagctttggaaagggaat

SEQ ID NO: 76021 - DNA, 173 bp, Glycine max
tggggatttttttctccaacacaatactaaacactcggtttgttgcctctctaatcaatacttcctaaaacaccctccaacctccacctctgattccatgtttaattcccaaaaaaatacattcaatgatcctatatctgcacaacatctctcttatacaaaaaaaatttacc

SEQ ID NO: 76022 - DNA, 392 bp, Glycine max
ggaaacgaaagagaatggagaacagggtaatattacaggaatggtttgaccgcgttgactcggagaaaagtggaagcataacagcggtacagctgaagactgctcttgctgtgggcaacctggaatttccgctctcagttgttcagcaaatgatcaggatgtacgatttcgacaggaatggtactatgagctttcaaagtatctctaactaacctattatccaattcaaccattttgtctatcactctctctggttctaaccctaaactctcaaaatttgttgcactcaacaacttctttcttaaggttcaacatgcattttctgatctagagagattaactaaatgatggacgaccttttggaaagaaactaataatatgaaggctcataa

SEQ ID NO: 76023 - DNA, 85 bp, Glycine max
  unsure (1)..(85): unsure at all n locations
ggtggactaactagcgaaagaaaaatagaactaggaaaattcttaaaagaaaaaggtggaacttactatatatgatgatgatgna

SEQ ID NO: 76024 - DNA, 259 bp, Glycine max
ggtttttgagactgtgagcacttagcagagaggaagaaagatgatcatccctgttcgttgtttcacctgcggaaaggtctcttcgcatcccaaatactctgattcttcctcttttcactttatttcgtaaattaaaaacaaaaaatgtctggactttatgtgtgattaaggtttacggtttacggttttggttaattaatgatcaatgtgacttcttttctccgatttaggtcattggaaacaaatgggatacctattt

SEQ ID NO: 76025 - DNA, 107 bp, Glycine max
gacacacagcaagccaattactctctgctcgctgatggctgaaatagtgatactggcatatgaaattttgctcccaaaattttgattttttgtatttagggaaaaat

SEQ ID NO: 76026 - DNA, 385 bp, Glycine max
ggttctagtgtgtgattgtttgttgttgtaactcggtcttcttcttttgttgttctgcgtttgtgtttgttttttctctcacctgaaaatgtcttgctgcggtggtaactgtggttgcggaagctcctgcaagtgcggcaacggctgcggaggctgcaagatgtacccagacttgagctacactgagtcaaccaccaccgagaccttggtcatgggagtggcacctgttaaggctcaatttgagggtgctgaaatgggtgtgcccgctgagaacgatggctgcaaatgtggaccaaactgctcctgcaacccctgcacttgcaagtgaggtgttgggagagcaagcttcaagcagagatagcccttaattaggaataatgataaa

SEQ ID NO: 76027 - DNA, 327 bp, Glycine max
  unsure (1)..(327): unsure at all n locations
ggttctagtgtgtgattgtttgttgttgtaactcgttcttcttcttttgttgntctgngtttgtgtttgttttttctctcacctgaaaatgtcttgctgcggtggtaactgtggttgcggaagctcctgcaagtgcggcaacggctgcggaggctgcaagatgtacccagacttgagctacactgagtcaaccaccaccgagaccttggtcatgggagtggcacctgttaaggctcaatttgagggtgctgaaatgggtgtgcccgctgagaacgatggctgcaaatgtggaccaaactgctcctgcaacccctgcacttgcaagtg

SEQ ID NO: 76028 - DNA, 338 bp, Glycine max
ggagtgagcaagagtgaagagcgaagagaatggctcccaagggtttaatctttttggctgtgttatgcttctcagtactgtcactgagtcgttgtcttgcggaggataatggacttgttatgaacttctacaaggaatcatgccctcaggctgaagacatcatcaaagaacaagtcaagcttctctacaagcgccacaagaacactgctttctcctggctcagaaacatcttccatgactgtgctgttcagagttgtgatgcttcactgttgctggacttccacagaaggagcttgtctgagaaggaaacagatagaagctttgggttgagaaatttc

SEQ ID NO: 76029 - DNA, 404 bp, Glycine max
ggatcgcagtgggtatagtagatgaagggaaagggacagcagccagcttcgggactcacggaaccttctaggctatatataaaaaaaaatattgcacgctccttcgggctcctggcatttcaaattcaaggcctctttccaatcttcaaagcagctactgcggcagctccattttccaattgaagttagcagagcaggttgcagtggaattcttagagacagtactttaaattgcagaactttgggggacctatcatggcctctgcttgatttggcatgaagccatctgtgtgtgaaggggacatgatggatgattcccaaaagcatagaatcctgatggtctcagattttttctatcccaactttggaggtgtggagaatcacatatattatctctcacagtg

SEQ ID NO: 76030 - DNA, 293 bp, Glycine max
acgcgtccgaacacgtgcgaaaaaacaacttaagatgatcactctttgactactaggcaataggcttgagtgggaaacctaactcgatataaggacccaccatctcccttggtttggattgttattccataaaattgaatctggtgttttacccacaccaacggaggaattaaaatatacacttgatatgttccctgcacattccttattacacataatttaatttcataaaaggctgttcgatattaagcatattttatgataaacattttgcactgtctacgatgctcacg

SEQ ID NO: 76031 - DNA, 408 bp, Glycine max
ggtgcacaagtgagtttgttgatcgagataactagaaacagtgtgatgaaaatgaaggtccttgttttcttcgttgctacaattttggtagcatggcaatgccatgcgtacgatatgttccctctccgaatgaacactggctatggtgcccgtactccggaggtgaaatgcgcaagttggaggcttgctgtggaagcacacaacatctttggctttgagaccattcctgaagagtgcgttgaagcaacaaaggaatacatccatggcgaacaatatagatcagactccaaaacagttaaccaacaagcttacttttatgccagagacctcgaagtccatcccaaggacacatttgtgttcagtatagatggcaccgtactctctaatattccatactacaaaaaacat

SEQ ID NO: 76032 - DNA, 190 bp, Glycine max
ggagaaattcaggggtacgggatattccacatcgaatgggctttgttagatgtgtttagaccagattcaattgtttggagcaaatgctcagaatggtgatggcttattgtccttaggccaacatctgtatgcccaaatgatcttggatcatacttcatgaaattttttgtgaccttatgcaacatttctt

SEQ ID NO: 76033 - DNA, 204 bp, Glycine max
cgacgggggtgtcgagttcacttaacatatacgagattctggtgtgttgtgtgtgcgtactctctgtttaatttgtgtttgttcgttgcttcgaaactttacagttgaacagagtaatgatgactgaagtcctgcctatgtgtcgcgattgagtgcttcgtgtgcacatggcttgtcggttagaagctgcggccccactggctg

SEQ ID NO: 76034 - DNA, 271 bp, Glycine max
cacgggggtacatcgacggactataagaggggccatattatttttcagaacgcggctctataattgatttgtcaccctcttctaacggacgaaacaggtttccatcctacaatgtcgagttcataactctgaatgcactcttgctggactcaaacttgacggactggcggcatttcattcataaactcactcaggactaacatagactattgttaaattacacatctaaacaccaatggaatataactgcacagaggacatgaaacataca

SEQ ID NO: 76035 - DNA, 415 bp, Glycine max
caccgtgaggcgaagatgttcgctaaccctaaccctaacccctctttggatagtggtggcattttctctgagataggaaacttcaccagcctcatcaatttaaacaacaacgaagcgtttgggtttgggaacaataaaaataacaacagcatcctcgatgcgacgtcgtttcgtttcggtattagtgttactaatcaggtgcaggcggcagcaggtggaggccatggtcagtggcagcagcagaatcatcaggagttcggtacggcgtcgtttctcgatcacactgtgccgcttgagttttcttcgctgcagcataagactgggcatcagggagggtttggatcgttggattggcaacccggtgcggatcaaggtttgtttgatcttcctaacaccggtgatcagccttactgga

SEQ ID NO: 76036 - DNA, 286 bp, Glycine max
caatatcacacataattaatggcaaagtcactcctattgctatagcagtatgatgggtgacactgagatcaaaccatcagttgaagtaatcatatgttcttccatgaacactaacaatagcgcaaacaaccacacccttccaacctacatcacctagtcatcacaatcacacttaccaatcttgatcaagctacatgctggatactttatcaaatgcctttccttttatgcacaaaatttgcatatggaactataggcattgctctgaatttgcaatccaaaaatg

SEQ ID NO: 76037 - DNA, 426 bp, Glycine max
accggttgcaaaagaccaccggaaggggacacacattggtcctagtagtgcctacagactcgatatgatacgccacttgtgagactgtagccttatcactcgcgtgcgacctgcagcaccacagctagctcaagggcgtatccccaacgatcataatgtacggtcactgtgctctaaccatacgctggcacgggtacatgatgatctaaaggcgtcacagcactgaatcagagagctcgactctgataacggtagatgacatgcacgctaaccagcactatgctgtagaagatacagtcgctatcgtgaaacttgaggatattgaggcctccaatgacaactgtgacgatgcttatgatgaaccaactgactgcctcatcattgatatagctcaggatggaccgttcagactccttactgaaaatg

SEQ ID NO: 76038 - DNA, 277 bp, Glycine max
caaaaaaccccactaggggacacacaaatcgcctaattatctccagaggctatatcttatatgcggcgtgtgaagtcctatgccctaacttacaatgctacactttatacaccaattggtaagccaatggcctcatgtgaatcttctactacagtacctactccagccatgaaccctcattatactccaatcctacctatgccttatccatacatgccttgtgctcaaaattttgcttttccacatcggattcaagttcctttaaatcccaaaccta

SEQ ID NO: 76039 - DNA, 143 bp, Glycine max
ggcaaaagttagtagtagtgaagaaaatgaaagtcctggttttctttgttgctatagttctagcagcatggcattgccatggctcagaccatgaccatgaccatggccacacctaccaaattttccctctgagaatgaaaact

SEQ ID NO: 76040 - DNA, 323 bp, Glycine max
ggttctagtgtgtgattgtttgttgttgtaactcgctcttcttcttttgttgttctgtgtttgtgtttgctttttctctcacctgaaaatgtcttgctgcggtggtaactgtggttgcggaagctcctgcaagtgcggcaacggctgcggaggctgcaagatgtacccatacttgagctacactgagtcaaccaccaccgagaccttggtcatgggagtggcacctgttaaggctcaatttgagggtgctgaaatgggggtgcccgctgagaacgatggcttgcaatgtgggaccaaactgctcctgcaacccctggacttgc

SEQ ID NO: 76041 - DNA, 118 bp, Glycine max
gtggcaagggacatgatggaggaccttagggatcctctgaaagaaaacacggtgcctgtatgggctgttactttatatgcggttcttatgccaatgggcgttttccttctcttgtata

SEQ ID NO: 76042 - DNA, 95 bp, Glycine max
tgggatagcagcatggtacaaagcattggattcaataacttaagttcattccttgtgttttgctttctttctcaaaaccaaacatgtctaacaca

SEQ ID NO: 76043 - DNA, 337 bp, Glycine max
agaagaccacacaaagggacatacatagagtcttcaatctttacccagataaatacataaaaatggttactcttccaattggcattaggaaaaattgtctaacatactttcagtatgaataagtaagggacacaccaagcgaaacatgaaacattcttctgataatcttcactttggttgcagcaatgacatttcaagctgcagtgaatcctcctgttggattttgacaagacgataacgatggacacgtctcatgaagagcaatctatgcttcagatacacattcttactatgtcttcctcatattcaatactttggcattttctaatcccatatt

SEQ ID NO: 76044 - DNA, 314 bp, Glycine max
ggaacaaaacaagtgtttcgaatagattatcctaagtctttgggaatagtgctgcaatggcttcaagtcaggaggaggtgacccttttgggagctactggaagcccatttgtgtgcagggttcatattgccctcaagttgaagggagttcaatacaaatatgtcgaagaaaatttgaggaacaagagtgaactgcttctcaaatccaacccagttcacaagaaggttccagtgtttattcacaatgagaagcccatagcagagtctcttgtgattgttgaatacattgatgagacatggaagaacaaccccatc

SEQ ID NO: 76045 - DNA, 383 bp, Glycine max
gtggtcaatgagtgaaaaaaagaaagaaagaggtgaggtagaataactaccaaaagtaattagtcaaagtgtcaaaccataattctattttacctgttaatgctacgacttatgggataagagataatgggggcagaaatctttttctatttcagtttttttaatattaattagtacaataatgttgtgaatagaaagcagtactgctataaatttaaattaatgttagtacagttttgaaataagaaagtcgcacctatatcatttagttgacttcaaacgaattttgaatattccaaacaactgcttgtgcttttatcttttttcaatttcatgattgatacattatcaataatttacgtccgtgtttctacttttcaatc

SEQ ID NO: 76046 - DNA, 242 bp, Glycine max
ttattaccatttcctcgacctctttcgacaccatactgatacacacttaataatattatattataaattatccaccaaattacactaacccctttatatatacaacttaatatctttattttatcaatattaaattaaaatcatttgcaaccaatacctctttacatatttcattacaaatattaatttccaccgattatatatacttatccaaaatattcatcatcttaaattcttctttt

SEQ ID NO: 76047 - DNA, 361 bp, Glycine max
ggctcagataggccattgattggacagagcttggctctttgtgaggaggataaaaccactgtggtgaatgagtgctgcgataagtacagcattgcagtaccacgtgtactataaatactctataaacatgaacactggatatatcaccctgaatggtctgctgaattgatacttgatccagtttacttggttaacgatgcacatgtaaagttcctagatcatttcaatagattaacttgtgaacacgagagagatctagattagctatcgacatagatgactcttcgagacaaatctccagcagtgttacttgaactcatgatatctagatcatcatggcttgacaaatttatgcacaagc

SEQ ID NO: 76048 - DNA, 96 bp, Glycine max
ttggggtttagagaagccattgattgtacggggctatcctctttgtgaagaagttataaccaaagttattaatgaatgctgtattaagtacagtat

SEQ ID NO: 76049 - DNA, 425 bp, Glycine max
ggcacaagtgagtttgttgatcgagataactaggaacagtgtgatgaaaatgaaggtccttgttttcttcgttgctacaattttggtagcatggcaatgccatgcgtacgatatgttccctctccgaatgaacactggctatggtgcccgtactccggaggtgaaatgcgcaagttggaggcttgctgtggaagcacacaacatctttggctttgagaccatttctgaagagtgcgttgaagcaacaaaggaatacatccatggcgaacaatatagatcagactccaaaacagttaaccaacaagcttacttttatgccagagaccttgaagtccattccaaggacacatttgtgttcagtatatatggcaccgtactttttaatattccatacttcaaaaaacatggatattgggtggagaaat

SEQ ID NO: 76050 - DNA, 222 bp, Glycine max
ggcagtcgcgtctgataataaacatacacaatcgcctctctcttctagccctagggcgctcttactgattttctctcttccgattgagagaattgtgaacatgttactgcaagctactgacaaactcattaagcactggaaagttgtcagatgtaataatgttatgataataaggtgcaaagataacggctagactgggactattaaccgtgtcattcgctc

SEQ ID NO: 76051 - DNA, 407 bp, Glycine max
ggtgcacaagtgagtttgttgatcgagataactagaaacagtgtgatgaaaatgaaggtccttgttttcttcgttgctacaattttggtagcatggcaatgccatgcgtacgatatgttccctctccgaatgaacactggctatggtgcccgtactccggaggtgaaatgcgcaagttggaggcttgctgtggaagcacacaacatctttggctttgagaccattcctgaagagtgcgttgaagcaacaaaggaatacatccatggcgaacaatatagatcagactccaaaacagttaaccaacaagcttacttttatgccagagaccttcaagtccattccaaggacacatttgggttcagtatagatggcaccgtactctctaataattcatactacaaaaaaca

SEQ ID NO: 76052 - DNA, 288 bp, Glycine max
ggtacaccgaatcgaaggaaccaaccgtcattgagataattatttctgacacaattgtgtgtctattcatgcttcggatggcaatgttgtggcatttctatcacataatcaatgagtatagaactcgatgcttactcaatgctgtgcgtatggatgcacttcaatgcatgggctgtatgagcagattaccttactatccgagtgtgacaatcatgttacaggtgatgcacctatcaaatcgagccattcagactgcttgcatcgtcaagaatcatggaatcatcatga

SEQ ID NO: 76053 - DNA, 426 bp, Glycine max
gggggcctgaacaatgctgtcaatagtccagtcaggcctggcgcttacttgggatctggaagtgggacttttggtgtttcaattggaaatgctggcaccaattggggtccatcagttccaacccagggtggaggggctgcctctgggtatagtacttggggctcttatgaaggtggagataacagcattggtttaggaggtggagggtatggaaggaacagcagcccaagtgtgcctcaatcctcaacatttactgcaccaactggtgattatgaaggatcctatggggacttgtaccgcaatggttcagtttacagtgactcaactttgcggtctgctgcttctgagatagatgcttctggttcgtttggttatggtggacttggtggtatagcttcagatgatctagttaagagttctgagggt

SEQ ID NO: 76054 - DNA, 288 bp, Glycine max
ggttcaccggatcgaaggatctaacagtgagagggatagttttttctaacaacgggtcgcgtaaattggtgcttcagaggagaaggctgtactattccatatggttattcaatgagtattggactcgactctttatcatggaggtgcctatgtatggtctgcaggatatcggattcattggcagagctagattacggactgtctgatacaatcatatatccccttatgagctatgtcaaaccgagctattcaggctgcatgcatggtcaaggttctgggcaatgattt

SEQ ID NO: 76055 - DNA, 160 bp, Glycine max
gcttcaccgaatccaaggatctaacagtgatagggataattttttctacctacagtattcgtaaattggtgcttcggatgagaatgctgacacattcccatatgttacatcaacgattataggactccatgcttaatcatacatcagcctatgtattctc

SEQ ID NO: 76056 - DNA, 385 bp, Glycine max
ccccaagagaatgagatataaaattcctagaaggaaaagggaaaggaactgagagagtaaagacaaaaatggaatccacacacgtaatagccattacaaatggagaagagaatatgattcgttcatcaaaagagaataaaacattccaatttcaacttccacccattatttcccatcttgggaaaaatgaagtccactgtgtctccattacttcttccaatcccagacacaagcaggtgcaaagtggtggccatgacacgaggaagataatccactgcatcaaaatgggaatctccttggttttggtttcactcctatacctcttgaaccctctctttaagcaagttggagaaaatgcaatgtgggctatcatgacagttgtagt

SEQ ID NO: 76057 - DNA, 215 bp, Glycine max
gctactgagaatgaattatgatggaagtgaatcgggaagttagtaaggctgaaactgtttgcatgatgatggggatgatcacgatgaactacatgcaggcactgatgcgaatgaggatcaggcctaagatgatgatgaagatgcttacactgaggtggaccaggttgaagctgcattggatgaccatgctactgctggggcttcattacatgatg

SEQ ID NO: 76058 - DNA, 180 bp, Glycine max
gaggacatccgacagtgacgaatccctgatctactttggcggcgctcaattattagaacggctgacactagtgccatctcgaattcgaccataatgattacactcacacatacatgcacgcgtctgggcataatccacgaacgaattgcatgcactaaggtgaaatgcgatagagccaag

SEQ ID NO: 76059 - DNA, 359 bp, Glycine max
gcttcaaaaatccattcctaatcaaacggaacggtaaaattatgtgtggaaaggggaaccaaaatcctaaccaccatggccaccattaaaggttcttaacctttttcccccgttgcatattattgttaacaatttcctaaagcctttttaagtttggggaattaccaagatgctattggatttaaccttgcttattataattcctcttaaaagaatcctattcataaaacctattccccaaactattgttaagaacttcttaatggccttgacaaagtacctaactatgaatttttcaaggttgttaatttttgaccccttattcctgttaaccgtataccattttttggcaaactagg

SEQ ID NO: 76060 - DNA, 69 bp, Glycine max
gcttcaccgattcaaatgatctaacagtgattgggataattatttctataaacttgattctataaattt

SEQ ID NO: 76061 - DNA, 90 bp, Glycine max
gaattctccgggtcgacctacgcgttcgaacatttgttacacgaccatacaacggcctacctattctgtagtgtcacctaacttcaatgg

SEQ ID NO: 76062 - DNA, 300 bp, Glycine max
aggaccacagaaattgactactaatctctggagatcggcgagatagtgtgactaacatggctcacacgacagtcatctatagtcgacacataaatgcttctcaagccttttatacctgctcgagactattctgagcatattattaaagcctactcactgaggtggacttactagttgccaactgggttaatcttgcctcatatgagtgctcatcagaggaagctgatcagatgaccttatgctctcacgtatggatcatatcttgctgaggactctgtccatgaacttacttaatatttt

SEQ ID NO: 76063 - DNA, 268 bp, Glycine max
ggacccaaaaggttgtcacgaataaggcgatggggttctatgatggggacccgataacaggtaacataaccaattggaccacaccttaatctaggcttgctgatgacacgactaacattatgcctcctactggttgatacttgagcatcaacaaatacactttaatgctcaataactgatttcttgatccgaatctacgagagcagctacattcataggtcacacatatatcatgaaaccgatgaaccaatggattacatgactgaat

SEQ ID NO: 76064 - DNA, 130 bp, Glycine max
cattgggaaatatattgggtatgggaattttgtttatggggctggatacaaaacacatcaaatcaacttcataactataactgagtacagatactctaaatttactagcctacttatattcttccccaac

SEQ ID NO: 76065 - DNA, 359 bp, Glycine max
gaaacgaagcctgttaatttcttcctacttggcaaactataggaagagccacacggtatcttataccataggtcaccatgatccttccattaaacgttgctatagaccgatccaaatgcatatgatatacactttcatgaatggctagctttatatactgaacctcatgccccgatgacaaacttttaagacacatacatatttgctggatttctcggcatagaccagatagagcatgtaattccaaattaacccataataacacttccgcttgctcaccatacatatattattgacgacggagatgccaatatccaagccttatctaacggataatatggtgaaagcttcaactggtc

SEQ ID NO: 76066 - DNA, 393 bp, Glycine max
ggttctagtgtgtgattgtttgttgttgtaactcgttcttcttcttttgttgttctgtgtttgtgtttgttttttctctcacctgaaaatgtcttgctgcggtggtaactgtggttgcggaagctcctgcaagtgcggcaacggctgcggaggctgcaagatgtacccagacttgagctacactgagtcaaccaccaccgagaccttggtcatgggagtggcacctgttaaggctcaatttgagggtgctgaaatgggtgtgcccgctgagaacgatggctgcaaatgtggaccaaactgctcctgcaacccctgcacttgcaagtgaggtgttgggagagcaagcttcaagcagagatagcccttaattaggaataatgataaactattaat

SEQ ID NO: 76067 - DNA, 370 bp, Glycine max
ggttctagtgtgtgattgtgggttgttgtaactcgttcttcttcttttgttgttctgtgtttgtgtttgttttttctctcacctgaaaatgtcttgctgcggtggtaactgtggttgcggaagctcctgcaagtgcggcaacggctgcggaggctgcaagatgtacccagacttgagctacactgagtcaaccaccaccgagaccttggtcatgggagtggcacctgttaaggctcaatttgagggtgctgaaatgggtgtgcccgctgagaacgatggctgcaaatgtggaccaaactgctcctgcaacccctgcacttgcaagtgaggtgttgggagagcaagcttcaagcagagatagcccttaatt

SEQ ID NO: 76068 - DNA, 338 bp, Glycine max
atggcgattaacatcattcacgacacgggtattaatagggcgcatttgtgccagaaaatccttaaggtctacattcgttgtgttgttcttaaaagggtatctttcgttggacactatttccgctttatttgtaacatactttttgtttgctccgtctccggaaggccatctcagtaccggaaactacctgttcgacacccctcttcttcgccgtcgtactacgctgactacgacttcttttccgctacaactaccactggcggttattacttctattccgatattttgaaccttaatatcagcttgtagtcttattgccatattttaaaaactacttt

SEQ ID NO: 76069 - DNA, 268 bp, Glycine max
gaaggtttaatattttattttatggtgtactaacccagtctttgtttaatgttgtacggggtttcctttcctaatatcattcacataaaaaaacatattctgcagatataactcctaaattcagaaactacttcaaaatccgtaaccattactaacccttcacaatatacacactcttcacctacactaagacaaccaccacccataccttggtcattgctaattcacacatataagctcaaatctgagatacctaaaatctttttat

SEQ ID NO: 76070 - DNA, 352 bp, Glycine max
ttctctaaaacagttcctttattactatcatggaactggggaagcgtcctttatattctgtattttccacaaagcctactcaagtttcctctgtggaaaacctctatgaatctatttgctcagcacctttactcgacacattacgcctcacacaatagcagagcctcaaaaagctaagatttatcattactatgtacctgtctttctctgctgtgaacagcacattactgaacatcattgccatttcatacattgacaatatataccttctttagtgattggttatacagctcctcaaagctgacataagacaacccttgtctttgctcttgactatcatttcgaaaccatt

SEQ ID NO: 76071 - DNA, 433 bp, Glycine max
  unsure (1)..(433): unsure at all n locations
gtaagaagaataangaataangaagaaggagcgacggaaaaaagacctcggtgagattgtctatccgaggagcgtccagaggaangagagaatgangaataatacnagatnnagcgatggagatatcctcgaagaagaagaagaagaaagaagggtggaagggagaaagntgaagtgaaagagaaaaaagggtgaagaaacaatggtggctttctggaattatgagcanctgagtcatttgnnaatctctcggattggtctgannacctacttataaagccattatggatatngggattccaccacatgaaactcagattcaagcgaagggcaattccaccgcttttgaattggaaaaagatgnttcttggtgctgcaaggactggttctgggaaaactcttgccttcttaattcctgctgtggagctgttgt

SEQ ID NO: 76072 - DNA, 219 bp, Glycine max
gatcatggcggcagcttgttgtctctgcatcaaagcggtctatctgccgatccggggacttcgcctcacccgacgcttttaccaaactacaaaacagccatccagctaaatccgtggcacaacgcgtactacatgttcatccaccacaacttacctatgaaccccaactactgcatgcgcagctctttttctgcaccgatcgcatgtgttaacctactt

SEQ ID NO: 76073 - DNA, 227 bp, Glycine max
caagaccgatgatatttacatttaccaaagaatactttggacttatatttatatcgtaaaaaaataaatatagataataaaaatttaaacttttataaatattgttcgtacaagcagattggtattttgttgagccgacgagatgaaatctaatacgtctcagggggtcgtggttacctattaataagctatgatggtcgaaaagtttgaattagcgatgcgtgatt

SEQ ID NO: 76074 - DNA, 428 bp, Glycine max
tacccaatcgagccacacattctaattctatcgaacgttttattaattttttttctatttctttttttcgacattaatacgggacctttatcatgaatgctactactattacattaagaaataattcttcattctcataaagattaaactttaagtccatattttgccctattatccatccaatttcaacacaaaatgttatcttcttaacgaaaatgtaaacttgaactaaattaaatacttttctttattattaggaacttattaattaaaaaatcatattactttccattaattctttattaatccatcaactactacttaaatgaataaatttcaaaaattctatgatttcattatttaattttaatcctactattatcttatatatcccactaaaatattttttttttcttattttttaccaa

SEQ ID NO: 76075 - DNA, 351 bp, Glycine max
gatcacaggccagggaacttctaacacatacactactctctctctctattttattgtatggccggcaattccagaatccgaagcatcaccttcttatggaaacaagtccccaaccgtatctggacttacaacgctcctcctctcacttcaatgacgggagcatacattagcggctgcatgtacgacaagaaccctgacgatgagatccactcgtgcgcacgtgcccgacgatgtgatccaggcagatacacagtccggctaatactgggccacacatccacagactgaggtatctgagccctccggatgatgtgaacaaactgcttgcgacattcactcttgtgcgctata

SEQ ID NO: 76076 - DNA, 190 bp, Glycine max
tttgcttaggtgcaatacagagctattgagggcgcattacacgctcaacctcatactcaacaactcgcgtaaccttctcacccttgacgagaatatccccccccgaaatttcaatataaaatctctcccccaaaaaatctcactttactgtctcctatatgatacacaaaacatttttaatcaccctctt

SEQ ID NO: 76077 - DNA, 143 bp, Glycine max
ccctattcttttacttctcctttgggtcttttgcaccaacttgccctctgcttctcttccttctactgattcctgcccagaagagcattagacaaatacttcagtgttttttttagatcatagagttacacatactctttccc

SEQ ID NO: 76078 - DNA, 326 bp, Glycine max
acttatcattatcatgttttgggttcactatattctggaatgtctccttccattcctcaaaattttatacaccacccttctaatattaattattacatacaaacattttctccttcttattaaatttttaaccttcttacaattatatatgtactatctccttaaaatcaaaacataccttgaattcctatcacttcttaattaatcacctcattcatatttttcaattctctatttacaacttacccatatacattatctctaatttttaccataaaaatcccaatatttattctctatataatacctttcaatacatttaattt

SEQ ID NO: 76079 - DNA, 375 bp, Glycine max
tcaggcacactagttataaaggtttttaatgggataacgcagatgaatatttgttagacattaaatattctcttattaaaattatgtttctgaatctgaaaaggaacacctacatcttactatttgattgtggacagtaaataaataaagaaactcgattcaagttttgtccataaattgaaaaatatgtttgcagaacattttgctctcctagtaaatgcataataaaaatcaatgagtgtaacttagttgtacacttatttaacgtaaatgttgcactttgtatctcaactagtagttgttttaggtcaacataataagtatgttaatgtaagatatgttaagtgtttagctagatagcacccgttcaatgtt

SEQ ID NO: 76080 - DNA, 238 bp, Glycine max
gtttcaagagtgaagagcgaagagaatggctcgcgaaggtttaatctttttggctgtgttatgcttctcagcactgtcactgagtcgttgtcttgcggaggataatggacttggtatgaacttctacaaggaatcatgcccctaggctgtagacatcatctaagaacaagtcaagcttctctacaagcgccactagaacactggtttcttctggctcagaaacatcttccatgactgt

SEQ ID NO: 76081 - DNA, 331 bp, Glycine max
tgggcccacaggaaatgtaagatgctgataaagttataccccattttcatttcattacacagctccttttctctctcttttctctcaccccactttcgttctttatctctatcttcactaacataacataggatcctttcattgtacttctcactcatgaaagagatacatatatagaaatagaaacactctttttgagaaacaatcatataatcggcatcatcatcatcattcatagagtgcagagaatgaattcttcttctgctcagagcagcgactatgatctctccatcaagatcttactgatcggtgactctgctgagggaaaaag

SEQ ID NO: 76082 - DNA, 299 bp, Glycine max
tgtcaaaaaaaggaccactatttgattccccgggaaatgtgaggatgctggaccagcttaaccccattttcatggtattaattctacactacagtgtctaatacatatgactctaattctttttaagacggctcttattttggaccgtcttagaaagcgtacattgtaatacggatattagataacgacccacttataaaaacacttcctcttatttgagaaacatggatcatgtttgaaaatacatcatctatgacagagtgcagataatacctgtttctataagtccaattttttaa

SEQ ID NO: 76083 - DNA, 239 bp, Glycine max
cgagggtatcaactgtgtatgaggagagagagaaagtgaggagcactagcactacacaagctccgaaataaggaggggcgagaaattttggatgcgttggatttcgtagatctgacacataaattgtggtggcagcacaatggatcctggcagtggaagaaacaagctttggcaccactcttaatttgctttaaaacaacgtttaccggggacaccttgattacattaacccctttgtg

SEQ ID NO: 76084 - DNA, 286 bp, Glycine max
  unsure (1)..(286): unsure at all n locations
tggaaatgcaagaagcttatcttgtcaatctcgtaaatgtgttacgagaattgtatttgcacagtccagaggaagctcgccaattgagaaggaaagctctctctcgtattgaatggctgcaaaaagctgatgtgcctaccatagcacagattgaagagttccattcgatgcagaggatgatgaatgctcctgattcaaatgataatatngatttacttgtgagcattgattttgtgggtttacaaagagcaagtaaagctttttcaaacaaaattggttttgatga

SEQ ID NO: 76085 - DNA, 361 bp, Glycine max
  unsure (1)..(361): unsure at all n locations
aagttttcagatttttttagttatataatgcctgctcttgctgggcagcatagtacaagttattgcagcttgatgggtggtagttgcttgtttaattgtacggtttttctagtgaagcacaggcaggcttctctagaactacggatatagaaaaaggccatagttattattgtgcagcagctgattgcatcgtgggtgaaagaaaagtttctcatgtaaagggttttgttatgcatctggtttgactatgtgcttatatcaaatctataagcatatgagacatttttaatgtattgntccttttttcttttttgttcaattattttagctaaacggttctatttccaaatttgtacaccta

SEQ ID NO: 76086 - DNA, 376 bp, Glycine max
  unsure (1)..(376): unsure at all n locations
gccaaatgctgttctttcaatgtggagatattttgttggagatgtcgtctttgaagtttctaagatgacttctccctacattaaatgtacagtctctttcttcatagcatttggaaatttggctgatgataccatcaattttgaggcttttccccacaagctggtgcagtttggagagattcaggaaaaagttgtattgaaattttcacaagaggaatttcttacagcttggtcaactcangtgcgtcctgcaacaactctgttggctgatgggtgtccatatttgtatgcaatggtgcatgatagttcagtgtctacaataccaggtgattttgtcattggtgtcaagtngacaaccatanacaatatgtgtgca

SEQ ID NO: 76087 - DNA, 283 bp, Glycine max
gtccagaggaagctcgccaattgagaaagaaagctctctcgcggattgaatggctgcaaaaagctgatgtgcctaccatagcacagattgaagagttccattcgatgcagaggatgatgaatgctcctgattcaaatgataatattgatttactgttgagcattgatttgttgggtttacaaggagcaggtgaagctttttcaaacaaaattgtttttgatgataagcttgcgttggctaacacacaagaattctttgaaggaaatattccagtggattcttg

SEQ ID NO: 76088 - DNA, 421 bp, Glycine max
  unsure (1)..(421): unsure at all n locations
gacaaaatcagaaccacattcctgggaattgatcttcccaatagaggtatgtggtcctaataatggttttgaaatgtggagttctgagtgggcaaatcaaacttcatggcatttgagtttccttattgacaatcccaaacagtctacagtttttgatattctcttgggaatctctcaagattttgaaattgctggtaatactcttatgccagctttttctgttccacaggctactgccagatcttctgaaaatgcggaatcctctgcatgatctggaatttgtgttttctttcgctttttcgtttgtttaattcaataaaggaaattaggcatgaccctctttgtgagtatgctctgnctatttgaaaatttccacacctcttttaattgtcgtaatgaatggggaaatgtgtggtatttt

SEQ ID NO: 76089 - DNA, 276 bp, Glycine max
ctcaggtgcgtcctgcaacaactctgttggctgatgggtgtccatatttgtatgcaatggtgcatgatagttcagtgtctacaataccaggtgattttgtcattggtgtcaagttgacaaccataaacaatatgtgtgcatatgggctcaatcctggtatttcaggttctcgtcttttgggcaccattcctcagtccatttcacagcaaactgtttggaatcaaatggcaacagtgagaacaccattgaattttgattctagcaagcagagctttt

SEQ ID NO: 76090 - DNA, 361 bp, Glycine max
ctgaaaatgtcttgctgcggtggtaactgtggttgcggaagcggctgcaagtgcggcaacggctgcggaggctgcaagatgtacccagacttgagctacactgagtcaaccaccaccgagaccttggtcatgggagtggcacctgttaaggctcaatttgagggtgctgaaatgggtgtgcccgctgagaacgatggctgcaaatgtggaccaaactgctcctgcaacccctgcacttgcaagtgaggtgttgggagagcaagcttcaagcagagatagcccttaattaggaataatgataaactattaatgtgtagctaaaaacttatgtattatgtctgtgatggctttcgtgcactct

SEQ ID NO: 76091 - DNA, 351 bp, Glycine max
gcctttgttgatgacctgattctttttgcagagacatctggggagaatattttaaatattttttgcaggacttctaggcaaaaaattagcctagaaaaatctcggtttttcttttaaaaaattgtggcggtttgttcaaaggaatcaacttagtcaagaaatgggaatccaagggactcaggatttggggaagtatttgggagtccctatatttcacaaaagggcctctaggagcgctttccaatttattttggattaggttgatcagcgtcttaacacatggaaagcaaaaactttatcctttgcagcgtctcatctcgtgttcgaagacaactccagcgtccccttggt

SEQ ID NO: 76092 - DNA, 306 bp, Glycine max
actcttcacctcgtcctccgtctccgtggtggcatgcagagctgcgttaagacactcaccggcaagaccataaccctagaggttgaaagctccgacaccatcgataacgtcaaggccaagatccaggacaaggagggtatccccccggaccagcaacgtctcatcttcgtcggaaagcagctcgaggacggtcgcaccctcgccgactacaacattcagaaggaatcaacccttcacctcgtcctccgtctccgaggtggcatgcagatcttcgttaagaccctcaccggcaagactattacccta

SEQ ID NO: 76093 - DNA, 337 bp, Glycine max
cttctgctctagaaaattcagtggtgatacatggcttcggctactctctctgtagccaaaccagcccttcaggcaaatgggaaaggcttctctgaattctctggcctccgcagctcatcaggcttccttcccttttctagaaaatcttcagaggatttccattctgtcattgccttccagacctatgcagttggaagcagtggaggatacaagaagggtgtgacagaagcaaaactgaaggttgccataaacggatttggaaggattggaaggaacttcttgaggtgctggcacggtcgcaaagactcccctcttgatgtcattgccatcaacgaca

SEQ ID NO: 76094 - DNA, 394 bp, Glycine max
  unsure (1)..(394): unsure at all n locations
gcagcagtcaaaaggagtgattgggcctcattggtacaagtgtttttaacaaacagcaacagtacagagcattttgatgcatgtaagtggacaaaatcagaaccacattcctgggaattgatcttcccaatagaggtatgtggtcctaataatggttttgaaatgtggagttctgagtgggcaaatcaaacttcgtggcatttgagtttccttattgacaatcccaaacagtctacagtttttgatattctcttgggaatctctcaagattttgaaattgctggtaatactcttatgccagctttttctgttccacaggctactgccagatcttctgaaaatgcgaaatcctctgcatgatctggaaaattgngtttctttcgcttggtcgttg

SEQ ID NO: 76095 - DNA, 336 bp, Glycine max
gaaaaacaagtagttgagaactaagaagaaggaaatggcgggctcaatgatctcctccccagctgttaccaccgtcaaccgtgccggtgccggcatggttgctccattcaccggcctcaaatccatggctggcttccccacgaggaagaccaacaatgacattacctccattgctagcaacggtggaagagtacaatgcatgcaggtgtggccaccaattggcaagaagaagttcgagactctttcctacttgccagacctcgatgatgcccaattggcaaaagaagtcgaataccttctaaggaaaggatggattccttgcttggaattcgagtt

SEQ ID NO: 76096 - DNA, 325 bp, Glycine max
cgggcatgtaatttatgtagaaaagttaaaaacctaatactttgtacaacaacttgcaagttggttcaaatgtacccaacctaactccgggccaaaaagtaacatttaaattttgcagggacgaaaaatagacaactttttgtagttatggattcagaacattttcatatttatgaagatgaaaacttattttaacattttttaaaacaaaattgtcaatgtacattaattgctgttgtctaagcatttgacaatagcaattaatgtacattgacaaatgcttagacaacatttaaaaaatctgtataggtttgaaaaaacagaa

SEQ ID NO: 76097 - DNA, 390 bp, Glycine max
  unsure (1)..(390): unsure at all n locations
gcttgcacaaaagcaatgactatgtcatttaatccaaacccgtgttctgatgcatggagtttggaatttctgaagcgtactggatttcattgcgatatcatttgtgtcactggatggactgccaccccaatgcaggatgttcaggttacaattgattggtttatttcctctcaggaatgtgttcccaggacctattgtgttttaaatccacaaaatccttttgtgttaaataggtggatgggaaaattgactttcccccagggcacttcccgaagtgttaagagaatgcctctttctatagggggaggagctggtgcaaagaatgctattctcatgaatatgccaaatgctngtctttcaaatgtgaggatatttgtggagatctcgtct

SEQ ID NO: 76098 - DNA, 302 bp, Glycine max
tgataacttatttagtgttcatgaatatgtcaagccttaggtgagtggttctaaattgaaaagctttctagctagtcataacatcaccattactgatggtattgacaaaactagtgcaactttgcaatttagaaagttagcagattgtgattttctcaagagaaactttaagcagatgtctaatgttttgtgggtggctcctgaggacaaggcgagtttatggtcacaacttcattatgtttcgtgtaataatctggaaatgcaagaagcttatcttgtcaacctcgtaaatgtgttacgag

SEQ ID NO: 76099 - DNA, 276 bp, Glycine max
ttgagaaggaaagctctctctcgtattgaatggctgcaaaaagctgatgtgcctaccatagcacagattgaagagttccattcgatgcagaggatgatgaatgctcctgattcaaatgataatattgatttactgttgagcattgatttgttgggtttacaaggagcaggtaaagcttttccaaacaaaattgtttttgatgataagcttgtgttggctaacacacaagaattctttgatggaaattttccagtggattcttggttaccaattttt

SEQ ID NO: 76100 - DNA, 245 bp, Glycine max
aagattttgaaattgctggtaatactcttatgccagctttttgtggtccacaggctactgccagatcttctgaaaatgcggaatcctctgcatgatctggaatttgtgttttctttcgcttgttcgtttgtttaattcaataaaggaaattaggcatgaccctcttgttgagtatgctctgcctatttgaaaatttccacacctcttttaattgtcgtaatgatgtgtgaagtgtgtgttatttt

SEQ ID NO: 76101 - DNA, 213 bp, Glycine max
acaacgcaccacgcctacgtaagctccgaattcatctccatctctacagaacttttttattcccatatacatgcatcactcaccgggggcaatgccatcctactgggctgcatccttctactactatatcttcatgcccttcaaaagaaatgaccaactgacccttacaaaatttacttgagcaatgccatatacaaaacttacgctactcca

SEQ ID NO: 76102 - DNA, 246 bp, Glycine max
ctagggttatcatttctccatttccattttctctctcacttgcaagaatcgtaagctatgggaaagtcttacccaactgtgagtgctgattaccagaaggccgttgagaaggcgaagaagaagctcagaggcttcatcgctgagaagagatgcgctcctctaatgctccgtttggcatggcactctgctggaacctttgacaagggcacgaagaccggtggacccttcggaaccatcaagcaccct

SEQ ID NO: 76103 - DNA, 317 bp, Glycine max
gaaactttaagcatatgtctaatgttttgtgggtggctcctgaggacaaggcgagtttatggtcacaacttcattatgtttcgtgtaataatctggaaatgcaagaagcttatcttgtcaatctcgtaaatgtgttacgagaattgtatttgcacagtccagaggaagctcgccaattgagaaggaaagctctctctcgtattgaatggctgcaaaaagctgatgtgcctaccatagcacagattgaagagttccattcgatgcagaggatgatgaatgctcctgattcaaatgataatattgatttactgttgagc

SEQ ID NO: 76104 - DNA, 308 bp, Glycine max
cacagattgaagagttccattcgatgcagaggatgatgaatgctcctgattcaaatgataatattgatttactgttgagcattgatttgttgggtttacaaggagcaggtaaagcttttccaaacaaaattgtttttgatgataagcttgtgttggctaacacacaagaattctttgatggaaattttccagtggattcttggttaccaatttttgtgaattgtctttatcctgtaagtcaattaccttcagaagctgtcgttgtaaatgttacatgtggtagtggacgtggtgggttacccaccact

SEQ ID NO: 76105 - DNA, 265 bp, Glycine max
gtgatgataacttaattagtgttcatgaatatgtcaagccttactttagtggttctaaattgaaaagctttctagctagtcataacatcaccattactgatggtattgacaaaactagtgcaactttgcaatttagaaagttagcagattgtgattttctcaagagaaactttaagcagatgtctaatgttttgtgggtggctcctgaggacaaggcgagtttatggtcacaacttcattatgtttcgtgtaataatctggaaat

SEQ ID NO: 76106 - DNA, 335 bp, Glycine max
gctgatgataccatcaattttgaggcttttccccacaagctggtgcagtttggagagattcaggaaaaagttgtattgaaattttcacaagaggaatttcttacagcttggtcaactcaggtgcgtcctgcaacaactctgttggctgatgggtgtccatatttgtatgcaatggtgcatgatagttcagtgtctacaataccaggtgattttgtcattggtgtcaagttgacaaccataaacaatatgtgtgcatatgggctcaatcctggtatttcaggttctcgtcttttgggcaccattcctcagtccatttcacagcaaactgtttggaa

SEQ ID NO: 76107 - DNA, 87 bp, Glycine max
gatgagtgttcttttgcatttgtgaactagtatgtagtatgggattcacttaaataaagcgcattactatgtgcaatgagtgtgttt

SEQ ID NO: 76108 - DNA, 301 bp, Glycine max
tggctgatgataccatcaattttgaggcttttccccacaagctggtgcagtttggagagattcaggaaaaagttgtattgaaattttcacaagaggaatttcttacagcttggtcaactcaggtgcgtcctgcaacaactctgttggctgatgggtgtccatatttgtatgcaatggtgcatgatagttcagtgtctacaataccaagtgattttgtcattggtgtcaagttgacaaccataaacaatatgtgtgcctatgggctcaatcctggtattttaaggtcttctcttttgggccc

SEQ ID NO: 76109 - DNA, 220 bp, Glycine max
gctggtgcagtttggagagattcaggaaaaagttgcatggaaattttcacaagagagaacttgttacagcttggtcaactgacgtgcgtcctgcaacaactctgatggctgatgggtgtccatatttgtatgcagaggtgcatgatagctcagcgtctacaataccaggtgattttgtcattggtgtcaagatgacaaccataaacaatatgtgtgcata

SEQ ID NO: 76110 - DNA, 331 bp, Glycine max
  unsure (1)..(331): unsure at all n locations
gggggaggagctggtgcaaagaatgctattctcatgaatatgccaaatgctgttctttcaatgtggagatattttgttggagatctcgtctttgaagtttctaagatgacttctccctacattaaatgtacagtctctttcttcatagcatttggaaatttggctgatgataccatcaattttgaggcttttccccacaagctggtgcagtttggagagattcaggaaaaagttgtattgaaattttcacaagaggaatttcttacagcttggtcaactcangtgcgtcctgcaacaactctgttggctgatgggtgtccatatttgtatg

SEQ ID NO: 76111 - DNA, 195 bp, Glycine max
caacgaatgggaccataatgtacctgctgatcatcctataacggccgacttccatgtgtatatcgaactcaacaccatgaacctagccgctccatggtgctactactataacgcgcacatctttaatacttttatgttagaaacagcataccaaagcatatcaacttgcaagctcacactattgattgctcttat

SEQ ID NO: 76112 - DNA, 294 bp, Glycine max
aggatgttcatgttacaattgattggtttatttcctctcaggaatgtgttcccaggacctattgtgttttaaatccacaaaatccttttgtgttaaataggtggatgggaaaattgactttcccccagggcacttcccgaagtgttaagagaatgcctctttctatagggggaggagctggtgcaaagaatgctattctcatgaatatgccaaatgctgttctttcaatgtggagatattttgttggagatctcgtctttgaagtttctaagatgacttctccctacattaaat

SEQ ID NO: 76113 - DNA, 357 bp, Glycine max
ggactttccccatggctcttctgcattttaataaaggagattgaccatggtagctgccagaatagtaggaagcatgggatagtcccaccccaccaattctttgatgcttgaaggggcactctatgtgttaatagttccatatacctatcaagctcctaataaatgtagatatagacttttttttatacaatgtagacatagacttggttggttgttgcttcttttcctttcatttacatccgagctttccatttggctaagctgagattcctagtcatattatacatttggcacggtatagaatatgtaattgcataaaagcaaattcactaaactaggtgactgaccacttttttt

SEQ ID NO: 76114 - DNA, 282 bp, Glycine max
gaaagctctctctcgtattgaatggctgcaaaaagctgatgtgcctaccatagcacagattgaagagttccattcgatgcacaggatgatgaatgctcctgattcaaatgataatattgatttactgttgagcattgatttgttgggtttacaaggagcaagtaaagcttttccaaacaaaattgcttttgatgataagcttgtgttggctaacacacaagaattctttgatcgaaattttgccatggattcttgggtaacaatttttgggaaatggcttta

SEQ ID NO: 76115 - DNA, 290 bp, Glycine max
caaatatgatataattggtgctggttcacattcttcagaagattttcctgaaaaggaagatcaagaaaaacccaaaaagattgatgccagattgagacaaagaatagatcctcaatacaatgaggttcaagctcagatggaaacaaatttgtttaaattgtctcttgatgatgttgaaactcctaaaggttccatgttggatctgaaaatttctcaatctaaaattgcactttccaagaacacagttggaggaaccattctgcgtaatgatctattggcaaattttttga

SEQ ID NO: 76116 - DNA, 299 bp, Glycine max
tcttcatagcatttggaaatttggctgatgataccatcaatttggaggcttttccccacaagctggtgcagtttggagagattcacgaaaaagttgtattgaaattttcacaagaggaatttcttacagcttggtcaactcaggtgcgtcctgcaacaactctgttggctgatgggtgtccatatttgtatgcaatggtgcatgatagttcagtgtctacaataccaggtgattttgtcattggtgtcaagttgacaaccataaacaatatgtgtgcatatgggctcaatactggtatt

SEQ ID NO: 76117 - DNA, 279 bp, Glycine max
acagtctacagtttttgatattctcttgggaatctctcaagagtttgaaattgctggtaatactcttatgccagctttttctgttccacaggctactgccagatcttctgaaaatgcggaatcctctgcatgatctggaatttgtgttttctttcgcttgttcgtttgtttaattcaataaaggaaattaggcatgaccctcttgttgagtatgctctgcctatttgaaaatttccacacctcttttaattgtcgtaatgatgtgtgaagtgtgtgtta

SEQ ID NO: 76118 - DNA, 259 bp, Glycine max
gcgattattgattagtacaaaaaaaaaaaaaaaaaaagagaatgttggggagcactcatcaaccatggtgatgttgtttgcacacacagattcaatagtcacttactaattcttggagaaaaccaagtgtcagttattacttaccagccaaaccgaaaagaattccgattcgattccgagagaaccacccttaagaacgaccaccacaaccaccaccaccaccagcgccgagcatagcaaagacactaccgttggaatc

SEQ ID NO: 76119 - DNA, 314 bp, Glycine max
ccttgctgatcctcatgatgggaaccaccacttctccggactgtctctatacactcctcagcatcaaaccatgaccgtgaagaatcctcttggctccctttccgcaccccaagtcaaaatatttctcttgctccaaacccattgatacaagtctcagaaagaaccaacctccatcttccagaccttgatcggacacacgctggatggctcatgctcaacagggcctagcagcttaggctatctcctaggcactcaaccatagcccacgattgatcaatggcaatgcattggcacttgagtttgatgtgcttaat

SEQ ID NO: 76120 - DNA, 310 bp, Glycine max
gacctattgtgttttaaatccacaaaatccttttgtgttaaataggtggatgggaaaattgactttcccccagggcacttcccgaagtgttaagagaatgcctctttctatagggggaggagctggtgcaaagaatgctattctcatgaatatgccaaatgctgttctttcaatgtggagatattttgttggagatctcgtctttgaagtttctaagatgacttctccctacattaaatgtacagtctctttcttcatagcatttggaaatttggctgatgataccatcaattttgaggcttttccccac

SEQ ID NO: 76121 - DNA, 197 bp, Glycine max
ggaaacatctataaaagcctcctttagattatttttatttagggggttaactgtttcctttatatttaaaagttgagttgtagcaattcaaagtattctatgcagtgtaataaagacaatgtacacggtcataaaaaaaattaaatagatacagtaggcaattattttcttttaaataataataatgaattatattc

SEQ ID NO: 76122 - DNA, 425 bp, Glycine max
cacttatacaaaattctccaattagtaacttgttgagagttgctgcttggaagaaaggctgtttaatggtcaagattgtgatgtctgggaatgcagcagtcaaaaggagtgattgggcctcattggtacaagtgtttttaacaaacagcaacagtacagagcattttgatgcatgtaagtggacaaaatcagaaccacattcctgggaattgatcttcccaatagaggtatgtggtcctaataatggttttgaaatgtggagttctgagtgggcaaatcaaacttcatggcatttgagtttccttattgacaatcccaaacagtctacagtttttgatattctcttgggaatctctcaagattttgaaattgctggtaatactcttatgccagctttttctgttccacaggctactgccagatct

SEQ ID NO: 76123 - DNA, 327 bp, Glycine max
cagcaacagtacagagcattttgatgcatgtaagtggacaaagtcagaaccacattcctgggaattgatcttcccaatagaggtatgtggtcctaataatggttttgaaatgtggagttctgagtgggcaaatcaaacttcatggcatttgagtttccttattgacaatcccaaacagtctacagtttttgatattctcttgggaatctctcaagattttgaaattgctggtaatactcttatgccagctttttcttgttccacaggctactgccagatcttctgaaaatgcggaatcctctgcatgatctggaattgtgttttctt

SEQ ID NO: 76124 - DNA, 115 bp, Glycine max
atttaatttcttacttggaattatgtattggcttggtggttgagctcgaattttgacagcgccattcttccatagatcagtgctgattggtaagaagcccttcattttctcttca

SEQ ID NO: 76125 - DNA, 322 bp, Glycine max
attcctcagtccatttcacagcaaactgttggaatcaaatggcgacagtgagaacaccattgaattttgattctagcaagcagagcttttgtcagttttctattgaccttctcggtggaggaatcttagtggacaaaactggagattggatcacacttatacaaaattctccaattagtaacttgttgagagttgctgcttggaagaaaggctgtttaatggtcaagattgtgatgtctgggaatgcagcaatcaaaaggagtgattgggcctcattggtacaagtgtttttaacaaacagcaacagtacagagcattttga

SEQ ID NO: 76126 - DNA, 390 bp, Glycine max
tgatagttcagtgtctacaataccaggtgattttgtcattggggtcaagttgacaaccataaacaatatgtgtgcatatgggctcaatcctggtatttcaggttctcgtcttttgggcaccattcctcagtccatttcacagcaaactgtttggaatcaaatggcaacagtgagaacaccattgaattttgattctagcaagcagagcttttgtcagttttctattgaccttctcggtggaggaatcttagtggacaaaactggagattggatcacacttatacaaaattctccaattagtaacttattgagagttgctgcttggaagaaaagcttgttaatggtcaagattgtgatgtctgggaatgcagcagtcaaaaggagtgattg

SEQ ID NO: 76127 - DNA, 261 bp, Glycine max
gagatattttgttggagatctcgtctttgaagtttctaagatgacttgtccctacattaaatgtacagtctctttcttcatagcatttggaaatttggctgatgataccatcaattttgaggcttttccccacaagctggtgcagtttggagagattcaagaaaaagttgtattgaaattttcacaagaggaatttcttacagcttggtcaactcaagtgcgttctgcaacaactctggtggctgatgggtgtccatattt

SEQ ID NO: 76128 - DNA, 426 bp, Glycine max
ctagttttgatggtttgattaccaagcaagttatgagcaagagggcagaaatgataaacagtctttgtggtggtgatgaaaaattgatgcgtgaaaggacgcacctgctgttggcttgttgttcaaggatggcaatttgtaagaaagatgtttggagagttgaatgtggaatcccttctggatttccgctcacagttatttgcaatagcatttttaatgagatgctcattagatatagctatgaaaaattactgcgccaggctaaagctccaagtatgtttttacaatccttcaaaaattttgtttctttgtgtgtgtatggtgatgataacttaattagtgttcatgaatatgtcaagccttactttagtggttctaaattgaaaagctttctagctagtcataacatcaccattactgatggta

SEQ ID NO: 76129 - DNA, 406 bp, Glycine max
gtgatgataacttaattagtgttcatgaatatgtcaagcctgacttgagtggttctaaattgaaaagctttctagctagtcataacatcaccattactgatggtattgacaaaactagtgcaactttgcaatttagaaagttagcagattgtgattttctcaagagaaactttaagcagatgtctaatgttttgtgggtggctcctgaggacaaggcgagtttatggtcacaacttcattatgtttcgtgtaataatctggaaatgcaagaagcttatcttgtcaatctcgtaaatgtgttacgagaattgtatttgcacagtccagaggaagctcgccaattgagaaggaaagctctctctcgtattgaatggctgcaaaaaagctgatgtgcctaccatagcac

SEQ ID NO: 76130 - DNA, 280 bp, Glycine max
tgggaatgcagcagtcaaaaggagtgattgggcctcattggtgcaagtgtttttaacaaacagcaacagtacagagcattttgatgcatgtaagtggacaaaatcagaaccacattcctgggaattgatcttcccaatagaggtatgtggtcctaataatggttttgaaatgtggagttctgagtgggcaaatcaaacttcatggcatttgagtttccttattgacaatcccaaacagtctacagtttttgatattctcttgggaatctctcaagatttt

SEQ ID NO: 76131 - DNA, 429 bp, Glycine max
  unsure (1)..(429): unsure at all n locations
gcttggaagaaaggctgtttaatggtcaagattgtgatgtctgggaatgcagcagtcaaaaggagtgattgggcctcattggtacaagtgtttttaacaaacagcaacagtacagagcattttgatgcatgtaagtggacaaaatcagaaccacattcctgggaattgatcttcccaatagaggtatgtggtcctaataatggttttgaaatgtggagttctgagtgggcaaatcaaacttcatggcatttgagtttccttattgacaatcccaaacagtctacagtttttgatattctcttgggaatctctcaagattttgaaattgctggtaatactcttatgccagctttttctgttccacaggctactgccagatcttctaaaatgcggaatcctctgcatgatctggaaattgnngtttctttc

SEQ ID NO: 76132 - DNA, 415 bp, Glycine max
gcctaccatagcacagattgaagagttccattcgatgcagaggatgatgaatgctcctgattcaaatgataatattgatttactgttgagcattgatttgttgggtttacaaggagcaggtaaagcttttccaaacaaaattgtttttgatgataagcttgtgttggctaacacacaagaattctttgatggaaattttccagtggattcttggttaccaatttttgtgaattgtctttatcctgtaagtcaattaccttcagaagctgtcgttgtaaatgttacatgtggtagtggacgtggtggtttacccaccactgcttggattagttctgcagttaacaatcgctcctcagatatcaacaaaaggattcgcacagcacttgggaaaggtaagaaaaatgtttttcttact

SEQ ID NO: 76133 - DNA, 426 bp, Glycine max
ggttacaattgattggtttatttcctctcaggaatgtgttcgcaggacctattgtgttttaaatccacaaaatccttttgtgttaaataggtggatgggaaaattgactttcccccagggcacttcccgaagtgttaagagaatgcctctttctatagggggaggagctggtgcaaagaatgctattctcatgaatatgccaaatgctgttctttcaatgtggagatattttgttggagatctcgtctttgaagtttctaagatgacttctccctacattaaatgtacagtctctttcttcatagcatttggaaatttggctgatgataccatcaattttgaggcttttccccacaagctggtgcagtttggagagattcaggaaaaagttgtattgaaattttcacaagaggaatttcttacagc

SEQ ID NO: 76134 - DNA, 386 bp, Glycine max
  unsure (1)..(386): unsure at all n locations
ctcnagccgctcgagccgatcacacttatacaaaattctccaggtagtgacttgttgagagttgctgcttggaagaaaggctgtttaatggtcaagattgtgatgtctgggaatgcagcagtcaaaaggagtgattgggcctcattggtacaagtgtttttaacaaacagcaacagtacagagcattttgatgcatgtaagtggacaaaatcagaaccacattcctgggaattgatcttcccaatagaggtatgtggtcctaataatggttttgaaatgtggagttctgagtgggcaaatcaaacttcatggcatttgagtttccttattgacaatcccaaacagtctacagtttttgatattctcttgggaatctctcaagattt

SEQ ID NO: 76135 - DNA, 168 bp, Glycine max
gcggaatcctctgcatgatctggaatttgtgttttctttcgcttgtgcgtttgtttaattcaataaaggaaattaggcatgaccctcttgttgagtatgctctgcctatttgaaaatttccacacctcttttaattgtcgtaatgatgtgtgaagtgtgtgttatttt

SEQ ID NO: 76136 - DNA, 379 bp, Glycine max
gttgaatgtggaatcccttctggatttccgctcacagttatttgcaatagcatttttaatgagatgctcattagatatagctatgaaaaattactgcgccaggctaaagctccaagtatgtttttacaatccttcaaaaattttgtttctttgtgtgtgtatggtgatgataacttaattagtgttcatgaatatgtcaagccttactttagtggttctaaattgaaaagctttctagctagtcataacatcaccattactgatggtattgacaaaactagtgcaactttgcaatttagaaagttagcagattgtgattttctcaagagaaactttaagcagatgtctaatgttttggtgggtggctcctgaggacaag

SEQ ID NO: 76137 - DNA, 238 bp, Glycine max
gaaaattgtttttcttactagagttgatccttttccagtagcgttactggctgttctttttggcgttaagaatgaaattctgagttctaacgccactaatcctatgctgacgcgacttcttgagaactgtaagagtctcaaatatctggttgatgagtgtccttttgcatttgtgaactagtatgtagtattttattcacttaaataaagcgcattactatgtgcaatgagtgtgttt

SEQ ID NO: 76138 - DNA, 163 bp, Glycine max
tggcctttgtacaattaaggtgcacaaaacaatctcaagttggagaacttttctagaattaaccttattctgaaaagctcgtatgtttgatagatgttattgtcaaatatcatatatctttcttcccttcaatattgtgagttgggttcaaggtagaccttgt

SEQ ID NO: 76139 - DNA, 389 bp, Glycine max
ggaggaatgtattagctgcggatgtttaatgtactttgtgatgtaactatattagcttcattagacgttgggatgaagaatttgagagattagcccctgaatcttcagaataggtcacaatgcattggaaaactcttgactttgtgcactcaaattgcgtggttttatgattttatcggtttgtttcaaaaaaaaaaaaaaaaaaaaaaaaaaaaaaaaaaaaaaaaaaaaaaaaaaaaaaaaaaaataaaaaaccacaaaaaaaaaactaaaataaccaaacacaaaaaacataaaccacacctaaaaaaagaacaaattcacattaaagaaaatcctattataacaaaagggggggccccccctttattgaatttgttccccccttt

SEQ ID NO: 76140 - DNA, 389 bp, Glycine max
ctcgagccgcatgaactgaataaaaggatgcctcatgcttgggctaaaaaaaaaaaaaaaaaaaaaaaaaaaaaaaaaaaaaaaaaaaaaaaaaaaaaaaaaaaaaaaaaaaaaaaaaaaaaaaaaaaaaaaaaaaaaaggaagtaggaaaaaaaaaaaaaaaagaaaaaaattaaaaaaaaaaaaaatgaaggaaaaaaaaattaaaaaaaaaaagggggtggttagaagcttggagaaatcatggcaataaaaataataatgggtgaaatgtgtaaaagggtcacaattttacaaaatatacgagcataaaacatagggggcataaacttggaaagcctaaggggtgaataaattaaaataaattgcattatttctaaatgcctgat

SEQ ID NO: 76141 - DNA, 370 bp, Glycine max
ctccagctgttaccactgtcaaccgtgccggtgccggcatgggggctgcattcactggcctcaagtccatggctggcttccccaccaggaagaccaacaatgacattacctccattgctagcaacggtggaagagtgcaatgcatgcaggtgtggccaccagttggcaagaagaagtttgagactctttcctacctgccagaccttgatgatgcacaattggcaaaggaagtagaataccttcttaggaagggatggattccttgcttggaattcgagttggagcacggtttcgtgtaccgtgagcacaacaggtcaccaggatactacgatggacgctactggaccatgtggaagctgcctatgtttgg

SEQ ID NO: 76142 - DNA, 219 bp, Glycine max
aaaaaaaaattttttaaaaaaaaaaaaaaaaaaaaaaaaaaaagagggggttaaataaaattaataagttgtcgaccccaaaatttatttctcgacccacccattacttacttcccacctccccctttaattctcccactcataccttttcgtatccctgtttaacctttgttccttccttaaatttctttcctttctcattgcaatacttttttcctt

SEQ ID NO: 76143 - DNA, 304 bp, Glycine max
aatccttcaaaaattttgtttctttgtgtgtgtatggtgatgataacttaattagtgttcatgaatatgtcaagccttactttagtggttctaaattgaaaagctttctagctagtcataacatcaccattactgatggtattgacaaaactagtgcaactttgcaatttagaaagttagcagattgtgattttctcaagagaaactttaagcagatgtctaatgttttgtgggtggctcctgaggacaaggcgagttaatggtcacaacttcattatgttttcgtgtaataatctggaaatgc

SEQ ID NO: 76144 - DNA, 426 bp, Glycine max
ggaagaaaggctgtttaatggtcaagattgtgatgtctgggagatgcagcagtcaaaaggagtgattgggcctcattggtacaagtgtttttaacaaacagcaacagtacagagcattttgatgcatgtaagtggacaaaatcagaaccacattcctgggaattgatcttcccaatagaggtatgtggtcctaataatggttttgaaatgtggagttctgagtgggcaaatcaaacttcatggcatttgagtttccttattgacaatcccaaacagtctacagtttttgatattctcttgggaatctctcaagattttgaaattgctggtaatactcttatgccagctttttctgttccacaggctactgccagatcttctgaaaatgcggaatcctctgcatgatctggaatttgtgttttcttt

SEQ ID NO: 76145 - DNA, 413 bp, Glycine max
ctttgaagttttttagatgacttctccctacattaaatgtagggtctctttcttcatagcatggggaaatttggctgatgacaccatcaattttgaggcttttccccacaagctggtgcagtttggagagattcaggaaaaagttgtattgaaattttcacaagaggaatttcttacagcttggtcaactcaggtgcgtcctgcaacaactctgttggctgatgggtgtccatatttgtatgctatggtgcatgatagttcagtgtctacaataccaggtgattttgtcattggtgttaagttgacaaccataaacaatatgtgtgcatatgggcttaatcctggtatttcaggttctcgtcttttgggcaccattccttaatccattttacagcaaactgtttggaataaat

SEQ ID NO: 76146 - DNA, 425 bp, Glycine max
cgcgtctggtttctctcccaacattctcatctgggtcttccgaatttcttgatttgatctttctccctctcagaaactggcctcagccaagagtttctcctttttccttttcacctgttcagcattgatatttggttatacattgcattaggttgaatatcagtgttttcaatttgataaaagatattgattctgtaagtccatttgctaagaatcaaatcaaaaaagtatcttctaaatttgatagaataggatcaaaatttcgccatgagtttctctgaccatattccatcctttatgatgtcaccgccgtcgttttccacagacacggatgccattgaagtgaggcttcaattcccaacgaacaacgaatcattggagccacattcaccacaggatcaacccccttcgttcaagagggcaag

SEQ ID NO: 76147 - DNA, 429 bp, Glycine max
  unsure (1)..(429): unsure at all n locations
ctcgagccgattcggctcgagccccaatgcaggatgttcaggttacaattgattggtttatttcctctcaggaatgtgttcccaggacctattgtgttttaaatccacaaaatccttttgtgttaaataggtggatgggaaaattgactttcccccagggcacttcccgaagtgttaagagaatgcctctttctatagggggaggagctggtgcaaagaatgctattctcatgaatatgccaaatgctgttctttcaatgtggagatattttgttggagatctcgtctttgaagtttctaagatgacttctccctacattaaatgtacagtctctttcttcatagcatttggaaatttggctgatgataccatcaattttgaggcttttccccacaagctggtgcagtttggagagattcangaaaaag

SEQ ID NO: 76148 - DNA, 393 bp, Glycine max
cagctccaataacgctggcgatgggccggaaaagacccgcgagcggaaaagttggttcccacggtttaagtccaattggctgggcacgttccgttccaagcaaatgttccagtgctgcgagtgcgcagtggtccttgcttccaacaataactcgctcttgagtcaggccggacgctacaagggcgccgagggcaagcactgccggtgtgggaaggaccagtggcatctcgccaagtccgtcgaggagaccgagtacaaccgccgtatggagatcagcaaggcttttggtggcatgcgctacgatgaggccgtactccgactgcgtagcatgggccaatctgagctggactttaagccgtccgagtacacggccaacgatggattgcctacaca

SEQ ID NO: 76149 - DNA, 431 bp, Glycine max
  unsure (1)..(431): unsure at all n locations
acataaccacaatacctcaacaccacaatcatggacaagagcgaaggagaagctccacattggcagcagccgccgcaagtcacagcccgagaacgatgctagcctgggaagctcaacctccggccatggtgtcggcaccattgaagagaaccgcgactcaatcgactcggagctcgcctcaatgcccccccacgagcgcgtcgcatacctccaagaattcgagcacagcgacaagcacgacgcgcccaagaaaggcgggctcatcgagaagctgattgcgcgtggcaacaagcgcacggaagagcaactcgcccgtgaggcggcggagcgcgaggagaagaacagggcggcgacacatgcgcaattgggtcccggtgcgggcgcgagtgcgcatagtgccgcggngccgacgacggataagtgtattcgct

SEQ ID NO: 76150 - DNA, 365 bp, Glycine max
caagccttactttagtggttctaaattgaaaagctttctagctagtcgtaacatcaccattactgatggtattgacaaaactagtgcaactttgcaatttagaaagttagcagattgtgattttctcaagagaaactttaagcagatgtctaatgttttgtgggtggctcctgaggacaaggcgagtttatggtcacaacttcattatgtttcgtgtaataatctggaaatgcaagaagcttatcttgtcaatctcgtaaatgtgttacgagaattgtatttgcacagtccagaaggaggctcgccaattgagaaggaaagctctctctcgtattgaatggctgcaaaaagctgatgtgcctacc

SEQ ID NO: 76151 - DNA, 427 bp, Glycine max
caatggtgcatgatagttcagtgtctacaataccaggtgattgtgtcattggtgtcaagttgacaaccataaacaatatgtgtgcatatgggctcaatcctggtatttcaggttctcgtcttttgggcaccattcctcagtccatttcacagcaaactgtttggaatcaaatggcaacagtgagaacaccattgaattttgattctagcaagcagagcttttgtcagttttctattgaccttctcggtggaggaatcttagtggacaaaactggagattggatcacacttatacaaaattctccaattagtaacttattgagagttgctgcttggaagaaaggctgtttaatggtcaagattgtgatgtctgggaatgcagcagtcaaaaggagtgattgggcctcattggtacaagtgtttttaac

SEQ ID NO: 76152 - DNA, 233 bp, Glycine max
ggtaatactcttatgccagctttttctgttccacaggctactgccagatcttctgaaaatgcggaatcctctgcatgatctggaatttgtgttttctttcgcttgttcgtttgtttaattcaataaaggaaattaggcatgaccctcttgttgagtatgctctgcctatttgaaaatttccacacctcttttaattgtcgtaatgatgtgtgaagtgtgtgttattttaaaaa

SEQ ID NO: 76153 - DNA, 398 bp, Glycine max
gtcctgcaacaactctgttggctgatgggtgtccatatttgtatgcaatggtgcatgatagttcagtgtctacaataccaggtgattttgtcattggtgtcaagttgacaaccataaacaatatgtgtgcatatgggctcaatcctggtatttcaggttctcgtcttttgggcaccattcctcagtccatttcacagcaaactgtttggaatcaaatggcaacagtgagaacaccattgaattttgattctagcaagcagagcttttgtcagttttctattgaccttctcggtggaggaatcttagtggacaaaactggagattggatcacacttatacaaaattctccaattagtaacttgttgagagttgctgcttggaagaaaggctgtttaatg

SEQ ID NO: 76154 - DNA, 408 bp, Glycine max
ctcgagccgattcggctcgagctggcagagcccgtagtgtacgggccagaattttgcctgctctaccgttcgcacggctgggtccgtctccaggtcgtacatgatgtccgatacgccgggtcccgagtaggacatgagcagcatcttgccgagggtccatccttgaatccatcctagcgccaccatggagaaggcaactgaaaatgagagggttcggtcaagccacacatacatctggatgctcagtaggggcaagattagcaggagtgacgagcacgataatgtcagaaaatgcgacgggttgctcagcaccgaaggcaggttagcgatcgcacttagcctcatgaccttgcctatgcgcgcatggttcttcaacaagattgctgagaccagtgtcgagacaacacc

SEQ ID NO: 76155 - DNA, 409 bp, Glycine max
gaaagatctcgctatggttaaagttaatgtagcatgtgctggggtgggcttgacatcaagttacactccaactccattgttggaatctggtttgcaaaaagacagagggttaattgtggagtattttggaaggatgtcttacgttgctcataacgttaatcagccccaagagaaagatttgttggagggaaatttttcctttgatattaaatctcgctctagattggaaaaagtttcctctacaaaagcacaatttgttagtggaaaaaccttcaaatatgatataattggtgctggttcacattcttcagaagattttcctgtaaaggaagatcaagaaaaacccaaaaagattgatgccagattgagacaaagaatagatcctcaatacaatgaggttcaggctcag

SEQ ID NO: 76156 - DNA, 405 bp, Glycine max
gacaaaatcagaaccacattcctgggaattgatcttcccaatggaggtatgtggtcctaataatggttttgaaatgtggagttctgagtgggcaaatcaaacttcatggcatttgagtttccttattgacaatcccaaacagtctacagtttttgatattctcttgggaatctctcaagattttgaaattgctggtaatactcttatgccagctttttctgttccacaggctactgccagatcttctgaaaatgcggaatcctctgcatgatctggaatttgtgttttctttcgcttgttcgtttgtttaattcaataaaggaaattaggcatgaccctcttgttgagtatgctctgcctatttgaaaatttccacacctcttttaattgtcgtaatgatgtgtg

SEQ ID NO: 76157 - DNA, 374 bp, Glycine max
atctatgacgtcgcacgcacgcgtacgttagctattaattccgctctagaggagttttttcaacaatctatttgtgttgttattaaagaagggttctgacacagaggggagtcagcacatcatatcatgtacactctctcactcccatgcctctcttattctcttcacactcacacttaccaatatggtcgcttctctacccctatatcttttatcttcacacataatagacgctctcacaatcacttactaactacaagctcctaccttatacagagagaacgagagagcctaaagcatctacgcactatcatcacttccccttctcgttctggcttgtatcgcttgtttatacccaataacaacaagacctt

SEQ ID NO: 76158 - DNA, 357 bp, Glycine max
tacctcccgcgcgcgcgtacgctagctcttcattctcctctcgcaacaccttttcctttcatgaaacccccatcttcccaatagaagcgtttctttccaaagaatagctttctcattctacattcttatgatactcctaaaaccttttatcattcgtttttccttatcacttatcctataccttcccctgtttttattattctaccctaaatttttcaacatcatgaaactattcctaattctgatctaccaattttgtttcctgcacacatttcttgcttacctttttttaccactgatatacattcataacctattattaagtttttctttgaatctaacattcctttttttcat

SEQ ID NO: 76159 - DNA, 392 bp, Glycine max
attttgttggagatctcgtctttgaagtttctaagatgacttctccctacattaaatgtacagtctctttcttcatagcatttggaaatttggctgatgataccatcaattttgaggcttttccccacaagctggtgcagtttggagagattcaggaaaaagttgtattgaaattttcacaagaggaatttcttacagcttggtcaactcaggtgcgtcctgcaacaactctgttggctgatgggtgtccatatttgtatgcaatggtgcatgatagttcagtgtctacaataccaggtgattttgtcattggtgtcaagttgacaaccataaacaatatgtgtgcatatgggctcaatcctggtatttcaagttctcgtcttttggcacca

SEQ ID NO: 76160 - DNA, 396 bp, Glycine max
caaatggcaacagtgagaacaccattgaattttgattctagcaagcagagcttttgtcagttttctattgaccttctcggtggaggaatcttagtggacaaaactggagattggatcacacttatacaaaattctccaattagtaacttattgagagttgctgcttggaagaaaggctgtttaatggtcaagattgtgatgtctgggaatgcagcaatcaaaaggagtgattgggcctcattggtacaagtgtttttaacaaacagcaacagtacagagcattttgatgcatgtaagtggacaaaatcagaaccacattgctgggaattgatcttcccaatagaggtatgtggtcctaataatggttttgaaatgtggaggtctgagtgggcaaat

SEQ ID NO: 76161 - DNA, 406 bp, Glycine max
attcaagaaaaagttgtattgaaattttcacaagaggaatttggtacagcttggtcaactcaagtgcgtcctgcaacaactctgttggctgatgggtgtccatatttgtatgcaatggtgcatgatagttcagtgtctacaataccaggtgattttgtcattggtgtcaagttgacaaccataaacaatatgtgtgcatatgggctcaatcctggtatttcaggttctcgtcttttgggcaccattcctcagtccatttcacagcaaactgtttggaatcaaatggcaacagtgagaacaccattgaattttgattctagcaagcagagcttttgtcagttttctattgaccttctcggtggaggaatcttagtggacaaaactggagattggatcacacttatac

SEQ ID NO: 76162 - DNA, 409 bp, Glycine max
aaaactagtgcatctttgcaatttagaaagttagcagattgggattttctcaagagaaactttaagcagatgtctaatgttttgtgggtggctcctgaggacaaggcgagtttatggtcacaacttcattatgtttcgtgtaataatctggaaatgcaagaagcttatcttgtcaacctcgtaaatgtgttacgagaattgtatttgcacagtccagaggaagctcgccaattgagaaggaaagctctctctcgtattgaatggctgcaaaaagctgatgtgcctaccatagcacagattgaagagttccattcgatgcagaggatgatgaatgctcctgattcaaatgataatattgatttactgttgagcattgatttgttgggtttacaaggagcaggtaaagctt

SEQ ID NO: 76163 - DNA, 80 bp, Glycine max
aaaaaaaaatatttaaaaaaaaaaaaaaaaaaaaaaaaaaggaaggaaaaaaaaaaaaaaaaaaaaaaaaaaaaaaaaaa

SEQ ID NO: 76164 - DNA, 396 bp, Glycine max
caagagaaagatttgttggagggaaatttttcctttgatattaaatctcgctctagattggaaaaagtttcctctacaaaagcacaatttgttagtggaaaaaccttcaaatatgatataattggtgctggttcacattcttcagaagattttcctgaaaaggaagatcaagaaaaacccaaaaagattgatgccagattgagacaaagaatagatcctcaatacaatgaggttcaggctcagatggaaacaaatttgtttaaattgtctcttgatgatgttgaaactcctaaaggttccatgttggatctgaaaatttctcaatctaaaattgcactttccaagaacacagttggaggaaccattctgcgtagtgatctattggcaaattttttg

SEQ ID NO: 76165 - DNA, 406 bp, Glycine max
gtcacaacttcattatgtttcgtgtaataatctggaaatgcaggaagcttatcttgtcaatctcgtaaatgtgttacgagaattgtatttgcacagtccagaggaagctcgccaattgagaaggaaagctctctctcgtattgaatggctgcaaaaagctgatgtgcctaccatagcacagattgaagagttccattcgatgcagaggatgatgaatgctcctgattcaaatgataatattgatttactgttgagcattgatttgttgggtttacaaggagcaggtaaagcttttccaaacaaaattgtttttgatgataagcttgtgttggctaacacacaagaattctttgatggaaattttccagtggattcttggttaccaatttttgtgaattgtctttat

SEQ ID NO: 76166 - DNA, 406 bp, Glycine max
gaaaaattgatgcgtgaaagagacgcacctgctgttggcggggtgttcaaggatggcaatttgtaagaaagatgtttggagagttgaatgtggaatcccttctggatttccgctcacagttatttgcaatagcatttttaatgagatgctcattagatatagctatgaaaaattactgcgccaggctaaagctccaagtatgtttttacaatccttcaaaaattttgtttctttgtgtgtgtatggtgatgataacttaattagtgttcatgaatatgtcaagccttactttagtggttctaaattgaaaagctttctagctagtcataacatcaccattactgatggtattgacaaaactagtgcaactttgcaatttagaaagttagcagattgtgattttctc

SEQ ID NO: 76167 - DNA, 397 bp, Glycine max
gcatttggtaatttggctgatgataccatcaattttgaagctttttcccacaagctggtgcagtttggagagattcaggaaaaagttgtattgaaattttcacaagaagaatttcttacagcttggtcaactcaagtgcgtcctgcaacaactctgttggctgatgggtgtccatatttgtatgcaatggtgcatgatagttcagtgtctacaataccaggtgattttgtcattggtgtcaagttgacaaccataaacaatatgtgtgcatatgggctcaatcctggtatttcaggttctcgtcttttgggcaccattcctcagtccatttcacagcaaactgtttggaatcaaatggcaacagtgagaacaccattgaattttgattctagcaagc

SEQ ID NO: 76168 - DNA, 399 bp, Glycine max
  unsure (1)..(399): unsure at all n locations
gtggacaaaactggagattggatcacacttatacaaaattctccaattagtaacttgttgagagttgctgcttggaagaaaggctgtttaatggtcaagattgtgatgtctgggaatgcagcagtcaaaaggagtgattgggcctcattggtacaagtgtttttaacaaacagcaacagtacagagcattttgatgcatgtaagtggacaaaatcagaaccacattcctgggaattgatcttcccaataaaagtatgtggtcctaataatggttttgaaatgtggagttctgagtgggcaaatcaaacttcatggcatttgagtttccttattgacaatcccaaatagtctacagnttttgatattctcttgggaatctctcaagattttgaaattgct

SEQ ID NO: 76169 - DNA, 398 bp, Glycine max
ccggaattaccggatcgacccaagcgtgctagagggtgtatttctagtcaggctcgggagtttgacctgactaatatagccattgtccatgcatgaggcatctttgtaaggatcttcattctgctcggtgacaatctaacctgaaggcgcaaagattgaacttgatctacataaatgatcaatggaaagacaatctgacatggtaaccaacgaactgtgaacagatgaaacctttgagacatgcctaatagaatcatcaatacgactaatacagaatcgagaagaggggatcactcatgagtgcactgatgagctcagtatcccaaggatgattgactcttagacacccctccagactgacctattcgtggcgattactagacatgactactggagag

SEQ ID NO: 76170 - DNA, 402 bp, Glycine max
cacactacgtaatcattggctctcccctcatgccctgtaacggcgttaaaaaccctaccgagcaactttgtctaaatctcaactactagcacataacgatcgtcacggtcaacatcaaagcgctggccgacgtgctcgaacaaaccataaacgacgtcgaccatcttgtggactatgctcagcatatactaaaatgctctcacctccttttactggcctacttatgtgcgaatcaggctattctgctcgtgtctcattctgcattactacatctgcggcctcgctcctgcacccgggcaccgagccgtctcgtgactctcatcaacaccaaataattcccgagccttccttgcccctgctgccgtgtctcgcttgatctgcctcactccatcgatgtgatat

SEQ ID NO: 76171 - DNA, 394 bp, Glycine max
ctcgagccgaatcggctcgagatctggtttgcaaaaagacagagggttaattgtggagtattttggaaggatgtcttacgttgctcataacgttaatcagccccaagagaaagatttgttggagggaaatttttcctttgatattaaatctcgctctagattggaaaaagtttcctctacaaaagcacaatttgttagtggaaaaaccttcaaatatgatataattggtgctggttcacattcttcagaagattttcctgaaaaggaagatcaagaaaaacccaaaaagattgatgccagattgagacaaagaatagatcctcaatacaatgaggttcaagctcagatggaaacaaatttgtttaaattgtctcttgatgatgttgaaactcct

SEQ ID NO: 76172 - DNA, 406 bp, Glycine max
tggaaatgcatttagcttatcttgtcaatctcgtaaatgggttacgagaattgtatttgcacagtccagaggaagctcgccaattgagaaggaaagctctctctcgtattgaatggctgcaaaaagctgatgtgcctaccatagcacagattgaagagttccattcgatgcagaggatgatgaatgctcctgattcaaatgataatattgatttactgttgagcattgatttgttgggtttacaaggagcaggtaaagcttttccaaacaaaattgtttttgatgataagcttgtgttggctaacacacaagaattctttgatggaaattttccagtggattcttggttaccaatttttgtgaattgtctttatcctgtaagtcaattaccttcagaagctgtcgt

SEQ ID NO: 76173 - DNA, 400 bp, Glycine max
tgtgtatggtgatgataacttaattagtgttcatgaatatgtcaagccttactttagtggttctaaattgaaaagctttctagctagtcataacatcaccattactgatggtattgacaaaactagtgcaactttgcaatttagaaagttagcagattgtgattttctcaagagaaactttaagcagatgtctaatgttttgtgggtggctcctgaggacaaggcgagtttatggtcacaacttcattatgtttcgtgtaataatctggaaatgcaagaagcttatcttgtcaatctcgtaaatgtgttacgagaattgtatttgcacagtccagaggaagctcgccaattgagaaggaaagctctctctcgtattgaatggctgcaaaaagctgatgtg

SEQ ID NO: 76174 - DNA, 402 bp, Glycine max
tttggaaatttggctgatgataccatcaattttgaggcttttgcccacaagctggtgcagtttggagagattcaggaaaaagttgtattgaaattttcacaagaggaatttcttacagcttggtcaactcaagtgcgtcctgcaacaactctgttggctgatgggtgtccatatttgtatgcaatggtgcatgatagttcagtgtctacaataccaggtgattttgtcattggtgtcaagttgacaaccataaacaatatgtgtgcatatgggctcaatcctggtatttcaggttctcgtcttttgggcaccattcctcagtccatttcacagcaaactgtttggaatcaaatggcaacagtgagaacaccattgaattttgattctagcaagcagagcttt

SEQ ID NO: 76175 - DNA, 400 bp, Glycine max
catttgtgtcactggatggactgccaccccaatgcaggatgtggaggttacaattgattggtttatttcctctcaagaatgtgttcccaggacctattgtgttttaaatccacaaaatccttttgtgttaaataggtggatgggaaaattgactttcccccagggcacttcccgaagtgttaagagaatgcctctttctatagggggaggagctggtgcaaagaatgctattctcatgaatatgccaaatgctgttctttcaatgtggagatattttgttggagatctcgtctttgaagtttctaagatgacttctccctacattaaatgtacagtctctttcttcatagcatttggaaatttggctgatgataccatcaattttgaggcttttccccac

SEQ ID NO: 76176 - DNA, 400 bp, Glycine max
gttggctgatgggtgtccatatttgtatgcaatggtgcatgagagttcagtgtctacaataccaggtgattttgtcattggtgtcaagttgacaaccataaacaatatgtgtgcatatgggctcaatcctggtatttcaggttctcgtcttttgggcaccattcctcagtccatttcacagcaaactgtttggaatcaaatggcaacagtgagaacaccattgaattttgattctagcaagcagagcttttgtcagttttctattgaccttctcggtggaggaatcttagtggacaaaactggagattggatcacacttatacaaaattctccaattagtaacttgttgagagttgctgcttggaagaaaggctgtttaatggtcaagattgtgatgtct

SEQ ID NO: 76177 - DNA, 396 bp, Glycine max
gtcattggtgtcaagttgacaaccataaacaatatgtgtgcatatgggctcaatcctggtatttcaggttctcgtcttttgggcaccattcctcagtccatttcacagcaaactgtttggaatcaaatggcaacagtgagaacaccattgaattttgattctagcaagcagagcttttgtcagttttctattgaccttctcggtggaggaatcttagtggacaaaactggagattggatcacacttatacaaaattctccaattagtaacttattgagagttgctgcttggaagaaaggctgtttaatggtcaagattgtgatgtctgggaatgcagcagtcaaaaggagtgattgggcctcattggtacaagtgtttttaacaaacagcaacagt

SEQ ID NO: 76178 - DNA, 400 bp, Glycine max
gtgagaacaccattgaattttgattctagcaagcagagcttttgtcagttttctattgaccttctcggtggaggaatcttagtggacaaaactggagattggatcacacttatacaaaattctccaattagtaacttgttgagagttgctgcttggaagaaaggctgtttaatggtcaagattgtgatgtctgggaatgcagcagtcaaaaggagtgattgggcctcattggtacaagtgtttttaacaaacagcaacagtacagagcattttgatgcatgtaagtggacaaaatcagaaccacattcctgggaattgatcttcccaatagaggtatgtggtcctaataatggttttgaaatgtggagttctgagtgggcaaatcaaacttcatggcatt

SEQ ID NO: 76179 - DNA, 377 bp, Glycine max
aacagtgagaacaccatggaattttgattctagcaagcagagcttttgtcagttttctattgaccttctcggtggaggaatcttagtggacaaaactggagattggatcacacttatacaaaattctccaattagtaacttgttgagagttgctgcttggaagaaaggctgtttaatggtcaagattgtgatgtctgggaatgcagcagtcaaaaggagtgattgggcctcattggtacaagtgtttttaacaaacagcaacagtacagagcattttgatgcatgtaagtggacaaaatcagaaccacattcctgggaattgatcttcccaatagaggtatgtggtcctaataatggttttgaaatgtggagttctg

SEQ ID NO: 76180 - DNA, 394 bp, Glycine max
ggcttttccccacaagctggtgcagtttggagagattcaggagaaagttgtattgaaattttcacaagaagaatttcttacagcttggtcaactcaagtgcgtcctgcaacaactctgttggctgatgggtgtccatatttgtatgcaatggtgcatgatagttcaatgtctacaataccaggtgattttgtcattggtgtcaagttgacaaccataaacaatatgtgtgcatatgggctcaatcctggtatttcaggttctcgtcttttgggcaccattcctcagtccatttcacagcaaactgtttggaatcaaatggcaacagtgagaacaccattgaattttgattctagcaagcagagcttttgtcagttttctattgaccttctcggt

SEQ ID NO: 76181 - DNA, 404 bp, Glycine max
acttatacaaaattctccaattagtaacttgttgagagttgctgcttggaagaaaggctgtttaatggtcaagattgtgatgtctgggaatgcagcagtcaaaaggagtgattgggcctcattggtacaagtgtttttaacaaacagcaacagtacagagcattttgatgcatgtaagtggacaaaatcagaaccacattcctgggaattgatcttcccaatagaggtatgtggtcctaataatggttttgaaatgtggagttctgagtgggcaaatcaaacttcatggcatttgagtttccttattgacaatcccaaacagtctacagtttttgatattctcttgggaatctctcaagattttgaaattgctggtaatactcttatgccagctttttctgttc

SEQ ID NO: 76182 - DNA, 402 bp, Glycine max
gtctgaatagtaataatcgacagcaaaaatgaaatatttggaggaatggaccaaaacaatgatctagttttatggctgtttaagaatgttatatctcactaaccaaactcaagtcaaagctaattttaacaggcccagattttagaaattagaccaagttgttttaaggatgacattgggacttggttgatacttcggtcatcccaacccatttcgatgcacatattcttcttaacaaatatatattagtagtaatacttcttaacataacattttaaacaatattatattatatttatgaatttaattggaatgcactatagtgtaaaggttttttatgctgtcatcaatcacaaattgtcacctatgataagtttgttgacttatataataactacttta

SEQ ID NO: 76183 - DNA, 407 bp, Glycine max
aaaaaaaaaaaattaaaaaaaaaaaaaaaaaaaaaaaaaaaaaggaaaaaaaaaaaaaaaaaaaaaaaaaaaaaaaaaaaaaaaaaaaaaaaaaaaaaaaaaaaaaaaaaaaaaaaaaaaaaaaaaaaaaaaaaaagggggcgcccccccctttttaaccccttccccccggaatttatttccgacccgttccctgagggctccccaatttccccttttggaagcccttttaaacctgggcgaaaaaatggcaataccttttccctgggaaaaatttttttcccctaaaatttccccaaaaattccaacccgaaaccttaaagtttaaaccctgggggccctaataaggaacctacctccctttatttgcgttgccctcactcccccttttcaataggaaaaacctt

SEQ ID NO: 76184 - DNA, 405 bp, Glycine max
ctcgagccgaatcggctcgagttggatcacacttatacaaaagtctccaattagtaacttattgagagttgctgcttggaagaaaggctgtttaatggtcaagattgtgatgtctgggaatgcagcagtcaaaaggagtgattgggcctcattggtacaagtgtttttaacaaacagcaacagtacagagcattttgatgcatgtaagtggacaaaatcagaaccacattcctgggaattgatcttcccaatagaggtatgtggtcctaataatggttttgaaatgtggagttctgagtgggcaaatcaaacttcatggcatttgagtttccttattgacaatcccaaacagtctacagtttttgatattctcttgggaatctctcaagattttgaaattgctgg

SEQ ID NO: 76185 - DNA, 325 bp, Glycine max
ctggtgcaaagaatgctattctcatgaatatgccaaatgctggtctttcaatgtggagatattttgttggagatctcgtctttgaagtttctaagatgacttctccctacattaaatgtacagtctctttcttcatagcatttggaaatttggctgatgataccatcaattttgaggcttttccccacaagctggtgcagtttggagagattcaggaaaaagttgtattgaaattttcacaagaggaatttcttacagcttggtcaactcaggtgcgtcctgcaacaactctgttggctgatgggtgtccatatttgtatgcaat

SEQ ID NO: 76186 - DNA, 340 bp, Glycine max
tgccacacaaccacacttggctaacaccaccaacttggcagaacatttggctgcatctctgcatggaaatgcaacaaagctagcgccaccaagtcaggtttcctttcaacaacacagctgcactagtactcctacactatctacccctttcatttttccacaaaaatagatgaaaatgtacatgaagggaaaattaattagagtggtatgcatgtatgaaaattagattacagatgttaattaattaaagaagagtgtaaagttcgttaggttactcttttcaaaaaagatggaacatattttcttttctgataatagaatatatcagccttagaatctg

SEQ ID NO: 76187 - DNA, 320 bp, Glycine max
ttgaattgtatttgtgtttcagagtttggaattggtgtttctgagggaattcgcgcacccttccatgaatcctttctctactgtggcttcaaattttcggatcctctcacccaagtacacacttttagtccatgaccctaggaaattgtgccatagttttatgattaaatttactgttactgtgtggtttttttgttcacttaggcaatgaatatgatggggctttacgactttgcttactggttttcctggctcatctgggaggcagttgtcacgatcctatcgtccctccttataatttcttttgattgcattattat

SEQ ID NO: 76188 - DNA, 354 bp, Glycine max
ctcgagccgtggagttctgagtgggcaaatcaaacttcatgggatttgagtttccttattgacaatcccaaacagtctacagtttttgatattctcttgggaatctctcaagattttgaaattgctggtaatactcttatgccagctttttctgttccacaggctactgccagatcttctgaaaatgcggaatcctctgcatgatctggaatttgtgttttctttcgcttgttcgtttgtttaattcaataaaggaaattaggcatgaccctcttgttgagtatgctctgcctatttgaaaatttccacacctcttttaatttgtcgaatgatgtgtgaaatgtgtgttatttt

SEQ ID NO: 76189 - DNA, 334 bp, Glycine max
attggtacaagtgtttttaacaaacagcaacagtacagagcagtttgatgcatgtaagtggacaaaatcagaaccacattcctgggaattgatcttcccaatagaggtatgtggtcctaataatggttttgaaatgtggagttctgagtgggcaaatcaaacttcatggcatttgagtttccttattgacaatcccaaacagtctacagtttttgatattctcttgggaatctctcaagattttgaaattgctggtaatactcttatgccagctttttctgttctacaggctactgccagatcttctgaaaatgcggaatcctctgcatgatct

SEQ ID NO: 76190 - DNA, 291 bp, Glycine max
atcgagataactagaaacagtgtgatgaaaatgaaggtccttggtttcttcgttgctacaattttggtagcatggcaatgccatgcgtacgatatgttccctctccgaatgaacactggctatggtgcccgtactccggaggtgaaatgcgcaagttggaggcttgctgtggaagcacacaacatctttggctttgagaccattcctgaagagtgcgttgaagcaacaaaggaatacatccatggcgaacaatatagatcagactccaaaacagttaaccaacaagcttac

SEQ ID NO: 76191 - DNA, 383 bp, Glycine max
caactttgcaatttataaagttagcagattgtgattttctcaagagaaactttaagcagatgtctaatgttttgtgggtggctcctgaggacaaggcgagtttatggtcacaacttcattatgtttcgtgtaataatctggaaatgcaagaagcttatcttgtcaatctcgtaaatgtgttacgagaattgtatttgcacagtccagaggaagctcgccaattgagaaggaaagctctctctcgtattgaatggctgcaaaaagctgatgtgcctaccatagcacagattgaagagttccattcaatgcagaggatgatgaatgctcctgattcaaatgataatattgatttactgttgagcattgattttgttgggtttaca

SEQ ID NO: 76192 - DNA, 381 bp, Glycine max
ctcgagccgttgaaaagctttctagctagtcataacatcaccattactgatggtattgacaaaactagtgcaactttgcaatttagaaagttagcagattgtgattttctcaagagaaactttaagcagatgtctaatgttttgtgggtggctcctgaggacaaggcgagtttatggtcacaacttcattatgtttcgtgtaataatctggaaatgcaagaagcttatcttgtcaatctcgtaaatgtgttacgagaattgtatttgcacagtccagaggaagctcgccaattgagaaggaaagctctctctcgtattgaatggctgcaaaaagctgatgtgcctaccatagcacagattgaagagttccattcgatgcag

SEQ ID NO: 76193 - DNA, 390 bp, Glycine max
taaaagccttagccttccctacaactccaaacacaaagacatcatcatccatggctgcctccgtctccactgtcggagctgtcaacagagctcttttgaacctgaatggttctggagctggagcttcagctcccagttcagccttctttgggaccagcttgaagaaggttattgcctcaagggtccccaacagcaaggtttccggtggaagcttcaagattgttgctgtagaagagaagaaagagattgaagagacccagcagaccgacaaggacagatggaagggtcttgcctatgatatctcagacgaccaacaagacatcacaagaggaaagggtttggttgactcccttttccaagctccacaggatgctggaactcactatgcag

SEQ ID NO: 76194 - DNA, 381 bp, Glycine max
gaaattttcacaagaggaatttcttacagcttggtcaactcaggtgcgtcctgcaacaactctgttggctgatgggtgtccatatttgtatgcaatggtgcatgatagttcagtgtctacaataccaggtgattttgtcattggtgtcaagttgacaaccataaacaatatgtgtgcatatgggctcaatcctggtatttcaggttctcgtcttttgggcaccattcctcagtccatttcacagcaaactgtttggaatcaaatggcaacagtgagaacaccattgaattttgattctagcaagcagagcttttgtcagttttctattgaccttctcggtggaagaatcttagtggacaaaacttgaaattggatcacact

SEQ ID NO: 76195 - DNA, 300 bp, Glycine max
ctaataccaaattcatttaataataccatcaatataaaaagggaggacccacaaacaaatagacaagatagactacattcaactaaaaaattatattgacccttttactaatatgcattccttacccttcgttcaactcatgtgcacttctgcaacatctctgttatctgttgcgtgtccatatttttttgcaatgcctcatcataattctctttcttcaccactctctcatttcttcctccccgtcatttttacatccatatcccatatttcctcattttggctcattccttgtttttt

SEQ ID NO: 76196 - DNA, 322 bp, Glycine max
gttcccaggacctattgtgttttaaatccacaaaatccttttgtgttaaataggtggatgggaaaattgactttcccccagggcacttcccgaagtgttaagagaatgcctctttctatagggggaggagctggtgcaaagaatgctattctcatgaatatgccaaatgctgttctttcaatgtggagatattttgttggagatctcgtctttgaagtttctaagatgacttctccctacattaaatgtacagtctctttcttcatagcatttggaaatttggctgatgataccatcaattttgaggcttttcctgaatctc

SEQ ID NO: 76197 - DNA, 357 bp, Glycine max
agattgtgattttctcaagagaaactttaagcagatgtctaatgttttgtgggtggctcctgaggacaaggcgagtttatggtcacaacttcattatgtttcgtgtaataatctggaaatgcaagaagcttatcttgtcaatctcgtaaatgtgttacgagaattgtatttgcacagtccagaggaagctcgccaattgagaaggaaagctctctctcgtattgaatggctgcaaaaagctgatgtgcctaccatagcacagattgaagagttccattcgatgcagaggatgatgaatgctcctgattcaaatgataatattgatttactggtgaacattgatttggtgggtttaca

SEQ ID NO: 76198 - DNA, 383 bp, Glycine max
gctcgatgatgtgagtagtggtgctgcacttagcagagcctcaagtgctagcttgggactctctttctccttcactggctttactatgcctcctgaagaaattgctgactccaagcccttcagtgatgatgatatccgtaagtacatgacaatttaattaccatacacttaatttgtataagactgatactcaaagacagttctataaatcatacacctcattatactagtattttttataattaacaagtgtcaaatgattttttaatatgttttattattataattagagtttcacagtcagagattcaccttgacatttaatcaagaccttgaacattattgagataaaacttcaattctaaacaaataattaacaacac

SEQ ID NO: 76199 - DNA, 387 bp, Glycine max
ctggtatttcaggttctcgtcttttgggcaccattcctcagtccatttcacagcaaactgtttggaatcaaatggcaacagtgagaacaccattgaattttgattctagcaagcagagcttttgtcagttttctattgaccttctcggtggaggaatcttagtggacaaaactggagattggatcacacttatacaaaattctccaattagtaacttgttgagagttgctgcttggaagaaaggctgtttaatggtcaagattgtgatgtctgggaatgcagcagtcaaaaggagtgattgggcctcattggtacaagtgtttttaacaaacagcaacagtacagagcattttgatgcatgtaagtggacaaaatcagaaccacatt

SEQ ID NO: 76200 - DNA, 418 bp, Glycine max
tccccccgtccttaagctcggatttcggctcgagctgccaccccaatgcaggatgttcaggttacaattgattggttaatttcctctcaggaatgtggttcccagaacctattgtgtttaaatccacaaaatccttttgtgttaaataggtggatgggaaaattgacttttccccagggcacttcccgaagtgttaagagaatgcctctttctataaggggaggagctggtgcaaagaatgctattctcatgaatatgccaaatgctgttctttcaatgtggagatattttgttggagatctcgtctttgaagtttctaagatgacttctccctacattaaatgtacagtctctttcttcataacatttggaaatttggctgatgataccatcaattttgaggctttttcccacaagc

SEQ ID NO: 76201 - DNA, 186 bp, Glycine max
aaaaaaaattttttttaaaaaaaaaaaaaaaaataaaaatggacgatttatataaataaataattttaaaaaacacaccatttattaaaatttacaccatttttttcttaaaaatttaaaattttgaatacttttttttaaacttctattaacttataaatttattttaaaaaacgtttgtccccc

SEQ ID NO: 76202 - DNA, 370 bp, Glycine max
caacaacttttttttctgatgggtgtccatatttgtatgcaggggtgcatgatagttcagtgtctacaataccaggtgattttgtcattggtgtcaagttgacaatcataaacaatatgtgtgcatatgggctcaatcctggtatttcaggttctcgtcttttgggcaccattcctcagtccatttcacagcaaactgtttggaatcaaatggcaacagtgagaacaccattgaattttgattctagcaagcagagcttttgtcagttttctattgaccttcttggtggaggaatcttagtggacaaaactggagattggatcacacttatacaaaattcttcaattaataacttattgagagttgctgc

SEQ ID NO: 76203 - DNA, 390 bp, Glycine max
tgataacttaattagtgttcatgaatatgtcaagccttactttagtggttctaaattgaaaagctttctagctagtcataacatcaccattactgatggtattgacaaaactagtgcaactttgcaatttagaaagttagcagattgtgattttctcaagagaaactttaagcagatgtctaatgttttgtgggtggctcctgaggacaaggcgagtttatggtcacaacttcattatgtttcgtgtaataatctggaaatgcaagaagcttatcttgtcaatctcgtaaatgtgttacgagaattgtatttgcacagtccagaggaagctcgccaattgagaaggaaagctctctctcgtattgaatggctgcaaaaagctgatgtgcc

SEQ ID NO: 76204 - DNA, 332 bp, Glycine max
atgataacttaattagtgttcatgaatatgtcaagccttactttagtggttctaaattgaaaagctttctagctagtcataacatcaccattactgatggtattgacaaaactagtgcaactttgcaatttagaaagttagcagattgtgattttctcaagagaaactttaagcagatgtctaatgttttgtgggtggctcctgaagacaaggcgagtttatggtcacaacttcattatgtttcgtgtaataatctggaaatgcaagaagcttatcttgtcaatctcgtaaatgtgttacgagaattgtatttgcacagtccagaggaagct

SEQ ID NO: 76205 - DNA, 399 bp, Glycine max
  unsure (1)..(399): unsure at all n locations
ggacgatgatnntttcctccttttatgtgatggggagttntntggggggaaatttaaaaaaaaaaaagtcccaccccacaccaaaaaaaaaaaaaaaaaaaaaaaaacaaaaaaggggggcggcctacaacctaaagaaggtcgaccccccgggtatcctaggcccccccccaccagccgaacacccattatacattaacagggggtaattatataattgggggggggcccccccccttggggccccccccccccggtttttttttccgcccccgcccccggggggccccccttttccctttgggggggggtataagggcggggggcaaaagggggccccccccccccccgggggaaatggtttcccccccccacttccccccaaatttccggcggggg

SEQ ID NO: 76206 - DNA, 218 bp, Glycine max
ttatgccagctttttctgttccacaggctactgccagatcttctgaaaatgcggaatcctctgcatgatctggaatttgtgttttctttcgcttgttcgtttgtttaattcaataaaggaaattaggcatgaccctcttgttgagtatgctctgcctatttgaaaatttccacacctcttttaattgtcgtaatgatgtgtgaagtgtgtgttatttt

SEQ ID NO: 76207 - DNA, 391 bp, Glycine max
gatcgagataactagaaacagtgtgatgaaaatgaaggtccttgttttcttcgttgctacaattttggtagcatggcaatgccatgcgtacgatatgttccctctccgaatgaacactggctatggtgcccgtactccggaggtgaaatgcgcaagttggaggcttgctgtggaagcacacaacatctttggctttgagaccattcctgaagagtgcgttgaagcaacaaaggaatacatccatggcgaacaatatagatcagactccaaaacagttaaccaacaagcttacttttatgccagagacctcgaagtccatcccaaagacacatttgtgttcagtatagatggcaccgtactctctaatattccatactacaaaaaacatgga

SEQ ID NO: 76208 - DNA, 391 bp, Glycine max
tggctcctgaggacaaggcgagtttatggtcacaacttcattatgtttcgtgtaataatctggaaatgcaagaagcttatcttgtcaatctcgtaaatgtgttacgagaattgtatttgcacagtccagaggaagctcgccaattgagaaggaaagctctctctcgtattgaatggctgcaaaaagctgatgtgcctaccatagcacagattgaagagttccattcgatgcagaggatgatgaatgctcctgattcaaatgataatattgatttactgttgagcattgatttgttgggtttacaaggagcaagtaaagcttttccaaacaaaattgtttttgatgataagcttgtgttggctaacacacaagaattctttgatggaaattt

SEQ ID NO: 76209 - DNA, 383 bp, Glycine max
ggaaaaagttgtattgaaattttcacaagaggaatttcttacagcttggtcaactcaggtgcgtcctgcaacaactctgttggctgatgggtgtccatatttgtatgcaatggtgcatgatagttcagtgtctacaataccaggtgattttgtcattggtgtcaagttgacaaccataaacaatatgtgtgcatatgggctcaatcctggtatttcaggttctcgtcttttgggcaccattcctcagtccatttcacagcaaactgtttggaatcaaatggcaacagtgagaacaccattgaattttgattctagcaagcagagcttttgtcagttttctattgaccttctcggtggaagaatcttagtggacaaaactggag

SEQ ID NO: 76210 - DNA, 318 bp, Glycine max
gataacttaattagtgttcatgaatatgtcaagccttactttagtggttctaaattgaaaagctttctagctagtcataacatcaccattactgatggtattgacaaaactagtgcaactttgcaatttagaaagttagcagattgtgattttctcaagagaaactttaagcagatgtctaatgttttgtgggtggctcctgaggacaaggcgagtttatggtcacaacttcattatgtttcgtgtaataatctggaaatgcaagaagcttatcttgtcaatctcgtaaatgtgttacgagaattgtatttgcacagt

SEQ ID NO: 76211 - DNA, 335 bp, Glycine max
gcattttgatgcatgtaagtggacaaaatcagaaccacattcctgggaattgatcttcccaatagaggtatgtggtcctaataatggttttgaaatgtggagttctgagtgggcaaatcaaacttcatggcatttgagtttccttattgacaatcccaaacagtctacagtttttgatattctcttgggaatctctcaagattttgaaattgctggtaatactcttatgccagctttttctgttccacaggctactgccagatcttctgaaaatgcggaatcctctgcatgatctggaatttgtgttttctttcgcttgttcgtttgtttaattc

SEQ ID NO: 76212 - DNA, 332 bp, Glycine max
  unsure (1)..(332): unsure at all n locations
ctctgntcttgcgtttgcgttgcttggaagacgctctcgctacactacagcctcatctttataatggttggatgattagtgatgggtggacagttctattggtgatgactgggagctcacttgctgatctaacgagggtcagacagtggtcttagttagacaaactgtcaatggcaagagtgcaacaggcaataccattcttggaaggaaggccttcaagtcaagggctagctcctctgctggatccacctgatgttaaacggctaccaaccgattttaccaccggccaaatggtcaatgttttcacaacccacgaattatttaatttgcct

SEQ ID NO: 76213 - DNA, 388 bp, Glycine max
ccttccttcagtattaattaattaattaattcctatgtgaaggggacatggtttggtatctctaattatttacctgttcccataattacttttttttttcctactgactagtgactgctccaagttttaggggatgaacatgcatggccctatgttcatggaaagaattgaagcccaagttaccttctcatgagtccaaggttttttgggggtctctcaccacattcttgtttttggaagttgttggtccacccgacttgacttcttgtctgcgtttttttctattgcgagggtttatggtttgtttttggtcagtggcttttcttgtttgagtttgagttattcaacgtgggtaataatgtattctggtattttcaatctcattatg

SEQ ID NO: 76214 - DNA, 108 bp, Glycine max
aacatcaccattactgatggtttggacaaacctagtgcaactgggcaatttagaaagttagcagatggtgattttctcaagagaaactttaagcagatgtctaatgtt

SEQ ID NO: 76215 - DNA, 237 bp, Glycine max
acgtaaagctcggaattctctggggcgcaaatcctgatttataaatgcctctcctctatttccccaccaccgccattttctatatcacagcaaactctttgcaatcaaatggcgccaacaaaaacacccttcaattttcataagctccaactatgcttttacaaaccttcaataaaccttctccgtggcggaattttagtgcacacaactgaacattctatcacacttattcaaacc

SEQ ID NO: 76216 - DNA, 273 bp, Glycine max
gttatgacaaaggacgcgcgcggacggaagctaagaattctggtgggagtaaagtgtgattagaaaaactttcaactgaccattatcccggcctagtgttaactttgaaggtacaatactatatgaatggtgccaacataatctcgttatgtatgacctttattactacaatcactctggtacaataccctcttgcttcgaaatgccagcgttactagaacttacagggaaacagtcttaccggcacgatacctgaagcattaataagcaact

SEQ ID NO: 76217 - DNA, 305 bp, Glycine max
gtacgtaacctcggaattcggctcgcgaaaaaaaaaaaaatatataaaaaaaaaaaaaaaaaaaaaaaaaccccgcaatttttaaaaaaaagccccccccccaaaaaatccaacaattcaacccaaaaattaattcccgcccgttacctacatgcatctccaccttcccctaaaaaaaagccacatcaaacctcctcataaaaatccccttcccctttccctttccaaaataaccatcccctaacatttccacccaacatcctaccctcaatcataaattcccacccccttttttccccaattaa

SEQ ID NO: 76218 - DNA, 303 bp, Glycine max
tggagagttgaatgtggaatcccttctggatttccgctcacaggtatttgcaatagcatttttaatgagatgctcattagatatagctatgaaaaattactgcgccaggctaaagctccaagtatgtttttacaatccttcaaaaattttgtttctttgtgtgtgtatggtgatgataacttaattagtgttcatgaatatgtcaagccttactttagtggttctaaattgaaaagctttctagctagtcataacatcaccattactgatggtattgacaaaactagtgcaactttgcaattt

SEQ ID NO: 76219 - DNA, 387 bp, Glycine max
gttgcaaagcaaaaactactacgaggagctttcctccatacgaatcaaaggaggagagagagagagagagagagaggagacacagacacaaaggaaacggaaaaagcaacacacaaaaaaaaagaggttcagattcgatctcttgttttgttcttccattcatatctgttttattttattttatttttctttctttcggcaattgcatctcatcaagctcgtttttttcttcttaccatcttcatttccgcacttgtttactcctcaattctcttttttttcttcgggatctcaagtgggtttccgttatttctcaatttggacgcatattttttgttttatctcttgaatctgcaagctatattgaagattcgttctaactcttaa

SEQ ID NO: 76220 - DNA, 328 bp, Glycine max
gaaagaaaaataaaaaaaaaaaaaaaaaaaaaaaaaaaaaaaaaaaaaaaaaaaaaaaaaaaaaaaaaaaaaaaaaaaaaaaaaaaaaaaaaaaaaaaaaaaaaaaaaaaaaaaaaaaaaaaaaaaagaaaacaaaaaaaaaaaaaaaaaaaaaaaaaaaaaaaaaaaaaaaaaaaaaaaaaaataaaaaacccccggcccccccttaaggaataattttaaaccctataataattcaagaccatactttatcccattataaattttttatttgttaacattttaaaaatgtggaaaatccggggcaataattgttaaaattaaaata

SEQ ID NO: 76221 - DNA, 411 bp, Glycine max
ggagattggatcacacttatacaaaattctccaattagtaactgggtgagagttgctgcttggaagaaaggctgtttaatggtcaagattgtgatgtctgggaatgcagcagtcaaaaggagtgattgggcctcattggtacaagtttttttaacaaacagcaacagtacagagcattttgatgcatgtaagtggacaaaatcagaaccacattcctgggaattgatcttcccaatagaggtatgtggtcctaataatggttttgaaatgtggagttctgagtgggcaaatcaaacttcatggcatttgagtttccttattgacaatcccaaacagtctacagtttttgatattctcttgggaatctctcaagattttgaaattgctggtaatactcttatgccagctttt

SEQ ID NO: 76222 - DNA, 88 bp, Glycine max
aaaagttacttaacacttagcaccttgctatactacctgtgcgctctaaactgtagtatcacctcatttattgatatagatgaaaaac

SEQ ID NO: 76223 - DNA, 414 bp, Glycine max
cttatacaaaattctccaattagtaacttgttgagagttgctgcttggaagaaaggctgtttaatggtcaagattgtgatgtctgggaatgcagcagtcaaaaggagtgattgggcctcattggtacaagtgtttttaacaaacagcaacagtacagagcattttgatgcatgtaagtggacaaaatcagaaccacattcctgggaattgatcttcccaatagaggtatgtggtcctaataatggttttgaaatgtggagttctgagtgggcaaatcaaacttcatggcatttgagtttccttattgacaatcccaaacagtctacagtttttgatattctcttgggaatctctcaagattttgaaattgctggtaatactcttatgccagctttttctgttccacaggctact

SEQ ID NO: 76224 - DNA, 394 bp, Glycine max
cccatatgcacacatatgggctcaatcctggtatttcaggttctgggcttttgggcaccattcctcagtccatttcacagcaaactgtttggaatcaaatggcaacagtgagaacaccattgaattttgattctagcaagcagagcttttgtcagttttctattgaccttctcggtggaggaatcttagtggacaaaactggagattggatcacacttatacaaaattctccaattagtaacttgttgagagttgctgcttggaagaaaggctgtttaatggtcaagattgtgatgtctgggaatgcagcagtcaaaaggagtgattgggcctcattggtacaagtgtttttaacaaacagcaacagtacagagcattttgatgcatgtaagtg

SEQ ID NO: 76225 - DNA, 97 bp, Glycine max
tgctgctgttgctctatattactgtttaaagacaaggcttttgagcccttttccaattgagtgatcttagcttaaatacaaattaattttttcaatt

SEQ ID NO: 76226 - DNA, 417 bp, Glycine max
tgcatgatagttcagtgtctacaataccaggtgattttgtcagtggtgtcaagttgacaaccataaacaatatgtgtgcatatgggctcaatcctggtatttcaggttctcgtcttttgggcaccattcctcagtccatttcacagcaaactgtttggaatcaaatggcaacagtgagaacaccattgaattttgattctagcaagcagagcttttgtcagttttctattgaccttctcggtggaggaatcttagtggacaaaactggagattggatcacacttatacaaaattctccaattagtaacttattgagagttgctgcttggaagaaaggctgtttaatggtcaagattgtgatgtctgggaatgcagcagtcaaaaggagtgattgggcctcattggtacaagtgtttt

SEQ ID NO: 76227 - DNA, 421 bp, Glycine max
cttgcaattgaagttgaagtcttgcccttctctcttcaactgcaaacacaagacatcatcatccatggctgcctccgtctccactgtcggagctgtcaacagagctcttttgaacctgaatgggtctggacctggggtttcagctcccagttcatccttctttgggagcagcttgaagaaggttattggctcaagggtccccaacacaaagatttcctctggaagcttcaagattgttgctgtagaagagaagaaagagattgaagagacccagcagaccgacaaggacagatggaagggtcttgcctatgatatctcagacgaccaacaggacatcacaagaggaaagggtttggttgactcccttttccaagctccacaggatgctggaactcactatgctgtcatgagctcctacgag

SEQ ID NO: 76228 - DNA, 408 bp, Glycine max
atggtattgacaaaactagtgcaactttgcaatttagaaagttaggagattgtgattttctcaagagaaactttaagcagatgtctaatgttttgtgggtggctcctgaggataaggcgagtttatggtcacaacttcattatgtttcgtgtaataatctggaaatgcaagaagcttatcttgtcaatctcgtaaatgtgttacgagaattgtatttgcacagtccagaggaagctcgccaattgagaaggaaagctctctctcgtattgaatggctgcaaaaagctgatgtgcctaccatagcacagattgaagagttccattcgatgcagaggatgatgaatgctcctgattcaaatgataatattgatctacttgtgagcattgatttggtgggtttacaaggag

SEQ ID NO: 76229 - DNA, 421 bp, Glycine max
gagatattttgttggagatctcgtctttgaagtttctaagatgacttctccctacattaaatgtacagtctctttcttcatagcatttggaaatttggctgatgataccatcaattttgaggcttttccccacaagctggtgcagtttggagagattcaggaaaaagttgtattgaaattttcacaagaggaatttcttacagcttggtcaactcaggtgcgtcctgcaacaactctgttggctgatgggtgtccatatttgtatgcaatggtgcatgatagttcagtgtctacaataccaggtgattttgtcattggtgtcaagttgacaaccataaacaatatgtgtgcatatgggctcaatcctggtatttcaggttctcgtcttttgggcaccattcctcagtccatttcacagcaa

SEQ ID NO: 76230 - DNA, 416 bp, Glycine max
gtaacttattgagagttgctgcttggaagaaaggctgtttaatggtcaagattgtgatgtctgggaatgcagcagtcaaaaggagtgattgggcctcattggtacaagtgtttttaacaaacagcaacagtacagagcattttgatgcatgtaagtggacaaaatcagaaccacattcctgggaattgatcttcccaatagaggtatgtggtcctaataatggttttgaaatgtggagttctgagtgggcaaatcaaacttcatggcatttgagtttccttattgacaatcccaaacagtctacagtttttgatattctcttgggaatctctcaagattttgaaattgcttgtaatactcttatgccagctttttctgttccacaagctactgccagatcttctgaaaatgcggaa

SEQ ID NO: 76231 - DNA, 193 bp, Glycine max
ggaatgcaaagtttatgaatagaggagagctcctccaatgggtctccattttaaaatgtaggtgatttttcaaacagtctatttgaggagagattctcaaagtttatatttatttgcagccaataataagttttggcgtgtctgaatgaatatcacccatatattgattgatattgaatttttgaattcttgt

SEQ ID NO: 76232 - DNA, 184 bp, Glycine max
gcatgatctggattttgtgttttctttcgcttgttcgtttgtgtaattcaataaaggaaattaggcatgaccctcttgttgagtatgctctgcctatttgaaaatttccacacctcttttaattgtcgtaatgatgtgtgaagtgtgtgttatttttaaaaaaaaaaaaaaaataaaaatttaa

SEQ ID NO: 76233 - DNA, 399 bp, Glycine max
cagggacagcgttactggtactactacatcatcgacggctacgacgtctcgcacgaccccgccaaggatcacaccaccgagcccacaactggccgcaagcttaacatcatcgatatcccggctgccaaatcgacctcaaagacaactacatccagctcagaccgcaaatcacgccgcgtctcgaccgcttccattcccaagggccgcggccttagcccagagcgtatcgtcgcaccaaagccacaacgcccacacgagacgcgccaggttatcaacactcagtacgacaagacaacacttgaggacctcaaccgccgcttcgccaagcagcaaatcgcagagtcgtccgacgaatcagactacgactctgacgaaggctccgatgttccctcgctcact

SEQ ID NO: 76234 - DNA, 414 bp, Glycine max
gcaattgaagttaaaagccttagccttccctacaactccaaacacaaagacatcatcatccatggctgcctccgtctccactgtcggagctgtcaacagagctcttttgaacctgaatggttctggagctggagcttcagctcccagttcagccttctttgggaccagcttgaagaaggttattgcctcaagggtccccaacagcaaggtttccggtggaagcttcaagattgttgctgtagaagagaagaaagagattgaagagacccagcagaccgacaaggacagatggaaaggtcttgcctatgatatctcagacgaccaacaagacatcacaagaggaaagggtttggttgactcccttttccaagctccacaggatgctggaactcactatgcagtcatgagcttcta

SEQ ID NO: 76235 - DNA, 417 bp, Glycine max
gtgttttaaatccacaaaatccttttgtgttaaataggtggatggggaaattgactttcccgcagggcacttcccgaagtgttaagagaatgcctctttctatagggggaggagctggtgcaaagaatgctattctcatgaatatgccaaatgctgttctttcaatgtggagatattttgttggagatctcgtctttgaagtttctaagatgacttctccctacattaaatgtacagtctctttcttcatagcatttggaaatttggctgatgataccatcaattttgaggcttttccccacaagctggtgcagtttggagagattcacgaaaaagttgtattgaaattttcacaagaggaatttcttacagcttggtcaactcatgtgcgtcctgcaacaactctgttggctgatg

SEQ ID NO: 76236 - DNA, 185 bp, Glycine max
  unsure (1)..(185): unsure at all n locations
gttcagtgtctacaataccaggtgattttgtcattggtgtcgagttgacaaccataaacaatatgtgtgcatatgggctcaatcctggtatttcaggttctcgtcttttgggcaccattcctcagtccatttcacagcanactgtttgaatcaaatggcaacagtgagaacaccattgaattttg

SEQ ID NO: 76237 - DNA, 415 bp, Glycine max
catgaacgtacgtggattcgggatggtgagacaaccacgcacgctaccatttattggcatttaatttgtcatagttcacttgctccacggtgatattgttattgcatcggttaatgagaattgttttatatccccaaagggtaatactaatactcctttcatttcaaattgatggacgttttaaccttaaaaaaaatgcatattcattgttgcttttggttttaataaaacttttattttaaatttaaatcttaataaatatgattttctcggtcctttatatgaaaattaaataattaatttatcaagatcaataaaaatacactttaatgacactacaccttcaccataaactttatttttattcttaaaaatacacttttaattgtacgtagttattaacatttaatgacac

SEQ ID NO: 76238 - DNA, 407 bp, Glycine max
ctttcaatgtggagatattttgttggagatctcgtctttgaaggttctaagatgacttctccctacattaaatgtacagtctctttcttcatagcatttggaaatttggctgatgataccatcaattttgaggcttttccccacaagctggtgcagtttggagagattcaggaaaaagttgtattgaaattttcacaagaggaatttcttacagcttggtcaactcaggtgcgtcctgcaacaactctgttggctgatgggtgtccatatttgtatgcaatggtgcatgatagttcagtgtctacaataccaggtgattttgtcattggtgtcaagttgacaacccataacaatatgtgtgcatatgggctcaaatcctgtattcaagttctcgtcttttggcacca

SEQ ID NO: 76239 - DNA, 318 bp, Glycine max
taattctgctcgagctcccaaacagatatttatcctctttctttcattcaaagaaacaagcccctctttataatcattgatccttttctaataaataccatttactcttccaatttcgtcatgcccaaaacctccttcaatcttcatcatcctttataaacaatgcattctttatcttctcccattacatacaaatattctgatataataccttttattaactagaaatctcaaataacctacattccagacatttataataaaaaatacactgtcccttcttattttactttcctccaattaatttattttcctcgc

SEQ ID NO: 76240 - DNA, 116 bp, Glycine max
gtttaattcaattaaggaaattaggcatgaccctcttgttgaggatgctctgcctatttgaaaatttccacacctcttttaattgtcgtaatgatgtgtgaagtgtgtgttatttt

SEQ ID NO: 76241 - DNA, 330 bp, Glycine max
cattcctcagtccatttcacagcaaactgtttggaatcaaatggcaacagtgagaacaccattgaattttgattctagcaagcagagcttttgtcagttttctattgaccttctcggtggaggaatcttagtggacaaaactggagattggatcacacttatacaaaattctccaattagtaacttgttgagagttgctgcttggaagaaaggctgtttaatggtcaagattgtgatgtctgggaatgcaacagtcaaaaggagtgattgggcctcattggtacaagtgtttttaacaaacagcaacagtacagagcattttgatgcatg

SEQ ID NO: 76242 - DNA, 382 bp, Glycine max
ataaaatggacaacactttcagtgttgtaccctcaaaaattgcgcggatggataacaacgatagtgctcttccctttcaatttgctaaaaccaaatgtaattgtagtgctattccgtcacaaggttctattcctgagagcaatcatggtgattgtttgggtgacaatgttgaaagggccctggaacagcttctatcacgcatggacaggatagaagaaatctgtcttggctttcaagagaaaatggtaatgcccatgagcagcattgaggcaagacttcagcaagtcgagcagcaactggatactctgactaagaaatttcagacttctgcttttccatcttgtcctagaatttctgctcttgatgcttcttgtattgaatc

SEQ ID NO: 76243 - DNA, 356 bp, Glycine max
gttttgaaatgtggttttctgagtgggcaaatcaaacttcatggggtttgagtttccttattgacaatcccaaacagtctacagtttttgatattctcttgggaatctctcaagattttgaaattgctggtaatactcttatgccagctttttctgttccacaggctactgccagatcttctgaaaatgcggaatcctctgcatgatctggaatttgtgttttctttcgcttgttcgtttgtttaattcaataaaggaaattaggcatgaccctcttgttgagtatgctctgcctatttaaaaatttccacacctcttttaattgtcgtaatgatgtgtgaagtgtgtgttatttt

SEQ ID NO: 76244 - DNA, 323 bp, Glycine max
caaaggttgctgtaggagataagattgcagtagtgctaagtgctaacacctgcagtgaacaatggcctctgcatcagcatctctgctcaagtcttcacttgttcttgacaagtctgagtgggtgaagggacaaacccttcgccaaccttctgcatcagttgtgagatgcaaccccaccaccccatcaggcctcaccatcagagctggttcctatgctgatgagctcgttaagaccgcgaaaacagtggcttcaccagggaggggtattttggccatggatgagtccaatgctacctgtgggaagcgtttggcttcaattgggc

SEQ ID NO: 76245 - DNA, 312 bp, Glycine max
cagctttttagctagcaaatacattctgcacactctttacggtacgcgactatacctatatctggataaaatgtccatcaatcgtgctttcatcaagaaatgggtcccgaccgagacctggcctatctttggcatcgttggcatcgcctgcggcggtgcgggctactatctttggaagctagccatgggccctgaggttgtgtgggaccgaaagggtgactggaggccgtgggacaaggtcaagcacgaccagaacctcaaattcctctcatacaaccctgaattctgggcacaacgcaagaaggaggcgtt

SEQ ID NO: 76246 - DNA, 212 bp, Glycine max
gttgaaaagagcaatctgatgatgtcagtcaagaacaatattgtgggagacggcgggatctggtagatatggtgcaatgtcaccgcatccaagtaggcgtccgtcatttactatagggcctcggccaaagtacgctctcacgatttcagaaaggtttctcttgggacctctggtttcactgagcacatggccactgccctgggatcctcttt

SEQ ID NO: 76247 - DNA, 348 bp, Glycine max
ggtcaagattgtgatgtctgggaatgcagcagtcaaaaggagggattgggcctcattggtacaagtgtttttaacaaacagcaacagtacagagcattttgatgcatgtaagtggacaaaatcagaaccacattcctgggaattgatcttcccaatagaggtatgtggtcctaataatggttttgaaatgtggagttctgagtgggcaaatcaaacttcatggcatttgagtttccttattgacaatcccaaacagtctacagtttttgatattctcttgggaatctctcaagattttgaaattgctggtaatactcttatgccagctttttctgttccacaggctac

SEQ ID NO: 76248 - DNA, 320 bp, Glycine max
  unsure (1)..(320): unsure at all n locations
aatttccacacctcttttaattgtcgtaatgatgtgtgaagtgtgtgttattttaaaaaaaaaaaaaaaaaaaaaaaaaaaaaaaaaaaaaaaaaaaaaaaaaaaaaaaaaaaaaaaaaaaaaaaaaaaaaaaaaaaaaaaaaaaagaaactaaaagaaaaaaaaaaaaaaaaaaaannaaaaaaaaaaaaaaaaaaagaaaaacaaataaacataaaattttaaaaaaaagaaaataagaagggggccgcaaatttttgcccccttccaccccgaaaaaaaaaaagagtcccgccctcaaaggcctacaaaaattttcc

SEQ ID NO: 76249 - DNA, 328 bp, Glycine max
cagctgcctacaatcaatccttgttttgcggatcgttggctatggggctataccagtttcgattgggtcgctccttgctttagctatactttctgctttaactcttcggtttcatacttgcaagccttgttacccaggtagcggttggggacgtcaactctggccagcgcgttacccgggactcggcgactgttgggtgcttgtagaggcgggcgaaagcctatatattgaagcggtgctccggtactgcgcctttacctgcgcttgacgcctgaagtcctgctcacttccatgagcgggcgccaattcggggtctgtggattgatgg

SEQ ID NO: 76250 - DNA, 280 bp, Glycine max
ggcagaaagcaagctcatcctagagttttaaaaatggcagcagccgtgtccatggctctctgttccccatccttggctggcaaggccgtgaagctgggcccatcagcccccgaagtcgggagggtcagcatgaggaagaccgtcaccaagcaggcctcctccggaagcccatggtacggcccagaccgcgtcaagtacttgggcccattctctggcgagcccccgtcctacctcactggcgagttcccaggtgacttccggctgggacactgctgggctt

SEQ ID NO: 76251 - DNA, 348 bp, Glycine max
cttagttgtcaagttttaatcaacccatactccatggaatggactggtttggccaatagattactgagtaagggcaatgatattctgtgttgcgattatgctagttttgatggtttgattaccaagcaagttatgagcaagatggcagaaatgataaacagtctttgtggtggtgatgaaaaattgatgcgtgaaaggacgcacctgctgttggcttgttgttcaaggatggcaatttgtaagaaagatgttttgagagttgaatgtggaatcccttctggattttcgctcacagttatttgcaatagcatttttaatgagatgctcattagatatagctatgaaaaa

SEQ ID NO: 76252 - DNA, 386 bp, Glycine max
catttgtgtcactggttggactgccaccccaatgcaggatgttcagggttacaattgattgggttatttcctctcaggaatgtgttcccaggacctattgtgttttaaatccacaaaatccttttgtgttaaataggtggatgggaaaattgactttcccccagggcacttcccgaagtgttaagagaatgcctctttctatagggggaggagctggtgcaaagaatgctattctcatgaatatgccaaatgctgttctttcaatgtggagatattttgttggagatctcgtctttgaagtttctaagatgacttctccctacattaaatgtacagtcttttttcttatagcatttggaaatttggctgatgataccatcaaattt

SEQ ID NO: 76253 - DNA, 337 bp, Glycine max
  unsure (1)..(337): unsure at all n locations
gtcttgcaattgaagttgaagtcttgcccttctctcttcaacggcaaacacaagacatcatcatccatggctggctccggcttcactggcggagctggcaacaaagcttttttgaacctgaatgggtctggacctgggggttcagctcccagttcatccttctttgggagcagcttgaagaaggttattggctcaagggtccccaacacaaagatttcctctggaagcttcaagattgttgctgtngaagagaagaaagagattgaagagacccagcagaccgacaaggacagatggaagggtcttgcctatgatatctcagacgaccaacaggaca

SEQ ID NO: 76254 - DNA, 390 bp, Glycine max
atggactgccaccccaatgcaggatgttcaggttacaattgattgggttatttcctctcaggaatgtgttcccaggacctattgtgttttaaatccacaaaatccttttgtgttaaataggtggatgggaaaattgactttcccccagggcacttcccgaagtgttaagagaatgcctctttctatagggggaggagctggtgcaaagaatgctattctcatgaatatgccaaatgctgttctttcaatgtggagatattttgttggagatctcgtctttgaagtttctaagatgacttctccctacattaaatgtacagtctctttcttcatagcatttggaaatttggctgatgataccatcaattttgaggcttttccccacaagct

SEQ ID NO: 76255 - DNA, 307 bp, Glycine max
agaaaccaaatttcatttgtcaactacgcacttaacaaacaaagggcgtattatcaccaaggcgcgggcaacccacaacacaaaccatcatatggacatcaacagctactaccacacttacaccgctaggcccaacaaatctaaaaatgtgctcttcaacaacaaccctccacaccgccgtcaaggtctattgcgaggtgcaaaaacatcgcactctgtccctatacaactgccccactcatagatacatatgcgataccatttatcggctgaccactgataacaaattgccccaactactgctgta

SEQ ID NO: 76256 - DNA, 336 bp, Glycine max
ttttgatgcatgttagtggacaaaatcagaaccacattcctgggaggtgatcttcccaatagaggtatgtggtcctaataatggttttgaaatgtggagttctgagtgggcaaatcaaacttcatggcatttgagtttccttattgacaatcccaaacagtctacagtttttgatattctcttgggaatctctcaagattttgaaattgctggtaatactcttatgccagctttttctgttccacaggctactgccagatcttctgaaaatgcggaatcctctgcatgatctggaatttgtgttttctttcgcttgttcgtttgtttaattcaata

SEQ ID NO: 76257 - DNA, 386 bp, Glycine max
aaatggcaacagtgagaacaccattgaattttgattctagcaggcagagcttttgtcagttttctattgaccttctcggtggaggaatcttagtggacaaaactggagattggatcacacttatacaaaattctccaattagtaacttgttgagagttgctgcttggaagaaaggctgtttaatggtcaagattgtgatgtctgggaatgcagcagtcaaaaggagtgattgggcctcattggtacaagtgtttttaacaaacagcaacagtacagagcattttgatgcatgtaagtggacaaaatcagaaccacattcctgggaattgatcttcccaatagaggtatgtggtcctaataatggttttgaaatgtggagttctgag

SEQ ID NO: 76258 - DNA, 314 bp, Glycine max
aacttattgagagttgctgcttggaagaaaggctgtttaatgggcaagattgtgatgtctgggaatgcaacaatcaaaaagagtgattgggccttattggtacaagtgtttttaacaaacagcaacagtacagagcattttgatgcatgtaagtggacaaaatcagaaccacattcctgggaattgatcttcccaatagaagtatgtggtcctaataatggttttgaaatgtggagttctgagtgggcaaatcaaacttcatggcatttgagtttccttattgacaatcccaaacagtctacagtttttgatat

SEQ ID NO: 76259 - DNA, 161 bp, Glycine max
gattaagttagagtgattcggtattggctagatctctagctgagatcatcgtgagttcatggatgacttcttgtatagtgtgtggaaacaagagaaatcgctgcactacaattaattagtttggccatgcttactggttatgcacatgttgtctaagacaa

SEQ ID NO: 76260 - DNA, 146 bp, Glycine max
ctcataagtattatttctcatggatgcgagaagaataccctaaggggggaccactattatgctggagctcttcaccatccaaatactatcattgcgttctcttatacctacaaacttcaagcctaaataacacacactaacgcttc

SEQ ID NO: 76261 - DNA, 385 bp, Glycine max
tgggaatgcagcagtcaaaaggagtgattgggcctcattggtggaagtgtttttaacaaacagcaacagtacagagcattttgatgcatgtaagtggacaaaatcagaaccacattcctgggaattgatcttcccaatagaggtatgtggtcctaataatggttttgaaatgtggagttctgagtgggcaaatcaaacttcatggcatttgagtttccttattgacaatcccaaacagtctacagtttttgatattctcttgggaatctctcaagattttgaaattgctgggaatactcttatgccagctttttctgttccacaggctactgccagatcttctgaaaatgcggaatcctctgcatgatctggaatttgtgttttc

SEQ ID NO: 76262 - DNA, 389 bp, Glycine max
ttggtgctggttcacattcttcagaagattttcctgaaaaggaagagcaagaaaaacccaaaaagattgatgccagattgagacaaagaatagatcctcaatacaatgaggttcaggctcagatggaaacaaatttgtttaaattgtctcttgatgatgttgaaactcctaaaggttccatgttggatctgaaaatttctcaatctaaaattgcacttcccaagaacacagttggaggaaccattctgcgtagtgatctattggcaaattttttgacagagggcaattttagagcaagtgttgatttgcagcgcacttatcgtattagagggatgattaaaatggtggccacagttggtattcctgagaatacaggtatatcattggcc

SEQ ID NO: 76263 - DNA, 390 bp, Glycine max
tggaaatgcaagaagcttatcttgtcaatctcgtaaatgtgtgacgagaattgtatttgcacagtccagaggaagctcgtcaattgagaaggaaagctctctctcgtattgaatggctgcaaaaagctgatgtgcctaccatagcacagattgaagagttccattcgatgcagaggatgatgaatgctcctgattcaaatgataatattgatttactgttgagcattgatttgttgggtttacaaggagcaggtaaagcttttccaaacaaaattgtttttgatgataagcttgtgttggctaacacacaagaattctttgatggaaattttccagtggattcttggttaccaatttttgtgaattgtctttatcctgtaagtcaattac

SEQ ID NO: 76264 - DNA, 391 bp, Glycine max
atttgcaatagcatttttaatgagatgctcattagatatagctatgaaaaattactgcgccaggctaaagctccaagtatgtttttacaatccttcaaaaattttgtttctttgtgtgtgtatggtgatgataacttaattagtgttcatgaatatgtcaagccttactttagtggttctaaattgaaaagctttctagctagtcataacatcaccattactgatggtattgacaaaactagtgcaactttgcaatttagaaagttagcagattgtgattttctcaagagaaactttaagcagatgtctaatgttttgtgggtggctcctgaggacaaggcgagtttatggtcacaacttcattatgtttcgtgtaataatcttgaaatgc

SEQ ID NO: 76265 - DNA, 390 bp, Glycine max
ggaaatgcaagaagcttatcttgtcaatctcgtaaatgtgttacgagaattgtatttgcacagtccagaggaagctcgccaattgagaaggaaagctctctctcgtattgaatggctgcaaaaagctgatgtgcctaccatagcacagattgaagagttccattcgatgcagaggatgatgaatgctcctgattcaaatgataatattgatttactgttgagcattgatttgttgggtttacaaggagcaggtaaagcttttccaaacaaaattgtttttgatgataagcttgtgttggctaacacacaagaattctttgatggaaattttccagtggattcttggttaccaatttttgtgaattgtctttatcctgtaagtcaattacc

SEQ ID NO: 76266 - DNA, 279 bp, Glycine max
tgacgaagccattatttttctgcatacgcttctgaatcaaactgagggcatgattaacactaggaggatgacaatatacggatgctgcatattactctacactccatcgtaatgcgggtgcctattacccaagaaagtttcttgaacacagggaatacaagttcagaaatctcacccagctccacagaatttgccaaccttatagagaacaattcacaaaactaaaaaagatctgacctttcttaaactcgtttgacatatcataagggaatttattaa

SEQ ID NO: 76267 - DNA, 326 bp, Glycine max
gattcccttgtccaaggatcaactaccagatggacatctatcgcttttttattgcatttatatcttattattttgtgcatcgtgaatatgtgatttttaagatactcctctcacaattgcagtgttcagttttttgtttttggattaatatgtaacattttgacttcatattgatgctactattgcttacctacctgtgcatggcaataccctctattcatgctcttatgtgcatcctattgcaggctaaaagacgacgtggtcgaaccccaacaccagggaagtatctagggctgagaactattcgtgctcaacggcgttcttca

SEQ ID NO: 76268 - DNA, 423 bp, Glycine max
ccccgtccgtaagctcggaattcggttcgagcaaaaagacagagggttaattgtggagtattttggaaggatgtctgacgttgctcataacgttaatcagccccaagagaaagatttgttggagggaaatttttcctttgatattaaatctcgctctagattggaaaaagtttcctctacaaaagcacaatttgttagtggaaaaaccttcaaatatgatataattggtgctggatcacattcttcagaagattttcctgaaaaggaagatcaagaaaaacccaaaaagattgatgccagattgagacaaagaatagatcctcaatacaatgaggttcaggctcagatggaaacaaatttgtttaaattgtctcttgatgatgttgaaactcctaaaggttccatgttggatctgaaaatttc

SEQ ID NO: 76269 - DNA, 391 bp, Glycine max
tgaaattttcacaagaggaatttcttacagcttggtcaactcaggtgcgtcctgcaacaactctgttggctgatgggtgtccatatttgtatgcaatggtgcatgatagttcagtgtctacaataccaggtgattttgtcattggtgtcaagttgacaaccataaacaatatgtgtgcatatgggctcaatcctggtatttcaggttctcgtcttttgggcaccattcctcagtccatttcacagcaaactgtttggaatcaaatggcaacagtgagaacaccattgaattttgattctagcaagcagagcttttgtcagttttctattgaccttctcggtggaagaatcttagtggacaaaactggagattggatcacacttatacaaaa

SEQ ID NO: 76270 - DNA, 299 bp, Glycine max
agcttgacgccatgcacgcgtacgtagctcggaattggtgggggtcattttttgcagggctgatgtaggtctacaatccaggattgtattgggtaattgcacctaacaattgggctatgctaatctggatttagtctgttttgggcccattctatcattacacaacgttggataaatggcacaggaaacaccatgattttgatttacaagcaactttgtagttttatgactttcgtggagaatttatggcaaactggatggatacattatcaaatttcattgtactgtgagagtgtgtt

SEQ ID NO: 76271 - DNA, 333 bp, Glycine max
tgctgcttggaagaaaggctgtttaatggtcaagattgtgatgtctgggaatgcacaatcaaaaagagtgattgggccttattggtacaagtgtttttaacaaacagcaacagtacagagcattttgatgcatgtaagtggacaaaatcagaaccacattcctgggaattgatcttcccaatagaggtatgtggtcctaataatggttttgaaatgtggagttctgagtgggcaaatcaaacttcatggcatttgagtttccttattgacaatcccaaacagtctacagtttttgatattctctttggaatctctcaagattttgaaattgct

SEQ ID NO: 76272 - DNA, 365 bp, Glycine max
ctacattaaatgtacattctctttcttcatagcatttggaaatttggctgatgacaccatcaattttgaggcttttccccacaagctggtgcagtttggagagattcaggaaaaagttgtgttgaaattttcacaagaggaatttcttacagcttggtcaactcaggtgcgtcccgcaacgactctgttggctgatgggtgcccatatttgtatgctatggtgcatgatagttcagtgtctacaataccaggtgattttgtcattggtgttaacgtgacaaccataaacaatatgtgtgcatatgggctcaatcctggtatttcaagttctcgtcttttgggcaccattcctcagtccatttcac

SEQ ID NO: 76273 - DNA, 375 bp, Glycine max
  unsure (1)..(375): unsure at all n locations
aaaaagttngagcacgctgccctcgtacgtaaattcggatttaggttaaaattgtgatgtctgttaatgcagcagtcaaaaggagtgattgggcctcattggtacaagtgtttttaacaaacagcaacagtacagagcattttgatgcatgtaagtggacaaaatcagaaccacattcctgggaattgatcttcccaatagaggtatgtggtcctaataatggttttgaaatgtggagttctgagtgggcaaatcaaacttcatggcatttgagtttccttattgacaatcccaaacagtctacagtttttgatattctcttgggaatctctcaagaatttgaaattgctggtaatacttttatgccagcttttt

SEQ ID NO: 76274 - DNA, 279 bp, Glycine max
tccacgcgtacgtaagctcggaattcttctcgtgaaaaaaaaaaaattttatattaaaaaaaaaaaaaaaaaaaaagaggaaaatttaaaaataaaaaaaaaaaaaaaaaaaaaaaaataaaaaaataaaaaaaaaaaaaaaaaataaaatttatatttcacctataatataataaaatactcctcataaatattatatatccataatccaataaataatcttatttttctcccctccccccctttttattttctcctccccctattttttttcttccc

SEQ ID NO: 76275 - DNA, 194 bp, Glycine max
ctcaatgtagttattcctttctattcttaaaaatcgatgaacgcaatggagttattcctttctattcttaaaaatagaaaggaataactacattgagttcattgatatctagggcaaatcgatgaactcaatgtagttattcctttctattcttaacaatccttcaagtcataaaattattttttattccaaac

SEQ ID NO: 76276 - DNA, 386 bp, Glycine max
caattttgaggcttttccccacaagctggtgcagtggggagagattcatgaaaaagttgtattgaaattttcacaagaggaatttcttacagcttggtcaactcaggtgcgtcctgcaacaactctgttggctgatgggtgtccatatttgtatgcaatggtgcatgatagttcagtgtctacaataccaggtgattttgtcattggtgtcaagttgacaaccataaacaatatgtgtgcatatgggctcaatcctggtatttcaggttctcgtcttttgggcaccattcctcagtccatttcacaacaaacttgttggaatcaaatggcaacagtgagaacaccattgaattttgattctagcaagcagagcttttgtcagtttt

SEQ ID NO: 76277 - DNA, 372 bp, Glycine max
aaagccttagcctttcctacaactccaaacacaaaggcatcagcatccatggctgcctccgtctccactgtcggagctgtcaacagagctcttttgaacctgaatggttctggagctggagcttcagctcccagttcagccttctttgggaccagcttgaagaaggttattgcctcaagggtccccaacagcaaggtttccggtggaagcttcaagattgttgctgtagaagagaagaaagagattgaagagacccagcagaccgaacaggacagatggaagggtcttgcctatgatatctcagacgaccaacaagacatcacaagaggaaaggggttgggttgactcccttttccaagctccacaggatgc

SEQ ID NO: 76278 - DNA, 138 bp, Glycine max
tttggtctctctttagaaccaaacaactttaatacagggcaattgacctttcaaggggtgcatacagatcacgaaaacaaaaatcctttgtgtaactatataaaccactggacaaaaaaataggttgtgcttaaaaat

SEQ ID NO: 76279 - DNA, 377 bp, Glycine max
acaaaattctccaattagtaacttgttgagagttgctgcttggaagaaaggctgtttaatggtcaagattgtgatgtctgggaatgcagcagtcaaaaggagtgattgggcctcattggtacaagtgtttttaacaaacagcaacagtacagagcattttgatgcatgtaagtggacaaaatcagaaccacattcctgggaattgatcttcccaatagaggtatgtggtcctaataatggttttgaaatgtggagttcttagtgggcaaatcaaactttatggcatttgagtttccttattgacaatcccaaacagtctacaatttttgatattctcttgggaatcttttaagattttgaaaattgcttggtaatac

SEQ ID NO: 76280 - DNA, 333 bp, Glycine max
cggctttagggcagaaatgataaacagtctttgtggtggtgatgaaaaattgatgcgtgaaaggacgcacctgctgttggcttgttgttcaaggatggcaatttgtaagaaagatgtttggagagttgaatgtggaatcccttctggatttccgctcacagttatttgcaatagcatttttaatgagatgctcattagatatagctatgaaaaattactgcgccaggctaaagctccaagtatgtttttacaatccttcaaaaattttgtttctttgtgtgtgtatggtgatgataactttattagtgttcatgaatatgtcaagccttactt

SEQ ID NO: 76281 - DNA, 140 bp, Glycine max
cgaatagattattctaagtctttgggaatagtgctgcaatggcttcaagtcaggaggaggtgacccttttgggagctactggaagcccatttgtgtgcagggttcatattgccctcaagttgaaagggagtttcaaatac

SEQ ID NO: 76282 - DNA, 237 bp, Glycine max
catgcacgcgtacgaagctcggaattcggtcagctcgagccgattttggtcggctgggatatgcttatgaaccatatgttgagccagttgtgcaagctcaaagtgctgaagtttactttgacttcttccctgtggaggttgatagtcaagagggagttgctcacattggtgaactgaaatctggtgtctatgtttcactgcctacaaaaactaatttgggggaaactcctaaggaat

SEQ ID NO: 76283 - DNA, 360 bp, Glycine max
  unsure (1)..(360): unsure at all n locations
tggaaatgcattatagcttatcttgtcaatctcgtaggtgtgtggcgagaattgtatttgcacagtccagaggaagctcgccaattgagaaggaaagctctctctcgtattgaatggctgcaaaaagctgatgtgcctaccatagcacagattgaagagttccattcgatgcagaggatgatgaatgctcctgattcaaatgataatattgatttactgttgagcattgatttgttgggtttacaaggagcaggttaagcttttccaaacaaaattgtntttgatgattagcttgtgttggctaacacacaagaattctttgatggaaattttccagtggattctttgttaccaattttt

SEQ ID NO: 76284 - DNA, 299 bp, Glycine max
agactatctttatataataatataaataagaataaaggaatggaaaaaaaaaaaggaatctatataaatataaaaataatatatataaggtacaaatagtaaatcgaggtacccattttatgataaactttccttccatttttgttcctctagtaggcctagtatttccggcaattgcaatggcttctttatttctttatgttcaaaaaaacaagattttttagatacagaaaacaaagtaaaaatttggggttttttattccccaattataatacttaaatttaaaaaggagaagtaa

SEQ ID NO: 76285 - DNA, 166 bp, Glycine max
acgggggggcgcgcgtacgtaagctcggaaaccgttttgagcggctatcttttttctcacgaagcctcggctgcaggggaggtgcctcaagctggagtgtgactcattacacacaccagcgttgcttaatacaaacaccttcaaacttctacattgtcccacaaaa

SEQ ID NO: 76286 - DNA, 142 bp, Glycine max
  unsure (1)..(142): unsure at all n locations
ctcgagccgntttataattttttaaaaaacaataaaaaaaaaagatagggtatatattaataaaatataataaaaaaaaaaaaaaaataaaataaaaaaaaaaaaaataaattttattataaataaaatataataaattaaa

SEQ ID NO: 76287 - DNA, 333 bp, Glycine max
caccattactgatggtattgacaaaactagtgcaacggtgcaatttataaagttggcagattgtgattttctcaagagaaactttaagcagatgtctaatgttttgtgggtggctcctgaggacaaggcgagtttatggtcacaacttcattatgtttcgtgtaataatctggaaatgcaagaagcttatcttgtcaatctcgtaaatgtgttacgagaattgtatttgcacagttcagaggaagctcgccaatagagaaagaaagctctctcttgtattgaatggctgcaaaaaagctgttgtgcctatcatatcacagattgaagagtttc

SEQ ID NO: 76288 - DNA, 351 bp, Glycine max
aagtgtacaaaattagaaccacattcctgggaattgagcttgggaatataggtatgtgggcctaataatggttttgaaatgtggagttctgagtgggcaaatcaaacttcatggcatttgagtttccttattgacaatcccaaacagtctacagtttttgatattctcttgggaattcttcaagattttgaaattgctggtaatactcttatgccagctttttctgttccacaggctactgccagatcttctgaaaatgcggaatcctttgcatgatctggaatttgtgttttctttcgcttgttcgcttgtttaaatcaattaaggaaaattatgcattacccttttgtt

SEQ ID NO: 76289 - DNA, 251 bp, Glycine max
aatgaggttcaggctcagatggaaacaaatttgtttaaattggctcttgatgatgttgaaactcctaaaggttccatgttggatctgaaaatttctcaatctaaaattgcacttcccaagaacacagttggaggaaccattctgcgtagtgatctattggcaaattttttgacagagggcaattttagagcaagtgttgatttgcagcgcactcatcgtattagaggaatgattaaaatggggggcccagt

SEQ ID NO: 76290 - DNA, 303 bp, Glycine max
atgctctcaattttatgatgagaaatcttgaggtgattcgaggtgcatgtttcacattaattggggggtgggggaaaaattaggattaataaatgtcatctagcttacatggcatacatgtttactgttacctaagttttggcagcatcctgatttaatttcattaggatgaatattgagaatgtcatattgttccctgttatagcaaactatctatctttttgcattcttttaagaaaacttttatcatgattggtttgtgaccattgtttaagatgtaatttgatttgattcattttgatt

SEQ ID NO: 76291 - DNA, 147 bp, Glycine max
cttcattttttttttcccccacaccccatgaaatatgggccaatgttactcttcagtgtgggggtcactgttccaattatccccttatccaatctcgcatcaacgatatgggctctctatttttagtcttttgctgtattcaaactt

SEQ ID NO: 76292 - DNA, 423 bp, Glycine max
gttctgaatattggtgcgtttgatttgatggtgttgcagctggtagtccttgggatagaaatgggatcgcatggggtacgaaaatttcatgctgtgcaagaagccaaaaggtgtggcggatgtagatggagatgcaagtgggatttcgcgcaccaacaaggggattgggagctggaaggcttggttcaacaaaatcctcaacctcaagaattctacccaactgattcgattaatcgaataaaaaaactcttggggaattgaacaatgatgccttttggggtgaaatgaatgccccttattttataaggaatatggatttttcttgggatgggttttttttttcggaagtccccaaaaacccctttttttggaaattttttttaaaatttttagttttttaggttttttgatttttttgggaaa

SEQ ID NO: 76293 - DNA, 308 bp, Glycine max
  unsure (1)..(308): unsure at all n locations
tgcaattgaagttaaaagccttagccttccctacaactccaaggacaaagacatcatcatccatggctgcctccgtctccactgtcggagctgtcaacagagctcttttgaacctgaatggttctggagctggagcttcagctcccagttcagccttctttgggaccagcttgaagaaggttattgcctcaagggtccccaacagcaaggtttccggtggaagcttcaagattgttgctgttgaaagagaagaaagagattggagagacccagcataccgacaaggacagatggaanggtcttgccta

SEQ ID NO: 76294 - DNA, 366 bp, Glycine max
gcacattccagttgaagctcgccaattgagaaggaaagctcggtctcggattgaatggctgcaaaaagctgatgtgcctaccatagcacatattgaagagttccattcgatgcagaggatgatgaatgctcctgattcaaatgataatattgatttactggtgagcattgatttgttgggtttacaaggagcaggttaagcttttccaaacaaaattgtttttgatgataagcctgtgttggctaacacacaagaattctttgatggaaattttccagtggattcttggttaccaaattttgtgaattgtcttttttctgtaagtcaattaccttcataagctgtcgttgttaaatgtaacatgtt

SEQ ID NO: 76295 - DNA, 132 bp, Glycine max
cctcaaccatatttcgttcttcttatgaatatacccaaaacagttgctgcacacatgggtacagtggccggcaatctcatatttaaaccccctaacattcatcacccatagcagaaactttctgcccaccgc

SEQ ID NO: 76296 - DNA, 287 bp, Glycine max
ggggtggggttattttgggggggggtggataaaaataatttttctaattttttctttatatttattcaatatttatttttattattctattttattttataatttttttttaattttatatttattttatatttttttttatattttattttttaatattattatatttctattattttttaattttatttctaatttttattttatttttttttcattttgattatttttttattgttttcttttttttatttaattttttttatttttatattatatttaatttt

SEQ ID NO: 76297 - DNA, 290 bp, Glycine max
gtcttgcaattgaagttgaagtcttgcccttctctcttcaactccaaacacaagacatcatcatccatggctgcctccgtctccactgtcggagctgtcaacagagctcttttgaacctgaatgggtctggacctggggtttcagctcccagttcatccttctttgggagcagcttgaagaaggttattggctcaagggtccccaacacaaagatttcctctggaagcttcaagattgttgctgtagaagagaagaaagagattgaagagacccaacagaccgacaagga

SEQ ID NO: 76298 - DNA, 224 bp, Glycine max
acgcgtacgtaagctcggaattcggcttgtgagcttgagattttagttttgtggcagctgtcttcttcatcaacggtggttttgggatcaatccggttgatagaaaaaccatttccatttccaatggctaacgaaatccctcacgatgtggtagtgtgtcgttccggcgccaacggaataatcggctcgtggttggtccgaacccattcggttaatgagtaccc

SEQ ID NO: 76299 - DNA, 259 bp, Glycine max
attttgtcattgtgtgtcaagttgacaaccataaacaatatgtgtgcatatgggctcaatcctggtatttcaggttctcgtcttttgggcaccattcctcagtccatttcacagcaaactgtttggaatcaaatggcaacagtgagaacaccattgaattttgattctatgcaagcagagcttttgtcaggtttttattgaccttctcggtggaggaatcttagtggacaaaactggagaattggtcacacttatacaa

SEQ ID NO: 76300 - DNA, 264 bp, Glycine max
aagctcgtatttcggctcgagcaatccccttctttcttctctttctatccaaattctccaccagccatggctttttcttcagcaacagcttcctccaaactcatactattcccccatgcatcatcatcctcttcccttaattccacacccttccgctccttcaccaccaacacccacaaactaacccctctctcctcctccttcctccaccccaccaccgtccttcgtcgcaccccttcttccaccaccaccccgcgttatacc

SEQ ID NO: 76301 - DNA, 334 bp, Glycine max
tgaaatctggctctattcaagagtaagggagaaaagtgtgaagggatcctccactttgttcctcaaacttctttctttgccattgattgaactgtgtttttgaacatggcatcatggtaatgcgtttctcacgcttctctgcttattgtttcttgtttttcttccctctctaatccacccttcaatgccatttccaccctttccgagaaaacgggaaaccaaagtttggatttgttcaaaattcttaattttctggtttttgaacggtatgaacattgttggttttaaggggagctgattttcttacgttatttgatgtgatctcgtgcttagt

SEQ ID NO: 76302 - DNA, 371 bp, Glycine max
ctcgagcctaatttgctcgaggtttatttcctctcaagaaagggttcccaggacctattgtgttttaaatccacaaaatccttttgtgttaaataggtggatgggaaaattgactttcccccagggcacttcccgaagtgttaagagaatgcctctttctatagggggaggagctggtgcaaagaatgctattctcatgaatatgccaaatgctgttctttcaatgtggagatattttgttggagatctcgtctttgaagtttctaagatgacttctccctacattaaatgtacagtctctttttttatagcattaggaaatttggctgatgataccatcaattttgaagctttttcccacaagctggtgc

SEQ ID NO: 76303 - DNA, 163 bp, Glycine max
gaagtatctgatttttcttacctggcaattgcttcacactcatgcaggcttctccaagctgtgaggctggtcacattctctgctccctaaaaaagctttttactgtacaactgtgggatgtctgataatgcatcagactcctagagagattgttcctgcttgt

SEQ ID NO: 76304 - DNA, 343 bp, Glycine max
ctcgaaccaaatttgctcttgaaaaaaaaaaaaaaaaaaaactcgcgaaatttaaaaaaaaaaaaaaaaaaaaaaaaaaaaaaaaaaaaaaaaaaaaaaaaaaaaaaaaaaaaaaaaaaaaaaaaaaaaaaaaaaaaaaaaaaaaaaaaaaaaaaaaaaaaaaaaaaaaaaaaaaaaaaaaaaaaaaaaaattggggcccccccccccaaaaaaacctcccccccccaaaaaaaaattcccccccaacctttaagcgcaaacaatttttctttatatggaccctataaaaatcttgccaaaaaaactcaaaaacttattccttttaaaaaaattttccccccc

SEQ ID NO: 76305 - DNA, 410 bp, Glycine max
cacgcgtacgtaagctctgaattcggctcctgaaaaaaatttttttataaacccaaaaactaataaaaataggaaaggtcttttataaaaaaaaagaaaccttaaattcatacaaatatacaaaaaataccaaataaataaaaaaacaataaaactgccccccccctcctttttccctctccacccctcatattaatcccttcccttcccctttagccttcccaattttccctttatcaaaccctttttaaccttccctcaaccttggaccaaccttttccctgtaaaaaatttttaccccctcccatttccccccatcatcctacccgatcccttaaaatttaaaccctggggccccctattaattaccctccccccttttttttttttcccctccctcccccttttcc

SEQ ID NO: 76306 - DNA, 405 bp, Glycine max
ggtcaagattgttatgtctgggaatgcagcattcaaaaggaagaattgttcctcattggtacaagtgtttttaacaaacagcaacagtacagagcattttgatgcatgtaagtggacaaaatcagaaccacattcctgggaattgatcttcccaatagaggtatgtggtcctaataatggttttgaaatgtggagttctgagtgggcaaatcaaacttcatggcatttgagtttccttattgacaatcccaaacagtctacagtttttgatattctctagggaatctctcaagattttgaaattgctggtaatacttttatgccaactttttctgttccacaggctactgccagatcttttgaaaatgcggaattctttgcatgatctggaattttggttttctt

SEQ ID NO: 76307 - DNA, 295 bp, Glycine max
aagctcgaattcgctcgagatcttcaaatactctatttctatcttccaatcctgctcctgggttgagtgatttttaaagggggagacctcctcaacctcgcccatttacaaagaaagctctctcccctattgaatggccacacaaagctcatgtgcctaccataactcatccttgaagagatccattccatgctaaagataattaatgctcctgattcaaatgattactattgatttactgttgaccatcaatcatgttgattcacaaagagcaggtccaagcttttccaaacaa

SEQ ID NO: 76308 - DNA, 244 bp, Glycine max
gcgtacgtaagctcgtaattcggctcaagcaaatcgtacttttgttaattccatcaatttttaggcgtgttgggctcattctgtaacaggggggatagacccaagaaaaattttttttgaaattttcacatgaggtattttttacaatttggttatctaatgtacatcctgcaacatccttattcacattatgttagccatatatccatgcaataggacatagatagttgatagttctacaata

SEQ ID NO: 76309 - DNA, 321 bp, Glycine max
gcgtacgtaagctcgtaattcggctctatccttgaatcatgttataaaggataggcaattttgccgtggcaggctagtttacttcagattctatgtcaatcacagcttacattaaagctaaaaaacaaaaataaagaacttcatttttaaaaaaaaaaaaaaaaaaaaaataaacaaaaaaataaaaaataaatataaaaaaaaatcataaatatattacaaaaaaaataatacataaaaaaaatggggcggccgcccccttttgagctcgtctacccggaattcaattccggaccggcccctgcaggcttaccagctttc

SEQ ID NO: 76310 - DNA, 399 bp, Glycine max
attttgttggagatctcgtctttgaagtttctaagatgacttcgccctacattaaatgtacagtctctttcttcataacatttggaaatttggctgatgataccatcaattttgaggcttttccccacaagctggtgcagtttggagagattcaggaaaaagttgtattgaaattttcacaagaggaatttcttacagcttggtcaactcatgtgcgtcctgcaacaactctgttggctgatgggtgtccatatttgtatgcaatggtgcatgatagttcagtgtctacaataccaggtgattttgtcattggtgtcaagttgacaaccataaacaatatgtgtgcatatgggctcaatcctggtatttcacgttctcgtcttttgggcaccattcctc

SEQ ID NO: 76311 - DNA, 213 bp, Glycine max
gctctaattctgctcgatcctatactcattttattttatctcatttactccctcctctctgtagagatcttttaaaaagacaagcacacacacacacacactcacacacacacacacaccaaacacttctaatttttttctcatattaaattataccacctttctttttctactttaaacctccctttactttaaaatctatctctctctttc

SEQ ID NO: 76312 - DNA, 281 bp, Glycine max
aaaaaaatttattttttttaaaataaaaaaacattttaagaaaagatttatttaaaaaaaaaagaaaccaatcatatctttattttctaaatatataattaaccactcaataaataataaattaataaataatgtgccccccccctctttataaccccttccccccctaatttatttcaaccctttcccttatacaatccctatttcccctatataaattcctttttaaaccctcccttaaaacttctttttacctttatacctcattaaaattttttttc

SEQ ID NO: 76313 - DNA, 393 bp, Glycine max
ctcaatcctggtttttcaggttctcgtcttttgggcaccattcgtcagttcatttcacagcgaactgtttggaatcaaatggcaacagtgagaacaccattgaattttgattctagcaagcagagcttttgtcagttttctattgaccttctcggtggaggaatcttagtggacaaaactggagattggatcacacttatacaaaattctccaattagtaacttattgagagttgctgcttggaagaaaggctgtttaatggtcaagattgtgatgtctgggaatgcagcagtcaaaaggagtgattgggcctcattggtacaagtgtttttaacaaacagcaacagtacagagcattttgatgcatgtaagtggacaaaatcagaaccacat

SEQ ID NO: 76314 - DNA, 404 bp, Glycine max
gctgatgataccattaattttgaggcttttccccacaagctggggcagtttggagagattcaggaaaaagttgtattgaaattttcacaagaggaatttcttacagcttggtcaactcaggtgcgtcctgcaacaactctgttggctgatgggtgtccatatttgtatgcaatggtgcatgatagttcagtgtctacaataccaggtgattttgtcattggtgtcaagttgacaaccataaacaatatgtgtgcatatgggctcaattctggtatttcaggttctcgtcttttgggcaccattcctcagtccatttcacagcaaactgtttggaatcaaatggcaacagtgagaacaccattgaattttgattctagcaagcagagcttttgtcagttttctat

SEQ ID NO: 76315 - DNA, 305 bp, Glycine max
cgaagctcgaatttgctcgagtctatatacatctttttccaccgaaaaaacatatccatatgaaagattacccttaataggggccatctccacattatctataatccgtaaatatacccccatagaatctacctattcagctttccatcggtatgtatccatgcgaataactcaacatgcctctttctgaaacaaaataactaccctctatccatgcctcaaaagggttgattatatgtaaaaacaaccaatgaatccatgattaaacccttctacatttttttattataaacttattcatcaat

SEQ ID NO: 76316 - DNA, 323 bp, Glycine max
ctctatccgctttccttttcatataaaataatcaacatctttcccaaagatctatttgtgaggtaggacagcccacctccttatttttctgccatttctattggtgactaactagacagctacatattatcttcaaccaaatcccgttcattcaagcatgagtcatttctctgcccctcacttatctattcactcccaactccaataccatcatcttttttatggcacaatcacactctctatttttctcctttcaatccctcacattcttaccttttttcctctccccattttttactacaacccggatttcttttctcctt

SEQ ID NO: 76317 - DNA, 213 bp, Glycine max
caaacggcatctgtgagaacaccattgaattttgattctagcgggcaaatcttttgtcaggtttctattgaccttctcggtggaggaatcttagtggacaaaactggagattggatcacacttatacaaaattctccaattagtaacttgttgagagttgctgcttggaagaaaggctgtttaatggtcaagattgtgatgtctgggaatgca

SEQ ID NO: 76318 - DNA, 220 bp, Glycine max
aagaagctccctctccgatgaggattcttaaaaaagggggtgggcctaccctaacccatttttgaatattccataccatgcaaaagatgatttatgcccctgaatcaaatgatatttttgattttcttttgaacatttatttgtttgggttctcacaaatccagtatagcttttccaaacaaaatttattttgatgataaacttgaggtagcttacacac

SEQ ID NO: 76319 - DNA, 241 bp, Glycine max
  unsure (1)..(241): unsure at all n locations
gaagagcgcggcgaagctagaattctgctcgaggtattaggtcctttttattgcgaactagtatgtantaggtaggcacttaaataaagcggagttagtctgttcaatgagtgtgtttaaatataaaaaaaaaaaaaaaaaaatatataaaattttaaaaaaaaaataaataataaataaaaaaaaaaaaattattaaaaaattaaaataaaataataaataaaaaattattgggcggccc

SEQ ID NO: 76320 - DNA, 358 bp, Glycine max
atggttttgaaatttggagttctgagtgggcaaatcaaacttcgtgcatttgagtttccttattgacaatcccaaacagtctacagtttttgatattctcttgggaatctctcaagattttgaaattgctggtaatactcttatgccagctttttctgttccacaggctactgccagatcttctgaaaatgcggaatcctctgcatgatctggaatttgtgttttctttcgcttgttcgtttgtttaattcaataaaggaaattaggcatgaccctcttgttgagtatgctctgcctatttgaaaatttccacacctcttttaattgtcgtaatgatgtgtgaagtgtgtgttatttt

SEQ ID NO: 76321 - DNA, 400 bp, Glycine max
ttatttttctgtttaaatcacatacatattacttctaatcttagaccttatataaatgggggagggtccctcccataatgtttctttatatttaacatacaaagttctctttctttatttctaatatttgattgtataaatatctttattgttaacctccctgtatttttcttctctcaattactttcccttttttataccatacttattttttaatttatcgaaatcttactttctttttttttatatttctcttttctttatcttttacttttctttatttaattttatatttatatcctattctttcttatatttctcttttttacataaattatttatgtcttcttttattttttaattcctttactatccctttatattttttttatccttttcc

SEQ ID NO: 76322 - DNA, 421 bp, Glycine max
ctcgagccgattctgctcgaggataacttaattagtgttcatgaatatgtcaagccttactttagtggttctaaattgaaaagctttctagctagtcataacatcaccattactgatggtattgacaaaactagtgcaactttgcaatttagaaagttagcagattgtgattttctcaagagaaactttaagcagatgtctaatgttttgtgggtggctcctgaggacaaggcgagtttatggtcacaacttcattatgtttcgtgtaataatctggaaatgcaagaagcttatcttgtcaatctcgtaaatgtgttacgagaattgtatttgcacagtccagatgaagctcgccaattgagaaggaaagctctctctcgtattgaatggctgcaaaaagctgatgtgcctaccatagcac

SEQ ID NO: 76323 - DNA, 321 bp, Glycine max
caaacatcaacaattcatagatattacatctacctaattacatggggaagacaaggatatagggagctatacatatgccaggccaacaaacacgccaatgggttcttgccaacccgccggtcaacgaccccgtcatcgagggcaaggacgcgacctttgagctcaagaccgtcgacctcccaagcccaagcgctgaccaggtcctcatcaagatcctctacttatcaaatgacccaccgcaaagaggatggattcaaaaggatatggaccccgagcgcctctacgttccgccagtaaacgaaggcgacatcatgcgttcct

SEQ ID NO: 76324 - DNA, 106 bp, Glycine max
cctaaacaaacacttgtataaaatccctaaatacacaaactcccccccttttttaaaacacccggggcccctaccatacaaatttccaccatttcattcacaaaca

SEQ ID NO: 76325 - DNA, 320 bp, Glycine max
  unsure (1)..(320): unsure at all n locations
gacaaaactagttcaactttgcaatttagaaagttagcagaagaggattttctcaagagaaactttaancanatgtctaatgttttgtgggtggctcctgaggacaaggcgagtttatggtcacaacttcattatgtttcgtgtaataatctggaaatgcaagaagcttatcttgtcaatctcgtaaatgtgttacgagaattgtatttgcacagtccagaggaagctcgccaattgagaaggaaagctctctctcgtattgaatggctgcaaaaagctgatgtgcctaccatagcacagattgaagagttccattcgat

SEQ ID NO: 76326 - DNA, 358 bp, Glycine max
aagctctctctcttattgaatggctgcaaaaagctgatgtgcctgcatggtacaaattgaagagttccattcaatgcacaggatgatgaatgctcctgattcaaatgataatattgatttactgttgagcattgatttgttgggtttacaaggagcaggtaaagcttttccaaacaaaattgtttttgatgataagcttgtgttggctaacacacaagaattctttgatggaaattttccagaggattcttggttaccaatttttgagaattggctttatcctgtaagtcaattaccttcagaagctgtcgttgtaaatgttacatgtggtagtggacgtggtggtttacccaccact

SEQ ID NO: 76327 - DNA, 346 bp, Glycine max
gtttttacaatccttcaaaaattttgtttctttgtgtgtgtatggtgaggataacttaattagtgttcatgaatatgtcaagccttactttagtggttctaaattgaaaagctttctagctagtcataacatcaccattactgatggtattgacaaaactagtgcaactttgcaatttagaaagttagcagattgtgattttctcaagagaaactttaagcagatgtctaatgttctgtgggtggctcctgaggacaaggcgagtttatggtcacaacttcattatgtttcgcgtaataatctggaaatgcaagaagcttatcttgtcaatctcgtaaatgtgtta

SEQ ID NO: 76328 - DNA, 209 bp, Glycine max
gctgtgtctatttgctggcctaagttaggtgtttcttatgtggagagattgcatactagggctacccacaaccttcttgatcgctcatgaaatgtagaatatatcaaatgtggctacacgttattaggtgttaaacttttatacacaaactttgcatgcaaactattaaatacatttatgaaactaaccatacacatactgttagctga

SEQ ID NO: 76329 - DNA, 340 bp, Glycine max
cataatttgagattatcatgatctagacaatcttcacatgacgcataattaagttgtggggacctttttgttaattggaatattcagttccatgctgtctaaatactaatcttagaccatgaacatgtggtagtcttgtaccatgtaataatttctcctctcctacagagtattctcacaggcttctagtgtttttggactagtttcatggtgtgaaaatcaattatttttcattgtgtagttacttctactttttcgtggcatcaccatgattttgtaaggtagaatttatttttgtgtattatccaaacacactattcattaagtggaattggcttta

SEQ ID NO: 76330 - DNA, 323 bp, Glycine max
accccttcattaagttgttgagataattttctatgggagatttcattgaaaactcaaataattaaaagtatcattgactctcatgcattcgtgactataaatttcggtgacctacgaagcaacctggtatattaatttggtttcagctagtcttcaatatacacttggacatggctcaaaccaatctttgttctatatctgtaccttttcttattctattaatgatcgcctttaatttcagtgcacagattactccagttagtgcaggtttgtctttctcattgaaaaatgcaaagatgtacaaaagcatatatggtagaatt

SEQ ID NO: 76331 - DNA, 328 bp, Glycine max
gttcttcaaaattttggaaaagttttctggtggcgatggaacggggatggtcagattcgcctcggggacgtgatttaccgtaacattccttttgaagtcaccattgaaggtcgtgtccctaaaaaagcctcttggggttggtggcatactcttcttctggccgaatcccacactttatgccatggtgctcctcacccaattatgctagttagcgggtatatttgatggcaatctatatgtgtacatacaatactgggatacaaatacatacttcgaaggattgaatcatggcgtgagaatgaccatgacttgctatagcatttaacac

SEQ ID NO: 76332 - DNA, 220 bp, Glycine max
aatccctccgtaaaacaaatttttattttaacaaataacaaatcaaaaaccgtcatgattttaaataaccgtctgccccttcataacaaacctatccctacaccaaaccaaatcaaatcgaaaatcctctaaaaattccaataccacattttcaacaaaataaatcccccaaaataatcatatcttactatcaaaatatatttatttcttaacaccccta

SEQ ID NO: 76333 - DNA, 191 bp, Glycine max
ctaacaatatgcttgttcctaacacttgggacaatgaaagggatgggtttttcttcgtggagcagatccttcttaaagctcttgcctggctgcactttcctgcgtaaacactgcagatttaaactctttacgccactaattcctattcctcctccacttcttgagaactgccacacactaaattatcttgt

SEQ ID NO: 76334 - DNA, 398 bp, Glycine max
caagactgtgaattgtggaatcctgcttgcacaaaagcaatgactatgtcatttaatccaaacccgtgttctgatgcatggagtttggaatttctgaagcgtactggatttcattgcgatatcatttgtgtcactggatggactgccaccccaatgcaggatgttcaggttacaattgattggtttatttcctctcaggaatgtgttcccaggacctattgtgttttaaatccacaaaatccttttgtgttaaataggtggatgggaaaattgactttcccccagggcacttcccgaagtgttaagagaatgcctctttctatagggggaggagctggtgcaaagaatgctattctcatgaatatgccaaatgctgttctttcaatgtggagatattt

SEQ ID NO: 76335 - DNA, 393 bp, Glycine max
tcaagattgttatgtctgggaatgcagcagtcaaaaggcgtgattgtgcctcattggtacaagtgtttttaacaaacagcaacagtacagagcattttgatgcatgtaagtggacaaaatcagaaccacattcctgggaattgatcttcccaatagaggtatgtggtcctaataatggttttgaaatgtggagttctgagtgggcaaatcaaacttcatggcatttgagtttccttattgacaatcccaaacagtctacagtttttgatattctcttgggaatctctcaagattttgaaattgctggtaatactcttatgccagctttttctgttccacaagctactgccagatcttctgaaaatgcggaatcctctgcatgatctggaattt

SEQ ID NO: 76336 - DNA, 342 bp, Glycine max
ctgatgcatggagtttggaatttctgaagcgtactggatttcattgcgatatcatttgtgtcactggatggactgccaccccaatgcaggatgttcaggttacaattgattggtttatttcctctcaggaatgtgttcccaggacctattgtgttttaaatccacaaaatccttttgtgttaaataggtggatgggaaaattgactttcccccagggcacttgccgaagtgttaagagaatgcctctttctatagggggaggagctggtgcaaagaatgctattctcatgaatatgccaaatgctgatctttcaatgtggagatattttgtggagatctcgt

SEQ ID NO: 76337 - DNA, 84 bp, Glycine max
gagcaatacgagatccctatggccacctcaaacggagtgctttttcattacttgcagacaccaatctactgctagggctacact

SEQ ID NO: 76338 - DNA, 392 bp, Glycine max
aatgtggaatcccttctggatttccgctcacagttatttgcagtagcatttttaatgagatgctcattagatatagctatgaaaaattactgcgccaggctaaagctccaagtatgtttttacaatccttcaaaaattttgtttctttgtgtgtgtatggtgatgataacttaattagtgttcatgaatatgtcaagccttactttagtggttctaaattgaaaagctttctagctagtcataacatcaccattactgatggtattgacaaaactagtgcaactttgcaatttagaaagttagcagattgtgattttctcaagagaaactttaagcagatgtctaatgttttgtgggtggctcctgaggacaaggcgagtttatggtcacaa

SEQ ID NO: 76339 - DNA, 189 bp, Glycine max
aacttaattagtgttcatgaatatgtcaagccttactttagtggttctaaattgaaaagctttctagctagtcataacatcaccattactgatggtattgacaaaactagtgcaactttgcaatttagaaagttagcagattgtgattttctcaagagaaactttaagcagatgtctaatgttttgtgg

SEQ ID NO: 76340 - DNA, 242 bp, Glycine max
ctctaacctctcttccaaagatctttctttcagcactttggtggacaataaaaaaacagtgccttgggccgttttttgctgatcgtgccccatattgtagacaaacctatggcggccacttaagcataaagggctttgaaaagcgactttacttgcactcacgttgagaagctttctcttgattcatatgttccgcgcctatatcaaagatgcctgaatgtaaaagagaaaccagtgtttga

SEQ ID NO: 76341 - DNA, 401 bp, Glycine max
gttttgtgtttgtttcctgaggacaaggcgagtttatgggcacaacttcattatgtttcgtgtaataatctggaaatgcaagaagcttatcttgtcaatctcgtaaatgtgttacgagaattgtatttgcacagtccagaggaagctcgccaattgagaaggaaagctctctctcgtattgaatggctgcaaaaagctgatgtgcctaccatagcacagattgaagagttccattcgatgcagaagatgatgaatgctcctgattcaaatgataatattgatttactgttgagcattgatttgttgggtttacaaggagcaggtaaagcttttccaaacaaaattgtttttgatgataaacttgtgttggctaacacacaaaaattctttgatggaaattt

SEQ ID NO: 76342 - DNA, 395 bp, Glycine max
gaatttgttaatgagtggccttaggatccttgttaaggaattataataaaaggtaaaagagcggtccagtgcccaaatgggatgtagggagggttgatatatgaagccttaccaggcatgcgaagaggctattttcaagtttgaacttgtgacctctatgtcacaaaggcaggaaccttacagttatacataatctcaccgtctaatttaaaaagtattgaatgaaaaagtagaagcatttaatatcttgtaaatctataaagccatcattattttcttctttaagctatcaggaggatttgtttattaaatgatattgttaatagagagtattattaaatgcttcttcaacaatgccctaagagcattggttaacaacacctttcattttttgc

SEQ ID NO: 76343 - DNA, 86 bp, Glycine max
agaaaatcctcacccatttcttcgtagccaaacactctgaaattgtcagttatgtcgtggcaagcgtatgtggatgatcacctact

SEQ ID NO: 76344 - DNA, 403 bp, Glycine max
caaaaagacagagggttaattgtggagtattttggaaggatgtcttacgttgctcataacgttaatcagccccaagagaaagatttgttggagggaaatttttcctttgatattaaatctcgctctagattggaaaaagtttcctctacaaaagcacaatttgttagtggaaaaaccttcaaatatgatataattggtgctggttcacattcttcagaagattttcctgaaaaggaagatcaagaaaaacccaaaaagattgatgccagattgagacaaagaatagatcctcaatacaatgaggttcacgctcagatggaaacaaatttgcttaaattgtctcttgatgatgttgaaactcctaaaggtttcatgttggatcttaaaatttctcaatctaaaa

SEQ ID NO: 76345 - DNA, 207 bp, Glycine max
ccttacctaagcattgaattcgagtctagcatcaaatggttcaaaacgcgccgtccacactatcacgggtgtggttacaacctgttgcatggagtataatatggtactaaacagcacccgggattgtaccatgagctgtaatgtgcctaaatgtgcatacaaggcttgaaatatgaggacggctactgacttctcatacaccagaaa

SEQ ID NO: 76346 - DNA, 261 bp, Glycine max
ctgcttgttatcttttacttgaaaccctgttcgtagtggggggaaatgctttcttctccgagcacacccactagattcctttgattctttctttgcttagaattccacagtatatggggactgttcttttcaattactccccacctttgggattcaagggtttgatcatggtggcagaagactcattgcttgggcacgcggacatatggaggtacatgtcatgctttacggactccggggaccttaaagctgttatagagc

SEQ ID NO: 76347 - DNA, 154 bp, Glycine max
caagataatggatttattcaaagatattttgggcggtcgtcggctagagcactcgatacaccgggaataaattccggaccgctgccgtgaggcgctccagttttccatatagagaggcgcactggacctaggcttactcatgtgcatagcatac

SEQ ID NO: 76348 - DNA, 55 bp, Glycine max
aaaaaaaaaaaaataaaataaaaaaaaaaaaaaaaaaaaaaaagaggaaaaaaaa

SEQ ID NO: 76349 - DNA, 358 bp, Glycine max
cacaagctggtgcagtttggagagattcaggaaaaagttgtattgaaattttcacaagaggaatttcttacagcttggtcaactcaggtgcgtcctgcaacaactctgttggctgatgggtgtccatatttgtatgcaatggtgcatgatagttcagtgtctacaataccaggtgattttgtcattggtgtcaagttgacaaccataaacaatatgtgtgcatatgggctcaatcctggtatttcaggttctcgtcttttgggcaccattcctcagtccatttcacagcaaactgtttggaatcaaattgcaacagtgagaacaccatttgaattttgattctagcaagcagagcttt

SEQ ID NO: 76350 - DNA, 363 bp, Glycine max
aacaacgcgtgcacgcgtacataagctcggaattcggctctaacaacaactttttttttttctcccctcctccaaaaccttcggtcccttaaaaaccagaaggctgccaaccaatcctcaacacacaatacattgaatggttctacgttaacacctacaccaaacaatcacaatgggataaactcacctaacccttctaccctccatccttaaactctgcgctctcaccatcagactgacccccagcatacgatcactccaccagtcaaaacttttttccttaaaatacgtgccccttatgaacaaataatccttactacaattattgttattttttcaacatcacctaagacaaacattttt

SEQ ID NO: 76351 - DNA, 396 bp, Glycine max
caaacacaaagacatcatcatccatggctgcctccgtctccactgtcggagctgtcaacagagctcttttgaacctgaatggttctggagctggagcttcagctcccagttcagccttctttgggaccagcttgaagaaggttattgcctcaagggtccccaacagcaaggtttccggtggaagcttcaagattgttgctgtagaagagaagaaagagattgaagagacccagcagaccgacaaggacagatggaagggtcttgcctatgatatctcagacgaccaacaagacatcacaagaggaaagggtttggttgactcccttttccaagctccacaggatgctggaactcactatgcagtcatgagctcctacgagtacctcagcactggac

SEQ ID NO: 76352 - DNA, 171 bp, Glycine max
gcgcgtacgtaagctctgaattcgactctaactcttaatttttatacatgaatacggaaacgcaaccaggggcggcttcctattggggctgcaggctcacccattaatttcacctatctgtccaaagcaccattatatgaccccactgtaaatactgtttctttaaataaa

SEQ ID NO: 76353 - DNA, 372 bp, Glycine max
caccattactgatggtattgacaaaactagtgcaactttgcaatttagaaagttagcagattgtgattttctcaagagaaactttaagcagatgtctaatgttttgtgggtggctcctgaggacaaggcgagtttatggtcacaacttcattatgtttcgtgtaataatctggaaatgcaagaagcttatcttgtcaatctcgtaaatgtgttacgagaattgtatttgcacagtccagaggaagctcgccaattgagaaggaaagctctctctcgtattgaatggctgcaaaaagctgatgtgcctaccatagcacagattgaagagttccattcgatgcagaggatgatgaatgctcctgattcaaatga

SEQ ID NO: 76354 - DNA, 396 bp, Glycine max
ttgcaatttagaaagttagcagattgtgattttctcaagagaaactttaagcagatgtctaatgttttgtgggtggctcctgaggacaaggcgagtttatggtcacaacttcattatgtttcgtgtaataatctggaaatgcaagaagcttatcttgtcaatctcgtaaatgtgttacgagaattgtatttgcacagtccagaggaagctcgccaattgagaaggaaagctctctctcgtattgaatggctgcaaaaagctgatgtgcctaccatagcacagattgaagagttccattcgatgcaaaagatgatgaatgctcctgattcaaatgataatatttgattactgctgagcattgatttgttgggtttacaaggagcaggtaaagctttt

SEQ ID NO: 76355 - DNA, 296 bp, Glycine max
  unsure (1)..(296): unsure at all n locations
gtggtatctagttttgtgatactacatacacccaaagcggaataattttctagcaagccgagcttttgtcanttttctattgaccttctcggtggaggaatcttagtggacaaaactggagattggatcacacttatacaaaattctccaattagtaacttgttgagagttgctgcttggaagaaaggctgtttaatggtcaagattgtgatgtctgggaatgcaacagtcaaaaggagtgattgggcctcattggtacaagtgtttttaacaaacagcaacagttcagagcattt

SEQ ID NO: 76356 - DNA, 213 bp, Glycine max
aaaaaaaatttatttaaaaaaaaaaaaaaaaaaaaaaattgtgaatataaaaaaaaaaaaaaaaaaaaaaaaaaaaaaaaaaaaaaaaaaaaaaaaaaaaaaaaaaaagggcccccccccccctattaagctcttccaccctgaaattaataccaaaccgatacctgcaggcataccacctttccctataattattcgttttaaaccttgtct

SEQ ID NO: 76357 - DNA, 238 bp, Glycine max
cgcgtacgtaagctctgaattcggcttagaaagcctttttcttctacaactccaaacacaaaggcgtgtgattcatagctgcctgcgcctccactgacagatctgtcaacatatctcttttgaacctgaatggttctggagcttgaacttcaactaccatttcagtcttctttttgaccagcttgaaaacatgtattgccttaagggttccctacaccatagattcctgtggaagctt

SEQ ID NO: 76358 - DNA, 403 bp, Glycine max
  unsure (1)..(403): unsure at all n locations
agcaaactgtttggaatcaaatggcaacagtgagaacaccattgaattttgattctagcaagcagagcttttgtcagttttctattgaccttctcggtggaggaatcttagtggacaaaactggagattggatcacacttatacaaaattctccaattagtaacttgttgagagttgctgcttggaagaaaggctgtttaatggtcaagattgtgatgtctgggaatgcagcagtcaaaaggagtgattgggcctcattggtacaagtgtttttaacaaacagcaacagtacagagcattttgatgcatgtaagtggacaaaatcagaaccacattcctgggaattgatcttnccaatagaggtatgtgggcctaataatggttttgaaatgtggagttcttg

SEQ ID NO: 76359 - DNA, 398 bp, Glycine max
ggaaatttggctgatgataccatcaattttgaggcttttccccagaagctggtgcagtttggagagattcaggaaaaagttgtattgaaattttcacaagaggaatttcttacagcttggtcaactcaggtgcgtcctgcaacaactctgttggctgatgggtgtccatatttgtatgcaatggtgcatgatagttcagtgtctacaataccaggtgattttgtcattggtgtcaagttgacaaccataaacaatatgtgtgcatatgggctcaatcctggtatttcaggttctcgtcttttgggcaccattcctcagtccatttcacagcaaactgtttggaaatcaaatggcacagtgagaacaccattgaattttgattctagcaagcagagctt

SEQ ID NO: 76360 - DNA, 82 bp, Glycine max
gttaaatttttttttttttaaaaaaaaacacaaaaaatggagaagttttaataaaaaaacaagccccaaaaaaaaattctct

SEQ ID NO: 76361 - DNA, 402 bp, Glycine max
gcaattgaagttgaagtcttgcccttctctcttcaactgcgaacacaagacatcatcatgccatggctgcctccgtctccactgtcggagctgtcaacagagctcttttgaacctgaatgggtctggacctggggtttcagctcccagttcatccttctttgggagcagcttgaagaaggttattggctcaagggtccccaacacaaagatttcctctggaagcttcaagattgttgctgtagaagagaagaaagagattgaagagacccagcagaccgacaaggacagatggaagggtcttgcctatgatatctcagacgaccaacaggacatcacaagaagaaagggtttggttgactcccttttccaagctccacaggatgctggaactcactatgctg

SEQ ID NO: 76362 - DNA, 245 bp, Glycine max
atgcacgcgtacataagctcttaattcggctctagagacaaatcatatttttcatgtaaatatttcttttcctcgtggtttttcttatccaagtgcgtccaagttcaaataggacttgcttgtaacattcttaaaattcttaatgtcttatgatcaaatagaactatccaatttttaaattattatactatatttttcatatatcactgtttttctttataattttgagttatattttacacttt

SEQ ID NO: 76363 - DNA, 281 bp, Glycine max
aaaaaaaaaaaattataaaaaaaaaaaaaaaaaaaaaaaaaaaagggaggaaaaaaaaaaaaaaaaaaaaaaaaaaaaaaaaaaaaaaaaaaaaaaaaaaaaaaaaaaaaaaaaaaaaaaaaaaaaaaaaaggggggggccccccctttttggcctcttccccccggaatttaattccggcccggtccctgggggggtcccagttttccttttagggaggctttttaaactttggcttaataatggccatagctgttccctttgtaaaattgttttccctt

SEQ ID NO: 76364 - DNA, 403 bp, Glycine max
cgccaattgagaaggaaagctctctctcgtattgaatggctgcaaaaagctgatgtgcctaccatagcacagattgaagagttccattcgatgcagaggatgatgaatgctcctgattcaaatgataatattgatttactgttgagcattgatttgttgggtttacaaggagcaggtaaagcttttccaaacaaaattgtttttgatgataagcttgtgttggctaacacacaagaattctttgatggaaattttccagtggattcttggttaccaatttttgtgaattgtctttatcctgtaagtcaattaccttcagaagctgtcgttgtaaatgttacatgtggtagtggacggtggggtttacccaccactgcttggattagttctgcagttaacaatc

SEQ ID NO: 76365 - DNA, 304 bp, Glycine max
gagtttccttatttacaatcccaaacagtctacagtttgtgatgttctcttgggaatctctcaagattttgaaattgctggtaatactcttatgccagctttttctgttccacaggctactgccagatcttctgaaaatgcggaatcctctgcatgatctggaatttgtgttttctttcgcttgttcgtttgtttaattcaataaaggaaattaggcatgaccctcttgttgagtatgctctgcctatttgaaaatttccacacctcttttaattgtcgtaatgatgtgtgaagtgtgtgttat

SEQ ID NO: 76366 - DNA, 290 bp, Glycine max
ccgcgtcgtaagctcggaattcggctcggcctctcccttcaaattccggcccaaaatgccacacttcattctgggggggcatcaattggttgcaagagtggcaaccatgcttctcaatcgaaattcacaagctcttcattcttgccctgggttaaaggtgatggtcgcgctctaaaagcttggaagaaaaaacttgtgccatcttccatttacttggtgcctcgagccacactcacatttgatgccccaacttccaactcagacaaaaccaaacaaaggaagcacactgt

SEQ ID NO: 76367 - DNA, 317 bp, Glycine max
aaacatccctccacccttacctaagctcggaattctgctcaatcaccaacctttttataaattatcaaacaaaataaaccttcgtcgattttctaaaactgcgctcacacacaaaaattctatcattaaaacttttcaatgaattatcctctaccaattcttttccataacatatatccttccagccaattactctacaaaaccttcatcttaaatgatacattgtacaacatatcatgatatccttacccactccttcttacattacttttgcagtctataatccctcctcaaatttaaataatattattcttaca

SEQ ID NO: 76368 - DNA, 155 bp, Glycine max
ctttgtcactaaaactcatgaatatgattactgacaaaggaattgagaaaaacagccctgggtttttcttgtgaagcaagaattctcatcatataactcgagacctgacttcgccgcgtactctactgctctttcttgagccgtcttcaatcttg

SEQ ID NO: 76369 - DNA, 352 bp, Glycine max
ggagctggtgcaaagaatgctattctcatgaatatgccaaatgctgttctttcaatgtggagatattttgttggagatctcgtctttgaagtttctaagatgacttctccctacattaaatgtacagtctctttcttcatagcatttggaaatttggctgatgataccatcaattttgaggcttttccccacaagctggtgcagtttggagagattcaggaaaaagttgtattgaaattttcacaagaggaatttcttacagcttggtcaactcaggtgcgtcctgcaacaactctgttggctgatgggtgtccatatttgtatgcaatggtgcatgatagttcaatgtcta

SEQ ID NO: 76370 - DNA, 395 bp, Glycine max
ggatcacacttatacaaaattctccaattagtaacttggggagagttgctgcttggaagaaaggctgtttaatggtcaagattgtgatgtctgggaatgcagcagtcaaaaggagtgattgggcctcattggtacaagtgtttttaacaaacagcaacagtacagagcattttgatgcatgtaagtggacaaaatcagaaccacattcctgggaattgatcttcccaatagaagtatgtggtcctaataatggttttgaaatgtggagttctgagtgggcaaatcaaacttcatggcatttgagtttccttattgacaatcccaaacagtctacagtttttgatattctcttgggaatctctcaaaattttgaaattgctggtaatactcttatg

SEQ ID NO: 76371 - DNA, 397 bp, Glycine max
attggtgtcaagttgacaaccataaacaatatgtgtgcatatgggctcaatcctggtatttcaggttctcgtcttttgggcaccattcctcagtccatttcacagcaaactgtttggaatcaaatggcaacagtgagaacaccattgaattttgattctagcaagcagagcttttgtcagttttctattgaccttctcggtggaggaatcttagtggacaaaactggagattggatcacacttatacaaaattctccaattagtaacttattgagagttgctgcttggaagaaaggctgtttaatggtcaagattgtgatgtctgggaatgcagcagtcaaaaggagtgattgggcctcattggtacaagtgtttttaacaaacagcaacagtacag

SEQ ID NO: 76372 - DNA, 413 bp, Glycine max
ctcgagccgaatcggctcgagaattttgattctatcaagcagagctttggtcagttttctattgaccttctcggcggaggaatcttattggacaaaactggagattggatcacacttatacaaaattctccaattagtaacttgttgagagttgctgcttggaagaaaggctgtttaatggtcaagattgtgatgtctgggaatgcagcagtcaaaaggagtgattgggcctcattggtacaagtgtttttaacaaacagcaacagtacagagcattttgatgcatgttagtggacaaaatcagaaccacattcctgggaattgatcttcccaatagaggtatgtggtcctaataatggttttgaaatgtggagttctgagtgggcaaatcaaacttcatggcatttgagttt

SEQ ID NO: 76373 - DNA, 260 bp, Glycine max
ctcgagccgaatctgctcgagaaaaaaaaaaaaaaaaaaaaagggaaaaaaaaaaaaaaaaaaaaaaaaaaaaaaaaaaaaaaaaaaaaaaaaaaaaaaaaaaaaaaaaaaaaaaaaaaaaaaaaaaaaaaaaaaaaaaggggcggcccccgactagtgactttttcaacccggaaataaattccggaccgtaccctgcaggcgtcccaattttccttataggaagtcgttttaaacctgggcgaaacaatggcaaaagt

SEQ ID NO: 76374 - DNA, 408 bp, Glycine max
aaaaaattaaatttttaaacaaaaaaaaaacaataaaaaataaagggataatacaaaaaattgaaaaaaaaaaaaaaataaaaaaactataacaaaaaaaaacaaaaaaaaatattatataaaaaaaaaacaaaaataaaataaaaaaaatttgtgctgcccccctctttttatctccccttcccccaatttttttttttaccctctcccaaaagtcaccatatttttctttttaagcgttctatttaaatctttcctaaaattatccaattttttattctttttgaaaagttttttcttttacaaaattcccaccactaaaaatctttatattaaattttttaccactcgggtccattattattaacctacttacaataaattgcttgcccttccttcccctttttt

SEQ ID NO: 76375 - DNA, 226 bp, Glycine max
ctcagatggaaacaaatttgtttaaattgtctcttgatgatgtggaaactcctaaaggttgcatgttggatctgaaaatttctcaatctaaaattgcacttcccaagaacacagttggaggaaccattctgcgtagtgatctattggcaaattttttgacagagggcaattttagagcaagtgttgatttgcagcgcactcatcgtattagaagaatgattaaaat

SEQ ID NO: 76376 - DNA, 399 bp, Glycine max
gttctagctagtcataacatcaccattactgatggtattgacagaactagtgcaactttgcaatttataaagttagcatattgtgattttctcaagagaaactttaagcagatgtctaatgttttgtgggtggctcctgaggacaaggcgagtttatggtcacaacttcattatgttacgcgtaataatctggaaatgcaagaagcttatcttgacaatctcgtaaatgtgttacgagaattgtatttgcacactccagaggaagctcgacaattgagaaggaaagctctctctcctattgaatggctgcaaaaagctgatgtgcctaccatagcacagattgaagagtttcattcgatgcagaggatgatgaatgctcctgattcaaatgataatatt

SEQ ID NO: 76377 - DNA, 396 bp, Glycine max
tgctattctcatgaatatgccaaatgctgttctttcaatgtggggatattttgttggagatctcgtctttgaagtttctaagatgacttctccctacattaaatgtacagtctctttcttcatagcatttggaaatttggctgatgataccatcaattttgaggcttttccccacaagctggtgcagtttggagagattcacgaaaaagttgtattgaaattttcacaagaggaatttcttacagcttggtcaactcaggtgcgtcctgcaacaactctgttggctgatgggtgtccatatttgtatgcaatggtgcatgatagttcagtgtctacaataccaggtgattttgtcattggtgtcaagttgacaaccataaacaatatgtgtgcata

SEQ ID NO: 76378 - DNA, 81 bp, Glycine max
cggctcgagccttcccttggggtccaagaaagaggaaccacggtaaggggtgcctcaacagcattgtcataaccagttgag

SEQ ID NO: 76379 - DNA, 104 bp, Glycine max
ccatgacaccagtctgactttacatctttcaaactctgactatgaatgggtggcttcacattggtgagtgccgttatctgaccctaggcatatgtactttctcc

SEQ ID NO: 76380 - DNA, 330 bp, Glycine max
agaaaaaaaagaattttagaccaagagcaaatatcaataaaaagggggtggtttaaaaaacacggatataacaaaaaataaaacacaaaaggggcgggttcagatttgtgatcttgccgacccggaaataaattctggacgggcgcctgcaggcagtactcttttttcctatatggaagtgaattaaagatgggcctttcaaaatcacaaatgactcctgtgtgaatttgaaatccggtcaaaatttcttatatcatctaatctacaataataaattgtgaattctggggatccttttgagcgacctaactaaaattagttgagtgcctc

SEQ ID NO: 76381 - DNA, 54 bp, Glycine max
aaaaaaaaaaaaaataaaaaaaaaaaaaaaaaaaaaaaaaaaaaggaaaaaaaa

SEQ ID NO: 76382 - DNA, 101 bp, Glycine max
aaaaaaaaaattatatcaattttatctgtttcaaaaactactagggacagggtgtaaaaaaaggggagaaactcgttccaaatcggctctagcttccacat

SEQ ID NO: 76383 - DNA, 415 bp, Glycine max
ctcgagccgttttgatgcatgtaagtggacaaaatcagaaccacattcctgggaattgatcttcccaatagaggtatgtggtcctaataatggttttgaaatgtggagttctgagtgggcaaatcaaacttcatggcatttgagtttccttattgacaatcccaaacagtctacagtttttgatattctcttgggaatctctcaagattttgaaattgctggtaatactcttatgccagctttttctgttccacaggctactgccagatcttctgaaaatgcggaatcctctgcatgatctggaatttgtgttttctttcgcttgttcgtttgtttaattcaataaaggaaattaggcatgaccctcttgttgagtatgctctgcctatttgaaaatttccacacctcttttaat

SEQ ID NO: 76384 - DNA, 187 bp, Glycine max
taaaaaaaaaaaaaaaaaaaaaaaaaaaaagggaaaaaaaaaaaaaaaaaaaaaaaaaaaaaaaaaaaaaaaaaaaaaaaaaaaaaaaaaaaaaaaaaaaaataaaaaaaaaaaaaaaaaaaaaaaaaaaaaaaaaatataaaaaaaaataaaaaaaaaaaaaaaaatattaggttttgggtgtttc

SEQ ID NO: 76385 - DNA, 221 bp, Glycine max
ctcttatgccagctttttctgttccacaggctactgccagatcggctgaaaatgcggaatcctctgcatgatctggaatttgtgttttctttcgcttggtcgtttgtttaattcaataaaggaaattaggcatgaccctcttgttgagtatgctctgcctatttgaaaatttccacacctcttttaattgtcgtaatgatgtgtgaagtgtgtgttatttt

SEQ ID NO: 76386 - DNA, 89 bp, Glycine max
atcgatatattgtcattaagattgacactgatccaagagtcgacaagtaatcgggctgtttttatttaagcttgactcgcttagtttcc

SEQ ID NO: 76387 - DNA, 413 bp, Glycine max
aaaataataagcagtggccctcctctttacatctgatctgatggatatggaaatgaagtctttcattgttagtgctcttattctagttttgttccttcatcttcggttgcttcctgggactgcagctcgaccacttgagataaggaagttagaaagcactagccagagaatgtgggcaatgcttcattcagggccaagctctggtgggaaaggccataaatctgagactggggaagccccaattccaggacagcttaaacaatctgttccaagccctggagttggacactaattaacacatgatgctgatcctcgagtcattttgttctatcactagctaggagtaattatcattaataacatgtaactggatagtagaatgctatgctcttttgtttgataaaactcatgtg

SEQ ID NO: 76388 - DNA, 395 bp, Glycine max
ttttctttggcgttatcttttcatggcttagttaagaaattagattactcaaagcatctacctggtctaatggggagagattaatggcatcaattacctgcttaattttgttgcattttttcatcatgaatctaggttgtagttgcacaaatgtctagtgactgaaatggtacttgtcatgaatccaggttgtagttgtatatttttattgtcttgttgccgcgttgcattttatgtcccacgtagggattggatatgcaatggctttgctatgaatttattaatcaaatttgtcatactatacaattaacaaattgaattggtcttttgcagctctgccccatatgtctgaccaattcaaaagacatggccttcagatgtggacatcagacatg

SEQ ID NO: 76389 - DNA, 174 bp, Glycine max
cgtgcgtaagctctgaattcggctccaggacgttacatgcatttaattttgcgaacctttctataggcgagggattttgtagaggagagacatttttctggaagcgtcattaacggattaattttgaccaccaattgtggggtgagatcaactctttctagttagatggatcca

SEQ ID NO: 76390 - DNA, 189 bp, Glycine max
ctcgagccgcagtcttggaagaatctgaagagttacaaggcattgattttggggactcagaagaagttagcttttagctgtttttagttttttttattatattgggaaaggggcagaggagaatgaacatattttgtcttgaacaatttaacttttgagataatattatgttaatgttttgtccagctt

SEQ ID NO: 76391 - DNA, 251 bp, Glycine max
acacaaccaaaggtgctgatcatcttgcatttcatcattttccttctggggaacacaatcagaatcttacatctaaacttccacacctcaatttctctgatgttactaccaccgtgtctgataatgtttctaaagcccaagcccattctttttctttaactggaaacacatgccaagatgtttataaagaatctccccccaaatctaaatctatacctacacagggcgacatcctgactgatatttaggac

SEQ ID NO: 76392 - DNA, 413 bp, Glycine max
caacagtacagagcattttgatgcatgtaagtggacaaaatcagaaccgggttcctgggaatggagcttcccaatagaggtttgtggtcctaataatggttttgaaatgtggtgttctgagtgggcaaatcaaacttcatggcatttgagtttccttattgacaatcccaaacagtctacagtttttgatattctcttgggaatctctcaagattttgaaattgctggtaatactcttatgccagctttttctgttccacaggctactgccagatcttctgaaaatgcggaatcctctgcatgatctggaatatgagttttctttcgcttgttcgttcggttaattcaatgaaggaaattattcatgaccctcttgttgagtatgctctgcctatttgaaaatttccacacct

SEQ ID NO: 76393 - DNA, 407 bp, Glycine max
ctttgtgtgtgtatggtgatgataacttaattagtgttcatgagtatgtcaagccttactttagtggttctaaattgaaaagctttctagctagtcataacatcaccattactgatggtattgacaaaactagtgcaactttgcaatttagaaagttagcagattgtgattttctcaagagaaactttaagcagatgtctaatgttttgtgggtggctcctgaggacaaggcgagtttatggtcacaacttcattatgtgtcgtgtcataatctggaaatgcaagaagcttatcttgtcaatctcgcaaatgtgttacgagaattgtattcgcacaatccagaggaagctcgccaattgagaaggaaagctctctctcgtattgaatggctgcaaaaagctgatgtg

SEQ ID NO: 76394 - DNA, 394 bp, Glycine max
aattggtgctggttcacattcttcagaagattttcctgaaaaggaagatcaagaaaaacccaaaaagattgatgccagattgagacaaagaatagatcctcaatacaatgaggttcaggctcagatggaaacaaatttgtttaaattgtctcttgatgatgttgaaactcctaaaggttccatgttggatctgaaaatttctcaatctaaaattgcacttcccaagaacacagttggaggaaccattctgcgtagtgatctattggcaaattttttgacagagggcaattttagagcaagtgttgatttgcagcgcactcatcgtattagaggaatgattaaaatggtggccacagttggtattcctgagaatacaggtatatcattggcctgt

SEQ ID NO: 76395 - DNA, 79 bp, Glycine max
caaaatgttgaaggtgctaggtttcctgtcttgactccaaaccttaaaggctttgaggcagctgttgctgctggagcta

SEQ ID NO: 76396 - DNA, 339 bp, Glycine max
aaaaaaaaaaaaaaaaaaattaaaaaaaaaaaaaaaaaaaaaaaggaaagagggaaaaaaaaaaaaaagaaaaaaaaaaaaaaaaaaaaaaaaaaaaaaaaaaaaaaaaaaaaaaaaaaaaaaaaaaaaaaaaaaaacggggcgcccccctcttttttacttctcccccccggtatttattcccgacccggaccctggaggttcccaactttcccttttaatgaatcgtttaaaacctgggcttttctatggaaataatttttcctttttaaaaatttttttccctccaaatttccccaaaaaatacgacccgaaaacttaattttaaaaccctggggg

SEQ ID NO: 76397 - DNA, 413 bp, Glycine max
gtaagggcaatgatattctgtgttgcgattatgctagttttgatggtttgattaccaagcaagttatgagcaagatggcagaaatgataaacagtctttgtggtggtgatgaaaaattgatgcgtgaaaggacgcacctgctgttggcttgttgttcaaggatggcaatttgtaagaaagatgtttggagagttgaatgtggaatcccttctggatttccgctcacagttatttgcaatagcatttttaatgagatgctcattagatatagctatgaaaaattactgcgccaggctaaagctccaagtatgtttttacaatccttcaaaaattttgtttctttgtgtgtgtatggtgatgataacttaattagtgttcatgaatatgtcaagccttactttagtggttctaaa

SEQ ID NO: 76398 - DNA, 406 bp, Glycine max
aaggaagaagaaaaatgagaaaggaggaaagcataatactgatggggatagtgatgaaagtgcaaatccaaaggtattttcaaggaagaagaaaaatgacaaaggaggaaagcctaagattgatgatgatagtgatgaaagtccaaatccaaaggtcttttcaaggaagaaaaatgagaaaggaggaaagctcaacaggtcaacaccaacaaagtctacatccaaagagaaaactgtaaaagtcactaaatgaaaaggcaagaagaaagagatgtcaagccctagtgataatcagttacgtgatgcgatatgtaaaattcttaaagaagttgacttcaatacggttagatgttggaaacttgaaatataatttacataattcagtgactagttgaattttatgttt

SEQ ID NO: 76399 - DNA, 163 bp, Glycine max
caacaactctgttggctgttgggtctccatatttgtattcaatggtgcgtgattgtccagggactacaattccatgtgattttgtcattgttgttaatttacaaccataaaaaatttttgagcataaggcctgaatcctctttttacaggtaaacgcttttta

SEQ ID NO: 76400 - DNA, 248 bp, Glycine max
gctactggccccttggaatgaacgccgacagttactttttctatgtacggtgtataacctggggaaacaggtctacttatttaataagagttttagtgtgaaatttcaatcaaacattgttagtagtgctagcatggaagcaaacaagattgatgcttattttaattgacttaacagtggagacacggattggatacctactgacctgcacgaaagtttgaggaacaactgaatgatgtattgccctt

SEQ ID NO: 76401 - DNA, 407 bp, Glycine max
gttcttttagggggcgcgccagttctgatatttacaccatctggtctcaagactgtgaattgtggaatcctgcttgcacaaaagcaatgactatgtcatttaatccaaacccgtgttctgatgcatggagtttggaatttctgaagcgtactggatttcattgcgatatcatttgtgtcactggatggactgccaccccaatgcaggatgttcaggttacaattgattggtttatttcctctcaggaatgtgttcccaggacctattgtgttttaaatccacaaaatccttttgtgttaaataggtggatgggaaaattgactttcccccagggcatttcccgaagtgttaagagaatgcctctttctatagggggaggagctggtgcaaagaatgctattctcatg

SEQ ID NO: 76402 - DNA, 223 bp, Glycine max
cacgcgtccgtcagctctgaattcggatctagaataaaaggcaaatttagtgtctcaatccctctaacaccaccggtcccgtgcctattcttatcttgctttctcttcactccccactccctatagctcttccttactctacttgtatgtctaaacattccctttcaaaaacatgctcctatttgcatcttcctcccggttatggatgccgctgagctctcca

SEQ ID NO: 76403 - DNA, 244 bp, Glycine max
cacgcggcgtgagctctgaattcggctctagggaaaatacgcattaccctcttgttgagtatgctctccctatttgggaaggtccacacctcttttaattgtcgtcatgatttgtgaaatgtgtgctattttaaacaacaaccttatctccaaaaaaaaacatggcggccgccgactatttagctcgtcccccgggaatttattgcggaccggcaccttcaagcgttccaactttacctatagt

SEQ ID NO: 76404 - DNA, 369 bp, Glycine max
gctcaatcgtggtatttcaggttctcgtcttttgggcaccattcctcagtccatttcacagcaaactgtttggaatcaaatggcaacagtgagaacaccattgaattttgattctagcaagcagagcttttgtcagttttctattgaccttctcggtggaggaatcttagtggacaaaactggagattggatcacacttatacaaaattctccaattagtaacttgttgagagttgctgcttggaagaaaggctgtttaatggtcaagattgtgatgtctgggaatgcagcagtcaaaaggagtgattgggcctcattggtacaagtgtttttaacaaacagcaacagtacagagcattttgatgcatg

SEQ ID NO: 76405 - DNA, 395 bp, Glycine max
ctcgagccgattcggctcgagctaaattgaaaagctttctaggtagtcataacatcaccattactgatggtattgacaaaactagtgcaactttgcaatttagaaagttagcagattgtgattttctcaagagaaactttaagcagatgtctaatgttttgtgggtggctcctgaggacaaggcgagtttatggtcacaacttcattatgtttcgtgtaataatctggaaatgcaagaagcttatcttgtcaatctcgtaaatgtgttacgagaattgtatttgcacagtccagaggaagctcgccaattgagaaggaaagctctctctcgtatagaatggctgcaaaaagctgatgtgcctaccatagcacaaattgaagagttccattcgatg

SEQ ID NO: 76406 - DNA, 337 bp, Glycine max
gcacgcgacgaagctagaattcgctcgagcaacatgtttaattattggaacataaatacaacattcaagttgattctaaaagcagacctattctcaattttctacagaccacagtagtggacatattttagcgaacaataacaagagattgaatctcactgttacactcttatgccatattttacttttccacaggctcctgtcagatcatatgctaatgcataatcctcatcatgatctgtaagaatgctccaattttaatgggtcattcgtccaaatcaatacaagagattataacaaacatcatttgttcagaatcctttgactcttttaaaat

SEQ ID NO: 76407 - DNA, 402 bp, Glycine max
gttgacaaccataaacaatatgtgtgcatatgggctcaatcctggtatttcaggttctcgtcttttgggcaccattcctcagtccatttcacagcaaactgtttggaatcaaatggcaacagtgagaacaccattgaattttgattctagcaagcagagcttttgtcagttttctattgaccttctcggtggaggaatcttagtggacaaaactggagattggatcacacttatacaaaattctccaattagtaacttgttgagagttgctgcttggaagaaaggctgtttaatggtcaagattgtgatgtctgggaatgcagcagtcaaaaggagtgattgggcctcattggtacaagtgtttttaacaaacagcaacagtacagagcattttgatgcatg

SEQ ID NO: 76408 - DNA, 190 bp, Glycine max
gacaaaactagttcaactttgcaatttagaaagttagcagatgttgattttctcaagagaagactttaatcatatgtctaatgttttgtgggtggctattgagatcttctcaagagaatctttacaccgacatctattgttttgtaattcgcttctaatgaacaaggttagattatggtcacaacttaat

SEQ ID NO: 76409 - DNA, 402 bp, Glycine max
caccaccgtagcagcatcgccggcgtcctctccgtctaacccgacaaaaaaaaaaacaattttaaaaatttcccaaaccgaccatctccgcaaaaaaacacgtgacgatcgttgcgatgagcctgagcacgtgacattcccattgttccgcttaaatttcatgactttttgagttcaagttcgtgggtctgctgttcgttgatttcgtggcttgttagtgcaatttcaagcacgacttgcagcttttaattgaattgaagttctggacacttgctgctttggttcttccaatccccaactgtccaaccaaccagttctgctgatggtgaagtgcggatttgggatacacttcagcatcggacagtgtcatcagcatggttacatagtgccgcacatggtatt

SEQ ID NO: 76410 - DNA, 208 bp, Glycine max
gaattcgactcgagaaaaatctgatttgcctaccattacacccattgaatagtcccacccttgccgttcgattatgcatgcctcctcctaatatggtattttagattttctcatattcatattttcttccgagaaactttgagctcacggctcatgctctatcaaaacccctatcgacgatcatcttttttagtcacacccacaataa

SEQ ID NO: 76411 - DNA, 354 bp, Glycine max
gttctaaattgaaaagctttctagctagtcataacatcaccattactgatggtattgacaaaactagtgcaactttgcaatttagaaagttagcagattgtgattttctcaagagaaactttaagcagatgtctaatgttttgtgggtggctcctgaggacaaggcgagtttatggtcacaacttcattatgtttcgtgtaataatctggaaatgcaagaagcttatcttgtcaatctcgtaaatgtgttacgagaattgtatttgcacagtccagaggaagctcgccaattgagaaggaaagctctctctcgtattgaatggctgcaaaaagctgatgtgcctaccatagcac

SEQ ID NO: 76412 - DNA, 400 bp, Glycine max
ttggaatttctgaagcgtactggatttcattgcgatatcatttgtgtcactggatggactgccaccccaatgcaggatgttcaggttacaattgattggtttatttcctctcaggaatgtgttcccaggacctattgtgttttaaatccacaaaatccttttgtgttaaataggtggatgggaaaattgactttcccccagggcacttcccgaagtgttaagagaatgcctctttctatagggggaggagctggtgcaaagaatgctattctcatgaatatgccaaatgctgttctttcaatgtggagatattttgttggagatctcgtctttgaagtttctaagatgacttctccctacattaaatgtacagtctctttcttcatagcatttggaaatt

SEQ ID NO: 76413 - DNA, 296 bp, Glycine max
aattcatctcgcgagaacacaaacctattttaataaaaaaaaaaaaaacaaaaaaaaacgtgacattaaaaaaaaaccgaccacaacaaaaaaaaaaaaaaaaaaaaaacaaaaaaaaataaaaaaaaaaacaaaaaaatataaacaaggcccccccccacccaataaacccccccaccccacaaaaaaatatccacccgcaccttcaagacaaccatcttttcctatatataaacaaataaaaacttaggctaaacaacactaaaaccattctcccgcgaaaaatttttaacctc

SEQ ID NO: 76414 - DNA, 401 bp, Glycine max
ctcgagccgaatcggctcgagcggctcgagcgccaattgagaaggaaagctctctctcgtattgaatggctgcaaaaagctgatgtgcctaccatagcacagattgaagagttccattcgatgcagaggatgatgaatgctcctgattcaaatgataatattgatttactgttgagcattgatttgttgggtttacaaggagcaggtaaagcttttccaaacaaaattgtttttgatgataagcttgtgttggctaacacacaagaattctttgatggaaattttccagtggattcttggttaccaatttttgtgaattgtctttatcctgtaagtcaattaccttcagaagctgtcgttgtaaatgttacatgtggtagtggacacgtgggttacccacc

SEQ ID NO: 76415 - DNA, 59 bp, Glycine max
aaaaaaaaaaaaaaattttaaaaaaaaaaaaaaaaaaaaaaaaggggggggaatttaaa

SEQ ID NO: 76416 - DNA, 367 bp, Glycine max
caataaatctgatgcatgcggttcgctactacgcctactggggaggtcctttctacctcaagcacgtttaaatttccgttcccagtccaaaagcaaatgactttttaatcaaactttaagcatttatcattaaccctatttatttgaaaattcataaaagttttcttcgtcctttatttttccccataacctttccccacataccttgcactgatttggctggaaaaataattgatatctgaactcatgtcaagattttaaagtttgcgaccaagtccttgctaaactcactcatcaataattaggttggttttcccagtttgcttttgctactgagagcttaacaacatccaaaccatcttatgtt

SEQ ID NO: 76417 - DNA, 136 bp, Glycine max
cgaaattcggttcgagcttatttttttccttttttaactttcactctctctctctctgtcggccataatcatgggagcagtgattctcccagatctcggcaccgagattttgattccggtctgcgccatcattgga

SEQ ID NO: 76418 - DNA, 405 bp, Glycine max
tgtggtccgtcaaaagtttttaaattttgtgaggttcattatgaagaaaagggacaaacttagttgtcaagttggaatcaacccatactccatggaatggactggtttggccaatagattactgagtaagggcaatgatattctgtgttgcgattatgctagttttgatggtttgattaccaagcaagttatgagcaagatggcagaaatgataaacagtctttgtggtggtgatgaaaaattgatgcgtgaaaggacgcacctgctgttggcttgttgttcaaggatggcaatttgtaagaaagatgtttggagagttgaatgtggaatcccttctggatttccgctcacagttatttgcaatagcatttttaatgagatgctcattagatatagctatgaaaa

SEQ ID NO: 76419 - DNA, 404 bp, Glycine max
gttttctattgaccttctcggtggaggaatcttagtggacaaaactggagattggatcacacttatacaaaattctccaattagtaacttgttgagagttgctgcttggaagaaaggctgtttaatggtcaagattgtgatgtctgggaatgcagcagtcaaaaggagtgattgggcctcattggtacaagtgtttttaacaaacagcaacagtacagagcattttgatgcatgtaagtggacaaaatcagaaccacattcctgggaattgatcttcccaatagaggtatgtggtcctaataatggttttgaaatgtggagttctgagtgggcaaatcaaacttcatggcatttgagtttccttattgacaatcccaaacagtctacagtttttgatattctct

SEQ ID NO: 76420 - DNA, 397 bp, Glycine max
ctcgagccggaattttgattctagcaagcagagcttttgtcagttttctattgaccttctcggtggaggaatcttagtggacaaaactggagattggatcacacttatacaaaattctccaattagtaacttattgagagttgctgcttggaagaaaggctgtttaatggtcaagattgtgatgtctgggaatgcagcagtcaaaaggagtgattgggcctcattggtacaagtgtttttaacaaacagcaacagtacagagcattttgatgcatgtaagtggacaaaatcagaaccacattcctgggaattgatcttcccaatagaggtatgtggtcctaataatggttttgaaatgtggagttctgagtgggcaaatcaaacttcatggcatttg

SEQ ID NO: 76421 - DNA, 401 bp, Glycine max
cggctcgagcggctcgaggttgagaactaagaaggagaagcggatggcttcctcaatgatctcttccccagctgttaccactgtcaaccgtgccggtgccggcatggttgctccattcactggcctcaagtccatggctggcttccccaccagaaagaccaacaatgacattacctccattgctagcaacggtggaagagtgcaatgcatgcaggtgtggccaccagttggcaagaagaagtttgagactctttcctacctgccagaccttgatgatgcacaattggcaaaggaagtagaataccttcttaggaagggatggattccttgcttggaattcgagttggagcacggtttcgtgtaccgtgagcacaacaagtcaccaggatactacgatggac

SEQ ID NO: 76422 - DNA, 406 bp, Glycine max
gtcacaacttcattttttttcgtgtaataatctggaaatgcaggaagcttatcttgtcaatctggtaaatgtgttacgagaattgtatttgcacagtccagaggaagctcgccaattgagaaggaaagctctctctcgtattgaatggctgcaaaaagctgatgtgcctaccataacacagattgaagagtgccattcaatgcagaggatgatgaatgctcctgattcaaatgataatattgatttactgttgagcattgatttgttgggtttacaaggagcaagtaaagcttttccaaacaaaattgtttttgatgataagcttgtgttggctaacacacaataattctttgatggaaattttccagaggattcttggttaccaatttttgtgaattgtctttat

SEQ ID NO: 76423 - DNA, 394 bp, Glycine max
ctcgagccgctcgagccgctcgagcggctcgagcgccagttgtgatatttacaccatctgctctcaagactgtgaattgtggaatcctgcttgcacaaaagcaatgactatgtcatttaatccaaacccgtgttctgatgcatggagtttggaatttctgaagcgtactggatttcattgcgatatcatttgtgtcactggatggactgccaccccaatgcaggatgttcaggttacaattgattggtttatttcctctcaggaatgtgttcccaggacctattgtgttttaaatccacaaaatccttttgtgttaaataggtggatgggaaaattgactttcccccagggcacttcccgaagtgttaagagaatgcctctttctataggggga

SEQ ID NO: 76424 - DNA, 390 bp, Glycine max
cgtaaatgtgttacgagaattgtatttgcacagtccagaggaagctcgccaattgagaaggaaagctctctctcgtattgaatggctgcaaaaagctgatgtgcctaccatagcacagattgaagagttccattcgatgcagaggatgatgaatgctcctgattcaaatgataatattgatttactgttgagcattgatttgttgggtttacaaggagcaggtaaagcttttccaaacaaaattgtttttgatgataagcttgtgttggctaacacacaagaattctttgatggaaattttccagtggattcttggttaccaatttttgtgaattgtctttatcctgtaagtcaattaccttcagaagctgtcgttgtaaatgttacatg

SEQ ID NO: 76425 - DNA, 401 bp, Glycine max
ggaaaattgactttcccccagggcacttcccgaagtgttaagagaatgcctctttctatagggggaggagctggtgcaaagaatgctattctcatgaatatgccaaatgctgttctttcaatgtggagatattttgttggagatctcgtctttgaagtttctaagatgacttctccctacattaaatgtacagtctctttcttcatagcatttggaaatttggctgatgataccatcaattttgaggcttttccccacaagctggtgcagtttggagagattcaggaaaaagttgtattgaaattttcacaagaggaatttcttacagcttggtcaactcaggtgcgtcctgcaacaactctgttggctgatgggtgtccatatttgtatgcaatggtgca

SEQ ID NO: 76426 - DNA, 126 bp, Glycine max
gttggcaattggaaaaaaagatgttgggggagttgaatgtggaatcccttctggatttccgctcacagttattggcaatagcatttttaatgaggaggctccattagaatataggctatggaaaaa

SEQ ID NO: 76427 - DNA, 341 bp, Glycine max
gttctgagtgggcaaatcaaacttcatggcatttgagtttccttattgacaatcccaaacagtctacagtttttgatattctcttgggaatctctcaagattttgaaattgctggtaatactcttatgccagctttttctgttccacaggctactgccagatcttctgaaaatgcggaatcctctgcatgatctggaatttgtgttttctttcgcttgttcgtttgtttaattcaataaaggaaattaggcatgaccctcttgttgagtatgctctgcctatttgaaaatttccacacctcttttaattgtcgtaatgatgtgtgaagtgtgtgttatttt

SEQ ID NO: 76428 - DNA, 365 bp, Glycine max
gaggacaaggcttttttatggccacaacttcattatgtttcctgtaatactctggaaatgcaagtaccttatcttgtctatcttttaaattctttacaagttttgaatttgctcatactactcttatctcacctatttctaatgcacacgctacttccaaatctattgaaaatgcaagatactctgcctcatctgcaatttagtgtatctttcacttgatcctttgtttaattcaataaacgaaattaagcattacccttttgttgagtatgctcttcctatttgaaaattttcacacctcttttaattgtccttatgatgtttgaagtgttttttattttaaaaaaaaataaaaaaataaaccc

SEQ ID NO: 76429 - DNA, 336 bp, Glycine max
  unsure (1)..(336): unsure at all n locations
gaataaaaaaaactaatcncttcctccaattctccaaatccaataagctctgtatttacttttatccctcctcctacacaatcntcatctttatctttnttaatcatatttttttttaactttcacaatttttcatgcattttcattaaatatctattatcttttttttaaattttttttattttatactccttttttacttaaattattttctatttttacaaattttattaattttttccatttttttattcttataatttttaattataatttcttttttttttccaattttatttataatttttttataatttatattttttttttttttat

SEQ ID NO: 76430 - DNA, 399 bp, Glycine max
gggtacactagacaacttagaattagaatggatgcatttaggagaaagttgggtaacactggaaaagatagtagaatcttgcgttaggtagtttgagctgatgtggaaaagactgtaaaagctcttgtaaagggagcagatcaaatggaggaaagtccaatagttagaggtagaaggggccaagacaaactataatttaagaaggacttgatttaaatggtttgtcattagacatgatccacatcaattgatccatgtagctgatcccacttagtggggaaaaagtttttttccccatgttgttgttcaatagaaagaagctaaggagtgaagttagaaataagtatttaagttatgcttggttatgaatattgctttttgtcaacctttataaatgat

SEQ ID NO: 76431 - DNA, 285 bp, Glycine max
  unsure (1)..(285): unsure at all n locations
aaacagtctacagtttttgatattctcttgggaatctctcaagattttgaaattgctggtaatactcttatgccagctttttctgttccacaggctactgccagatcttctgaaaatgcggaatcctctgcatgatctggaatttgtgttttctttcgcttgttcgtttgtttaattcaataaaggaaattaggcatgaccctcttgttgagtatgctctgcctatttgaaaatttccacacctcttttaattgtcgtaatgatgtgtgaagtgtgtgttntttt

SEQ ID NO: 76432 - DNA, 256 bp, Glycine max
attcgtctcgagctctttttcactattctctccctatcccaaaaattccacacctctgcaaattttacaaaccctgttttaaatctttgctattttcacataaaaattaaaacaaatctcaaaaattatttacaaaaaacattaaactcataatcttctatttaaatatactccaattttaccctcaaactaatttcaatacaaaattatatactaatcttaaatctaaacttcatcgttttctttttaataccac

SEQ ID NO: 76433 - DNA, 224 bp, Glycine max
agctcggaattcggttcgagaaaaagttctattgtttttttcacaagaggaatttcttacagctgggtcaactcaggtgcgttctgcaacaactctgttggctgatgggtgtccatatatgtatgcaatggtgcattatagttcatcttctacaataccaggtgattttgtcattggtgtcatgtttacaaccataaacagtctttgctcatatttgcttaata

SEQ ID NO: 76434 - DNA, 323 bp, Glycine max
aaataaaatactctgtttcggtgcttcactcttctgcaaaccatgaccaccactaccaaactccaatctatattacgcacagtgcacacacattaaatatttaataataattcccctcacattttcccagaaaaataagaattccaatcttgtcctttgggttcatttttttatgcgaatgttcgctaccaatgccacgagcaacctcttcttcccctgcagcccttcgtccttccggtgccgcgccgccgccggagacctctccgcgggcccctccttcatccagtccgtcgccggcggtctaagaattggccagttccccg

SEQ ID NO: 76435 - DNA, 381 bp, Glycine max
atgaatatgtcaagccttactttagtggttctaaattgaaaggctttctagctagtcataacatcaccattactgatggtattgacaaaactagtgcaactttgcaatttagaaagttagcagattgtgattttctcaagagaaactttaagcagatgtctaatgttttgtgggtggctcctgaggacaaggcgagtttatggtcacaacttcattatgtatcgtgtaataatctggaaatgcaagaagcttatcttgtcaatctcgtaaatgtgttacgagaattgtatttgcacagtccagaggaagctcgctcattgaaaaggaaagctctctctcgtattgaatggctgcaaaaagctgatgtgcctaccatagcac

SEQ ID NO: 76436 - DNA, 161 bp, Glycine max
caatctcatttttatcctacaagtagtgtctaaacttaacatgtacttcttctacgagactttcaacattccaaaacatatttttatatactacaaaaatactctcttatactctcttaacttataggctcttaattctcctttaatttctaatccctttt

SEQ ID NO: 76437 - DNA, 171 bp, Glycine max
taattctgcttgagcattaacaccctttttctgcttaaattggcacaccaccaatttgcgttgtaacccgaaccaattaaacataaaaagagttcaattttgtgaaaattattaccattcattcttattcatcaacgttcccccttcttgtcccacttccaaatcttcttc

SEQ ID NO: 76438 - DNA, 78 bp, Glycine max
aaaaaaaaaaaaaaaaaaaaaaaaaaaaaaaaaaaaaaaaagagaaaaaaaaaaaaaaaaaaaaaaaaaaaaaaaaaa

SEQ ID NO: 76439 - DNA, 365 bp, Glycine max
taatcaatgagttctgcagagcataaataaattactctttcatgggtgattacaggggctactagggtatggcaaacgcagatcgcagctcgtgttttgtaaaagagctttcggattatgtagaaaaagatgtgtttttttctgtctggccgattttgtacaaattttaaacaaagtaaaaggttacctatccgcacttttattttttattttgctgctgttgttgcgatatctcttgtcttcctctgtcgtatatagtcacaacggaattacatgacattatggaaggctcttcatttagtcttttagaatgagtacccaataaccgactttcttttaagtacacacagtgcattttagtttgg

SEQ ID NO: 76440 - DNA, 60 bp, Glycine max
ccccttccccccttccttaacctcgaaattcgcctcgggaaaaaaaaaaaatatattttt

SEQ ID NO: 76441 - DNA, 306 bp, Glycine max
gtcttgcaattgaagttgaagtcttgcccttctctcttcaactgcggggacacaagacatcatcatccatggctgcctccgtctccactgtcggagctgtcaacagagctcttttgaacctgaatgggtctggacctggggtttcagctcccagttcatccttctttgggagcagcttgaagaaggttattggctcaagggtccccaacacaaagatttcctctggaagcttcaagattgttgctgtagaagagaagaaagagattgaagagacccagcaaaccgacaaggacagatggaagggtc

SEQ ID NO: 76442 - DNA, 372 bp, Glycine max
tttgatgcatgtaagtggacaaaatcagaaccacattcctgggaattgatcttcccaatagaggtatgtggtcctaataatggttttgaaatgtggagttctgagtgggcaaatcaaacttcatggcatttgagtttccttattgacaatcccaaacagtctacagtttttgatattctcttgggaatctctcaagattttgaaattgctggtaatactcttatgccagctttttctgttccacaggctactgccagatcttctgaaaatgcggaatcctctgcatgatctggaatttgtgttttctttcgcttgttcgtttgtttaattcaataaaagaaattaggcatgaccctcttgttgagtatgctc

SEQ ID NO: 76443 - DNA, 400 bp, Glycine max
ggctgatgataccatcaattttgaggcttttccccacaagctggtgcagtttggagagattcaggaaaaagttgtattgaaattttcacaagaggaatttcttacagcttggtcaactcaggtgcgtcctgcaacaactctgttggctgatgggtgtccatatttgtatgcaatggtgcatgatagttcagtgtctacaataccaggtgattttgtcattggtgtcaagttgacaaccataaacaatatgtgtgcatatgggctcaatcctggtatttcaagttctcgtcttttgggcaccattcctcagtccatttcacagcaaactgtttggaatcaaatggcaacagtgagaacaccattgaattttgattctagcaagcagagcttttttcagttt

SEQ ID NO: 76444 - DNA, 291 bp, Glycine max
ctaactgttcctatcccctctgccttcaattttgccactgactgggtgttaaagggaaaaaaatattactaaaaagtagaacaaaatcccaaatacgcagtcagtggcaaaattgaaggcagaggggataggaacagttagcgcgaaccgtgatgttggcacaggtgcgcgtattatagcattagagcttgttgataccactggtgcaggtgatgcattcattgcagctgttatctatgctattagtgccaagtttacaccagagacaatgctattctttgctgctaatgt

SEQ ID NO: 76445 - DNA, 380 bp, Glycine max
cactcataacacaaagcacaaagcaaagctcatccttgagttaaaaaatggcagcagcttcttccatggctctctcatccccatccttggctggcaaggccgtgaagctgggcccatcagccccagaagtgggaagggtgagcatgaggaagaccgtcaccaagcaggtctcctcaggaagcccatggtacggcccagaccgagtcaagtacttgggcccattctctggcgagcccccgtcctacctaaccggtgagttcccaagcgactacggctgggacactgctgggctttccgcagacccagaaaccttcgccaagaaccgtgaactcgaagtgatccactccaggtgggccatgctcggagccttgggctgcgtc

SEQ ID NO: 76446 - DNA, 107 bp, Glycine max
ctacaacggcgattcttgtgatggcacaatgtccttatcaaagaggtacactttcttaaagaagaacctagatttttgtgtggctgggggcgcgtgccatggaagtt

SEQ ID NO: 76447 - DNA, 129 bp, Glycine max
ctacaacggtgatttctgcaagggcttttcccccttctgaaacagcttcactttcttaaagaggtagatagatatttctgtagttggggtggctagcaatggaaggtttgcttcccaaactttcttctt

SEQ ID NO: 76448 - DNA, 122 bp, Glycine max
gagaatcgcaagagcaaaggaaagcccttaggcattaatgagaagaagaagaaagcttttagggttgtagagaaacagcaaatagagtctgccccttttgctgcagagtcattttcagaact

SEQ ID NO: 76449 - DNA, 131 bp, Glycine max
gtcacattctctctcttctattctaattctgatttctatctctctctacaaattccaaaaccctccccccttccaattccaattattcttttaccatgggttttgaaggttcccctgtctccgggaaaggg

SEQ ID NO: 76450 - DNA, 52 bp, Glycine max
tatttattctagaaaagaaagttttttacgttaaataaatgatatcttgtat

SEQ ID NO: 76451 - DNA, 103 bp, Glycine max
ttcggttcgaggtgtgaagtgtgtgttatttttaaaaaaaaaaaaaaaaaaaaaaagggaaagaaaaaagggaggaggcaaaatagtgagccggaaaaccggg

SEQ ID NO: 76452 - DNA, 224 bp, Glycine max
gttgtttttaaaaaaaattatttataaaaaaaaaaaaaataaaaaaggggagggattttaataaaaaaaaaaaaaataaaaaaaaaaaaaaaaataaaaaataaaaaaaaaaaaaaaaaaaaggccgcccccccactattaacctcttccccccggaattaaattccggaccgttccctgaaggcttaccaattttccctatagtgagccgttttaaaccttgc

SEQ ID NO: 76453 - DNA, 213 bp, Glycine max
ccagcaatttctgttccacaggctactgccagatcttctgaaaatgcggaatcctctgcatgatctggaatttgtgttttctttcgtttgttcgtttgtttaattcaataaaggaaattagacatgaccctcttgttgagtatgctctgtctatttgaaaatttccacacctcttttaattgtcgtaatgatgtgtgaagtgtgtgttatttt

SEQ ID NO: 76454 - DNA, 444 bp, Glycine max
caaactgtttggaatcaaatggcaacagtgagaacaccattgaattttgattctagcaagcagagcttttgtcagttttctattgaccttctcggtggaggaatcttagtggacaaaactggagattggatcacacttatacaaaattctccaattagtaacttattgagagttgctgcttggaagaaaggctgtttaatggtcaagattgtgatgtctgggaatgcagcagtcaaaaggagtgattgggcctcattggtacaagtgtttttaacaaacagcaacagtacagagcattttgatgcatgtaagtggacaaaatcagaaccacattcctgggaattgatcttcccaatagaggtatgtggtcctaataatggttttgaaatgtggagttctgagtgggcaaatcaaacttcatggcatttgagtttccttattgac

SEQ ID NO: 76455 - DNA, 461 bp, Glycine max
ggaaaaagttgtattgaaattttcacaagaggaatttcttacagcttggtcaactcaggtgcgtcctgcaacaactctgttggctgatgggtgtccatatttgtatgcaatggtgcatgatagttcagtgtctacaataccaggtgattttgtcattggtgtcaagttgacaaccataaacaatatgtgtgcatatgggctcaatcctggtatttcaggttctcgtcttttgggcaccattcctcagtccatttcacagcaaactgtttggaatcaaatggcaacagtgagaacaccattgaattttgattctagcaagcaaagcttttgtcagttttctattgaccttctcggtggaggaatcttagtggacaaaactggagatgggatcacacttatacaaaattctccaattagtaacttgttgagaggtgctgcttggaagaaggctgtttaatggt

SEQ ID NO: 76456 - DNA, 282 bp, Glycine max
gcccatcctagagctcataactagagaagccttgtaggtctggctacgggagaccataatgaacggcttcaaaaaacatggggcatattacatatccatctagtgagctgaaccgaactttaacactacaataacttacttgctaaatatatgtctgagaaaacccaccctaggtctgaactaaaaaccggccactacaaccgtaagagtcgccggaatctccatcaatgcgtggccagcgtcttgatcaccacctgtacattcaaggagaggcgctttcgt

SEQ ID NO: 76457 - DNA, 106 bp, Glycine max
cttcccttccacccttccgtagcctcggaattcggttcgggggttattccggccattattccattaaagagtgggtggccaggaaacaaccacggttgggggtcct

SEQ ID NO: 76458 - DNA, 430 bp, Glycine max
  unsure (1)..(430): unsure at all n locations
ctgtgtaataaacaagattttcttccttcaaaatttgcttgattggaattcgtattccgtgctttgnaaaaaaaaaaaaaaaaaaaaaaaaaaaaaaaaaaaaaaaaaaaaaaaaaaaaaaaaaaaaaaaaaaaaaaaaaaaaaaaaaaaaaaaaaaaaaaaaaaaaaaaaaaaaaaaaaaaaaaaaaaaaaaaaaaaaaaaaaaaaaaaaaaaaaaaaaaaaannggggggggcccccaaaaaagagactttctcccccgaaaaaaaaattgaaccggtaccctgaggggtaaaaaattttctaaaaaggaggggattaaaaaacgggggaaaaaaaggaaaaaactttttcctgggaaaaaattttttctcccaaaaaattcaaaaaaaaaaatggctggaaaaaaaaaattaaaaaaccggggggcc

SEQ ID NO: 76459 - DNA, 357 bp, Glycine max
ctagaacttcatttttctctccctcgtcactaacttgagcgggtggcttgttggtaaaattagtactcaaatcggggttcatgcaactgctgcaaagtggttcaacctctttacaactcagtcttattatgttcaacatcttactgatagattgcatttaaccaaacttcaccaccgagaaaagtcacttttcaactagtccatcaaacactcatactttacaacaaatggtcagatctcaacatcttttatagagtaccaaattctttaatttattcctcaaaacaatcactttcagcctttttttactatatatccttatttatactaattttttaaatttattttctattcttt

SEQ ID NO: 76460 - DNA, 96 bp, Glycine max
caacataaaagagctcgaaaacccgggaataaaattccggaccggaacctgcaggcgataccaactttccctataatgagtcgtcttagagcttgg

SEQ ID NO: 76461 - DNA, 330 bp, Glycine max
tgctggtcaaggattcctctcaacgtctgactaaggagatactcttggaacacccttggattgttcagaatgccgagccctctggtgtatataggagctagtgcaccttatcattcttatattgtattttcttaatcggggaaatcatcaaaatagcagctgcttctaagtatttgacaacattttggttttgagatgatgcaactatttgaagtaggttgctaggttaagagaaatcacttgttatatgattgtaaaccctactccttcaagggctatataaagaataactgatgtcacttgttatttgattgtaaaccctactccttc

SEQ ID NO: 76462 - DNA, 158 bp, Glycine max
ggttggttgattggtcccattgattcccaaaagaaaagaaaagatggttgggccacaacagctatacactcgcgcggagaccgagggattcgaccttgaattaagggaaaccctttacccaagggttagcgttggggagaaccaacttccattggggt

SEQ ID NO: 76463 - DNA, 255 bp, Glycine max
cttttaattgtcgtaatgatgtgtgaagtgtgtgttattttaaaaaaaaaaaaaaaaaaaaaaaaaaaaaaaaaaaaaaaaaaaaaaaaaaaaaaaaaaaaaaaaaaaaaaaaaaaaaaaaaaaaaaaaaaaaaaatttaaaaaaaaaaaaaaaaaaaaaaaaaaaaaagggaggtgatttttaaggttttttttgcactgaaaaaaaaattgtataaaggaatgttaatataaaaaatttttaattaataaaaa

SEQ ID NO: 76464 - DNA, 305 bp, Glycine max
aaaaaaaaaaaataaatataaaaaaaaaaaaaaaaaaaaaaaagagagggaaaaaaaaaaaaaaaaaaaaaaaaaaaaaaaaaaaaaaaaaaaaaaaaaaataaaaaaaaaaaaaaaaaaaaaaaaaaaaaaaaaaaaaaaaaatgggggggccccacctttttggatctttcaccccggaattaaatttgggccgggtttttggggggtaccaaattttcattatagagggggaaattaaagttgggcaaaaacagggaaaaagggttttcctgggaaaaaaatgtttcccttaaaaattccaa

SEQ ID NO: 76465 - DNA, 52 bp, Glycine max
cagaggaccccaacacataaccgccatcatgtcgcaggtccaccccctttcc

SEQ ID NO: 76466 - DNA, 431 bp, Glycine max
caaactgtttggaatcaaatggcaacagtgagaacaccattgaattttgattctagcaagcagagcttttgtcagttttctattgaccttctcggtggaggaatcttagtggacaaaactggagattggatcacacttatacaaaattctccaattagtaacttgttgagagttgctgcttggaagaaaggctgtttaatggtcaagattgtgatgtctgggaatgcagcagtcaaaaggagtgattgggcctcattggtacaagtgtttttaacaaacagcaacagtacagagcattttgatgcatgtaagtggacaaaatcagaaccacattcctgggaattgatcttcccaatagaggtatgtggtcctaataatggttttgaaatgtggagttctgagtgggcaaatcaaacttcatggcatttgag

SEQ ID NO: 76467 - DNA, 200 bp, Glycine max
  unsure (1)..(200): unsure at all n locations
gtgttgaagaggcttacaacaagctaatagttgaacttgagaaaagtgttcctacattggttggcattgaatgtcccaaggatgagaaacttcctcgtcgcanaatttttgacaaacctaagacgcgctgcttcactattctccctatggagtttaatcttgtggtccgtcaaaagtttttaaattttgtgaggttcatt

SEQ ID NO: 76468 - DNA, 284 bp, Glycine max
ctcgcatattgcaataacttgaaacgctgctcctcagggggagatgagaaaaatacacagagggatatttgaactttccagcaactacaccatatgcctatcttatcagttctaatgaagtttcaattcttgacggatacatttgcaaccctaatactctaccatgtctgaatactttgtgaggccaagacacataataggactctcatgtataatttatatatgaaacaactctagaagcatacggcattatttactctgccaacattaccaagattatgctt

SEQ ID NO: 76469 - DNA, 460 bp, Glycine max
ggacgcacctgctgttggcttgttgttcaaggatggcaatttgtaagaaagatgtttggagagttgaatgtggaatcccttctggatttccgctcacagttatttgcaatagcatttttaatgagatgctcattagatatagctatgaaaaattactgcgccaggctaaagctccaagtatgtttttacaatccttcaaaaattttgtttctttgtgtgtgtatggggatgataacttaattagtgttcatgaatatgtcaagccttactttaatggttctaaattgaaaagctttctagctagtcataacatcaccattactgatggtattgacaaaactagtgcaactttgcaatttaaaaagttagcaaattgtgattttctcaagagaaactttaagcagatgtctaatgttttgtgggtggctcctgaggacaaggcgagtttatggtcacaact

SEQ ID NO: 76470 - DNA, 118 bp, Glycine max
cttagttgatcaagtcgaaatcaaccaacaaacaatggaacaggcagggctttttcatgcatgtcagtggacaaaatcagaaccacattcctgggaattgatcttcccaataaaggtt

SEQ ID NO: 76471 - DNA, 244 bp, Glycine max
tggtgatgaaaaattgatgcgtgaaaggacgcacctgctgttggcttgttgttcaaggattgcaatttgtaagaaagatgtttggagagttgaatgtggaatcccttctggatttccgctcacaggtatttgccataacatttttaatgggatgctcattagatataactattaaaaattacttcgccaggcttaagcttcaaatatttttttaccatccttcaaaaattttggttctttgggg

SEQ ID NO: 76472 - DNA, 374 bp, Glycine max
tggatgggactgcacccccatgccaggagttcaaggtacaaatggatgggttatttcctctcaggaatggtgttccaggacctattgtgttttaaatccacaaaatccttttgtgttaaataggtggatgggaaaattgactttcccccaaggcactctccgaagtgttaagagaatgcctctttctatatggggaggagcttgtgcaaagaatgctattctcatgaatattccaaatgcttttctttcaatgtggagatattttgctggagatctcgtctttgaagtttctaagatgacttctccctacattaaatgtacagtctctttcttcatagcatttggaaatttggctgatgataccatcaattttg

SEQ ID NO: 76473 - DNA, 251 bp, Glycine max
gggctacatcaagagatgccctcgcataatatgcttaggagctgacgatatgaaggcaattctgaacaatggaccaattgacgtacatgtatagtgagtatgtttagaggttgaggaatacattgtaatatttaagacttgtgcgaaataagtataaggtacacaattccgtacaacgtacggattcaaagcgtacagtggataccatcatttacgtaacttgttaccacactgtcgtgtattctgttgag

SEQ ID NO: 76474 - DNA, 407 bp, Glycine max
atttgtatgcaatggtgcatgatagttcagtgtctacaataccaggtgattttgtcattggtgtcaagttgacaaccataaacaatatgtgtgcatatgggctcaatcctggtatttcaggttctcgtcttttgggcaccattcctcagtccatttcacagcaaactgtttggaatcaaatggcaacagtgagaacaccattgaattttgattctagcaagcagagcttttgtcagttttctattgaccttctcggtggaggaatcttagtggacaaaactggagattggatcacacttatacaaaattctccaattagtaacttgttgagagttgctgcttggaagaaggctgtttatggtcaagattgtgatgtctgggaatgcagcagtcaaaagaatgattgg

SEQ ID NO: 76475 - DNA, 277 bp, Glycine max
ctgtgaccttattttactaacttctcatatagtacacacctgggtggggaagaacatgggttcgatttctttctagaaactaccacttttaatgtggggtggtaacaaacacacgatgctgatcacggtggtttgaattaatttacactattacgagggacttcttgtttcttaaaagccagttcctaagctttaggagggttgaacaaaacacctcctttttccttaaataactttgaaccttgcgccccaaatttggttaactacaaaaaaaaca

SEQ ID NO: 76476 - DNA, 295 bp, Glycine max
cgcgcgcacgctaagctaagaattcgaatcgagcttgggctctctattactttaaaaccaaggcgaatgccccaccgctggggaaattaggagcgactcagggaactttttatttggatttgttcaggggggagataaatcagcttggtattgttatgtgcgttatgaatcatctgatgggggaagagggagaacaaattgtgagcaagcaaggacaaaagggtgttgattgcaatacaaggtgcttgtttaattggttacaagactgcaaccattgacgctgtgattgcataca

SEQ ID NO: 76477 - DNA, 355 bp, Glycine max
ataggttggggtagttttttgagatttatgaaaaatttttttttaaataaaaaaaaaaagaaagatttttaaatttgaaaaaaaacgtgccctctgcaagaagaataaaagatgaaaagaattttttttcaattctattataaaataaactgcattttttttaaaaaaaaaatgaaaacctttattaaaattaaaaaagaattgttaaaaataaaagggaaaaaaaaaaaaaacttttatataaaaaaaaaaaattaaacacaaccttccttgttgttcttctcctaaaaatttttaaaaatagagggccaatatttttttacaaccaaaaaaaaaaattttgtttggagtgttt

SEQ ID NO: 76478 - DNA, 382 bp, Glycine max
aaaaaaaaaaaaataaaaaaaaaaaaaaaaaaaaaaaaaaaaaggaaaaaaaaaaaaaaaaaaaaaaaaaaaaaaaaaaaaaaaaaaaaaaaaaaaaaaaaaaaaaaaaaaaaaaaaagaaaaaaaaaaaaaaaaaaaaaaaaaaaaaaaaaaaaaaaaaaaaaaaaaaaaaaaaaaggggggggcccccccttttgttgcttctccccccgggttttttttgggggccggttctttgggggggccctgctttcctttattggggggattttgaatcttggggacaaacggggatttagtgtcttctggggaaaaatattttgttgaaacaattcccccaacaataatcagcccgccattaatgggtatagacctgggggtc
